United States Patent Application Publication US 2004/0214272 A1 - sequence listing, part 38

SEQ ID NO: 158053 - DNA, 2646 bp, Zea mays
  Clone ID: MRT4577_75722C.1
atggtcgtcaccttctacagcaagatcaccatgcgtcccggatccgtgttctgcttcgggacaatctcatctgtagcggatgaagagggaattctacatcgtatcgcggatccgccggaaaagaagtctcctccaacgaactccgaaaatgtcggagaggcgcaacctccagctcttcggaaaaagatcttctccggaaagtcgggggccgagggctcgctgacccggaagactccgctgtctatttccccgacaaaagaatggacacggatcgcgaggaagaaggagaccagggaaaaacaagtcgttctttccgttcctctggcctcaaaagagaacggaaagaaagtcgccacgacagcagcaccgttctaccccgacgtcctcttcatcgggagagtggagtcacccaccgtctctgacgacgagccgaccgcgcccggagaagaaccgccacagcgagaatcccgccgacggaggaaccggcgcaggaacgttcgacgacatcacgcggccggagaacgggatccggagcagcctgtctcgcgagacgaggtttcggagataggagaaactctggaagaacgtgtcttcagagaacgaaggaactcccgacgacgtgatcgccggcgggctcaggaacaggccgagcaagacgcgaggcaacgccgggagaatccgctcttcgggcgcaacctgaatcccgacttcgcccgagctatgaacacgccaagcgaagtcggaggggtactagctcggatagctgatggacttcctcggactcccgacgccgagggataccgacgccttttcacccaggcagccaaccatcttctaccgcttgctcacccgccgaacgatctacgacacgccatcaacagtcgccgagacgcgcgaagttccatcaatgcttcgcgcgaacggcggcatgagaacgagattcgccgtcgggaggagtacgatcgggatcatggcatcccgactcagagccaggccaccaggactgagtcggcaacggcctcaactggcggtaccacccggggacggtcgaggaaccaccatcacaactcccctccccgggacagacatcgtccccgacgacaggaggacacgtgtggagtgtccgctcttactccgcgccttagggccatccaatggcctcccaacttcaagtggctacgacatctaccccgacacggcatcgacgactggggagacttcagtcgacgtttcaccaccaacttccagtccctctccgacaagccagcgcaaccgtgggacctcaaatccatcaagcgccgaggggatgagactctccggtcgtacctcaaaaggttccagaccatgagaaatcgcatccccgaggtcacggaggcggccgtgattgaggacttctacagaggatccaacgactcggcttttgtccgagccatactacagaaggcgccgactacttctgaggagctgttctgggaagccgacctctacatcaccgccgacgagcgagctcaggacctcatcggaggagtaaagcctgcgccggcagcaccacgacgcgacgcgaaccagccacccgacaaacgctgggagaagaggcctcgcgaagaagaggacctcgcggaggcgagcgcacgctggacgacatcctcgacgcccaatgcccataccacaaggacatgcgccacactcttcacaactgccgggacttcaagcactccgttgggcatggccgacccttccaacctctacctcctcctccgccgaggggaggaccggatgaaccgcgacaacctcatcagccagaggagggaggaggaggagctttcccacgcgtcgacggggaggtcaatgtcatcttcggcggacatgggtcgcaggagaacaaaagacaacaaaagctcaacgaccgccagatactggtggcgaccaccggtcctcccgtgcccataccggtggtcagaacacccgatcaccttcactcgggacgatcaatggctcaacttcgaccatccgggcaaatacccgctcctcgtcgatccggtgatccgagagagccgggtgaagaaggtgctagtggacggggggagcagcatcaacgtcaccttcccccggacgctccaaggcttgggggctcacctcaaagagctccacaagtcggacactcctttcttcggcatcgtgccgatggagggggaatacccgctaggccacatctacatgccagtcaccttcggaactccggagaactacagaaccgagttcctgaggttcgaaggggcaaacttcgactgcgggtacaacgccatcatcggaaggccgggattggccaaattcatggccattccgcactatacatacatgatactgaagatgccaggaccgcgagggatcataactgtgcgcgccgacttccaaggcgccgcagaatgtttccgagtggccatccaagcagccctcaccaccaagccgtcaacggtcccttctacactggcgaattctaagcctgaggaggacctcgccgtaccggcaaacgaagctcgggccgcgacctctatgtggccgactgaagaaaccaagcgaatcaacctggggttcgctgatgagcgcaagacagccatcatcagttccagcctggacgacaaatag

SEQ ID NO: 158054 - DNA, 2649 bp, Zea mays
  Clone ID: MRT4577_75723C.1
atggccgtcacctactatagcaagatcacccttcgtcccggatccatattctgcttcggaacaatctcatccgtagcagatgaagagggaactctacaccgcattgcggatccgccggaaaagaagtctcctccaacaaactccgaaaatgccggagaaacacaacctctagctctccggagaaagatcgtctccggaaagtcgggggccgagggcccactgacccggagaactccactgtctacttccccgacaagagaatggacacagatcgcgaggaagaaggaaaccaaggggaagcaagttgttctttccattcctccgccctcaaaggagaacagaaagaaggtcgccacgacagcagtaccattctatcccgacgtcctcttcatcgggagagcggagtcacccaccgtctccgacgacgagccgaccgcacccggagaagaaccgcctcaacgagaatcccgccgacggaggaaccggcgcaggaacgttcgacgacaccacgcggccggagaacgggatccgaagcaacctgtctcgcgagacgaggtctcggagataggagaaactccagaagaacgcgtcttcagagaacgaaggaactcccgacgacgtgatcgccgacgggctcaggaacaagccgagcaagacgcaaggcaacgccgggagaatccattcttcgggcgcaacctgaaccccgacttcgcccgagccatgaacacgccgagcgaagtcagaggagtactagctcggatagccgatggactccctcggactcccgacgccgagggctaccgacgactgttcacccaggcggccaaccatcttctaccgcttgctcacccgccgaacgatctacgacacgccatcaacagtcgccgagacgcgcgaagctccatcaatgcttcgcgtgaacggcggcatgagaacaagatctgccgccgggaggagtacgacagggatcatggcatcccagctcagagccaggccaccagaactgagtcggcaacggcctcaactggcgatccagggggttggctagccgtctacaccaccgctgctcgagctgccggggcgtccgaagacgtgatgaccgcgtacttacccattgtccttgggcaagacgcgctgcaatggctgcgacatctaccccgacactgcatcgacaactggggcgacttcagtcgacgcttcaccgccaatttccagtccctctccgacaaactggcgcaaccatgggacctcaaatccatcaagcgccggggggacgaaactctccggtcgtacctcaaaaggttccagaccatgagaaatcgtatccccgaggtcacggaggcggccgtgatcgaggacttctacagaggatccaatgactcggctttcgtccgagccatactacagaaggcgccgactacctccgaggagctgttccgggaagccgacctctacatcaccgctgacgagcgggcccaggacctcatcggaagggcaaagcccgcaccggcagcaccacgacgcgacgcgaaccagcaacccgacaaacgatgggagaagaggcctcgcgaagaagtacacgccgccggaccacctgcctctcgcgcccgaggaggacctcatggaggcgagcgcacgctggacgacattctcgacgcccagtgcccgtaccacaaagacatgtgccacactcttcgtaactgccgggacttcaagcactccgtcgggcacggccgacccttccaacctctacctcctcctccgccgaggggaggaccagatgaaccacgacaaccccatcagcaggaggagggaggaggaggagctttcccgcgcgttgacagggaggtcaacgtcattttcggtggacacgagtcgcaggagaacaaaaggcaacaaaagctcaacgaccgccagatactggtggcgaccaccggtcctcccgccccataccggtggtcggagcacccgatcaccttcactcgggaagatcaatggctcaacttcgaccatccaggcaaatacccgctcctcgtcgatccggtgatccgagagagccgggtgaagaaggtgctagtggacggggggagcagcatcaacgtcaccttcccccggacactccaaggcttgggagttcacctcaaagagctccacgagtcggacactcctttcttcggcatcatgccgacggaaggggaatacccgctgggccacatctacatgcctgtcaccttcggaactccggagaactacagaaccgagttcctgaggttcgaagtggcgaacttcgactacgggtacaacgccatcatcgggaggccgggattggccaaattcatggtcattccacattacacatacatgatactgaagatgccaggaccgcaaggaatcataactgtgtgcgccgacttccaaggcgccgcagagtgtttccgagtggccatccaagcagccctcaccaccaagtcgtcgacggtctcttcagcacaggcgaactctaagcctgaggaggacctcgcagtaccggcaaacgaagctcaggccacgacctctatgcggccgactgaagaaaccaagaggatcaacctggggttcgctgatgaacgcaagactgccgtcatcagctccagcttggacgacaaatag

SEQ ID NO: 158055 - DNA, 812 bp, Zea mays
  Clone ID: MRT4577_75724C.1
atcatcaaaccctcactcccacaatccggcgttacttcccctttctccctcttcccctccaccttccttcgctcctcaccgaacagaccgtcctcctcatggcaacagaacctctgcagtgcaaggtacctcccccaaacccagcactgtcactctcgctcgccgtgctgttactcgagtcttaccctccaggcctccttgatttcttggcgtgcagactctggtgctccgggtgtccatccactgcgagggatgcaagaagaaggtgaagaaagtgctgcagggcgtcgatggtgtgtcgtcggttctccaacattttcactctgctgtcttcacttgtccatctattttgcttgctcctgtgaaagggattttcctctcattccatagattcgcctttttctgaaggcgtgtacagatgcgacatcgacgcccggagcaacaaggtgacggtcgccgtcaccggcaacgtcagcgccgacgccctgctgaagaggctccgcaggtcgggcaagaacgcccagctgtggccggagcagcagcagcagcagcagcagcaactggccgtaggaacccagagacacggagaaaccaagaacgacgccatccagccagacaagcccggtggcactggcaccgcccacaagccggcgtccggcgacgaggggacaaacgccgcagacaagagcaactccaaggccaccccatgagaagatcccaacaaagtcgtccgcgagaccgcgaagccggctcaagacgacccggcgagcaccaatgcggacgccgacggcaacgacgctgtcagccatcgc

SEQ ID NO: 158056 - DNA, 653 bp, Zea mays
  Clone ID: MRT4577_75725C.1
cagagatcgctatggcgattatcacaggcacagggatcgcgattcggaacgtaatgaagactgggacaggggtagatcatctgggatacgcggcaggtcaagggaggctgaccactctaagcgcaggcggatgacacctcagtagtcgtagctgggtgagctactaatgtagaggcaaacgatgatccagagccgagtcttgcttgcacactggcatggttaacagctagcatcttcttgctgcctctggctgtggtggttctaatatcttgtgtctccggcaatgtgttgtagcaagaacgagagatgtaagtgaagcttaatctgatcccctgtttgttttacaactgtaaccctcttctttaattgtactgtttggtagtcatatgctgataacatcatgtaacagtatttttgtaccattacacttgtaacttgttatgtacacgaaattgtttgttttctccctcctgtgatcttttgtagctacaaggcattctgtaaggcaagaattgtaatatagagtccttgcctaataccatggaatgtacaattttgttgctatagctcaggtctcattgtaatcatcttagttttcattcaacgtgtatgtaggaacaatgaatttgtaaagatgacttgccgtacattgc

SEQ ID NO: 158057 - DNA, 2553 bp, Zea mays
  Clone ID: MRT4577_75726C.1
atggccgtcaccttcaacagcaagatcaccatgcgtcctggatccgtattctgctttgggacaatttcatccatagcagatgaagagggaactctacaccgtatcgcggacccactgaaaaagaagtctcctccaacaaaccccaaaaatgccggagaggcgcaacctccagctcttcggaaaaagatcgtcttcggaaagccgggggccgagagttcgctaacccggaagactccgctgtctacttccccgacaaaagaatggacacggatcgcaaggaagaaggagaccagagaaaagcaagtcgttctttccgttcctccggcctcaaaggagagcggaaagaaagtcgccacgacagcagcaccattctaccccgacgtcctcttcatcgggagagtggagtcgcccgccgtttccgacgacgaaccgaccgcacccggagaagaaccacctcaacgagagtcccgccgacggaggaatcggcgcaggaacgttcgacgacatcacgcggccggagaacgggatccggaacagcctgtctcgcgagatgaggtctcggagataggagaaactccggaagaacgcgtcttcagagaacaaaggaactcccggcgacgtgatcgccggcgggctcaggaacaagccgagcaagatgcaaggcaacgccgggagaatccgctcttcgggcgcaacctgaatcccaacttcgcccgagctatgaacacgccaagcgaagtcggagggagccaggccaccaggactgagtcggcaacggcctcaactggcggaaccacccggggacagtcgaggaaccacaatcacaactcccctccccgggacagacatcgtccccgacgacaggaggacacgtgcggagtgtccgctcttactccgcgccttagggccatccagtggcctcctaacttcaaggtatccaatgtcgacaagtatgaacctaagcaggatccatggggttggctagccgtctacaccaccgctgctcgggctgccggagcatctgaggacgttatgaccgcgtatctgcccatcgtccttgggcaagatgcgctacagtggctacgacatctaccccgacactgcatcgacgactggggagacttcagtcgacgcttcactgccaacttccagtccctctccgacaagccagcgcaaccgtgggacctcaaatccatcaagcgccggggggatgaaactctccggtcgtacctcaaaaggttccagaccatgagaaatcgcatccccgaggtcacggaggcgaccgtgattgaggacttctacagaggatccaacgactcggcttttgtccgagccatactacagaaggcgccgactacttccgaggagctgttccgggaagccgacctctacatcaccgccgacgagcgagctcaggacctcatcggaggagcaaagcctgtaccggcagcaccacgacgcgacgcgaaccagccacccgacaagcgctgggagaagaggcctcgcgaagaagtacacgccgccggaccgcctgcctctcgcgcccgaggaggacctcgcggaggcgagcgcacgctggacgacatcctcgacgcccagtgcccataccacaaggacatgcgccacactcttcgcaactgccgggacttcaagcactccgttgggcatggccgacccttccaacctctacctcctcctccgccgagaggaggaccggatgaaccgcgacaacctcatcagccggaggagggaggaggaggagctttcccacgcgtcgacagggaggagaacaagagacaacaaaaactcaacgaccgccagatactggtggcgaccaccggtcctcccaccccataccggtggtcagaacacccaatcactttcactcgagaggatcaatggctcaacttcgaccatccgggcaaatacccgctcctcgtcgatccggtgatccgagagagccgggtaaagaaggtgctagtggacggggggagcagcatcaacgtcaccttcccccgaacactccaaggcttgggagttcacctcaaagagctccacgaatcggacactcctttcttcggcatcgtgccgacggaaggagaatatccgctgggccacatctacatgccagtcaccttcggaactccggagaactacagaaccgagttcctgaggttcgaagtggcgaacttcgactgcgggtacaacgccatcatcgggaggccggggctggccaaattcatggccatcccccactacacatacatggtactgaagatgccaggaccacaaggaatcataattgtgcgcgccgacttccaaggcgccgcagaatgtttccgagtggccatccaagcagcccttaacaccaagccctcgacggtttcctcgataccggcgaactctaagcctggagaaagcctcgtagtaccggcaaatgaagcccaggccgcgacatctatgcggccgactgaagatactaagagaatcaacctggggttcgctgatgagcgcaagacggccatcatcagctccagcttgagcgacaaatag

SEQ ID NO: 158058 - DNA, 261 bp, Zea mays
  Clone ID: MRT4577_75727C.1
ccacagtgtggatcgcacaggggaatgtggcaggggccgctagagggcgctgcgacctctgtggggggccaggccaacaagagcctggatggtaggggcgcaaatcaacatcgtacgctcgaccatgcccattataccgactgtcaaaaattcttatgcagatcccgtcatcataaaggaaacttcaatgagcactggcgaagacatctaactcatggagattggcttcgcacactatgaggcgattgcccccatggtgat

SEQ ID NO: 158059 - DNA, 2376 bp, Zea mays
  Clone ID: MRT4577_75728C.1
atggccgtcaccatcaacagcaggatcaccttccgtcctggatccatgttctgctttggaacgatctcatccatagccgacgaaaagggaattctacaccgcgttgcagatccgccgggaaggaagcctcctccaacgaactccgaaaataccggggaagcattaccctcagctctccgaaagaagatcgccacgacagccacgccattctaccccgacgttctcttcatcggaagagtggagtcgcctcccgtctttgacgacgagccgaccgcgcctggggaggaaccacctcagcgggaatcccgtcgacgaagaaatcggcgccgaaacatccggagacatcaccaagccggagaacgggatccggagcagcctgtctcgcgagacgaggtctcggagatgggagaaactccggaagaacgcgtcttcagggaacgaaggaactcccgacgacgtgatcgtcgacgagctcaggaacaagccgagcaagacgcgaggcagcgccgagaaaatccactattcggccataacctgaaccccgacttcgcccgagccatgaacacgccgagtgaagtcggaggagtgctagctcggatagctgacggactccctcggactccagacgccgagggctatcgacgcctgctcacccaggcagccaaccatcttctacctctcgctcacccgccgaacgacttgcggcacgccatcaacagtcgccgggacgcgcggagttctatcaacgcttcgcgcgaacgacggcatgagaacgagatacaccgccgggaggaatacgacagggatcatggcatccccactcggagtcaagataccagagccgaatcaacgacggcctcgactggcgaaactgcccggggacggtcgaggaaccacaacaactactcccctccccgggacagacatcatccccgacgacaggaggacacatgtggagtgtctgcccttactccacgccatagggccattcaatggccccctaacttcaaggtatccaatgtcgataaatatgaacctaagcaggacccaggaggctggctggctgtctacactaccgccgctcgagccgccggagcgtccgaagacgtgatgaccgcgtacttacccattgtccttgggcaagacgcgttgcaatggctgcgacatctaccccgacactgcatcgacgactggggcaacttcagtcgacgtttcaccgccaatttccagtccctctccgacaaaccggcacaaccatgggacctcaaatccatcaagcgccgaggggatgaaactctccggtcgtacctcaaacggttccagaccatgagaaaccgtatccctgaggtcacggaggcggccgtgatcgaggacttctacagaggatccaatgactcggccttcgtccgagccatactacagaaggcgccaactacctccgaggagctgttccgggaagccgacctctacatcaccgccgatgagcgagcccaggacctcatcggaggagcgaagcccgcactggcagcgccacgatgcgacacgaaccagcaacctgacaaatgctgggagaagagaccgcgcgaagaggtgcacgccgccggaccacctgcctctcgcgcccggggaggacctcgcggaggcgagcgcacactagacggcatcctcgacgcccagtgcccgtaccacaaggacatgcgccacactcttcggaactgccgggacttcaagcattccgttgggcacggccgacccttccaacctctaccccctcctccgccgcggggaggaccagaagaaccacgacaaccccagcagcaggaggagggaggaggaggagcctttccgcgcgttgacagggaggtcaacgtcatcttcggcggacatggattgcaggagaacaaaagacagcaaaagctcaacgatcgccagatactggtggcaaccaccggtccacccgctccgtaccgatggtcggagcacccgatcaccttcactcgggcggatcaatggctcaacttcgaccatccgggcaaatacccgctcctcgtcgacccggtgatccgagagagcagggtgaagaaggtgttagtggacagggggagcagcatcaacgtcaccttcccccggacactccgaggcttgggagttcacctcaaagaactccacgagtcagacactcccttctttggcatcgtgccaactgagggagaatacccgctgggccacatctacatgcccgtcaccttcgggactccggaaaactacagaaccgagttcctgaggttcgaagtggcgaacttcgactgcgggtacaacgccatcatcgggaggccgggactggcaaaattcatggccattccgcattatacatga

SEQ ID NO: 158060 - DNA, 2478 bp, Zea mays
  Clone ID: MRT4577_75729C.1
atggccgtcaccttccaccgcaagatcaccctccgtcccggatccgtgttctgctttggaacgatctcatccatagcagatgaagagggaactctacaccgcatcgccgatccgccaaagaagaagtccactccaacacgctccgagaatatcggggtgaggaaggaaaaagcgcaacctccagcgctccgaaaaaagatcgccttcgacaagccaggggtcgagagcccgctgacccggagaactccactgtctacttcctcgacgaaagaatggacgcaaatcacaagaaagaaggaggcaaacaagaccgggaggaagcaagttgctctttccgttcctccgccctcaaaggagaacggaaagaagatcgccacgatagccacaccattctaccccgatgttcttttcatcgggagagtggagtcgccccccgtctccgacgacgagacgaccgcgcccggagaagaaccacctcagcggaaccggcttcgaaatattcggcgacatcacgaggccggagaacgggatccggagcaacctgtttcgcgggacaagactcccgacgccgagggctatcgacgactgttcacccaggcagccaaccatcttctaccgctcgctcacccgccgaacgatctacgacacgccatcaacagtcgttgggacgcacgaagctccatcaacgcttcgcgtgaacgacggcatgagaacgagatccgccaccgggaggagtacgacagggatcatggcatcccagctcggagtcaggcaaccagaaccgagtcagcaacgacctcgactggcgtggcccctaacttcaaggtatccaatgtcgacaaatatgaacctaagcaggatccaggaggctggctggccgtctacaccactgccgcccgagccgccggagcatccgaggacgtgatgactgcgtacttacccattgtcctcgggcaagacgcactgcaatggctgcgacatctacctcgacactgcatcgacgactggagcgacttcagtcgacgcttcaccgccaactttcagtccctctccgacaaaccagcgcaaccatgggacctcaaatccatcaagcgccggggggacgaaactctccggtcgtacctcaaaaggttccagaccatgagaaatcgtatccccaaggtcacggaggcggccgtgatcgaggacttctacagaggatccaatgactcggccttcgtccgagccatactgcagaaagcgccgactacctccgagcagctgttccgagaagccaacccatacatcaccgccgacgagcgagctcaggacctcatcgggggagcgaagcccacaccgacagcgccacgacgcgacacgaaccagcaacccgacaaacgctgggagaaaagacctcgcgaagaggtgcacgccgccggaccacctgcctctcgcgcccggggaggacctcgtggaggcgagcgcacgctggacgacatcctcgacgcccagtgcccgtaccacaaggacatgcgacacaccctatggaactgcagggacttcaagcactccatcggacacggccgacccttccaacctctacctcctcctccgccgcggggaggaccagaagaaccacgacaaccccagcagcaggaggagggggaaggaggagccttcccacgcgttgacagggaggtcaacgtcatcttcgacggacacggatcgcaggagaacagaagacaacaaaagctcaatgatcaccagatattggtggcgaccaccggtcctcccgctccgtaccggtggtcggagcacccgatcaccttcactcgggcagatcaatggctcaacttcgaccacccaggcaaatacccgctccttgttgatccggtgatccgagagagcagggtgaagaaggtgttagtggacgaggggagcagcatcaacgtcaccttcccccggacactccaaggcttgggagttcacctcaaagagctccgtgagtcagacacgcctttcttcggcatcgtaccaactgaaggggaatacccgctgggccatatctacatgcccgtcacctttggaactccggagaactacagaaccaagttcctaaggttcgaggtggcaaatttcgactgcgggtacaacgccatcatcgggaggccgggattggcaaaattcatggacatcccgcattacacgtacatgatattgaagatgccaggaccacaaggaatcataactgtgcgcgctgacttccaaggcgccgcagaatgtttccgagtggccatccaagcggccctcaccatcaaactgtcggcgacttcttcagcacaggtgaactctaagcctgaggaagaccttacagcaccggcgaacgaagctcaagccgcgacctctatgcggccgactgaagaaactaaaaggatcaacctggggtttgctgatgaacgcaagactgctatcatcagctccagcctggacgataaatag

SEQ ID NO: 158061 - DNA, 373 bp, Zea mays
  Clone ID: MRT4577_7572C.1
gctcaatcatttcctttatatttttctatcgccagcgcctgccaaggcgcggattggcaggagcggggatcgcactattattgtttggctccccactatgtcttttccaatcaagcgccaggcgatggacctcatgaagcttatgatgagctacttcatggtgagtatggtgtacgaccggatgcatgtatcttttgcagaaattcgagtgcctaacgaagacttttatcaaggaacgcttatccgaaggcataagtctaatagcagacacatattcttactaatccacatcgattcgctacatcagtacgatatattacccgaatatcactgaaaagattgtatgagactgtctggatgttattaaccagac

SEQ ID NO: 158062 - DNA, 2520 bp, Zea mays
  Clone ID: MRT4577_75730C.1
atggtcgtcaccttccacagcaagatcaccatgcgtcccggatccatattctgcttcgggacaatctcatccgtggcggacgaagaaggaatcctacaccgcctcgcggatctgccggaacggaagtctcctccaacaaactccgaaaatgctggaaagacgatacctccggctcttcggaaaaagatcgtttccggggaggctggagcgagaagctcgctgacccggaagactccgctgtctacttccccgacgaaagaatggacacgggtcgtgagaaagaaggagatcagggggaggccagtcgttcttcccgttcctccgacctcaaaggagaacggaaagaaagtcgtcgcggcagcaataccgttctaccccgacgtcctcttcatcgggagagcagagtcgcccgccgtctccgacgatgaaccgaccgcgcctggagaagaaccgcctcagcgagaatcccgccgacgaaggaatcgacgcaggaacgttcgacgacatcacgcagctggagaacgggatccggagcagcctgtctcacgagacgaggtctcagagataggagaaactccggaagaacgcgtcttcagggaacgaaggaactcccgacgacgagatcgccgtcggactcaggagcaagccgagcaagatgcaaggcaacgacgcgagaatccgctcttcgggcgcaacctgaaccccgacttcgcccgagctatgaatacgccgagcgaagtcggaggcgttctagcccggatagctgacggacttcctcggacccccgacgccgagggataccgacgcctgttcactcaggcagccaaccatcttctaccgcttgctcacccgccgaacgatctgcgacacgccatcaacagtcgccgagacgcgcgaagctctatcaatgcttcgcgcgaacggcggcacgagaacgaaattcgccatcgggaggagtatgatcgagatcatggcttcccgactcaaagccaggccacccgaactgagtcgacaacagcttcaactggtggaaccacccggggacggtcgaggaaccaccaccgccactcccctccccgggacagacgacatcctcgacgacaggaggacacgtgcggagtatctgcccttactccgcgccttagggccatccaatggcctcccaacttcaaggtatccaatgtcgacaaatatgaacctaagcaggatccagggggctggttggccgtctacaccaccgctgctcgggctgccggggcatccgaggacgtcatgactgcgtatctgcccatcgtcctcgggcaagacgcgctgcagtggctacgacatctaccccgacactgcatcgacgactggggagacttcagtcgacgtttcaccgccaacttccagtctctctccgacaagccagcgcaaccatgggacctcaaatccatcaagcgccggggggatgagactctccggtcataccttaaaaggttccaaaccatgagaaaccgcatccctgaggtcacggaggcggccgtgatcgaggacttctacagaggatctaacgactcggctttcgtccgagccatactgcaaaaggcgccgactacctccgaggagctgttccgggaagccgacctctacatcaccgctgacgagcgggcccaggacctcatcggaggagcaaagcccgcaccggcggcaccacgacgcggcgcgaaccagccgcccgacaagcgctgggagaagaggcctcgcgaagaggagaacaagagacaacaaaagctcaacgaccgccagatactggtggcgaccaccggccctcccgccccgtaccggtggtcggagcacccaatcacgttcactcgggaggatcaatggctcaacttcgaccacccgggcaaatacccgctcctcgtcgatccggtgatccgagagagccgggtgaagaaggtgctagtggacggggggagcagcatcaacgtcaccttcccccgtacgcttcaaggcttgggagttcacctcaaagagctccacgagttagacactcctttcttcggcatcgtgccgacggaaggggaatacccgctgggccacatctacatgccggtcaccttcgggactccggataattacagaaccgagttcctgaggttcgaggtggcgaacttcgactgcgggtacaacgccatcatcgggaggccagggctggccaagttcatggccatcccacactatacgtacatgatattgaagatgccaggaccacaaggaatcataactgtgcgcgccgacttccaaggcgccgcagaatgtttccgagtggccatccaagcagccctcaccaccaaaccgtcaacggttccttctacaccggcgaactctaagcctgaagaagacctcgccgtaccggcaaacgaagctcaggccgcgacctctatgcggccgactgaggacaccaagcggatcaacctggggttcgctgatgagcgcaagacggccatcatcagctccagtttgagcgacaaatag

SEQ ID NO: 158063 - DNA, 445 bp, Zea mays
  unsure (1)..(445): unsure at all n locations
  Clone ID: MRT4577_75731C.1
cgggccggggaacaccgaccggcggcgctccanacctgagcggaacgaactagagaggggggaggacccgcccgataccatgaggccgttcgtccttgtgcctcgcgtgctcactggactcgtctgtgcgcaccgccaactgcacgcatacaggcggcacctgcggctgccagccaccggcggcgcgtgatttaccgccgccggcgcatttgccacctgcggaacacctgccacctacgaggcatgtgccaccgccggttcacctgccaccgtcgggccacctgtacaccggcgcgccatgctacctcgcacgcgatcatactgccttcgtcaccatgccgctaccctactgaagctgcccgagcacaggatcatgcgcaggcacaccgacgcgcacgccaacagtcagatgcaagcccgtgccacgtggccggaacctgcggcg

SEQ ID NO: 158064 - DNA, 2643 bp, Zea mays
  Clone ID: MRT4577_75732C.1
atggccgtcaccttccacagcaagatcaccatgcgtcccggatccatattctgcttcgggacaatctcatccgtggcggacgaagaaggaatcctacaccgcctcgcggatctgccgaaacagaagtctcctccaacaaactccgaaaatgctggaaaaacgctacctccggctcttcggaacaagatcgtctccggggaggctggagctagaagctcgccgacccggaagactccgctgtctacttccccgacgaaagaatggacacaggtcatgagaaggaaggagatcagggagaggccagtcgttcttcccgttcctccgacctcaaaggagaatggaaagaaagtcgccgcggcagcaataccgttctaccccgacgtcctcttcatcgggagggcagagtcgcccgccgtctccgacgatgaaccgaccgcgcccggagaagaaccgcctcagcgagaatcccgccgacgaaggaaccgacacagaaacgttcgacgacatcacgcagctggagaacgggatccggagcagcctgtctcgcgagacgaggtcggaggcgttctagcccggatagctgacggacttcctcggacccccgacgccgagggataccggcgcctgttcactcaggcagccaaccatcttctaccgctcgctcacccgccgaacgatctgcgacacgccatcaacagtcgccgagacgcgcggagctctatcaatgcttcgcgcgaacggcggcacgagaacgaaattcgccgtcgggaggagtatgaccgagatcatggcttcccgactcaaagccaggccacccgaactgagtcggcaacagcttcaactggtggaaccacccggggacggtcgaggaaccaccaccgccactcccctccccgggacagacgacatcctcgacgacaggaggacacgtgcggagtatctgcccttactccgcgccttagggccatccaatggcctcccaacttcaaggtatccaatgtcgacaaatatgaacctaagcaggatccagggggctggttggccgtctacaccaccgctgctcgggctgccggggcatccgaggacgtcatgactgcgtatctgcccatcgtcctcgggcaagacgcgctgcagtggctacgacatctaccccgacactgcatcgacgactggggagacttcagtcgacgtttcaccgccaacttccagtctctcttcgacaagccagcgcaaccatgggacctcaaatccatcaagcgccggggggatgagactctccggtcataccttaaaaggttccagaccatgagaaaccgcatccccgaggtcacggaggcggccgtgatcgaggacttctacagaggatctaacgactcggctttcgtccgagccatactgcaaaaggcgccgactacctccgaggagctgttccgggaagccgacctctacatcaccgctgacgagcgggcccaggacctcatcggaggagcaaagtctgcaccggcggcaccacgacgcgacgcgaaccagccgcccgacaagcgctgggagaagaggcctcgcgaagaggtacacgccgccggaccacccgcctctcgcgcccgaggaggacctcatggaggcgaacgcacgctggacgacatcctcgacgcccagtgtccgtaccacaaggacatgcgacacactctccgcaactgccgggatttcaagcactccgtcgggcatggccgaccctttcaacctctaccacctcctccgccgaggggaggaccagatgaaccacgacagccccatcagccggaggaggggggaggaggagctttcccgcgcgttgacagggaggtaaacgtcatcttcggcggacatgggtcgcaggagaacaagagacaacaaaagctcaacgaccgccagatactggtggcgaccaccggccctcccgccccgtaccggtggtcggagcacccaatcacgttcactcgggaggatcaatggctcaacttcgaccacccgggcaaatacccgctcctcgtcgatccggtgatccgagagagccgggtgaagaaggtgctagtggacggggggagcagcatcaacgtcaccttcccccgtacgcttcaaggcttgggagttcacctcaaagagctccgcgagtcagacactcctttcttcggcatcgtgccgacggaaggggaatacccgctgggccacatctacatgccggtcaccttcgggactccggataactacagaactgagttcctgaggttcgaggtggcgaacttcgactgcgggtacaacgccatcatcgggaggccggggctggccaaattcatggccatcccacactatacgtacatgatactgaagatgccagggccgcaaggaatcataactgtacgcgccgacctccaaggcgccgcagaatgtttccgagtggccatccaagcagccctcaccaccaagccgtcagcggttccttctacaccggcgaactctaagcctgaagaagacctcgctgtgccgacaaacgaagctcaggccgcgacctctatgcggccgactgaggacaccaagcggatcaacttgggatttgctgatgagcgcaaggcggccatcatcagctccagtttaaatgacaaatag

SEQ ID NO: 158065 - DNA, 636 bp, Zea mays
  Clone ID: MRT4577_75733C.1
agtatcctcaaggatttacaggaattgatttaggacgctgccgatcgtagcaagagggacctgatggaggcatatgttcactggtaggctccatcatgcgccctcctgatacgcgatatgttggaggagttgttcatgtcgaacattcattttacgtcagactacaccttataggctactacggcatcttttaagagaaaggtcttccatcacaaacgtcatgacgaatgagaatcttatgccttcgacattcttaacgagtggagcgagccctgactttgacaatcgtctaaggatattgctttctatccgatcgctgcttactgatccaaacccatacaagcctcttggccactgagagtgctcacatgtactagacaaataggtctaactagcaaagcgacagcactgatctggtgccagaagaaccccatgagatgaaatgttccatcgttactgactagatgccgactgattgcgaagtctgccatgatactgtgtatcgactacactcatgatcgtctgttccatgcggattcaccgatccatcgatatgatccgaggacaataccaagattaacctaccattgctatcgggtacatagatatgacttacgctagctgtgacaactatgc

SEQ ID NO: 158066 - DNA, 384 bp, Zea mays
  Clone ID: MRT4577_75734C.1
atcttcctggctgctgctgctgctactgctacctgtctgtttggtgttctaaaagactctgatgagtggttctgaatgtctgcatttcaaaaaaaaaaaaaaaaaaaaaaaaaaaaagggcaaccggtctacaggactcaagcttacatactcacgcacgcgaccatgcaactccataatagtgccacctagacacatataactaaccgactgtccacaacgttacaactgggaaaaccctaaaaccacgcaactacaaaacttaacagcacatccccacatccccatctggccagctagcgaataggcccagaccgatcgccctatcgaacattcgaacaggtctgcatggctaaatggacaacgccacgtagccctgcatta

SEQ ID NO: 158067 - DNA, 788 bp, Zea mays
  unsure (1)..(788): unsure at all n locations
  Clone ID: MRT4577_75735C.1
ataacttttcgccgcacttgaggctgccgattcggccgccacaaacctgagacccgccacacttctccagagtgccagcgccggccctagcacctccaccgcaactccgacgcttggaccaccggatctgctgctggccgtcgactgccatcagaagggacttgttgcaagctgagggcaccaggaaacccttgtttgctactgctcaagatgggttcaaagaagatgtatcttgagtattgcaataactataatcattacctacgaaggagaagggtgcttgttttcactaccatccgcattgttttattgtggtataagttgcaactgaatagattgaataagaagcacaccaaatacggttctttgttacaaagagatttggaaagggaaaggcggctggaccgtttgtaccatgggaccgaagccaactgcattagtgagttgcgtatgcgcaaatttgtttttcacaggttatgtggtcatttaaggacccatggggcttttagtggactctatcaatgtctcaattgaagaacaggtagccatgtttatgaaatttgttggccatagatggacaaataagatctgggttggttttgaattcttgcgatctggagagacagttagtaggtactttaatgctgttttagatgctttatgtgtcctatcacgtgacctcattaccatgagaaccacggagacacatccaaagatatctnaatagctccgggaaggtttcatccatactttgagaaatgtattggagcactagatggcacacatat

SEQ ID NO: 158068 - DNA, 274 bp, Zea mays
  Clone ID: MRT4577_75736C.1
tcctggccgagcccccttgtctcaggccaggggggttctactagcaaccaccaggtccgtaggatggcaccgacttttatggagcgagcactcgagcaggctatgcttgggctggataacctcgaggtccctgttgggagtgtgcttgtggaggacggcaaggtgcttccctctgggagctacaagacgtgtgccactggtaatgctacaagacatgctcagagggaagccattggcttccaagtccaggagaagctgggcttggctcttagtc

SEQ ID NO: 158069 - DNA, 618 bp, Zea mays
  Clone ID: MRT4577_75737C.1
ataacttttcaccgcacttgaggctgccgattcggccgccacaaacctgagacccgccacacttctccagagtgccagcgccggccctagcacctccaccgcaactccgacgcttggaccaccggatctgctgctggccgtcgactgccatcagaagggacttgttgcaagctgagggcaccaggaaacccttgtttgctactgctcaaggtagcacaagcagtcagattgcatttttctagactggttcaaacaattcataaatccattagtctgtcgagtgtacattttaattaccttgcattttttagatgggttcaaagaagatgtatcttgagtattgcaataactataatcattacctacgaaggagaagggtgcttgttttcactaccatccgcattgttttattgtggtataagttgcaactgaatagattgaataagaagcacaccaaatacggttctttgttacaaagagatttggaaagggaaaggcggctggaccgtttgtaccatgggaccgaagccaactgcattagtgagttgcgtatgcgcaaatttgtttttcacaggttatgtggtcatttaaggacccatgggcttttagtggactcta

SEQ ID NO: 158070 - DNA, 459 bp, Zea mays
  Clone ID: MRT4577_75738C.1
agatctggaattcgcggccgcgtcgacgcagccgaaagcggcacggcgcaagcaatcttggtgggggtgggcacggccgggagcgacgcggcgcaggcgagctcgacgcttgcgggcgcgtcgcgggcgagctcgtcgagggcgggcgcggacgagcacttcgtggccagatctccgacaagcactgcgcgggctgatctcggcgagtgtgactagactgggtcttcggcgagaggcacgagcggggctccgtcgtgctgcgcgaccatcctcctccggcgtgctgcgcaaccacgacctctggtcaactacggctgccctgattgttgagctcggtgtgtgatgctctagttaattgaggtatgcagcaagcttcaacacaagttaattgatgttggggctaatttactaactagaataattttgttgtcaactaggatgaattcgaatacttctttt

SEQ ID NO: 158071 - DNA, 243 bp, Zea mays
  Clone ID: MRT4577_75739C.1
taggtagggctgaggacccgcgattaatatgagcaaaggcttagacaaaggagttaagcgcgagaacgttctcgctgccctacgtagtttttttctgctcaaagtcttgggaaggatttgacgggttcctgcacatgatgcactgaccgggtcacaaggtggacggccggatgagcgatgatcaaaggaggggaaagctcagcagatgatggcctacacgctgcccgtcccggacgcgtgggg

SEQ ID NO: 158072 - DNA, 381 bp, Zea mays
  unsure (1)..(381): unsure at all n locations
  Clone ID: MRT4577_7573C.1
catgagctagatctacagcagagcgcagaagtaccggagcgacaccatgagggcgctggtgggcgacgtgcgctcttctggctttggctgagagcaccaccttcacgcatacaagcggcgaatgcgggtgacagccaccaccgtggggtcatctaccgccgacggcgcatatgacacctccggttcacctgccaccttcggagcatataggaccgccgggacacctgtcgccgacggttcacctgccaccaccggtacatgtgccggcgccggatcatctgacgacgccacgatgccactacgctactgaaccgcgccggccgcacactnatccgcagccacacccatgcccgtgccaacagccgcattcaagcccgtgcc

SEQ ID NO: 158073 - DNA, 264 bp, Zea mays
  Clone ID: MRT4577_75740C.1
attcttgtgctaccaagcttttcaacgccaccgacttgctgcagtactgattcagcgagttgtcagaggatggctggctagaaagagactgttaggttcctcttcactgcgaacctacacaagactttgtgtagtcgaccaaagtcaaaagagaaaatgttatcaaagccttgagttgaacattgtgctagactctgtcataaggctacaaagatgctggaggaagttcctgctgcgtcagtctgtcaaaacatatgtgatctc

SEQ ID NO: 158074 - DNA, 583 bp, Zea mays
  Clone ID: MRT4577_75741C.1
tctccacggcacgctctacgacctcctgcaccgagagcagaacggtagcttgtcgccgttgtcctgggaggagcgcctgaggatatccaccgagatcgcgggtgcgctcacgtacctgcactccgcggcttccgtgtcgatcctacacagagacgtcaagtgcatgagcgtgctcctgacggacagctacaccgcaaaggtttcagacttcggcgcttcgaggctgatcccgatcgatcagacgcacctagtcactgccgttcagggcacgtttgggtacctagatccggagtattaccacaccggtcagctcaacgaaaagagcgatgtttatagttttggagtgatactcgttgagctgctgacgaggaggaagcccatcattcagaatgagcatggcgagaagcagaacctgtccaactacttcttgtgggctatgagggagaggcccctcgaggagacagtggaccctcagatccttgaggaagcgaatgaggaaggcgttctgtgcatggctcagttggcggaggagtgcctatgtctgacacgagtgcagaggcctaccatgaaggatgtggagatg

SEQ ID NO: 158075 - DNA, 1441 bp, Zea mays
  unsure (1)..(1441): unsure at all n locations
  Clone ID: MRT4577_75742C.1
gcttatgtgccgcgcacctatctggcaagcgacgccgcggcctcgatcggagtcggaggcgaacacccccatggcggcggctggcggcggcnnccccctccttgcctcgagcggacggtggtgctgacgcgcacgcaccacccatcactgcagtactgcaaatgaagtgcaaaatggccagcagtagtagagtagtagcagccgccgccgtccttgtagccttttgcgccgccgccctctcgtcggccacggtgaccgtgaacgagcccatcgtcaacggcctctcctggagcttctacgacgcgtcctgcccgtccgtcgagggcatcgtgcgctggcacgtcgccgacgccctccgccgcgacatcggcatcgccgccggcctcatccgcatcttcttccacgactgcttcccgcagggctgcgacgcgtccgtcctcctgtctggttccaacagcgagcagaagcagggacccaaccagacgctccgtcccgaggcgctcaagctcatcgacgacatccgcgccgccgtccacgccgcctgcggccccaaggtgtcctgcgccgacatcaccacgctcgccacccgggacgccgtcgtcgcgtccgggggtcccttcttcgaggtgcctctcggccgccgcgacgggctatcgccggcgtccagcgaccaggtcttcacgctgccgggccccgacttcgacgtgcccacgctgctcgccgcgttcaagaaccggagcctggacacggcggacctcgtggcgctctccggggcgcacaccgtgggtcgtggccactgctcctccttcaccagccgcctcccgcccaacgccgacgacggcaccatggacccggcgttccgccggacgctcgcggccaagtgcgccaaggacgccagcgcggcgcaggtgctggacgtgcgcacccccaacgccttcgacaacaagtactacttcgacctcatcgccaagcaggggctcttcaagtcggaccagggcctcatcaacgaccagaccaccaaacgcgccgccacgcgcttcgcgctcaaccaggccgccttcttcgaccagttcgccaggtccatggtcaagatgagccagatggacgtgctcacgggcaacgccggagaggtccgcctcaactgcgcagtgcgcaacgccgcccgcgtcgtctcagcagaccagctcgagaccgccgccggcgacgaggggctcgcggccgacgcgtgattagaattttgttttacaataaatgggtggcgagcgcgagttgcgagtagaacgagagccaagagctgactgttgtggtgtgtggctcatggaagcctgtcttttgctgttgcttctccagttctccttgtcctatctgtacggcgcgtgcactactctctccttatattttttttcttcatttctcgtgaaaaaggcacttcatttaccac

SEQ ID NO: 158076 - DNA, 294 bp, Zea mays
  Clone ID: MRT4577_75743C.1
cgtattaaatctgcacctctagcactcgactggggatctactaaacctgcaagcagacgtgaatccttcggatctggtactcgaataatgcagtgcattgggactcgatgttgtagcagcagttgaccacaagccgcgagcatctcacagtatgtttgatgtcaattcgtcagggtgggagctggcactgggcactgctccaagcactcaaattatccaggcagttgagacaagattggctggaggctttgacgagctgctaattaacaggatctacaaagactaggccagtag

SEQ ID NO: 158077 - DNA, 422 bp, Zea mays
  unsure (1)..(422): unsure at all n locations
  Clone ID: MRT4577_75744C.1
tatactgtacatgcatatagggctgcgacgcgtccgtcctcctgtctggttccaacagcgagcagaagcagggacccaaccagacgctccgtcccgaggcgctcaagctcatcgacgacatccgcgccggcgtccacgccgcctgcggacccaaggtgtcctgcgccgacatcaccacgctcgccacccgggacgccgtcgtcgcggtaagcacacgacgcccatgcatcgcggcagggacgtacacgtacatacgtcccacgtactataatataattaaccagctgacaacacaacaaaacaatgcatatgcagtccgggggtcccttcttcgaggtgcctctcggccgccgcgacgggctatcgccggcgtncagcgaccaggtcttcacgctgccgggccccgacttcgacgtgcccac

SEQ ID NO: 158078 - DNA, 697 bp, Zea mays
  Clone ID: MRT4577_75745C.1
aaatccaccgtggccgcacgggtcgccctcgccttccccttttcctctgctcccccgtgcgccctctccctcccctggttggtgtggtggctgctgcgcgcatcatcgtcagagcctccctccctcgcccaccaaccgcaccaccacaggagcgcgcgacgcagagatttgattcagggagaagagaatggcggcgccgtcgtccctcgcctcctcccacctctcccgcctcgccgctgccgcaccggccccgcagcaccaccaccagaaccaccagctccgcctcggctgctcccgccgccgcgcgcagcgcctcgtcgccatggccggatccggaaagttcttcgtcggaggcaactggaagtgcaatggaacaaaggaatccattagcaagcttgtctctgatttgaatgctgccacactcgaaagcgatgtagatgttgtggtagcaccgccattcatctatatcgaccaggtcaagagttcactaactggacgtattgaggtgtctgctcaaaacacatggattggaaaaggaggagctttcactggagagatcagtgcggagcagttggtggacattggctgccaatgggttattcttggtcactctgagcgcagacatgttatcggtgaagatgatgagtttattgggaagaaagctgcatatgcattggagccaaatcttaaggttatg

SEQ ID NO: 158079 - DNA, 1467 bp, Zea mays
  Clone ID: MRT4577_75746C.1
atgccgtcctcttcctcgtttgctgcaaatacaccgccggccggcgcatcgtccgaggacactttgagcaacatggcggtggaggagctacatcctggtgatacagtggagtttgtgatgaacaaggaccgtcaagacgctgcgcagaagcgccgggcggtcgtcaggctcgcagatcctatgtgtgagacgaagagggcgcaggggagcgcgaagactgctgctgcctccggcagtagcaagccggtgccggctgcgaaaccggttgtccccggacccagcaaggcgtcggcgagcgcgaagactgccgcctctggcggaaccaagcctcccccgggcgaacccgtgaaaggacgggagttgccttcgccggggaggcgtgttgccgacttcgacacgaacatcagtgtcgaggattattttgttgggtcgggtgaggggcaattggttgttgtcccgccttcggcggcaaccacgttgccaacagcggtggttggggcgaagggtgccgcgcaagacccgtgggccgccttctgcgtgagcgacgagattctgtcagctgccgccgccaaggacgtggcgggctccatgtcccatcggctgagggaggcgtcgcagcagctgtcgcagcagctgacgcagcaactgaagcaagcggccgacttcgccgaccgcgtggcgtcgggtgtcctgactgcggacgtggctgccaaagtcgagagtcttcgggcgcagcatgcggatgctgtccgggagaagtcggctgcggaaagcaaaaaccacaggctagcggagaaagtggccgccatggaggccgagaaggcggacctccggcgccagctggcggaggagaggagggaggcgaaccaggccatcgctaaagcgcaggctgcacgagcggaggccaaagtggcgcgggcggagagcagtctcgccagccaacgcaccgaggaggtggaggcaaggttcaacgcattgcgcagctgcgtggacaaggccgaggcctcgacgcgctcggaagtcgagcgaacgcatgcacagttagtggacgcgtaccgcgagctgggtgtgcggactgctgacttcgcagtacccgaccgggaagcaagccttcgcttcctcgaatggttgcaggaggagctgctggtgctcccgaccattgtggagggtttcatgtccttcgcctccctcgtcacctgcgaggggaccatgaatgcattgtcccgcgaggggtgcaggcactacgaggtcttcgaccaatcagacgagaactttgaacgtgaaatcttcaaggccgaagaccctgtggtgaagcagtcagcgggggctctcttcgataggatgtggggtccgcacggtctggaggcagtcagggagcgatccgaccgggcgatagagcagatggcgcgtgccgaggacgtcgaggaccttggaggtctggccggcgcgtcgcccgcggctgtggag

SEQ ID NO: 158080 - DNA, 435 bp, Zea mays
  Clone ID: MRT4577_75747C.1
atccgacaagaaacatttttgttaaaaagttcgaaaaaaagtttggaatgcaaacaaaaaaacatggtcacagaataaaaaacgacatgctcacaaaagcagttaaaaaaaatgggggggtttccatgggccaaaatcaggccaacgaaagctttccagggggaatatttttttttaccaatttttcccatgattcggtgggcttttgaatgacctttagggggttttccttgtttgggggcttgttgccaaaaccaaatttgttggcaggctttccatcaggtattttggaatctttgaaccaatctttgatgggagtcaaggtccccggaaaatgcttttaaaaattatccacgtggttaaaaaaaaatgctttcgggtcatccaaaaaaatggccacaatttttccaggaaagctctccctaataaataatt

SEQ ID NO: 158081 - DNA, 324 bp, Zea mays
  unsure (1)..(324): unsure at all n locations
  Clone ID: MRT4577_75748C.1
gcggccggccgggcgggcactgtctttgtctttgatactaccttggggacgggcgcaaagaaccttacgccagcaggagacgaaggtagaacacgggggaacaaacaggcctcaatgggcatgcacaagagcaaagggggatcctacgctgggctaatagcacaggggggggggaaaacgcttgnttgntaaaaaccaacctatggcgcagggctaagggggcacggggacaaaaacgaccaaagctcaaaaagacggagaggctagacagccgctaagatacctaaggccgctaccactacaaagggcgcaatgttcaggcac

SEQ ID NO: 158082 - DNA, 2805 bp, Zea mays
  Clone ID: MRT4577_75749C.1
atgtcgggagaactcgccaagaaggagatggagaccggcaacaagcccgctacaagccacgggaaggcttcatcgggagagtcccgcaacaaggagaagaagagggagaagaagaaggagaagaagacttcttctcacaagtcgcatcggagtggcgacaaaataaagaagatgaggaaggtggtctactacgagaccgacacttcatcaccttctaccttcggctccgacgcgccctccataacttctaagcgccatgagcgcaagaagtttagtaagatccccttacattatcctcatacctctagacatactccattactttccgttccattaggcaaaccgccaacctttgacggtgaagattatgctaggtggagtgatttaatgaaatttcatctaacctcactccacaaaagtatatggaatgttgttgagtttggagcacaggaaccatccgtaggggatgaggattatgatgaggacgaggtggcccaaatcgagcacttcaactcccaagccacaaccatactcctcgcctctctaagtagggaggagtacaacaaggtgcaaggactaaaaaacgccaaggaagtttgggacgtgctcaaaacggcgcacgagggtgatgaactcaccaagatcaccaagcgggaaacgatcgagggggagctcggtcgcttccgtcttcgccaaggggaggagccacaagatatgtacaaccggctcaagaccttggtgaatcaagtgcgcaacctcgggagcaaaaagtgggatgaccacgaggtggttaaggttattctaagatcacttattttccttaaccccactcaagtacaattaattcgtggcaacccaagatatacactaatgacccccgaggaagtaatcgagaattttgtgagctttgaatttatgatcaagggctcacgaaagatcaacgagcttgacggcccctccatgtccgaagcacaaccggtcgcattcaaggcgacggaggagaagaaggaggagtctacatcgagtagaacacccatcgacgcctccaagctcgacaacgaggaaatggtgctcgtcatcaagagcttccaccaaatcctcaaacaaaggagggggaaagattacaagccccgctccaagaaggtttgctacaaatgtggtaagcccggtcactttatagctaaatgtcctatttctagtgacagtgacaggggtgacgacaagaaggggagaagaaaggagaagaagagatactacaagaagaagggcggcgatacccatgtttgtcgcgagtgggactccgacgaaagctctagcgactcctcctccgacgaggacgccgccaacatcgccgtcaccaagggacttctctttcccaacgtcggccacaagtgcctcatggcaaaggacggcaaaaagaagaaggttaaatctaaatcctccactagatatgaatcctctagtgatgaaaatgctagtgatgaggaagataacttgcgcactctttttgccaacttaaacatgcaacaaaaggagaaattaaatgaactaataagtgccatccatgagaaggatgatctcttggactcccaagaggacttcctaatcaaggaaaacaaaaagcatgttaaagttaaaaatacttatgctctagaagttgaaaaatgtgaaaaattatctagtgagctaagcacttgccatgagactatagacaaccttagaaatgagaattctaatttgttagctaaggttgattctattgcttgtaatgtttcaattcccaatcttagaaatgataatgatgatttgcttgctaagattgaagaattgaacatatcttttgttagccttagaaaggaaaatgaaaaattaattgctaaggctaaagattttgatgtttgcaatgttacaatttccgatcttagagataagaatgatatattgcgtgctaagattgttgaacttaattcttgcaaaccctctacatctatcgtagaacataccactatttgtactacatgtagagatgttaacattgatgctatacatgatcacatggctttaattaaacaacaaaatgatcatatagctaaattagatgctaaaattgccgagcatgacttagagaacgaaaaatttaaatttgctagaagcatgctctatagagggagacgccccggcattaaggatggcattggcttccaacagggaggcaatgtcaaacttaatgcccctcctaagaaattgtctaattttgttaagggcaaggctcccatgcctcaggataacgagggttacattttgtaccctgtcggctatcccgaggacaaaattaggaaaattcattctaggaagtctcactctggccctaaccatgctttcatgtataagggtgagacatctagctctaggcaaccaacccgtgctaagttgcctaagaagaaaattcctaatgcatcaaatgaacatagtttttcattcaaaacttttgatgcatcttatgttttgactaacaaatctggcaaggtttatgcatccgggggctcaagttggattatcgacagcgggtgcacaaaccacatgataggggagaagaagatgttctcctcctatgagaaaaaccaagatccccaacgagctatcacattcggggatggaaatcaaggtttggtcaaaggattgggtaaaattgctatatctcctggtcactggatgttaccaaatacccttcccactaaacttatgcaacacaagaaatggaatagagagagaaaatattgcaaaatctggcaacacctcccttga

SEQ ID NO: 158083 - DNA, 270 bp, Zea mays
  Clone ID: MRT4577_7574C.1
ttcctcttttttttttttttttttttttttttgtgggtttttttttttttttttgccttttcaagcgaaacaccaccaagagggcaaatccccatagccccacaatgggatgagttcagctatccctacgacgatgacggtgaaacaccaaactgggggccaagaccataagcgggcataatgcggaaggagtaatgccctactacggagaaataaaggcctgtttatttaaagggggaaaaagactgttgagggtaaagcattggggag

SEQ ID NO: 158084 - DNA, 1812 bp, Zea mays
  Clone ID: MRT4577_75750C.1
atgtcgggagaattcgccaagaaggagatggagaccggcgacaagcccactacaagccacgggaaggcttcatcggaagagtcccgcaacaaggagaagaagagggagaagaagaaggagaagaagacttcttctcacaagtcgcatcggagtggcgataagataaagaagatgaggaaggtggtctactacgagaccgacacctcatcgccatctacctccggctccgacgcaccctccataacttctaagcgccatgagcgcaagaagtttagtaagatccccctacgctaccttcgcattactaaacatacacctttactttccgtcccattaggcaaaccaccaacttttgatggtgaagattatgctaggtggagtgatttaatgcgatttcatctaacctcactccacaaaagtatatgggatgttgttgagtttggtgcacagcacttcaactcccaagccacaacaatactcctcgcctctctaagtagggaggagtacaacaaggtggaaggattaaagggcgccaaggaagtttgggacgtgctcaagaccgcgcacgagggtgatgaactcaccaagatcaccaagcgagaaacgatcgagggggagctcggtcgcttccgtcttcgccaaggggaggagccacaagacatgtacaaccggctcaaaaccttggtaaaccaagtgcgcaacctcgggagcaaaaagtgggatgaccacgaggtggttaaggttattctaagatctcttattttccttaaccctactcaagtacaattaattcgtggtaatcctagatatacactaatgacttccgaggaagtaatcgggaattttgtgagctttgaatttatgatcaagggctcacggaagatcaacgagcttgacggtccttctacgtccgaggctcaacccgtcgcattcaaagcgacgaaagacaagaaggaggagtacacaccgagtagaacacccatcgacgcctccaagctcgacaacgaggaaatggcgctcgtcatcaaaagctttcgccaaatactcaagcaaaggagggggaaagattacaagccccgctccaagaaggtttgctacaagtgtggtaagcccggtcactttatagctaaatgtcctatttctagtgatagtgacaagggtgacgacaagaaggggagaagaaaggagaagaagaggtactacaagaagaagggcggcgatacccatgtttgtcgggagtgggactctgacgaaagctctagcgactcctccgacgacgaggacgccgccaacatcgccgtcaccaagggactcttcttccccaacgtcggccacaagtgcgtcatggcaaaggacggcaaaaagaagaaggttaaatctaaatcctccactagatatgagtcttctagtgatgaaaatgctagtgatgaggaagataacttacgcactctttttgccaacttaaacatgcaacaaaaagagaaattaaatgaattgattagtgccatccatgagaaggatgatctcttggactcccaagaggacttcctaatcaagaaaaacaaaaagcatgttaaagttaaaaatgcttatgctctagaagttgagaagtgtgaaaaattgtctagtgagctaagcacttgccatgagaccattgacaaccttagaaatgaaaatgttagtttaaatgctaaggttgtttctcatgtttgtgatgttttaattcccaatcctagaaataatgatgatgatttacttgctaggattaaagaattaaacacttctcttgctagccttaggagtgaaaaatga

SEQ ID NO: 158085 - DNA, 362 bp, Zea mays
  Clone ID: MRT4577_75751C.1
gagcatcaaaaccagcacatttatgtaccttctatcgcatacaaaccatttcgacaccatgagcgtcgtgggtctttgtcatgtgcctgctacctatccattttacacaatgttcacaatacaatatagctgtctttcttgcaccaacctctcaccattcatgtacctcactacgtgaaatcccacatcttcaaccatacaggatccaacaggcatttgcaaccggcatttcacctttatcacccttgttacttcaacaaccgtgatcattattacaacagctatcatctgtgcatttgatcatacaaataatctactcacaacaactacaacaacttttattacgaaacacagctatctac

SEQ ID NO: 158086 - DNA, 3646 bp, Zea mays
  Clone ID: MRT4577_75752C.1
tcaatcaccaaaatacttagaaatgacccaagggcacatttccctttcacttatgtaagcaatcgggccgaatagatccatgtgtaggagctccagtggcctgtcagtcgtcatgatgttcttgtgtggatgatggacaccaacttgctttcctgcttggcatgcgctacaaatcctatctttctcaaaatgaacatttgttaatcctaaaatgtgctctccctttagaagcttatgaagattcttcatcccaacatgtgctagtcggcggtgccagagccagcccatgttagtcttgatttccatccccgaatgtaatggctcgtggggatcttggtttttctcataggaggagaacatcttcttctcccctgtcatgtggtttgtgcacccgctgtcgataatccaacttgagcccccggatgcataaacccaaatggttttgggtcctttggcattagacacaagaactttgggtacccaaacacaagtctttgaccccttgtgcttgcccccaacatatttggcaactactttgctggatttgttagttaaaacatatggtgcatcaaaagttttgaatgaaaagctatgttcatttgatgcactaggagtttttcttttaggcaacttagcgcgggttggttgcttagagctagatgtctcacccttatacatgaaagcatgattagggccagagtgagacttcctagaatgaattctcctaattttgctctcgggataaccggcagggtacaaaatgtaaccctcgttatcctgaggcatgggagctttgcccttaacaaaattagacaatttcttaggaggggcattaagtttgacattgtcccccttttggaagccaatgccatccttaatgccagggtgtctcccactatagagcatgcttctagcaaatttaaatttttcattttctaagtcatgctcattgattttagcattaagttgagctatgtgatcattttgttgtttaattaaagccatgtgatcatgaatagcatcaatattaacatctctacatctagtgcaaatagaagtgtgctcaatggtagatgtagagggtttgcaagattttaattctacaaccttagcatgtaatatatcatttctacttctaaggtcggaaatagtggtattgcaaacatcgaaatctttagccttagcaagcaatttttcattttcatctctaaggctagcaagagaaatgttcaactcttcaatcttagcaagcaaatcatcattattatttctaagattgggaattgaaacattacaaatatttgaatcaaccttagctaataaattagaattcacatttctaaggttgtctatagtttcatggcaagtgcttagctcactagataatttttcacatttttcaacttctaaagcataagcatttttaactttaacatgctttttgttttccttgattaggaagtcctcttgggagtccaagagattatccttctcatggatggcgctaattaattcatttaatttctctttttgttgcatgtttaagttggcaaaaagagtacgtaaattgtcttcctcatcactagtattatcatcactagaggactcatatctagtggaggatttagatttaaccttcttctttttgtcgtcctttgccatgaggcacttgtggccgacgttggggaagagaaggcccttggtgacggcgatgttggcggcgtcctcgtcgaaggaggagtcgctagagctttcgtcggagtcccactcacgacaaacatgggcatcgccgctcttcttcttgcagtacctcttcttctcctttcttctccccttcttgtcgtcacccctgtcactgtcactagaaataggacattttgcaataaagtgaccgggcttaccacacttgtagcaaaccttcttggagcggggcttgtaatccttccccttcctttgcttgaggatttggcgaaagcttttgatgacaagcgccatctcctcgttgtcgagcttggaggcgtcgattggttgtctacttggtgtagactcctccttcttttcttccgtcgctttgaatgcgaccgattgagcttcggacgtggagggactgtcaagctcgttgatctttcgtgagcctttgatcataaattcaaagctcataaaattcccgattacttcctcgagagtcattagtgtatatctaggattaccacgaattaattgaacttgagtagggttaaggaaaataagagatcttagaataaccttaaccacctcgtggtcatcccactttttgctcccgaggttgcgtacttggttcaccaaggttttgagccggttgtacatgtcttgtggctcctccccttggcgaagacggaagcgaccgagctccccctcgatcgtttcccgcttggtgattttggtgagttcatcaccttcgtgcgccgtcttgagcatgtcccaaacctccttggcgctttttagtccttgcaccttgttgtactcctccctacttagagaggcgaggagtattgatgtggcttgggagttgaagtgctcaatttgggccacctcgtcctcatcataatcctcatcccctacggatggtacctgtgctccaaactcaacaacattccatatactcttgtggagtgaggttagatgaaatttcattaaatcactccacctagctaatcttaccgtcaaggttggcggtttgcctaatggaacggaaagtaatggagtatgtctagaggtgcaaggataatgtaaggggatcttactaaacttcttgcgctcatggcgcttagaagttatggagggtgcgtcggagccggaggtagaaggcgatgagttgtcggtctcgtagtagaccaccttcctcatcttctttatcttgtcgccactccgatgcgatttgtgggaggaagtcttcttctccttcttcttttccttcctcttctccttgttgcgggactctcccgatagggctttctcgttgcttgtagtgggcttttcgccggtctccatatccttcttggcgtgatctcccgacatcacttcgagcggttaggctctaatgaagcaccgggctctgataccaattaatagtcgcctagaggggggggtgaatagggcgaaactgaaattctcaaaaataatcacaactacaagccgggttagcgttagaagtataatcgagtccgcgagagggtgcaaaacaaatcgcaagcaaataaagagtgtgacacgcgggatttgttttaccgaggttcgattctcgcaaacctactccccgttgaggaggccacaaaggccgggtctctttcaacccttccctctctcaaacgatccctcggatcgagtgagctttctcttctcaatcacttggaacacaaagttcccacaaggaccaccacaagtttggtgtctcttgcctcaattacaagtgagtttgatcgcaatgaaagaatcaagaaagaagaaagcaatccaagcgcaagagctcgaaagaacacaagcaaatctctctctctagtcactagggcgttgtgtggaatttggagaggatttgatctctttggtgtgtctacaattgaatgctagagctcttgtagtagttgggaagtggaaaacttggatgcaa

SEQ ID NO: 158087 - DNA, 318 bp, Zea mays
  unsure (1)..(318): unsure at all n locations
  Clone ID: MRT4577_75753C.1
gctttgcttcctnncgtcgagggcgcaagttncnnctgcattgnatggcgactcgtaggtggcttgagaacttcccgtcgcctgttggcgtggggcgtgtccccgtgtacccccgcggtaggcatccggcgtgcgccccgccgcctgaggcgtaagctctggggaantgtcaaggagaggcctcnntgcgcccaagnaagcgttgcctaacccgactccaccctgccgtaccgccgagnnatgatctcggngtgggctgtcacgtcgcttcaaggagcggacgggngtccagctctgttcgcgtatcgtccaagttcg

SEQ ID NO: 158088 - DNA, 412 bp, Zea mays
  Clone ID: MRT4577_75754C.1
ttcaaaatgctcaagtgggaatcaacagggctaaggaattgctagccgctgatataaatgttggactcaatgatattaccgttgtgagtgtgactgaaggtaattgggctaacagcagcttaggtaatcctgaaccgggcaaattttacatgcagatgcttatgccaggatgtgtgattctattaaaagctaatggacaagaataccaatacaacactacaaacggtgcaacagcaatactgcgcagcagccaaattggacaaactggcttctggcctaattaagcttggttttattaaattcaagactttgtatgcattttttaaaagaatatttgtttattctataaagatgaattatcaataaaattgctatgagtcaatataaaatgagaattgattttccattaacc

SEQ ID NO: 158089 - DNA, 631 bp, Zea mays
  Clone ID: MRT4577_75755C.1
gccgcatcactcatgtgacacgttgtgactgcctgctctgctgctaattactactcgcctcccgagaaatttactctggcacctagggtacggcgtctcctaaatctggacatggcctccatctcctcggtcgcccgcacctcccagagcttttcgcaccactagtgctagccacatgacgcgcggcgaaccggagtggcggcttctgcggtgtcccgcggacgtaccctgatcgccgcgctcgcgctgagctacgcttggccatagtgacagcgactgccactgatccattccggtgtcccctacgcggagaatgctcttctgaggattcgccgagcgtggactgcttccaggacaacaccgcgtcctcatgctacgtcacacaacctcgactacaagcacgacaccaacacgttcgacgaggtcgaggtgtgtcagcaatacacgcacgtggtgtggctgcgactccaccgccacttatctgcgcccgtgtccatggcatccacgacgccgtcagacctgatcatcgtagcacttactgatcagtcagcgaatgaagcgcaagatagtcgcatactacacatgacatggatagtagctgtatatataattacgcttactattaacttct

SEQ ID NO: 158090 - DNA, 178 bp, Zea mays
  Clone ID: MRT4577_75756C.1
aagcgaaacgggcacttttcttcacagtccaagaggtctgtcacgacgataccctaatatggcacaaaacaagaatctactcaaagaaaaagaaacacaggggaagaacctggcaagcttaggctaaaaggctcaggtgaggactcacaaaacgcattctgacgctggtggctagggc

SEQ ID NO: 158091 - DNA, 134 bp, Zea mays
  Clone ID: MRT4577_75757C.1
ggagggatctgttcccgctgttaccggaggccttctcgggaatcaacggatcggtgtaatctggtggggctcggacggtcctgcactacctcgtaacttggtacactcccttgtctgaggtccaagtcccccta

SEQ ID NO: 158092 - DNA, 497 bp, Zea mays
  Clone ID: MRT4577_75758C.1
aaaacctataacacttcaatagcaattatgaggtttcacacgcaatccaatcttgggacaatactaactaaaacaaacccttatgcaattaagtcagacaccacaactatagttgaggctataatagtacggcatacttagtgcccaacatggagccactaattaggacggacccctcagactagtatgctacttatgaccatgagagaaatggacgaatgaccctgtacatggcaccatccttggaataggcgaataccacagacgcattatgcttcatggactcaccaacaaaaaattggaggaacttcaattcgctaaggacaaacttggttgcaccctcaacactcctttgagaactcatcctatatatctggctacaacacagcatccaaagtctagacgaattatttgatgtaagtacacaaatgagttcttgtaaacaggagggtcctcatccaaacggaatgggtaaacaatatcaaccacctatacag

SEQ ID NO: 158093 - DNA, 448 bp, Zea mays
  Clone ID: MRT4577_75759C.1
ctcactgtccttgtcactctcactggctcaccgtcacgtcaccgcccggatcgcaccgtacacacaaaatgcgaaggccgcccaagcccaagcgagtggcggcggcggccaagcttcccctccccctcaccgccaccttcctgtccctcctcctcctgccgctcggcttcgtcgtcatccacagggcattctccggcgtcgtcttcgcggcctcgactcccgccgtcaagcgtgttcttcttgagtactacggccgtgccagtgccaatgtcattgccagtacttgtcgcttattctctcggtgtttttttattctttttttttcttgttactcttttttttggtcttttggttttttatttcttttttttgtatttttttatattatttgtgcttttttttatctttctctattttttatttattttatttctctcttttttttttt

SEQ ID NO: 158094 - DNA, 2439 bp, Zea mays
  Clone ID: MRT4577_7575C.1
ggcttcctgctgcctggccttctctcctccccaaaatcaatcgcccacaaaggagagccagccaaatcctccacctcctccatttccagccccgtccccacaccagctcgcgtaacctcctgcccatggctggaggcggcggcgcaggcgcgggctcgtcgtccggcggcggcggagggggcggcagggagggcgactgggactgcggcagctgcggcaaccgcaactacgccttccgctcgctctgcaaccgctgcaggcagccgcgcctcctcgtcgaccccaacaccccgcgcgactccaagtggctaccccgcgccggggactggatctgcaccggtaacacctctcctgccacgctacccttcattattacccagccctgaatcacccgtcacttgttgtagatgcaggctctcatccatccctatgcagcgcattgatagtctagtgaatctagcatttctccttcatcccttgtgttcgctctaggtttagtatgttggcatagccctggttattattgtagacttcttagctagactttgggtctgtttggattcaagatctaattactagctagctaaaattagctaaaattgattctagtgcatccaaacaagagggctaatagacgtgctaattttttagccaagtttttaactagctgttagccaactagctagccaaactcagctagattttaacccatctagtagccctaactcatccaaacatgatcttttctagtcatgcagacaacattttaataaggtaagttagttgcattttaaatgatgagtgtttattttttaaaacagaacaggtgtaaataaaggaactagaaacttcattcaaactaagaaaggaaactctacaaattatttgaccaccgctccttaagctttccatgcaaatcagttcattcaccctctttgatctatattttttttttgaccaaactgtatacctctcttataagcacggtaatcagggtatttagtactactatatgttctgaaagtatcttggatgatctttgtttgtgttttaattgttgctactacctattagaaatattttcattattccttctgtttattttgttcattgaatgctgctatatgtagataatattagaaaaaaactttaccaatgaatgtgctaagtaatgactagtgtgcgtgtgtctattcctttctatgggtttgtgcgtgatggctggtcatggtggtggtgggtgtgggtgtgcttcggtgcgttttgctgcctactgtgctggttggtttatgcggcaaatggatgaataggttgcagtaacaataattatgcatccagaaagaactgcaaaaagtgtggcttgcccaaggaggaagcagcaatgccagcattgcaaatggcagggatggctatgccagcttatgcaacttatattgcaagactacaaagccttgctgcttctgcttctgcatataagatgaactttgggatggctgccaattcacctttgcagcagcaactacttgcaaatgcaaactggtcctatgggatggctggtagatgcaatcttctggttggacacttgccaactgcagcccggatgggtttccaggttgttccaaaggattggcgtaatggagactggctctgcagctgtggatttcataattattcatctcgtactcagtgcaaagagtgtggtgcacctataccatcaggcattccctccacaacaatgaaagctacgacatctgatgcctcttccacattaggaactaagcggttagcctcagaggagctggcaaacgactgtgataataaaaggctaaatccaggaaatgacaattatccactttcaacagcaggtgcaaataatttgtttttgggtattgagcaaggagctggaagcagcaatggccaggctgctttttcgaaatttgactatgggagctcaatgtcattaccatctgggcagggaatgtctggtcttatcgtaaaaggggcaaaatggcgcgacggggactggttgtgcaacaactgcaacaaccacaactacgcatctcgtgcgttttgcaacaggtgcaaaactcagaaagaatctgcagttcaccctggtgtgctatagcttgcttttgctggttcatattgttggactcgtttgttgcagggtcgtgcgtatggttgtggaaaacactattttgcagctgcaatggttagagatttgaaatatgagggaaaatatgagatgagcctcatgctgttgtgcatcatcgatcagaccactataagtaggactggaaatggatgtctggagatccgaattattcgtatttgctgaaaccgttaatatggatatccgtatctttattcgatttcaatatggatgtcaaatgtatacattcgaatttgatttataatacttttctcttatccgattcg

SEQ ID NO: 158095 - DNA, 1101 bp, Zea mays
  Clone ID: MRT4577_75760C.1
tttttttttttttttttttttttttttttttttttttccgcttttttttttttttttttgaataggaacccataccctaaacaggggttgggagtgatattaatagagtgagtaactgggccaggcccattacacagggggtataacggtcattacaaggggaataacataaaccctagacgggtagtctaacacgtatacgtgttgctaaaaatatccaatccatatgcaattccggtaaccgccacaggaaaattgctctgagagtcacactacacccagccaccggatcagttcatgtccacgtcggtgtcgttgagcctacaccccttcgtctcgaaggggaagaacgagacggccaggccggagaggaagattacaagctcgaagaggaggatcgccgtcgtctgctggcagctgtgcaccagggcgacagcgacgagtgggcagaggatgcccccgatcctgcccactgagctcgcgatgccgatgcccgtcgtcctcaccgcggtcgggtaaatctctggagcatatatgtatacgatggtgaagctggcagatatacagagccgggcaccaaacagggagattctggttagtatatctgtccgggagaacactagtgggagtaagaaaacgcagctagtgaagagcatcgacgccatggaacgcttccgaccaaatctatccacgatcatggccgacagaaatgaccctgggatctctgcaaaactagatatgaaaacattcttatataggcttgcattggttgaatgaactgattcaacatcctctttggcacatatcctgtttccattactgagctctgatgtcagaagaacaatgccataataggcaaacgcatttccaaagaaggccatccacagaagcagggttgctctgatcagttttggtgcgagtagcttgccgacggacttaatacctccgaaatcagaaccctgatcctcatttaggttgtcactttcttcggcaccagccagaagtgtcgtggactctgaagatcctgaaacttcatctagctcaatattttgtcagaaacaagcctaccagagacccggcccggccggcctcgagggtccc

SEQ ID NO: 158096 - DNA, 2427 bp, Zea mays
  Clone ID: MRT4577_75761C.1
atggctgtcaccttccatagcaagatcaccctgcgtcccggatccatattctgcttcggaacaatctcatctgtggcggatgaagagggaactctacaccgcattgcggatccgccggaaaagaagtctcctccaacaaactctgaaaatgtcggagaagcgcaacctccagctctccggaaaaagatcgtctccggaaagtcgggggccgagggcccgctgacccggagaactccactgtctacttccccgacaagagaatggacacagatcgcaaggaaaaaggaaaccaaggggaagcaagttgttctttccgttcctccgccctcaaaggagaacggaaagaaggtcgccacagcagcagtaccgttctatcccgatttcctcttcatcgggagagcggagtcacccaccgtctccgacgatgagccgaccgcacctggagaagaaccgcctcaacgagaatcccgccgatggaggaaccggcgcaggaacgttcgacgacaccacgcggccggagaacgggatccggagcaacctgtctcgcgagacgaggtctcggagataggagaaactccggaagaacgcgtcttcagagaacgaaggaactcccgacgacgtgatcgccgacgagctcaggaacaagccgagcaagatgcaaggcaacgccgggagaatccattcttcgggcgcaacctgaaccccgacttcgcccgagccatgaacacgccgagcgaagtcggaggagcggccaaccatcttctatcgcttgctcacccgccgaacgatctacgacacgccatcaacagtcgccgagacgcgcgaagctccatcattgcttcgcgtgaacgacggcatgagaacgagatccgccgccgggaggagtacgacagggatcatggcatcccagctcggagccaggccaccagaactgagtcggcaacgacctcaactagtggtaccacccggggacggtcgaggaaccacaacaattactcccctccccgggacagacatcatccccgacgacaggaggacacatgcggagtgtctgctcttactccgtgccttagggccatccaatggcctcccaacttcaaggtatccaatgtcgacaaatatgaacctaagcaggatccaaggggttggctagccgtctacaccaccgctgctcgagctgccggagcgtccgaagacgtgatgaccgcgtacttacccattgtccttgggcaagacgcgctgcaatggctgcgacatctaccccgacactgcatcgatgactggggcgacttcagtcgacgcttcaccgccaacttccagtccctctccgacaaaccggcgcaaccgtgggacctcaaatccatcaagcaccgggggacgagactctccggtcgtacctcaaaagccatactacagaaggcgccgactacctccgaggagctgttccgggaagccaacctctacatcaccgccgacgagcgggcccaggacctcatcggaggagcaaagcccgcaccggcagcatcacgacgcgccgcgaaccagcaacctgacaaacgatgggagaagaggcctcgcgaagaagaggagggaggaggaggagccttcccgcgcgttgacagggaggtcaatgtcattttcggcggacatgggtcgcaggaaaacaaaagacaacaaaagctcaacgaccgccagatactggtggcgaccaccggtcctcccgccccatatcggtggtcagagcacccgattactttcactcgggaggatcaatggctcaacttcgaccatccaggcaaatacccgctcctcgttgatccggtgatccgagagagccgggtgaagaaggtgctagtggacagggggagcagcatcaacgtcaccttcccccggacactccaaggcttgggagttcacctcaaagagctccacgagtcggacactcctttcttcggcatcgtgccgacggaaggagaatacccgctgggccacatctacatgcctgtcaccttcggaactccggagaactacagaaccgagttcctgaggtttgaagtggcgaacttcgactgcgggtacaacgccatcattgggaggccgggactggccaaattcatggccatcccccattacacgtatatgatactgaagatgccaggaccacaaggaatcataactgtgcgcgccgacttccaaggcgccgcagagtgtttccgagtggccatccaagcagccctcaccaccaagccgtcggcggtttcttcaacactggcgaactctaagcctaaggaggaccttgcagtaccggcaaacgaagctcaggccgcgacctctatgcggccgactgaagaaaccaagaggatcaacctggggttcgctgatgaacgcaagactgccatcatcagctccagcttggacgacaaatag

SEQ ID NO: 158097 - DNA, 466 bp, Zea mays
  Clone ID: MRT4577_75762C.1
gggtacctcgaggccggccgggagaacattcatctccagccgttgtcttctcgtgccgtcgtcttcccacgctagcacctgaatgaatgagagtggactaacatgatgcgcaacggctggatacccagccgagggttggacgctgacggtatacgtaggacccagagacctgcacctcggccgggctactatcacgtccgctactggaccatgctgaagctgcccatgtatccgtgcaacgataccacaaaggtgaagaaggagctgatcgaggacatgaaaagctacaaggatgccttccaccgaggtgtcgacttcaacatgatgaagtagacgaagtgagtcctcttctacaactatcgaaccctggtcatcgactatgaccgccgacgccgtgcgcctctcggcgtctaaggtaacagatatctgcagcgtgcactagtagctggtgtacatgcgacgtctc

SEQ ID NO: 158098 - DNA, 2487 bp, Zea mays
  Clone ID: MRT4577_75763C.1
atggccgtcaccttccatagcaagatcaccctccgtcccggatccgtattctgcttcagaacaatatcatccgtagcacatgaagagggaactctacaccgcattgcagatccgccgaaaaagaagtctcctccaacaaactccgaaaatgtcggagaagcgcaacctccagctctccggaaaaagatcgtccccagaaagtcaggggccgagagtccgctgacccggagaactccactgtctacttccccgacaaaagaatggacacagatcgcgaggaagaaggagaccaaggggaagcaagttgttctttccgttcctccgccctcaaaggagaacggaaagaaggtcgccacgacagcagcaccattctatcccgacgtcctcttcatcgggagagtggagtcgcctcccgtctccgacgacgagtcgaccgcacccggagaagaaccacctcaacgagaatcccgccgacggagaaaccggcgccggaacgttcggcgacatcacgcggccggagaacgggatccggagcaacctgtctcgcgggacgaggtctcggagataggagaaactccggaggaacgcgtcttcagagaacgaaggaactcccgacgacgtgatcgccgccgagctcaagaacaagctgagcaagacggaaggcagccaaccatcttctaccgcttgctcacccgccgaacgatctacgacacgccatcaacagtcgccgagacgcgagaagctccatcaatgcttcgcgtgaacgacggcatgagaacgagatccgccaccgggaggagtacgacagggatcatggcatcccagctcggagccaggccaccagaactgagtcggcaacggcctcaactggcggccatccaatggcctcctaacttcaaggtatccaatgtcgacaaatatgaacctaagcaggatccagggggctggctagccgtctacaccaccgctgctcgagctgccggggcgtccgaagacgtgatgactgcgtacttacccattgtcctcgggcaagacgcgctgcaatggttgcgacatctaccccgacactgcatcgacgactggggcgacttcagtcgacgcttcaccgccaatttccagtccctctccgacaaaccggcgcaaccatgggacctcaaatccatcaagcgccggaggacgaaactctcctgtcgtaccttaaaaggggatccaatgactcggccttcgtccaagccatattacagaaggcaccgactacctccgaggagctgttccgggaagccgacctctacatcaccgccgacgagcgggcccaggacctcatcggaggagcaaagcccgcaccggcggcaccacgacgcgacgcgaaccagcaacccgacaaacgctgggagaagagacctcgcgaagaagtacacgccgccggaccaccagcctctcgcgcccgaggaggacctcgcggaggcgagcgcatgctggacgacatcctcgacgcccagtgcccgtaccacaaggacatgcgccacactcttcggaactgtcgggacttcaagcactccgtcgggcacggccgacccttccaacctctacctcctcctccaccgaggggaggaccagaagaaccacgaccaccccatcagcaggaggagggaggaggaggagctttcccgcgcgttgacagggaggtcaacgtcatctttggtggacatgggtcgcaggagaacaaaagacaacaaaagctcaacgatcgccagatactggtggcgaccaccggtcctcccgcgcccataccggtggtcggagcacccgatcactttcactcgggcggatcaatggctcaacttcgaccacccaggcaaatacccgctcctcgtcgatccggtgatccgagaaagccgggtgaagaaggtgctagtggacggggggagcagcatcaacgtcaccttcccccggacactccaaggcttgggagttcacctcaaagagctccacgagtcggacactcccttcttcggcatcgtgccgactgaaggggaatacccgctaggccacatctacatgcccgtcaccttcggaactccggagaactacagaaccgagttcctgaggttcgaagtggcgaacttcgactgcgggtacaacgccatcatcgggaggccgggattggccaaattcatggccattcctcattacacgtacatgatattgaagatgccaggaccacaaggaatcataactgtgcacgccgacttccaaggcgccgcagagtgtttccgagtggccatccaagcggccctcaccaccaagccgtcgatgatttcttcaacacaggcgaactctaagcctgaggaggaccttgcagtaccggcaaacgaagctcaggccgcgacctctatgcggccgactgaagaaactaaaaggatcaacctagggttcgctgatgaacgcaagactgccatcatcagctccagcctggacgacaaatag

SEQ ID NO: 158099 - DNA, 277 bp, Zea mays
  Clone ID: MRT4577_75764C.1
ggcacaaatagagggctggtttaatttacatgcatacaagggctcttaaaatttaaaaaattccttgtgctaatatagatgacataaaacctatgctatctaggataccttgccgacatcatcatctcttgctccaaactgtatcttctactaaattcctcataactatgcccttcactaatcccttattaataatttgcccccttgctactattctcgaaatccttcattacgaaattacccttcttgtactttttatttgaaccctttttaaaat

SEQ ID NO: 158100 - DNA, 365 bp, Zea mays
  Clone ID: MRT4577_75765C.1
aacaaacaaaaaatttggttgatactttcaattgaacttattcccccccaaatgattttgcagccccaggcccaagccgggcctaaattacagggcccggtgggggtccctgaccaaagaatcctaatttatcccgatctttttcatgaccatttttatgcctttggaaactgaaaaaaaaatagcccaagagccccgcagtttttgttacaagctgcaaacctgccattaatttttaaaaaaaaatttcgagtttttccttttgcagaacggactgggcctaaaaagttcctcatgggggaggattgcatttatcagggcggaatgaagggagccctcttgagtttttgaaaacaaaggcacac

SEQ ID NO: 158101 - DNA, 3255 bp, Zea mays
  Clone ID: MRT4577_75766C.1
atggccgtcaccttccaccgcaagatcaccctccatcccggatccgtgttctgctttggaacgatctcatccatagcagatgaagaaggaactctacaccgcatcgccgatccgccaaagaagaagtccactccaacgcgctccgagaatatcggggtgaggaaggaaaaagcgcaacctccagcgctccgaaaaaagattgacgtcggcaagccagaggccaagagtccgctgacccagaaaactccactatctacttcctcgacgaaagaatggacgcaagtcgcaaggaagaaagagaccgggaggaagcaagttgttctttccgttcctccgccctcaaaggagaacgggaagaagatcgccacgaccgccgcaccattctaccccgacgtcctcttcatcgggagagtggagtcgccccccgtctccgacgacgagccaaccgcacccggagaagaaccacctcagcgggaatcccgctggcggagataccggcgccgaaatattcggcgacatcacgaggccggagaacgggatccggagcaacctgtttcgcgggacgaggtctcggagataggagaaacttcggaggaacgcatcttcagagaacgaaggaattcccgccgacccatgaacacgctgagtgaagtcggaggggtactggctcggatagctgatggactccctcggactcccgacgccgagggctatcgacgactgttcacccaggcagccaaccatcttctaccgctcgctcacccgccgaacgatctacgacacgccatcaacagtcaccgagacacgcgaagctccatcaatgcttcgtgtgaacgacggcatgagaacgagatccgctgcagggaggagtacgatagggatcatggcatcctagctcggagtcaggcaaccagaaccgagtcagcaacggcctcgactggtggtactacccagggacggtcgaggaatcacaacaactactcctctccccgggacagacatcatccccgacgacaggaggacacgtgtggagtgacagcccttactccatgccttagggccattcaatggccccctaacttcaaggtatccaatgtcgacaaatatgaacctaagcaggatccaggaggctggctggccgtctacaccaccgccgcccgagccgccagagcatccgaggacatgatgactgcgtacttacccattgtcctcgggcaagacgcgctacaatggctgcgacatctaactcgacactgcatcgacgactggagcgacttcagtcgacgtttcaccgccaactttcagtccctctccgataaaccagcgcagccatgggacctcaaatccatcaagcgccggggggacgaaactctccggtcgtacctcaaaaggttccagaccatgagaaatcgtatccccgaggtcacggaggcggtcgtgatcgaggacttctacagaggatccaatgactcggccttcgtccgagccatattgcagaaagcgccgactacctccgagcagctgttccgagaagccgacctctacatcaccgccgacgagcgagctcaggacctcatcgggggagcgaagcccgcaccggcagcgccacgacgcgacacgaaccagcaacccgacaaacgttgggagaaaagacctcgcgaagaggtgcacgccgccggaccacctgcctctcgtgcccggggaggacctcgcggaggcgagcgcacgctggacgacatcctcgacgcccagtgcccgtaccacaaggacatgcgccacaccctgcggaactgcagggacttcaagcactccgtcggacacgaccgacccttccaacctctacctcctcctccgccgcggggaggaccagaagaaccacgacaaccccagcagcaggaggagggggaaggaggagccttcccacgcgttgacagggaggtcaacgtcatcttcgacggacacggatcgcaggagaacagaagacaacaaaagctcaacgatcgccagatattggtggcgaccaccggtcctcccgctccgtaccggtggtcggagcacccgatcaccttcactcgggcagatcaatggctcaacttcgaccacccaggcaagtacccgctcctcgtcgatccggtgatccgagagagcagggtgaagaaggtgttagtggacaggggaagcagcatcaacgtcaccttcccccggacactccaaggcttgggagttcacctcaaagaactccgcgagtcagacactcctttcttcggcatcgtgccgaccgaaggggaatacccgctgggccacatctacatgcccgtcaccttcggaactccggagaattacagaaccaagttcctgaggttcgaagtggcaaacttcgactgcggatacaatgccatcatcggtaggcctggattggcgaagttcatggccattccacattatacgtacatgatattgaagatgccaggaccacaaggaatcataaatgtacgcgctgacttccaaggcgccgcagagtgtttccgagtggtcattcaggcggccctcaccaccaaaccatcagcgacttcttctacgcaggcgaattcaaagcctgaggaagacctcgtggtatccgcgaatgaagctcaagtcgtgacctctatgcggccgactaaagaaaccaagagaatcaacctcgggttcaccgatgaacgcaagactgccatcatcagttccagcctggatgacaaataggaaggcgcgctcgtccggtttctgcaagataaccgagacgtatttgcatggcaacctgcggatatgctgggagtcccgagagaactggcgaagcacaaactgaaggtctacccccaggcgaggccgatccgacagaaattacgtcgttgcacgcccgacaagagagaagccatccgtgcagagctggctcgcttggtcgcggccagattcattagagaagtgttacatcccgagtggttagcaaatcatgttcttgtactcaaaaataataaagtgggttggcgcatgtgcgtcgactatccggatctcaacaaacattgtccgaaggatcccttcggacttcctagaatagaccaggtggtagactcaaccgccgggtgttctatgttgtctttcttagattgctattccagatatcatcagatcagcttggcaaaagaagacgaggaaaaaacagcattcatcaccccgttcggagccttctgctatacctccatgccattttcattgttgttc

SEQ ID NO: 158102 - DNA, 2640 bp, Zea mays
  Clone ID: MRT4577_75767C.1
atggccgtcaccttccacagcaagatcaccgtgcgtcccggatctgtattctgcttcgggacaatctcatctgtagcggatgaagagggaattctacaccgcctcgcggatctgccggaaaagaagtctcctccaacaaactccgaaaatgctggaaagacgctacctccggctcttcggaaaaagattatctccgggaaggctggagctggaagctcgctgacccggaagactccgctgtctacttccccgacgaaggaatggacacggatcgcgaggaagaaggagaccagggagaggcaagtcgttcttcccgttcctctgacctcaaaggagaacggaaagaaagtcgccacaacagcagtaccgttctaccccgacatcctcttcatcgggagagtggagtcacccgccatctctgacgacgaaccgaccgtgcctggagaagaaccacctcagcgagaatcccgccgacggaggaaccgacgcaggaacgttcgacgacatcacgcggccggagaacgggatccggagcagcctgtctcgcgagatgaggtctcagagataggggaaactccggaagaacgcatcttcagggaacgaaggaactcccgacgacgtgatcgccgacggactcaggagcaagccaagcaagatgcaaggcaacgccgggagaatccgctcttcgggcgcaacctgaaccccgacttcgcccgagctatgaacacgccgagcgaggtcggaggcgttctagctcggatagctgacggactcccgacgccgagggatatcgacgcctgttcacttaggcggccaaccatcttctaccgctcgctcacccgccgaacgatttgtgacacgccatcaacagtcgccgagacgcgcgaagctccatcaatgctttgcgcgaacggcggcatgggaacgaaattcgccgtcgggaggagtatgaccgagatcacggcttcccgactcaaagccaggccaccaggactgagtcggcaacagcttcaactggcggtaccacccggggacggtcgaggaaccaccaccaccactcccctccccgggacagacgtcatccccgacgacaggaggacacgtgcggagtatccgctcttactccacgccttagggccatccaatggcctcccaacttcaaggtatccaatgtcgacaaatatgaacctaagcaggatccaggggtctctctccgacaagccagcgcaaccatgggacctcaaatccatcaagcgccggggggatgagactctccggtcatacctcaaaaggttccagaccatgaaaaaccgcatccccgaggtcacggaggcggccgtgatcgaggacttctacagaggatctaatgactcggctttcgtccgagccatactacaaaaggcgccgactacctccgaggagctgttccgggaagccgacctctacatcaccgccgacgagcgggcccaggatctcatcggaggagcaaagcccgcaccgacagcaccacgacgcgacgcgaaccagccatccgacaaacgctgggagaagaggcctcgagaagaagtacacgccgccggaccacccgcctctcgcgcccgaggagggcctcgtggaggcgagcgcacgctggacgacatcctcgacgcccagtgcccgtaccacaaggacatgcgccatactctccgtaactgccgggacttcaagcactccgtcggacatggtcgacccttccaacctctaccgcctcctccgccgaggggaggaccagatgaaccacgacagccccatcggcaggaggaggggggaggaggagctttcccgcgcgttgacagggaggtcaacatcatcttcggcggacacgggtcgcaggagaacaaaagacaacaaaagctcaacgaccgccagatactggtggcaaccaccggtcctcccgccccataccggtggtcggagcacccgatcactttcactcgggaggatcaatggctcaactttgaccatccaggcaaatacccgctcctcgtcgatccggtgatccgagagagccgggtaaagaaggtgctagtggacggggggagcagcatcaacgtcactttcccccggacacttcaaggcttgggagttcacctcaaagagctccacgagtcggacactcctttctttggcatcgtgccgacggaaggggaatacccgctgggccacatctacatgccggtcaccttcggaactccggagaactaccgaaccgagttcctgaggttcgaggtggcaaacttcgactgcgggtacaacgccatcatcgggaggccggggctggctaagttcatggccatcccgcactatacatatatgatactgaagatgccaggaccgcaaggaatcataactgtgcgcgccgacttccaaggcgccgcagaatgtttccgagtggccatccaagcagccctcaccaccaagccgtcaacggttccttctacaccggcgaactctaagcctgaggaagacctcgccgtaccggcaaacgaagctcaggccgcgacctctatgcggccgactgaagaaaccaagcggatcaacctggggtttgctgatgagcgcaaaacggccatcatcagctccagtttgaatgacaaatag

SEQ ID NO: 158103 - DNA, 2736 bp, Zea mays
  Clone ID: MRT4577_75768C.1
atggccgtcactttccacagcaagatcgccgtgcgtcccggatctgtattctgcttcgggacaatctcgtccgtagcggatgaggaaggaattctacaccgcctcgcagatctgccgaaacagaggtctcctccaaccaactccgaaaacgctggaaagacgctacctccggctcttcggaaaaagatcgtctccggggaagctggagctagaagctcgctgacccggaagactccgctgtccacttccccgacgaaagaatggacacgggtcgtgagaaagaaggagaccagggcgaggcaagtcgttcttcccgttcctccggcctcaaaggagaacggaaagaaaatcgccgcaacagcagtaccgttctaccccgacgtcctcttcatcgggagagcagagtcgcccgccgtctctgacgatgaaccgaccgcgcctggagaagaaccacctcagcgagaatcccgccgacgaagaaaccgacgcaggaacgttcggcggcatcacgcagctggagaacgagatccggagcagcctgtctcgcgagacgaggtctcagagataggagaaactccggaagaacgcgtcttcagggaacgaaggaattcccgacgacgtgatcgccggcggactcaggagcaggccgagcaagatgcaaggcaacgacgcgagaatccgctcttcgggcgcaacctgaaccccgactttgcccgagctatgaacacgccgagcgaagtcggaggcgttttagctcggatagctgacggtcttcctcggactcccgacgccgaaggataccgacgcctgttcactcaggcggccaaccatcttctaccgctcgctcacccgccgaacgatttgcgacacgccatcaacagtcgccgagacgcgcgaagctctatcaatgcttcgcgcgaacggcggcatgagaacgaaattcgccgtcgggaggagtatgaccgagatcatggcttcccgactcaaagccaggccacccgaactgagtcggcaacagcttcaactggtggtaccacccggggacggtcgaggaaccaccaccgccactctcctccccgggacagacgtcatcctcgacgacaggaggacacatgcggagtatccgcccttactccgcgccttagggccatccaatggcctcccaacttcaaggtatccaatgttgacaaatatgaacctaagcaggatccagggggttggttagccgtctacaccaccgctgctcgggctgctggagcatccgaagacgtcatgaccgcgtatctgcccatcgtccttgggcaagatgtgctgcagtggctacgacatctaccccgacactgcatcgacgactggggagatttcagtcgacgtttcaccgccaacttccagtctctctccgacaagccagcgcaaccatgggacctcaaatccatcaagcgccgggggatgagactctccggtcataccttaaaagccatactacaaaaggcgccgactacctccgaggagctgttccgggaagccgacctctacatcaccgccgacgagcgggcccaggatctcatcggaggagcaaagcctgcaccggcagcaccacgacgtgacgcgaaccagccatccgacaaacgctgggagaagaggcctcgtgaagaagtacacgctgccggaccacccgcctctcgcgcccgaggagggcctcgaggaggcgagcgcacgctggacgacatcctcgacgcccagtgcccgtaccataaggacatgcgccacactctccgcaactgccgggatttcaagcactccgtcgggcatggccgacccttccaacccttaccacctcctccgcggaggggaggacccggtgaaccacgacagccccatcagccggaggagggaggaggaggaggaggagctttcccgcgcgttgacagggaggtcaacgtcatcttcggcggacatgggtcgcaggagaacaaaagacaacaaaagctcaacgaccgccggatactggtggcgaccaccggccctcccgccccataccggtggtcggagcacccaatcactttcactcgggaggatcaatggctcaactttgaccatccaggcaaatacccgctcctcgtcgatccggtgatccgagagagccgggtaaagaaggtgctagtggacggggggagcagcatcaatgtcaccttcccccgtacgctccaaggcttgggagttcacctcaaagagctccacgagtcagacactcctttcttcggcatcgtgccgacagaaggggaatacccgctgggccacatctacatgccggtcaccttcgggactccggataactacagaaccgagttcctgaggttcgaggtggcgaacttcgactgcgggtacaacgccatcatcggaaggccggggctagccaaattcatggccatcccgcactatacctacatgatactgaagatgtcaggaccgcaaggaatcataactgtgcgcgccgacttccaaggcgccgcagaatgtttccgagtggccatccaagcagccctcaccaccaagccgtcgacggttccttctacgccggcgaactctaagcctgaggaagacctcgccgtaccggcaaacgaagctcaggccgcgacctctatgcggccgactgaagaaaccaagcgaatcaacctggggtttgctgatgagcgcaagacggccatcatcagctccagcttgaatgacaaatag

SEQ ID NO: 158104 - DNA, 2367 bp, Zea mays
  Clone ID: MRT4577_75769C.1
atgtcgggagaacacgccaagaaggagatggaaatcagcgacaagcccactacaagccacgggaaggcctcatcggaagagtcccgcaacaaaaagaaagggaaggagaagaaagctgtgggggacagatatcccccgggtccaccggaaggatccaccgaaaaagaaatctcctccaacaaaccccgaaaataccggagaagcgcaacttccagctctccgaaaaagatcgccttcagaaagtcaggggccaagggcccgctggcccggagaactccactgtctacttccccgacgaaagaatggacacaggtcgcaaggaagaaagaggccaggagaaagcaagttgttctttctgttcctccgccctcaaaggagaacggaaaaaagatcgtcacgaccgccgtaccattctaccccgacgtcctcttcatcgggagagtggagtcgccccccgtctccgacgacgagccgatcgcgcccggagaagaaccacctcagcgggaatcccgccgacggagaaaccggcgccgaaacattcggcgacaccacgaggccggagaacgggatccggagcaacctgtttcgtgggacgaggtctcggagataggagaaactccggaggaacgcgtcttcaaagaacgaaggaactcccgacgacgtgatcgtcgccgggctcaggaacaagccgagcaagatgcaaggcaacgccgagagaatccactcttcgggcgcaacctgaatcccgacttcgcccgagccatgaacacgccgagtgaagtcggaggagtactagctcggatagctgatggactccctcggacttctgacgccgagggctatcgacgactgttcactcaggcggccaaccatcttctaccgcttgctcacccgccgaacgatctacgacacgctatcaacagacgtcgggacgcgcgaagctccatcaatgcttcgcgtgaacgacggcatgagaacgagatccgccgccgggaggaggccatccaatgtccccctaacttcaaggtatccaatgtcgataaatatgaacctaagcaggatccagggggctggctagccgtctacaccaccgctgctcgggccgccagggcgtccgaggacgtgatgaccgcgtacttacccattgtcctcgggcaagacgcgctgcaatggctgcgacatctaccccgacactgcatcgacgactggggcgattttagtagacgcttcaccgccaattttcagtccctctccgacaaaccagcgcaaccgtgggacctcaaatccatcaagcgccggggggacgaaactctccggtcatacctcaaaaggttccagaccatgagaaatcgtatccctgaggtcacggaggcgaccgtgatcgaggacttctacagaggatccaatgactcggccttcgtccgagccatattgcagaaggcgccgactacctctgaggagctgttccgggaagccgacctctacatcacagccgacgagcgagcccaggacctcatcggaggagcgaagcccgcactggcagcaccacgatgcgacgcgaaccagcaacccgacaaacgctgggagaagagacctcgcgaagaagtacacgccgccggaccaccagcctctcgtgcccggggaggacctcgcggaggcgagcgcacgctggacgacatcctcgacgcccagtgcccgtaccacaaggacatgcaccacactcttcggaactgccgagacttcaagcactccgtcgggcacggccgacccttccaacctctacctcctcctccgccgaggggagggccagaagaaccacgacaaccccagcagcaggaggagggaggaggaggagctttccctcgtgttgacagggagctcaacttcgaccacccaggcaaatacccgctcctcatcgatccggtgatccgagagagcagggtgaagaaggtgttagtggacggggggagcagcatcaacgtcaccttcccctggacactccaaggcttgggagttcacctcaaagagctccacgagtccgacactcctttcttcggcatcttgccgactgaaggagaatacccgctgggccacatctacatgcccgtcaccttcggaactccggataactacagaaccgagttcctgaggttcgaagtggcgaacttcgactgcgggtacaacgccatcatcgggaggccgggattggcaaaattcatggccattccgcattacacgtacatgatactgaagatgccaggaccacaaggaatcataactgtgcgcgctgacctccaaggcgctgcagagtgtttccgagtggccatccaagcggccctcaccaccaagccgtcaacgacttcttga

SEQ ID NO: 158105 - DNA, 250 bp, Zea mays
  Clone ID: MRT4577_7576C.1
ccccagactaaaacagggccgggggcggcgacaagcgggacgtaggggatgaggagcaggagcagcactctgatggtgatcctatgttctccaggcccttctgctctctgcggttgtggccaaggggacctgcagggccgaaggaagcactgctggtgcggcgagtgcaccagctgggccggcgtgtggacctgcgacgacctcctcaccaagtgcgccggcacctgcaagaactgggtgcccgtctcca

SEQ ID NO: 158106 - DNA, 851 bp, Zea mays
  unsure (1)..(851): unsure at all n locations
  Clone ID: MRT4577_75770C.1
cattgggacctcgagccggcgggacttggcctccttccgcagaaaagagcaaactgccttggcaaagcgaaaccatcaaaccggtgccgatgctctgccggcgcccgtgccccggcgtgttcctccgcctcttcgccacttcctgccgccgcagctccctccacccctcgcagccgcacctacggacagctacagctctcccgacgctgcctgtggcgaagaaggtccccttcaatgtgtcggcgcacgggaggtcgtggagtgacccgtaccactggatgcgcgacacctccgacccggacctcgcagtcctcctcgccgctgagaacgcgtacgccgacgcgttcgtcggatcggcaggtggcggcggcctccgcgcgcgcctcgccgcggagatgcgcgcccggctgcccgcttctactgccacaccgcctcagctctggggaccttggttatattatcagtatgttccagagggaaaggagtaccctgttttatctaggaagctgaggccctctagtggtctggtaggaactctgcttgattacctttctggttctgagaaggagcaagtgttgcttgattggaacgaggttgcagaaaanaatggttatgtccacnattgggagttgtcgaatctctccagatcacaggtttcttgcatatacagttgatacaatctgggggtgaactattttcccttgaagtgaaagatctgctgtctgagcatgtcatctttagttcccaaacaagggagtagttagtttagcatggtctggcaaacagtgaaagttattttacactgtctgtgatgagactcacgtcctaaacaggttttctgtaaaaagtgc

SEQ ID NO: 158107 - DNA, 2607 bp, Zea mays
  Clone ID: MRT4577_75771C.1
atggccgtcaccttccgcagcaagatcaccctgcgtcccggatccgtattctgcttcgggacaatctcatccgtagcggatgaagagggaactctacaccgcatcgcggatccgccggaaaagaagtctcctccaacaaactccgaaaatgccggagaggcgctacctccggctcttcggaaaaagatcgtctccggggaggctggggccgggggctcgctgacccggaggactccgctgtctacttccccgacgaaagaatggacacgggtcgcgaggaagaaggagaccagggagaggcaagtcgttcttcccgttcctccgccctcaaaggagaacggaaagaaggtcgccacgacagcagcaccattctaccccgacgtcctcttcatcgggagagtggagtcgcccgccgtctccgacgacgagccgaccgcgcccggggaagaaccgcctcaacgagaatcccgccgacggaggaaccggcgcaggaacgttcgacgacatcacgcggccggagaacgggatccggagcagcctgtctcgcgagacgaggtctcggagataggggaaactccggaagaacgcgtcttcagggaacgaaggaactcccgacgacgtgatcgccgacgggctcaggagcaagccgagcaagatgcaaggcaacgccgggagaatccgctcttcgggcgcaacctgaaccccgacttcgcccgagctatgaacacgccgagcgaggtcggaggcgttctagctcggatagctgacggactccctcggactcccgacgccgagggctaccgacgcctgttcacccaggcggccaaccatcttctaccgctcgctcacccgccgaacgatctgcgacacgccatcaacagtcgccgagacgcgcgaagctccatcaatgcttcgcgcgaacggcggcatgagaacgagattcgccgccgggaggagtacgaccgggatcacggcttcccggctcagagccaggccaccaggactgagtcggccacggcctcaactggcggtaccacccggggacggtcgaggaaccaccaccaccactcccctccccgggacagacatcgtccccgacgacaggaggacacgtgcggagtgtccgctcttactccgcgccttagggccatccaatggccccccaacttcaagtccctctccgacaagccggcgcaaccgtgggacctcaaatccatcaagcgccggggggacgagactctccggtcgtacctcaaaaggttccagaccatgagaaaccgcatccccgaggtcacggaggcggccgtgatcgaggacttctacagaggatccaatgactcggctttcgtccgagccatactgcagaaggcgtcgactacctccgaggagctgttccgggaagccgacctctacatcaccgccgacgagcgggcccaggacctcatcggaggagcaaagcccgcaccggcagcaccacgacgcgacgcgaaccagccacccgacaaacgctgggagaagaggcctcgcgaagaagtacacgccgccggaccacccgcctctcgcgcccgaggaggacctcgtgggggcgagcgcacgctggacgacatcctcgacgcccagtgcccgtaccacaaggacatgcgccacactctccgtaactgccgggacttcaagcactccgtcgggcacggccgacccttccaacctcttccgcctcctccgccgaggggaggaccagatgaaccacgacagccccatcagcaggaggaggggggaggaggagctttcccacgcgtcgacagggaggtcaacgtcatcttcggcggacatgggtcgcaggagaacaaaagacaacaaaagctcaacgaccgccagatactggtggcggccaccggtccgcccgccccataccggtggtcggagcacccgatcactttcactcgggaggatcaatggctcaacttcgaccatccaggcaaatacccgctcctcgtcgatccggtgatccgagagagccgggtaaagaaggtgctagtggacggggggagcagcatcaacgtcaccttcccccggacgctccaaggcttgggagttcacctcaaagagctccacgagtcagacactcctttcttcggcatcgtgccgacggaaggggaatacccgctgggccacatctacatgccggtcaccttcgggactccggagaactacagaaccgagttcctgaggttcgaggtggcgaacttcgactgcgggtacaacgccatcatcgggaggccggggctggccaaattcatggccatcccgcactacacgtacatgatactgaagatgccagggccgcaaggaatcataactgtgcgcgccgacttccaaggcgccgcagagtgtttccgagtggccatccaagcagccctcaccaccaagccgtcggcggttcctccgacgccggcgaactctaagcctgaggaggacctcgccgtaccggcaaacgaagctcaggccgcgacctctatgcggccgactgaagaaaccaagaggatcaacctggggttcactaatgaacgcaagactgccatcatcagctccagcttggacgacaaatag

SEQ ID NO: 158108 - DNA, 2957 bp, Zea mays
  Clone ID: MRT4577_75772C.1
atggtcgtcaccttccacagcaagatcgccgtgcgtcccggatctgtattctgcttcgggacaatctcatccgtagcggacgaagagggaattctacaccgcctcgcagatctgccggaacagaagtctcctccaacaaactccgaaaatgctggaaagacgctacctccggctcttcggaaaaagatcgtctccggggaggctggagctagaagctcgctgacccggaagactccgttgtctacttccccgacgaaagaatggacacgggtcgtgagaaagaaggagaccagggagaggcaggttgttcttcccgttcctccggcctcaaaggagaacggaaagaaagttgccacgacagcagtaccgttctaccccgacgtcctcttcatcgggagagcagagtcgcccgccgtctctgacgatgaaccgaccgcacctggagaagaaccgcctcagcgagaatcccgccgacgaaggaaccgacgcaggaacgttcggcgacatcacgcagctggagaacgggatccggagcagcctgtctcgcgagacgaggtctcagagataggagaaactccggaagaacgcgtcttcagggaacgaaggaactcccgacgacgtgatcaccgtcggactcaggagcaagccgagcaagatgcaaggcaacgacgcgagaatccgctcttcgggcgcaacttgaaccccgacttcgcccgagctatgaacacgccgagcgaagtcggaggcgttctagctcggatagctgacggacttcctcggactcccgacgccgagggataccgacgcctgttcactcaggcagccaaccatcttctaccgctcgctcacccgccgaacgatttgcgacatgccatcaacagtcgccgagacgcgcgaagctctatcaatgcttcacgcgaacggcggcacgagaacgaaattcgccgtcgggaggagtatgaccaagatcatggcttcccgactcaaagccaggccacccgaactgagtcggcaacagcttcaactagtggtaccacccggggacggtcgaggaaccaccaccgccactcccctccccgggacagacgtcatccccgacgacaggaggacacgtgcggagtatccgcccttactccgcgccttagggccatccaatggcctcccaactttaaggtatccaatgtcgacaaatatgaacctaagcaggatccagggggttggttagccgtctacaccaccgctgctcgggctgccggggcatccgaagacgtcatgactgcgtatctgcccatcgtcctcgggcaagacgcgctgcagtggctacgacatctaccccgacactgcatcgacgactggggagacttcagtcgatgtttcaccgccaacttccagtctctctccgacaagccagcgcaaccatgggacctcaaatccatcaagcgccggggggatgagactctccggtcataccttaaaaggttccagaccatgagaaaccgcatccccgaggtcacggaggcggccgtgatcgaggacttctacagaggatctaacgacttggctttcgtccgagccatactacaaaaggcgccgactacctccgaggagctgttccgggaagccgacctctatatcaccgccgacgagcgggcccaggatctcatcggaggagcaaagcccgcaccggcagcaccacgacgcgacgcgaaccagccgcccgacaagcgctgggagaagaggcctcgtgaagaggtacacgccgccggaccacccgcctctcgcgcccgaggaggacctcgtggaggcgagcgtacactggacgacatcctcgacgcccagtgcccgtaccacaaggacatgcgccttactctacgtaactgccaggacttcaagcactccgttggacatggtcgacccttccaacccctaccgcctcctccgccgaggggaggaccaggtgaaccacgacagccccatcagccggaggagggggaggaggagctttcccgcgcgttgacagggaggtcaacgtcatcttcggcggacatgggtcgcaggagaacaaaagacaacaaaagctcaacgaccgccagatactggtggcgaccaccggccctcccgccccgtaccggtggcaaatacccgctcctcgtcgatccggtgatccgagagagccgggtaaagaaggtgctagtggacggggggagcagcatcaacgtcaccttccctcgtacgctccaaggcttgggagttcacctcaaagagctccacgagtcagacactcctttcttcggcatcgtgccgacggaaggggaatacccgctgggccacatctacatgccggtcaccttcgggactccggataactacagaaccgagttcctgaggtttgaggtggcgaacttcgactgtggttacaacgccatcatcggaaggccggggctagccaaattcatggccatcccgcactatacctacatgatactgaagatgccaggaccgcaaggaatcataactgtgcgcgccgacttccaaggcgccgcagaatgtttccgagtggccatccaagcagccctcaccaccaagccgtcaacggttccttctacaccggcaaactctaagcctgaggaagacctcgccgtgccggcaaacgaagctcaggccgcgacctctatgcggtcgactgaagaaaccaagcggatcaacctggggtttgccgatgagcgcaaggcggccatcatcagctccagtttgaatgacaaatagaactcggggtgaccactatgccctacgtaacggagcaatcgacttaagtcggcaacgacttaaggcggtgcaacatgctcacgcttacttaactcagggtgaccactatgccctactaacagaacaatcgacttaagttggaaacgacttaaggcggatcatattacccacgcctatgcaattcagggggt

SEQ ID NO: 158109 - DNA, 2568 bp, Zea mays
  Clone ID: MRT4577_75773C.1
atggccgtcaccttccacagcaagatcaccctccgtcccggatccgtattctgcttcggaacaatctcatctgtagcagatgaagagggaactctacaccgcattgcagatccgccgaaaaagaagtctcctccaacaaactccggaaatgtcagagaagcgcaacctccagctctccggaagaagatcgccttcagaaagtcaggggccgagagcccgctgacccggagaactccactgtctacttccccgacaaaagaatggacacagatcacgaggaagaaggagaccaaggggaagcaagttgttctttccgttcctccgccctcaaaggagaacggaaagaaggtcaccacgacagcagcaccattctatcctgacgtcctcttcatcgggagggcggagtcgcctcccgtctccgatgacgagccgaccgtacccggagaagaaccacctcaacgagaatcccgccgacggagaaaccggcgccggaacgttcggcgacatcacgaggccggagaacgggatccggagcaacctgtctcgcgggacgaggaacaagctcagcaagacgcaaggcaacaccgggagaacccactcttcgggcgcaacctgaatcccgacttcgcccgagccatgaacacgccgagcgaagttgggggagtactagctcggatagctgacggacttcctcggactcccgacgccgagggctatcgacgactgttcacccaggcagccaaccatcttctaccgcttgctcacccgccaaacgatctacgacacgccatcaacaaccgtcgggacgcgcgaagctccatcaatgcttcgcgtgaacgacggcacgagaacgagattcgccgccgggaggagtacgacagggatcatggcatcccagctcggagccaggccaccagaactgagtcggcaatggcctcaactggcggtactacccggggacgggccatccaatggcctcctaacttcaaggtatccaatgtcgataaatatgaacctaagcaggacccagggggctggctagccgtctacaccactgctgctcgagctgccggggcgtctgaagacgtgatgaccgtgtacttacccattgtcctcgggcaagacgcgctgcaatggctgcgacatctaccccgacactgcatcgacgactggggcgacttcagtcgacgcttcaccgccaatttccagtccctctccgacaaaccggcgcaaccatgggacctcaaatccatcaagcgccggggggacgaaactctccggtcatacctcaaaaggttccagaccatgagaaatcgtatccctgagaaggcaccgactacctccgaggagctgttccgggaagccgacctctacatcaccgccgacgagcaagcccaggacctcatcgggggagcaaagcccgcgccggcagcaccacgacgcgacgcaaaccagcaacctgacaaacgctgggagaagagaccccgcgaagaagtacacgccgccgggccaccagcctctcgcgcccgaggaggacctcgcggaggcgagcgcacgctggacgacatcctcgacgcccagtgcccgtaccacaaggacatgcgccacactcttcggaactgccgggacttcaagcactccgtcgggcacggccgacccttccaacctctacctcctcctccgtcgaggggaggaccagaagaaccacgaccaccccatcagcaggaggagggaggaggaggagctttcccgcgcgttgacagggaggtcaacgtcatcttcggtggacacgtgttgcaggagaacaaaagacaacaaaagctcaacgatcgccagatactggtggcgaccaccggtcctcccgccccgtaccggtggtcggagcacccgatcactttcactcgggcggatcaatggctcaacttcgaccacccaggcaaatacccgctcctcgtcgatccggtgatccgagagagtcgggtgaagaaggtgctagtggacggggggagcagcatcaacgtcaccttcccccggacactccaaggcttgggagttcacctcaaagagctccacgagtcggacactcccttcttcggcatcgtgccgactgaaggggaatacccgctgggccacatctacatgcccgtcaccttcggaactccggagaactacagaaccgagttcctgaggttcgaagtggcgaacttcgactccgggtacaatgccatcatcgggaggccgggattggccaaattcatggccattcctcattacacgtacatgatactgaagatgccaggaccacaaggaatcataactgtgtgcgccgacttccaaggcgccgcagaatgtttccgagtggccatccaagcagccctcaccaccaagccgtcgacgatttcttcaacacaggcgaactctaagcctgaggaggaccttgcagtaccggcaaacgaagctcaggccgcgacctctatgcggccgactgaagaaactaaaaggatcaacctggggttcgctgatgaacgcaagactgccatcatcagctctagcctggacgacaaatag

SEQ ID NO: 158110 - DNA, 2676 bp, Zea mays
  Clone ID: MRT4577_75774C.1
atggcgctttggttcgcatctgtggacagggaagcacagaagtgcgcaccattggcttgtatagcccaaggactcggacccccaggcgaagtgggcgttgtgcgcccggaacgctcggtgaaggccggtgcgccgccgtcgcatccggagagcgcggttgcaacaaacccacagagagagaggacccgatccgcgggccccaaatgtaagcgacacgctagatggtcccctgacgagacgggcccaccagcaaggacgtggtgtccaggtgtgcggacgacgctgcccaatgatcccacaagccagatgcacgccaaaattgggtattacaagaccaaggagaagcaagttgttctttctgttcctccgccctcaaaggagaacggaaagaaggtcgccacgacagcagcaccattctaccccgacgtcctcttcatcgggagagtggagtcgcctaccgtctccgacgacgagccgactgcacccggagaagaaccacctcaacgagaatctcgccgacggaggaaccggcgcaggaacattcgacgacatcacgcggccggagaacgggatccggagcagcctgtctcgcgagacgaggtctcggagataggagaaactccggaagaacacgtcttcagagaacgaaggaactcccgacgacgtgatcgccgccgggctcaggaacaagccgagcaagatgcaaggcaacgccgggagaatccattcttcgggcgcaacctgaatcccgacttcgcccgagctatgaacacgccgagcgaagtcggaggggtactagctcggatagctgatggactccctcggactcccgacgctgagggctaccgacgactattcacccaggcggccaaccatcttctaccgcttgctcacccgccgaacgatctacgacacgccatcaatagtcgccgagacgcacgaagctccatcaatgcctcgcgcgaacggcggcatgagaacgagatccaccaccgggaggagtacgacagggatcatggcattccggctcagagccaggccaccagaactgagtcagcaacggcctcaactggcggtaccacccggggacggtcgatgaaccacaaccactactcccctccccaggacagacatcatccccgacgacaggaggacacgtgcggagtgtctgctcttactccacgccttagggccatccaatggcctcccaacttcaagtcgacgcttcaccgccaacttctagtccctctccgacaaaccggcgcaaccgtgggacctcaaatccatcaagcgccgggggacgagactctccggtcgtacctcaaaaggttccagaccatgagaaatcgtatccccgaggtcacggaggcggccgtgatcgaggacttctacagaggatccaatgactcggctttcgtccgagccatactacagaaggcgccgactacctccgaggagctgttccgggaagccgacctctacatcaccgccgacgagcgggcccaggacctcatcggaggagcaaagcccgcatcggtagcaccacggcgcgacgcgaaccagcaacccgacaaacgatgggagaagaggcctcgcgaagaagtacacgccgccggaccacttgcctctcgcgcccgaggaggacctcgtggaggcgaacgcacgctggacgacatcctcgacgcccagtgcccataccacaaggacatgcgccacactcttcgtaactgtcgggacttcaagcattccgtcggacacggccgacccttccaacctctacctcctcctccgccgaggggaggaccagatgaaccacgacaaccccatcaacaggaggagggaggaggaggagctttcccacgcatcgacagggaggtcaacgtcatctttggcggacatgggtcgcaggagaacaaaagacaacaaaagctcaacgaccgccagatactggtggcgaccaccggtcctcccgccccataccggtggtcggagcacccgatcactttcactcgggaggatcaatggctcaacttcgaccatccaggcaaatacccgctcctcgtcgatccggtgatccgagagagccgggtaaagaaggtgctagtggacggggggagcagcatcaacgtcaccttcccccagacactccaaggcttgggagttcacctcaaagagctccacgagtcggacactcctttcttcggcatcgtgccgacggaaggggaatacccgctgggccacatctacatgccagtcaccttcggaactccggagaactacagaaccgagttcctgaggttcgaagtggcgaacttcgactgcgggtacaatgccatcatcgggaggccgggactggccaaattcatggccatcccccattacacgtacatgatattgaagatgccaggaccgcaaggaatcataactgtgcgcgccgacttccaaggcgccgcagaatgtttccgagtggccatccaagcagccctcaccaccaagtcatcggcggttccttcaacactggcgaactctaagcctgaggaggaccttgcagcaccggcaaaccaagctcaggccgcgacctctatgtggccgactgaagaaaccaagaggatcaacctggggttcgctgatgaacgcaagactgccatcatcagctccagcttggacgacaaatag

SEQ ID NO: 158111 - DNA, 318 bp, Zea mays
  Clone ID: MRT4577_75775C.1
gccggccggtccgggtatgtccctagaaaagcttgctggtcaacccgaggatcacgcacctgacttgaagaaaggcttggagcccattcatgaggtactcaagagctatccttttgtaaccggaaatcaagctggctgggctgatgttgtacttgcagcccatctgaatttcttggaaaaacttaaacctgaattatttcaagcctatgtgttggatgtatttgatgatgatattttattaaattggtggaaacgcgttgaatatattcgtaaataaatatgcttcactcttaaaaaaaaaaaaaaaaaaggccccta

SEQ ID NO: 158112 - DNA, 296 bp, Zea mays
  Clone ID: MRT4577_75776C.1
caaaaaaccatttctatttaataaccagggaaaaattgaactggtttgaaatcacaatggtccctcgggccctgagagaaaaaaaaaggcccaagcgtgacccaaaagcaaatgccaagctaccttgaacagcacgggggttctgttcacctatttttaggcccgggatcccccccttacaaatttgcatccgggccctttacattgggggataattccatagcaatttttggggggctaaagggcctttcaatttttaagggggctcccttttttgggaacatgccgaagctttt

SEQ ID NO: 158113 - DNA, 820 bp, Zea mays
  Clone ID: MRT4577_75777C.1
ccccgcgtccgcccacgcgtccgcccacgcgtccgtagagcaatcccaggccaatctctgcacggacatcagtatctccatcctcggccatcgagccactcgaatcaagatcgccctcgcttgattccaacaacccattggcagtggcaggcaaaaaattcgccttctatatgtgccgcggcctcccaactccagctccagctccagcgcttcaatttcagtcccaggattgcagtcggcagcagcgaggtactacccaagcaccgcccggccgagcgagcgagtccgtgcgtgcgtgcatggcagcagagaggaaggcggcctcccgcccggccgcctgcgggcgaatgcgcggcgccgagggtgccaagccgcggggccgtcaggcaaaggcagcgcgggcaccaccgggccaggggtacttcacggcggggctggcggcgctgttcctttgcctcaccacgctgctcgtgttcctgcctctcgtgctgccgccgctgccgccgccgccgttgctgctgctgctcgtgcccgtgggcctcatggctgtactgcttgcgctggcgctcgtgccgtccgacggccgggccgccgccgccgccgtcgcttcttcatcgtgcgtgtgctgaagacggacgacgcatcgcacgtgtgctagacacgccgagagactgtactgtaaaaatgtggcggtttaacatttgttttgttaatttgatataaggaatagtgatttcctacttctctctctgtgttctgaaaggatctttcagttgttaatcctgaggcagttttactgttttcaaaaaaaaaaaaaaaa

SEQ ID NO: 158114 - DNA, 391 bp, Zea mays
  Clone ID: MRT4577_75778C.1
acgcccactcctccggctcttcttctccaccggcaccagtccaccacctggctgccaccgcgcggccccaaccaaccacaccggagcgcagcaatggcgggcaacggcgccatcgtggagagcgacccgctgaactggggcgcgggggcggcggaggtgagcgggagccacatggactactatgctgagccgggagaacccggggggggggggggtttcatgatgtatgatgatactgataaaaccatggagaaggggaagcataatatcgacatgatgtatttgttgttgtacgtgcactcggggacccgggacatttggggggaggctatatgacaagggttcgttttctttagcgtaggggggggggggaatctaacaaggttttttt

SEQ ID NO: 158115 - DNA, 633 bp, Zea mays
  unsure (1)..(633): unsure at all n locations
  Clone ID: MRT4577_75779C.1
gtcctgctcaattacaacattaattaacacaaacgaacaaggggatcaggaccgtccgtttttatctgttaccgaggctggacacaaacaactcttcaaatctaaaggccaaattacaggtaatccaaaagggggcgggggggcatcnatcgaactctctaaatacttgacacaaaggctagttagcttgacaccatcatctggtcgcacgcctgcagtgcctggtttgcgtagtaccttacgtcgacctcaggggcctcgctgagctcaacgaggcacggtttcacggtcttctggggcgcagattggtccaggatcggtacaagtgactgtagtactttcgcaacattgaacttgatgttgggaaccctgtccttccaagaattaatgacgactggaagcagcttttgacaggtgatctctgcacccatgacaggagctagcaaggagattgcctgagggattatatgctgcattgcccactctggaccaaactcttctgcaaggcgcttcaagttgttagcggcagcatctctgattgaaaagacttgtcttccaaccttgcatgcagagcgcccccagcttgtcatcgaaaaacccacacctaattgactcgccaacaatgggatgtac

SEQ ID NO: 158116 - DNA, 577 bp, Zea mays
  unsure (1)..(577): unsure at all n locations
  Clone ID: MRT4577_7577C.1
cagcgtcctcggncgcgtgggcggncgcgtgggcgggcgcgtgggnaaaaaaaaaaaaaaaaaaaaaaggaagaaaaaaaaaaaaaaaaaaaaaaaaaaaaaaaaaaaaaaaaaaaaaaaaaaaaaaaaaaaaaaaaaaaaaaaaaaaaaaaaaaaaaaaaaaaaaaagggggggctttttttaaaagaaccaaatttgtgggggggggggtttgacaacttatatatttttttttttttgtgccctaaatttaatttaattggccgggcttttaaaaacttgggatttggaaaaaaattggttttaccaaatttattttttttgaaaaaaatccctttttttcaagttggcttattaaaaaaaaggcccgaccgattccctttttcaaaaatttttgaaccttaattggaaaatggaactccctttttaggggcgttttaataacgcggggtgtggtgtttactttaagggtgacctttaattttgttaggtcctttgcccccgctcttttggtttatttcctttctttttttgccaggttagcggttttttcccgtaaatttttaaatagggggt

SEQ ID NO: 158117 - DNA, 859 bp, Zea mays
  Clone ID: MRT4577_75780C.1
cctcgaggccggccgggccggggctaggtcagttcagatcctgctcctcttctccctccccctccttccacagctagatctgcgcccctcaccccgctcgctcgaccacctccgatcgccacgcccgcaccctcaataccgccgccgctgctaccgtcgtcggtctggagctcaggccttcttcattcgcgcgttcaccaatccttgatatacctgatggctatgattgatgagcctctgtacccaattgctgtactgattgatgagcttaagaatgaggacatccagttgcgtctaaactccattagaagactttcgacaattgcacgggctcttggagaagaaagaaccaggaaggagctgattccctttcttagtgaaaacaatgacgatgaagatgaggtgcttcttgcaatggctgaggaattgggtgtgttcattccttatgttgggggtgtagaacatgctcatgttttgcttccccctttggaaacattgtgtacagtagaagaaacttgtgtccgtgataaggcagttgaatctctgtgccgtattggtgcacaaatgaaggaaactgacatagtcgactggttcattccagtagtaaagaggctagcagctggtgagtggtttacagctcgtgtatcatcctgtggtcttttccacatagcctatccaagtgcattggaccaattgaaaacagaattaaggactatctatggtcagttatgtcaggatgacatgcctatggtcagaagagctgctgcatcaaatcttggaaaagttgcagccacagttgaacagaatcatttgaagacagaaataatgtcaatatttgatgacttaaccccagatgatc

SEQ ID NO: 158118 - DNA, 2348 bp, Zea mays
  Clone ID: MRT4577_75781C.1
cggccgcgtggggccacgtagagtcgacccgccgccccgttgtgagcccccgttgtagccccggtcccacctcgcacgccctcaggcctcgacatccactgccttccgttcgtctcaatcccccgtcgcattccgcaacacctgctcctcgcccccttctctcagaggcgacgcctcgggcgctcctaccctgccccgtctccggtccccccgcgccgtcggcgaggcagccggccgtcacagaagcccgatccggaccccgcgagaaatccttgttatacctgatggctatgattgatgagcctctttatccaattgctgtactgattgacgagctcaagaatgaagacatccagttgcgtctaaactccattagaagactttcaacaattgcacgggctcttggagaagaaagaaccaggaaggagctgattccttttcttagtgaaaacaacgatgatgaagacgaggtgcttcttgcaatggctgaggaattgggtgtgttcattccgtatgttggtggtgtagaacatgctcatgttttgctcccacctttggagacattgtgtacagtggaggaaacttgtgtccgtgataaagcagttgaatctctgtgccgtattggtgcacaaatgaaggaaactgacattgtcgactggttcattccagtagtaaagaggctagcagctggagagtggtttacagctcgcgtatcgtcctgtggtcttttccacatagcctatccaagtgcgtcggaccaattgaaaacagaattgaggactatctatggtcagctatgtcaggatgacatgcctatggtcagaagagcagcagcatcaaatcttggaaagtttgcagctacagttgaacagaatcatttgaagacagaaataatgtcaatatttgatgatttaacccaagatgatcaagattcagtgcgtctgttggctgttgaaggctgtgctgcccttggtaaattgttggaaccacaagattgcgtagcacacattcttccagtcattgtcaatttctcccaggataaatcatggcgtgttcgttatatggtcgccaatcaattatatgagctctgtgaggctgttggccctgagcctacaagagctgatttggtgcctgcctatgttcgcctccttcgtgataatgaggctgaagtgcggatagcagctgctggaaaagtaactaagttttgccgcatattaaatcctcagctctcagtccaacatattcttccatgcgttaaggaattgtcatcagattcatcccagcatgttcgttcagctttagcctcagtgattatgggaatggctcctgtactgggaaaggatgctaccattgaacagcttgttccaattttcctctctttgttgaaagacgaatttcctgatgttcgacttaacataatcagcaaacttgatcaagttaatcaggttattggaattgacttgctatctcaatcactgctaccagcaattgtagaacttgcagaggataggcactggagagtccggcttgcaataattgagtacatcccattgttggcgagtcaattaggtgttgggtttttcgatgacaagctgggggcgctctgcatgcaatggttggaagacaaggtcttttcaatcagagatgctgccgctaacaacttgaagcgccttgcagaagagtttggtccagagtgggcaatgcagcatataatccctcaggtgctggagaagatcaacaacccacactatttataccgcatgacgattctgcaggcaatctccttgctagctcctgtcatgggtgcagagatcacctgtcaaaagctgcttccagtcgtcattaattcttcgaaggacagggttcccaacatcaagttcaatgttgcgaaagtactacagtcacttgtaccgatcctcgaccaatctgtggtggagaagaccgtgaaaccgtgcctcgttgagctcagcgaggaccctgacgtcgacgtaaggtactacgcaaaccaggcactgcaggcgtgcgaccagatgatggtgtcaagctaactagcctttgtgtcaagtatttagagagttcgatcgatgctccatagtccaattttggattacctgtaatttggcctttagatttgaagagttgtttgtgtccagcctcggtaacagataaaaacggacggtcctgatccccttgttcgtttgtgttaattaatgttgtaattgagcaggacacaacgcgttgctgtgtgtgtttgcgtttacatggcagattgaactttacggtttgcttgcgctgtgcgaaaaaaaaaaaaaaaaaaaaaaaaaaaaaaaactcgagagtcttctaga

SEQ ID NO: 158119 - DNA, 1000 bp, Zea mays
  Clone ID: MRT4577_75782C.1
gccctgcgccctaacacttacaccacacgagcccacggccgcacagatgaccggccgccggccacccacgctggcgaggatctagttcctgcgagactgacttcatcgaatcgatgaggcggcagacggcgggcgacttcccgcggcgttgagaagctgcggtctaccttcttggtcggtcggccgtcggcgtcggagtctcggacgccggaacaccaacggcggcgtccgagagctggtcctggattatacttcgtgcaacaaccatcgcggcatagcccgccgtatgcgcggcccgaagatgctgacatccatgctctcaaaatcaacagcctcgccgtctccggcacgcctctatcacctcctccccgtctcttccctccaaacgaccagcgatctccatcctgcacccaatggcgcatctcctccacctccacctcctgcccaaatccccgccttcctctccccgtgcccatctccgtacaaccataacaattacgccaccatcctccgatcctgcgtcctctccagagccgttcgtcccggtcggcagctccacgccaggctcctcgtgtcgggaagtggcctcgatgcggtcctcgccaccaggcttgttgacctctacgcgtcttgcggccatgtgtctcttgcccgtcgcttgttcgacgaaatgcccaaccaggggaacgtctttctgtggaacgtgctcatccgtgcctatgcacgcgacgggccatgtgaagcggcaatagaactgtaccgcgcgatgctggcatatggtagcatgaaaccagacaacttcacctatccgccggttctcaaggcgtgcgctgcactcctggacctgggcgctggccgggaggtgcacgatcgtgtcatgcggacgagttgggccactgatgtttttgtatgtgcaggcctcatcgacatgtacgccaagtgtggttgcgtggatgagctttgggcggtgtttaatggacacacaatcagggatgctgcg

SEQ ID NO: 158120 - DNA, 984 bp, Zea mays
  Clone ID: MRT4577_75783C.1
ggcattgactttttatcccaaacactgctaccagccattgtagaacttgcagaggataggcactggagagtccggcttgcaataattgagtacatcccattgctggcgagtcagttaggtgttgggttttttgatgacaagctgggggcactctgcatgcaatggttggaagataaggtcttctcaatcagagatgctgccgccaacaacttgaagcgccttgcggaagagttcggtccagagtgggcaatgcagcatataattcctcaggtgctggagaagatcaacaatccgcactatttgtaccgcatgacgattctgcaggctatctccttgctagctcccgtcatgggtgcagagatcacttgtcaaaagctgcttccagtcgtcattaattcttcaaaggacagggttcctaacatcaagttcaacgttgcaaaagtactaaagtcacttgtaccgatcctcgatcaatctgtgagttcatccggttattttgcaagttgttaccgttttgaaaagcgctgcgtttgtatttccgcgttattggggaatatcgtgaatgcttacttcgcaggtcgtggagaagaccgtgaaaccatgccttgttgagctcagcgaggaccctgacgtcgatgtgaggtactacgcgaaccaggcgctgcaggcgtgcgatcaaatgatggtgtcgagctaactagccgtgtgcccgagtacttagagttcgatgcctcatagtccaattttggattacctgtaatttgttgggccttttagattgaagagttttccgtctagcctcggtggacagatcgacgctgcccatgctgataaatggacggtcctgatccattgttcgttgtgttattaatgttgtataattgagcaggccccaacacgtacgttactctctgtgtctgtgtgtgtttgcatggcattgtctcgcaggtagttgagcaaccacgtaataattctttccagcgc

SEQ ID NO: 158121 - DNA, 204 bp, Zea mays
  Clone ID: MRT4577_75784C.1
gggaataaataatcgagacaagtcttatcccttccctagactctaaacatatgggagctagccgccaacactcaatctgtttagagtctagggaaggaataaataatcgagacaagtcttatccctgtatttttgtagagaggtatttgaaacaagaagttcatcaaatacaaggggaaaatgtcatggcgacaaatatgttag

SEQ ID NO: 158122 - DNA, 1499 bp, Zea mays
  Clone ID: MRT4577_75785C.1
ttatattgtcgccaatcaattatatgagctctgtgaggctgttggccctgagcctacaaggtattatttgtcctagctgaattcaacctattattgcagggaaaccatgtgtctgaattcttgagtatcatgtaaacccatagccttttcaatggattaactgtaaatctctgcttttgggattagagctgatttggtgcctgcctatgttcgcctccttcgtgataatgaggctgaagtgcggatagcagctgctggaaaagtaactaagttttgccgcatattaaatcctcagctctcagtccaacatattcttccatgcgttaaggaattgtcatcagattcatcccagcatgttcgttcagctttagcctcagtgattatgggaatggctcctgtactgggaaaggatgctaccattgaacagcttgttccaattttcctctctttgttgaaagacgaatttcctgatgttcgacttaacataatcagcaaacttgatcaagttaatcaggttattggaattgacttgctatctcaatcactgctaccagcaattgtagaacttgcagaggataggcactggagagtccggcttgcaataattgagtacatcccattgttggcgagtcaattaggtgttgggtttttcgatgacaagctgggggcgctctgcatgcaatggttggaagacaaggtcttttcaatcagagatgctgccgctaacaacttgaagcgccttgcagaagagtttggtccagagtgggcaatgcagcatataatccctcaggtgctggagaagatcaacaacccacactatttataccgcatgacgattctgcaggcaatctccttgctagctcctgtcatgggtgcagaaatcacctgtcaaaagctgcttccagtcgtcattaattcttcgaaggacagggttcccaacatcaagttcaatgttgcgaaagtactacagtcacttgtaccgatcctcgaccaatctgtgagttcctcaagctattccgcccacatgttaccaacattttcgaagaaggcggtacatctgtatttttcatggtattggggaatatcatcagtgcttactccgcaggtggtggagaagaccgtgaaaccgtgcctcgttgagctcagcgaggaccctgacgtcgacgtaaggtactatgcaaaccaggcactgcaggcgtgcgaccagatgatggtgtcaagctaactagcctttgtgtcaagtatttagagagttcgatcgatgctccatagtccaattttggattacctgtaatttggcctttagatttgaagagttgtttgtgtctagcctcggtaacagataaaaacggacggtcctgatccccttgttcgtttgtgttaattaatgttgtaattgagcaggacacaacgcgttgctgtgtgtgtttgcgtttacatggcagattgaactttaaaaaaaaaaaaaaaaaaagaaaaaaaaaaaaaaaaaagcggcc

SEQ ID NO: 158123 - DNA, 2395 bp, Zea mays
  Clone ID: MRT4577_75786C.1
ccggccggggcgaggtcagttcagatcctgctcctcttctccctccccctccttccacagctagatctgcgcccctcaccccgctcgctcgaccacctccgatcgccacgcccgcaccctcaataccgccgccgctgctaccgtcgtcggtctggagcgcaggccttcttcattcgcgcgttcacgtgtggttcccctcctagatctgggctgttgtttggtcgattgcgctggttttgtaatgattgcgacgccctagtctgagttctcttctcgcggatcggaggctgtgtggcgttggttgctagcaatccttgatatacctgatggctatgattgatgagcctctgtacccaattgctgtactgattgatgagcttaagaatgaggacatccagttgcgtctaaactccattagaagactttcgacaattgcacgggctcttggagaagaaagaaccaggaaggagctgattccctttcttagtgaaaacaatgacgatgaagatgaggtgcttcttgcaatggctgaggaattgggtgtgttcattccttatgttgggggtgtagaacatgctcatgttttgcttccccctttggaaacattgtgtacagtagaagaaacttgtgtccgtgataaggcagttgaatctctgtgccgtattggtgcacaaatgaaggaaactgacatagtcgactggttcattccagtagtaaagaggctagcagctggtgagtggtttacagctcgtgtatcatcctgtggtcttttccacatagcctatccaagtgcattggaccaattgaaaacagaattaaggactatctatggtcagttatgtcaggatgacatgcctatggtcagaagagctgctgcatcaaatcttggaaagtttgcagccacagttgaacagaatcatttgaagacagaaataatgtcaatatttgatgacttaacccaagatgatcaagattcagtgcgtttgttggctgttgaaggttgtgctgctcttggtaaattgttggagccacaagattgtgtagctcacattcttccagtcattgtcaatttctcccaggataaatcatggcgtgttcgttatatggtcgccaatcagttatatgagctctgtgaggctgttggccctgagcccacaagagctgatttggtgcctgcatatgttcgtctccttcgcgataatgaggctgaagtgcgaatagcggctgctggaaaagtaactaagttctgccgcatattaaatccacagctttcaatccaacatattcttccgtgcgttaaggaattgtcatcagattcatcccagcatgttcgttcagctttagcctcagtcattatgggaatggctcctgtactgggaaaggatgctaccatggaacagcttcttccaatttttctctctttgctgaaggatgaatttccagatgttcggcttaacataatcagcaagcttgatcaggttaatcaggttattggcattgactttttatcccaaacactgctaccagccattgtagaacttgcagaggataggcactggagagtccggcttgcaataattgagtacatcccattgctggcgagtcagttaggtgttgggttttttgatgacaagctgggggcactctgcatgcaatggttggaagataaggtcttctcaatcagagatgctgccgccaacaacttgaagcgccttgcggaagagttcggtccagagtgggcaatgcagcatataattcctcaggtgctggagaagatcaacaatccgcactatttgtaccgcatgacgattctgcaggctatctccttgctagctcccgtcatgggtgcagagatcacttgtcaaaagctgcttccagtcgtcattaattcttcaaaggacagggttcctaacatcaagttcaacgttgcaaaagtactaaagtcacttgtaccgatcctcgatcaatctgtcgtggagaagaccgtgaaaccatgccttgttgagctcagcgaggaccctgacgtcgatgtgaggtactacgcgaaccaggcgctgcaggcgtgcgatcaaatgatggtgtcgagctaactagccgtgtgcccgagtacttagagttcgatgcctcatagtccaattttggattacctgtaatttgttgggccttttagattgaagagttttccgtctagcctcggtggacagatcgacgctgcccatgctgataaatggacggtcctgatccattgttcgttgtgttattaatgttgtataattgagcaggacacaacacgtacgttaaaaaaaaaaaaaaaccaaaaaaaaaaaaaaaaaaaaaaaaaaaaaaaaaaaaaaaaaaaaaaaaaaaaaaaaaaaaaaaaaaaaaaaaagggggg

SEQ ID NO: 158124 - DNA, 497 bp, Zea mays
  unsure (1)..(497): unsure at all n locations
  Clone ID: MRT4577_75787C.1
gtgtttttttcattacccatgtagacggaggaccgttttgtataacggacgacgcgatacaaantnnncgaaccacccggcnggacccaggcggggggggggaccaagaaaacacaacccccctttcacccaccaatgggggctgacggatttacaaggggggggaaagtcgaccacaaaaggaaaaaaaagggggggcttgcggggggatgctcctaatcgggggggctagttgggtgggggcaattttccatttaaacacccaaggattgattttaaaaacaacttgcaccaaaaccaccagggggggggaaagcactcctgggggggggcgaccaatcaaaaaaacaaaacaggcgcgcacccccgaggggttatatacagagcgaaaaaaggatgccccccccggtaaagggccgcccttctgggggccttcctcggccttggggggggacaaaaagaggcccctcaaaatattttttaaaacgccccaccct

SEQ ID NO: 158125 - DNA, 988 bp, Zea mays
  unsure (1)..(988): unsure at all n locations
  Clone ID: MRT4577_75788C.1
tccggcggccgttcctcgccgggnaattcttcgaccctgcgctcgaacgtcgtcccgcctcttcgagctcgtgttcaagcgccttgccctgggcgacaacgccctgccggaggacggcatcggcgccatcgcggatcagctcgcggctcgcctgccagcgggctccgtccgcctcaacacccgcgccgtcggcatcgaccagtccggtgtgacgctggataccggcgaaaccgtcgccggtggactcggcgtcatcgtcgctgtcgagcagcctcaggccgagaagcttctgccgcagctaccagctcaaggaaaggataagaaatcggagaggagcaccgtgtgcctctacttctccaccgaccgggcgccggtccaggaccccatcctgctgctcaacgggtcgggcaaggggatcgtgaacaacatgttcttcgtcaccaacgtggcgccgtcgtacgcaccggcgggtaaagttttggtgtccgtgtccctcgttggctcgttcgccgacagggaggacgccgatctggccgacgaagtggtccgggagcttggcgggtggttcggcgtcggagaggtcgcgtcgtggacacacttgtcgacgtatcgcatcgggttcgcgcagccggaccagacgccgcccacgacaccggcggggagggacccgagagttggtgacggattgtacgtctgcggtgaccactggtgctccgccacgttcgatggcgcgctggtgtccggaaggagggcggccgaggctctggccaaggacaggggactgtgaactccctatcatggggctgtgtttgagttggtccgtgctgcactgcagagtgcagactgcaaagaaaatccatcccgcatgacgaacgagtattttttttgagagagacaagtacatgtacatctccatctccatcaacgactaaaattcagcttgtaatttcctctgtaaatctgatatatatttactcattgaattcct

SEQ ID NO: 158126 - DNA, 251 bp, Zea mays
  Clone ID: MRT4577_75789C.1
ctatccctcctcggctcctcgccctttcccctcttgcccgagtcgctagggggcctggccctgcccctgacccgcctcctcccgcggaccacttcctccaccttcgcttccatagcaggctagcagccgaacagaggccaacccttccgccgttggagagaaagggagggcgcggcgaatagacgcccgggcctctgcccacctgtcgggaggccccacccgcttcccatgttgtgtagtccccccgcata

SEQ ID NO: 158127 - DNA, 278 bp, Zea mays
  Clone ID: MRT4577_7578C.1
ttcggctccagggaataaagagggagccttattttggtgcaggggtgaatcgggcggcaatcctttcggcgggattgaatggccaatggggtaaacctttccccagggaggagcaggaagggtttacttgtcagggcttcgcgctaaacataaattattccgggaggcacttccccctggttcaaaattatagggattattttttgaaacccgcttatggtaccaccttttaaacttcttaaaattgtggtgcccctaaaaaaaaaaaaaaaatatta

SEQ ID NO: 158128 - DNA, 535 bp, Zea mays
  Clone ID: MRT4577_75790C.1
tgacgctatactatagctgagccgtgacgtgcactcctcccgtacgctagatcgctatactagtcaggagcgccctttttttttttttttttttttttttttttttttttttttttttttttttttactgggtttttttttttttttttggaacaaattccagcagtcaacaataatttaagggaattaattggggggttcggttaacaatccactgtttccaaaaaaatcacgaatcctttttttgcccccatttccatttgtccaactttcgcatcgtcaaaaagtgctgcacttggccggagcgaacaacaggtttttctcccggacgttttaaaggatgggcatgttctgctgctgggagttcccaaacgtgctcattgccccctccgtttggttccgaatggccaggccccacacgccggaccccgaaatcatgtatctttcccgggggagcaccattttggccccctcaaaaggggagcgtaatgcttggaaccccggccggggggccccactttggggccggcagccc

SEQ ID NO: 158129 - DNA, 424 bp, Zea mays
  Clone ID: MRT4577_75791C.1
ggaacaaaactttttttttttcatttaaattgttcattcagggaattgctaaaactgaccctgccacccatggggatgcgggacacattattactcaatcatcccccctaaaagactcaactagctagctagccaggggttttactaaaaaaaaaaattttttaaagggggaacaccccccgcaacaacgtaagggcatggaatcggttttttaaagcccaaaattcccctaagttgttgccctttttgcccccccaaaaaccccgaaacctggccctttttgggtttttttttcaaaatggactggaaaaccaacccaaaaaacccctggtaccggggctggggctccacctgcctaaactgttggaaaaacttttgcccaaacaactggcacttaagcaaacaataaggcgtccccctcggg

SEQ ID NO: 158130 - DNA, 2562 bp, Zea mays
  Clone ID: MRT4577_75792C.1
atggccgtcaccttctacagcaagatcaccctgcgtcccggatccgtattctgcttcggaacaatctcatctgtagcggatgaagaaggaattttgcaccgtatcgcggatctgccggaaaagaagtctcccccaacaaactccgaaaataccggagaagcacaacctccaactttccggatgaagatcgtctccggaaagtcagggaccgagggcccgttgacccggaaaactccactgtctacttctccgacaaaagaatggacgtggatcgcgaggaagaaggagaccagggaaaagcaagtcgttctttccattcctccgacctcaaaggagaacggaaagaaggtcgccacgacaacagcaccattctaccccgacgtcctcttcattgggagagtggagtcgcccgtcgtctccgacgacgaaccaaccgcgcctggagaagaaccgcctcaacgagagtcccgacgacggagaaaccggcgcaggaacgtccgacgacatcacgcggccggagagcggaatccggagcagcctgtttcgcgagacgaggcggccaaccatcttctaccgcttgctcatccgccgaacgatctacgacacgccatcaacagtcgccgggacgcgcgaagctccatcaatgcttcgcgcgaacggcggcatgagaacgagattcgccgtcgagaggagtacgacagggatcatggcatcccgactcagagccaggccaccaggacggagtcggccacggactcaactggcggtaccactcggggacgatcgaggaaccacaatcacaactcccctccccgggacagacatcgtccccggcgacaggaggacacgtgcggagtgtccgctcttactccgcgccttagggccatccaatggcctcccaacttcaaggtatccaatgttgacaagtatgaacctaagcaggatccagggggttggctagccgtctacaccaccgctgctcgagctgccggggcatccgaggacgttatgaccgcgtatttgcccatcgtccttgggcaagacgcgctgcaatggctgcgacatctgccccgacattgcatcgacgtctggggcgacttcagtcgacgcttcaccaccaacttccagtccctctccgacaagccggcgcaaccgtgggacctcaaatccatcaagcgccgtggggacgagactctccggtcgtacctcaaaaggtttcaaaccatgagaaatcgtatccccgaggtcacggaggcggccgtgatcgaggacttctacagaggatccaacgacttggctttcgtccgagccatactacagaaggcgcagactacctccgaggagctgttccgggaagccgacctctacatcaccgccgacgagcgagcccaggacctcatcggaggagcaaagcccgcaccggcagcaccacgacgcgacacgaaccagccacccgacaaacgctgggagaagaggcctcgcgaagaagtgcacgccgccggaccacctgcctcccgcgcccgcggtggacctcgcggaggcgaacgcacactggacgacatcctcgacgcccaatgcccgtaccacaaggacatgtgccatactcttcgcaactgccgggacttcaagcattccgtcggacacggccgacccttccaacctcttcctcctcctccgccgaggggaggaccagatgaaccacaacgacctcatcggcaggaggagggaggaggaggagctttcccacgcgtcgacagggaggtcaacgtcattttcggcggacatgggtcgcaggagagcaagagacagcaaaagctcaacgaccgccagatactggtggcgaccaccggtcctcccgccccataccggtggtcagaacacccgatcactttcactcgggatgatcaatggctcaactttgaccatcctgtcaaatacccgctcctcgtcgatccggtgatccgagagggccgggtgaagaaggtgctagtggacggggggagcagcatcaacattaccttcccccggacactccaaggcttgggagctcacctcaaagagctccacaagtcggacactcccttcttcggcatcgtgccgacggaaggggagtacccgctgggccacatctacaagccggtcacctttggaactccggagaactacagaaccgagttcctgaggtttgaagtggcgaattttgactgcggatacaacgccatcatcggaaggccgggactggccaagttcatggccatcccgcattatacgtacatgatactgaagatgccaggaccgcaagggatcataactgtgcacgccgacttccaaggcgccgcagaatgcttccgggtggccatccaagcagccctcacttccaagccgtcgacagttccttctacgctggcgaactctaagcctggggaagacctcgcggtactggctaacgaaactcaggccgcgacctctatgcggccgactgaggaaaccaagcgaatcaacctggggttcactgatgagcgcaagacggccatcatcagctccagcttggatgacaaatag

SEQ ID NO: 158131 - DNA, 1647 bp, Zea mays
  Clone ID: MRT4577_75793C.1
ggtaccctcgaggccggccgggctcgggctctcggccttttcttttgctcatgacggcctcggtccaccacctcctcttctcgcctgtgccttttgcccctgtgctcgccacacgcggcgcaaccgcccacccacccagccaggagaagaagatctccgtcgcctgctcttcgcttcgcttcgaatcggaggtgtcgagtagccagtggtgtccctatggattcagcttttagaagagctctcaatgagcctatgtgcttggaagaaaccgtcgtccaacaaggaattgaaaggtgcccattcctgaggaacatcaatgagcctacaagtttttccttctcgtccgtcaacttccctattcccgcaagaggagccaagggaccgattttcgaagatgggcctaattttgacatggcatttcgagttttccatggtagagatggggttgttccactttcagaagggtcattggcccagattgagaagccactgccaaagcccaatcctgagttcaacccattggcagccaaagcagcaaccatcagtctatctgcatttggagggtttttcagctttggtgacttctcaaataagcgcaataagaaaaactccaacaagaagaaccccaacaacctcccccagaataaaggccagcctaacaataacaaccatgaagcactgagcaacgagtggctggagatgggccaatgtccacttgcgaaatcttatagggcattaagtggaattgtgccacttgtcgcaaagatgatgacacccccagctggtatgaaacttaagtgcccacctgccgtggttgctgcccgcgcagcactatcccgcacagcctttgctaaggggcttcgccctcagcccctgccaacaaaaatactggtgattgcattgcttggtatggcagcaaatgttcctctgggcatctggagggagcacacacagaagttttcattgcagtggtttgccgcagtacatgctgcagtgccgttcatagggatgctcaggaaatctgtgctgatgcctaagacagccatggcccttactatagccgcctcgatattgggtcagacaatcgggtcaagagctgaacgtatcagactgaagagggccgcggcagcaaaattagcaagagagagccatggtgacgctgctgactacatcaaagcaccaatgagtctgaaaacagggaaccacactgttcagttttgggatccgctttccctcagagctgaaagcacagtggctgcaggtaccacagcagttcttgtccctgccatttctgctttcaactgatgacaggaatggattcattacgattgtaccagcatcgctggttggtgtattcttttttttctcctattctaaataatctgattgttgtatccattactgtacttttgagcttaagaaagaaatacttcacggcaaaaaaaaaaaaaaaatttggtggccacatgacagcgaataaattagagaacacgttgagctgagaactttttactctcctttgagatctgtctctggaaacacggatttccagccaatcgtcaatcgagcagtcacaattgcatgccatactgactttacagttattcgctgtcatgtagccaccaaaacaggatgaagagtttgccg

SEQ ID NO: 158132 - DNA, 2802 bp, Zea mays
  Clone ID: MRT4577_75794C.1
atgaagaggaaccttcggccatctcatacaaacaacttcagccgaaagccgcttcttcctacaagaccttcagcgacgaagcatagtcccaacaacgtcctcttcattgggagagcggagtcacccaccgtctccgacgacgagccgaccgcacccggagaagaaccgcctcaacgagaatcctgccgacggaggaaccggcgcaggaacattcgacgacaccacgcggccggagaacgggatccggagcaacctgtctcgcgagacgaggtctcggagataggagaaactccggaagaacacgtcttcagagaacgaagaaactcccgacgacgtgatcgccgacgggctcaggaacaagccgagcaagacgcaaggcaacgccgggagaatccattcttcgggcgcaacctgaaccctgacttcgcccgagccatgaacacgccgagcgaagtcggaggagtactagctcgaatagccgatggactccctcggactcctgacgccgagggctaccgacgactgttcacccaggcggccaaccatcttctaccgcttgctcacccgccgaacgatctacgacatgccatcaacagtcgccgagacgcgcgaagctccatcaatgcttcgcgtgaacagcggcatgagaacgagatccgccgccgggaggagtacgacagggatcatggcatcccagctcggagccaggccaccagaactgagtcggcaacgacctcaactggcggtaccacccggggacagtcgaggaaccacaacaattactcccctccccgggacagacatcatccccgacgacaggaggacacatgcggagtgtctgctcttactccgcgccttagggccatccaatggcctcccaacttcaaggtatccaatgtcgacaaatatgaacctaagcaggatccagggggttggctagccgtctacaccatcgctgctcgagctgccggggcgtccgaagacgtgatgaccgcgtacttacccattgtccttgggcaagacgcgctgcaatggctgcgacatctaccccgacactgcatcgacaactggggggacttcagtcgacgcttcaccgccaatttccagtccctctccgataaaccggcgcaaccatgggacctcaaatccatcaagcgccggggggacgaaactctccggtcgtacctcaaaaggttccaaaccatgagaaatcgtatctccgaggtcacggaggcggccgtgatcgaggacttctacagaggatccaatgactcggccttcgtccgagccatactacagaaggcgccgactacctccgaggagctgttccgggaagccgacctctacatcaccgctgacgagcgggcccaggacctcgtcggagggtcaaagcccgcgccggcagcaccacgacgcgacgcgaaccagcaacccgacaaacgatgggagaagaggccttgcgaagaggtacacgccgccggaccacctgcctctcgcgcccgaggaggacctcgtggaggcgagcgcacgctggacgacatcctcgacgcccagtgcccgtaccacaaagacatgtgccacactcttcgtaactgccgggacttcaagcactccgtcgggcacggccgacccttccaacctctacctcctcctccaccgaggggaggaccagatgaaccacgacaaccccatcagcaggaggagggaggaggaggagctttcccgcgcgttgacagggaggtcaacgtcattttcggtggacacgggtcgcaggagaacaaaaggcaacaaaagctcaacgaccgccagatactggtagcgaccaccggtcctcccgccccataccggtggtcggagcacccgatcaccttcactcgggaagatcaatggctcaacttcgaccatccagacaaatacccgctcctcgtcgatccggtgatccgagagagccgggtgaagaaggtgctagtggacggggggagcagcatcaacgtcaccttcccccggacactacaaggcttgggagttcacctcaaagagctccacgtgtcagacactcctttcttcggcatcgtgccgacggaaggggaatacccgctgggccacatctacatgccggtcaccttcggaactccggagaactacagaaccgagttcctgaggttcgaagtggcgaacttcgactgcgggtacaacgccatcatcgggaggccgggattggccaaattcatggccattccacattccacatacatgatactgaagatgccaggaccgcaaggaatcataactgtgcgcgctgtaacacccctggtgttactataattccgagtggccatccaagcggccctcaccaccaaactgtcggcgacttcttcagcgcaggcgaactctaagcctgaggaagaccttacaacaccggcgaacgaagctcaagccgcgacctctatgcggccgactgaagaaactaaaggatcaacctggggtttgctgatgaacgcaagactgccatcatcagctctagcctggacgataaataggaaggcgcgctcgtccggtttctgcaagacaaccgagacgtattcgcatggcaacctgcggatatgccgggagtcccgagagaactggccgagcacaaactaaaggtctacccccaggcaaggccgatccggcaaaaaactacgtcgcttcatgcccgacaaaagagaggccattcgcgctgagttggctcgcttggtcacggctgggtttattagagaggtgttacatcccgcccacgcgtccgctagttctagatcgcga

SEQ ID NO: 158133 - DNA, 740 bp, Zea mays
  Clone ID: MRT4577_75795C.1
ggggatttgttatgacacatgatgataggagacagctgttgttctgatttgttatgacgcattgcatataatttctttgctcaaattgctctctcaacatttccacacttgcaggtgtcgagtagccagtggtgtccctatggattcagcttttagaagagctctcaatgagcctatgtgcttggaagaaaccgtcgtccaacaaggaattgaaaggtgcccattcctgaggaacatcaatgagcctacaagtttttccttctcgtccgtcaacttccctattcccgtatgccctttacttcctgttcctctttacattatcacaccatccatttcttaagatcactggtgttctggaacgatcgctgaattctattgtttgctgcttgtgaaggcaagaggagccaagggaccgattttcgaagatgggcctaattttgacatggcatttcgagttttccatggtagagatgggggttgttccactttcagaagggtcattggcccagattgagaagccactgccaaagcccaatcctgagttcaacccattggcagccaaagcagcaaccatcagtctatctgcatttggaggggtttttcagcttttggtgacttctcaaataagcgcaataagaaaaactccaacaagaagaaccccaacaacctcccccaggtaaattgagttaattatactttctcaatatttcttgtctccagtgtcacaatgttccagtact

SEQ ID NO: 158134 - DNA, 2751 bp, Zea mays
  Clone ID: MRT4577_75796C.1
atggccgtcaccttctacagcaagatcaccatgcgtcctggatccgtattctgcttcgggacaatctcatctgtagcggatgaagagggaactctacaccgcattgcggatccgccggaaaagaagtctcctccaacaaactccgaaaatgtcggagaagcgccacctccagctctccgaaaaaagatcatctccgaaaagtcgggggccgagggctcgctgacccggaagactcggctgtctacttccccgacaaaagaatggacacggatcgcaaggaagaaggaaaccggggaaaagcaagtcgttctttccgttcctccggcctcaaaggagaacggaaagaaagtcgccacgacagcagcaccattctaccccgacgtcctcttcatcgggagagtggagtcgcccaccgtctccgacgacgaaccgaccgcgcccggagaagaaccgcctcaacgagaatcccgccgacggaggaaccggcgcaggaacgttcgacgacatcacgtggccggagagcgggatccggagcagcctgtctcgcgagacgaggtctcggagataggggaaactccggaagaacgcgcttacagagaacgaaggaactcccgacgacgtgatcgctggcgagctcaggaacaggccgagcaagacgcaaggcaacgccgggagaatccattcttcgggcgcaacctgaatcccgacttcgcccgagctatgaacacgccgagtgaagtcggaggggtactggctcggatagctgacggacttcctcggactcccgacgccgagggctaccgacgtctgttcacccaggcggccaaccatcttctaccgctcgctcaccctccaaacgacctacgacacgccatcaacagtcgccgagacgcgcgaagctccatcaatgcttcgcgcgaacggcggcatgagaacgagattcgccgttgggaggagtacgaccgggatcatggcatcccgactcagagccaggccaccaggactgagtcggcaacggcctcaactggcggtaccacccggggacggtcgaggaaccacaatcacaactcccctccctgggacagacatcgtccccgacgacaggaggacacgtgcggagtgtccgctcttaccccacgccttagggccatccaatggcctcccaacttcaaggtatccaatgtcgacaaatatgaacctaagcaggatccagggggttggctagccgtctacaccaccgctgctcgagctgccggggcatctgaggacgttatgaccgcgtatttgcccatcgtccttgggcaagatgcgctacagtggctacgacatctaccccgacactgcatcgacgactgggaagacttcagtcgacgtttcaccgccaacttccagtccctctccgacaagccagcgcaaccgtgggacctcaaatccatcaagcgccggggggacgaagctctccggtcgtacctcaaaaggttccagaccatgagaaatcgtatccccgagtgcccgtaccacaaggacatgcgccacactcttcgtaactgccgggacttcaagcactccgtcgggcacggccgacccttccaacctctacctcctcctccgccgaggggaggaccagatgaaccacgacaaccccatcagcaggaggagggaggaggaggagctttcccgcgcgtcgacagggaggtcaacgtcatcttcggcgggcatgggtcgcaggagaacaaaagacaacaaaagctcaacgaccgccagatactggtggcgaccaccggtcctcccgccccataccggtggtcaaaacacccgatcaccttcactcgggaggatcaatggctcaacttcgaccatccgggcaaatacccgctcctcgtcgatccggtgatccgagagagccgggtgaagaaggtgctagtggacggggggagcagcatcaacgtcaccttcccccggacactccaaggcttgggggctcacctcaaagagctccacaagtcggacactcctttcttcggcatcatgccgacagagggggaatacccgctgggccacatctacatgctggtaaccttcggaactccggagaactacagaaccgagttcctgaggtttgaagtggcgaacttcgactgcgggtacaacgccatcatcggaaggccgggattggccaagttcatggccatccctcattacacgtatatgatactgaagatgccaggaccgcaaggaatcataactgtgcgcgcccacttccaaggcgctgcagagtgtttccgagtggccatacaagcagccctcaccaccaagccgtcggcggtttcttcgacactggcgaactctaagcctgaagaggaccttgcagtaccggcaaacgaagctcaggtcgcgacttctatgcggccgactgaagaaaccaagagaatcaacttggggttcgctgatgaacgcaagactgccatcatcagctccagcttggacgacaaataggaaagcgcgctcgtccagttcctgcaagataaccgagacatattcgcatggcaacctgcggatatgccgggagtcccaagagaactggccgagcacaaactgaaagtctatccccaagcaaggccgattcggcaaaagctacgacgtttcacgcccgacaagagagaggccattcgcgccgagttagctcgcttggtcgcagctggatttattagagaagtgctacaccccgagtggttagccaaccctgttctt

SEQ ID NO: 158135 - DNA, 1515 bp, Zea mays
  Clone ID: MRT4577_75797C.1
atgcaatggctgcgacatctaccccgacactgcatcgacgactggggcgacttcagtcgacgcttcaccgccaatttccagtccctctccgacaaaccggcgcaaccgtgggacctcaagtccatcaagcgccggggggacgaaactctccggtcgtacctcaaaaggttccagaccatgagaaatcgtatccccgaggtcacggaggcggccgtgatcgaggacttctacaggggatccaatgactcggccttcgtccgagccatattacagaaggcaccgactacctccgaggagctgttccgggaagccgacctctatatcaccgccgacgagcgagcccaggacctcatcgggggagcaaagcccgtgccggcagcaccacgacgcgacgcgaaccagcaacccgacaaacgctgggagaagagacctcgcgaagaagtacacgccgccggaccaccagcctctcgcgcccggggaggacctcgcggaggcgagcgcaccctggacgacatcctcgacgcccagtgcccgtaccacaaggacatgcgccacactcttcggaactgccgggacttcaagcactccgtcgggcacggccgacccttccaacctctacctcctcctccgccgaggggagggccagaagaaccacgacaaccccagcagcaggaggagggaggaggaggagctttcccgcgcgtcgacagggaggtcaatgtcatctttgacggacacggatcgcaggagaacagaagacaacaaaagctcaacgatcaccagatattggtggcgaccatcggtcctcccgccccataccggtggtcagagcacccgatcactttcactcgggcggatcaatggctcaacttcgaccacccaggcaaatacccgctcctcgtcgatccggtgatccgagagagcagggtgaagaaggtgttggtggacggggggagcagcatcaatgtcaccttcccccggacactccaaggcttgggagttcacctcaaagagctccacgagtccgacactcctttcttcggcatcatgccgactgaaggagaatacccgctgggccacatctacatgcccgtcaccttcggaactccggataactacagaaccgagttcctgaggttcgaagtggcgaacttcgactgcgggtacaacgccatcatcgggaggccgggattggcaaaattcatggccattccgcattacatgtacatgatattgaagatgccaggaccacaaggaatcataactgtgcgcaccgacttccaaggcaccgcagagtgtttccgagtggccatccaagcggccctcaccaccaagccgtcgacgacttctccaacacaagcgaactctaagcctgaggaggacctcgcagtaccggcaaacgaagctcaggccgcgacctctatgcggccgactgaagaaactaaaaggatcaacctggggttcgctgatgaacgcaagactgccatcatcagctccagcctaggcaacaaatag

SEQ ID NO: 158136 - DNA, 216 bp, Zea mays
  Clone ID: MRT4577_75798C.1
gacccgaaccctggagttcgcacgggctccggacagatccgcgcggtctaagcttggaagcggcgcatggaggcagcactagccgccgcactcaagtcgcccaccgtcgcacgtccctcgtggcgacccgcgttcacggtcgccaccatgcgttaccctttgaccgcaggctgcagttttgccttcgactacatcaaggggctggggtgggagcca

SEQ ID NO: 158137 - DNA, 2580 bp, Zea mays
  Clone ID: MRT4577_75799C.1
atggctgtcaccttctacagcaagatcacccttcgtcccggatccgtattctgctttggaacaatctcatccatagcagacgaaaagggaactctacaccgcattgcggatccaccggaaaagaagtctcctccaacaaactccgaaaatgccggagaagcgcaacctccagctctccggaaagaggtcgtctccagaaagtcggaggccgagggcccgctgacccggagaactccactgtctacttccccgacaagagaatggacacagatcacgaggaaaaaggagaccaaggagaagcaagttgttcttttcgttcctccgccctcaaaggagaacggaaagaaggtcgccatgacagcagcactgttctatcctgacgtcctcttcatcgagagagcggaatcgcacaccgtctccgacgacgagccgaccgcacccggagaagaaccgcctcaacgagaatcccgccgacggaggaaccggcgcaggaacgttcgacgacatcacgcggccagagaacgggatctggagcaacctgtctcgcgagacgagaatccattcttcaggcgcaacctgaaccccgacttcgcccgagccatgaacatgccgagcgaagtcggaggagtactagctcggatagttgatggactccctcggactcccgacgccgagggctaccgacgattgttcacccaggcggccaaccatcttctaccacttgctcacccgccgaacgatctacgacacgccatcaacagtcgccgagatgcgcgaagctccatcaatgcttcgcgcgaacggcggcatgagaacgagatccggcgtcgggaggagtacgacagggatcatggcatcccagctcagagccaggccaccagaactgagtcggcaacggcctcaactggcggtaccacccggggacggtcgaggaaccacaaccactactcccctccccgggacagacatcatccccgacgacaggaggacacgtgcggagtgtctgctcttactccgcgccttagggccatccaatggcctcccaacttcaaggtatccaatgtcgacaaatatgaacctaagcaggatccagggggttggctagccgtctacaccaccgctgctcgagctgccggggcgtccgaagatgtgatgaccgcgtacttacccattgtccttgggcaagacgcgctgcaatggctgcgacatctaccccgacactgcatcgacgactggggcgacttcagtcgatgcttcaccgccaacttccagtccctctccgacaaaccggcgcaaccgtgggacctcaaatccatcaagcgtcggggggacgagactctccggtcgtacctcaaaagaggatccaatgactcggctttcgtccgagccatactacagaaggcgccgactacctccgaggagctgttccgggaagccgacctctacatcaccgccgacgagcgggcccaggacctcaacggaggagcaaagcccgcaccggcagcaccacgacgcgacgcgaaccagcaacccgacaaacgatgggagaagaggcctcgcgaagaagtacacgccgccggaccacctgcctctcgcgcccgaggaggacctcgtggaggcgaacgcacgctggacgacatcctcgacgcccagtgcccgtaccacaaggacatgcgccacactcttcgtaactgccgggacttcaagcactccgtcgggcacggccgacccttccaacctctacctcctcctccgccgaggggaggaccagatgaaccacgacaaccccatcagcaggaggagggaggaggaggagccttcccgcgcgttgacagggaggtcaatgtcattttcggcggacatgggacgcaggaaaacaaaagacaacaaaagctcaacgaccgccagatactggtggcgaccaccggtcctcccgccccatatcggtggcaaatacccgctcctcgtcgatccggtgatccgagagagccgggtgaagaaggtgctagtggacggggggagcagcatcaacgtcaccttccccggacactccaagacctgggagttcacctcaaagagctccacgagtcggacactcctttcttcggcatcatgccgatggaaggagaatacctgctgggccacatctacatgcctgtcaccttcggaactccggagaactacagaaccgagttcttgaggtttgaagtggcgaacttcgactgcgggtacaacgccatcatcgggaggccgggactggccaaattcatggccatcccccattacacgtatatgatactgaagatgccaggaccgcaaggaatcataactgtgcgcgccgacttccaaggcgccgcagagtggttccgagtggccatccaagcagccctcaccaccaagccgtcggcggtttcttcaacactggcgaactctaagcctgaggaggaccttgcagtaccggcaaacgaagctcaggccgcgacctctatgcggccgactgaagaaaccaagaggatcaacctggggttcgctgatgaacgcaagactgccatcatcagctccagcttgggcgacaaatag

SEQ ID NO: 158138 - DNA, 745 bp, Zea mays
  Clone ID: MRT4577_7579C.1
gggtacagattatgtgaggattgaattagtacacgtatgtgtgtgtgccgttgtgtattatagtagtggtggcgtaggatatttgatttaggtgtgcgggtatatgccgtgatatggttatactcacgacgaagaaagatgtatgtattgtgtaacacaacgtttaggttgctgtcgtataattgtgtgaaggatgctcacgatggtcatgtgactaaagggtggtgtagtggcaaagcgagaagtaagtttaatatttttaacgattagttgatagcatctatcggtgtcgtcatgatttctgttgtatggtggatcgatgccttgctttgtcaaatattgcattccattcccattggataaataaatatcctgttgattgattagaggtcttatatgagcgttatcgcagccaaataattattggaggcgagtagcgtccataagtcggtccttgttaaaattgaagaacaatccgataagatatacacataagtgctttaggtccttcagtagccaatgtagtcttatggagttgtacgccacgtgttaatgcctctatgttacacccccaaaaatgtgttattttaggtgacttgtgtgttaacaaatttaagttgagcgatgatttaggaaaagctgattaatctgctccaacctatgtttttgagttgcgatgtctaaaatagtttgctaagtcttatattgtgattagccaactcatgttaagtagaagtctattttg

SEQ ID NO: 158139 - DNA, 705 bp, Zea mays
  unsure (1)..(705): unsure at all n locations
  Clone ID: MRT4577_757C.1
gtttgtagcagagcgacaagctaccacacttatccnaactagatcggacacggccgatctcgcggtctcagcttcggcatggccacggcggcgcctcacgtcatggtgttgccgctcgcggcgcagggccacgtgaccccgttcatggagctgtcgcaccgcctcgtcgagcacggcctcgaggtcaccttcgtctgcaccgagcccacccacgcgctcgtcctcggcgtcctgcgactgcggcaggccaccgtggacgggatccacctggtctccatgccggacagcctggccgacggcgacgaccgccgggacctcggcaaggtcctggacgcgctcgcccggtgcatgccgggctacgtggaggagctcatcagggagaagaaggtaacgtggctcgtcgccgacgccaacctggggtccttgtgcttcgaggccgccaagaagctcggcgtcagggtcgcatccttcttcccggcgtccgcggcatgccttgggacgttgtccaggatcccccagctcatagaggatggcttcttcgacgacaaaggcgtcccgaagcgacgagaggcggtcgagctggcccccgagatgccgccggtctacacgtcgcacatgctgtggagcgccgacggcgggcccgaggtgcagcacgtggtcttccagctgatgcgccggaacaccgaggcggccagcctcgccgac

SEQ ID NO: 158140 - DNA, 753 bp, Zea mays
  Clone ID: MRT4577_75800C.1
agtcccactgaccggacgaattgccccgtcgtctcttggtatagcaacggcatccccagagagaaaagaccgaccgaatcgcgatggaggcctgggtccgcgccgtcgtggaggccatccactcgtctcgagcccaagccgtcatctatctcgccggcggcgcctcccaggcgctcggctggctcctgtccgtgcccggcgcttctggcagcgtcctcgaggtcgtcgtgccctactccagggcctccatggcgcagctgctcggcaagttgcccctgcaattcacaagcaagcaggccgcagaggacatggcactggccgcgttcaaccgtgccctgaagctttctggaccaggtctacaagtaatgggtgttggatttactgggtcgctcgctagctcacgcccaaaacatggtgaccacaggttttatgtgtcaacgcgcacacaaaattgcctcaggacatcacatgtaacattgtcgaagggtttacggagcagagaggaagaagacaaggtctcaagctgttttgtgcttaaggcaattgcagatgcatgcagagtttctgcaaccattcagtcagacgttcaagaacctgaaattccaaaagaaagtgtggaacaatttgatgaagaccaagagctccagcaagttattgatggtcaagtctgcatgaaagtttaccactttgctgatccccacggaaagaacttcgacaggaaactaattctacctgggtcattcatcccttgca

SEQ ID NO: 158141 - DNA, 331 bp, Zea mays
  Clone ID: MRT4577_75801C.1
ctagccaacacacacatagtactctccatgccagccattagatctcaaggatagaggactgggcggactctacagcaggctttgcgtggacctcctgctgctcggttgttacaccggaacccagggcgtgccggcgattatggagtccgcgaggaagagcgagtcgcaaagcttccgctttaagggaccttgctgaaggaacgccaattgtccaaacgcctgcctgactcgaaggttttaccgggggtgtgatcagaggacctacaccacagctgttcctgtaccagggactgttaccactgcctgagctccggtcctgcgcgtgcatata

SEQ ID NO: 158142 - DNA, 578 bp, Zea mays
  unsure (1)..(578): unsure at all n locations
  Clone ID: MRT4577_75802C.1
cccgcgtccgccccgcgtccgcccacgcgtccgcggacgcgtgggcggacgcgtggggccactcgtcatgggcaagattaagatcggaatcaacggcttcggaaggatcggcaggcttatggccagggtctccctccagagcgaggatgttgagcttgttttcgtnaacgaccccttcattaccactgactacatgacctacatgttcaagtactacaccgtccacggccactggaagcacagtgacatcacacttaaggactccaagaccctttttttttatgacaagccggtcaccgtctttggcatcangaaccctgaggaaatcctatggggtgaggctggcgctgagtatgttgtgnagtncacctgcgtctttactgacaaggacaaggctgttgcacatntcaagggtgttgccaaaaaggttgttatctttgtcctaatcaaagattcacccatgtttgtttgttgtgtaaatgaggacaagtacactttnggatgttaacatttttttcaatgctagtttgnaccacaaactgccttgcttccctttgtaagggtatttaattacaact

SEQ ID NO: 158143 - DNA, 2622 bp, Zea mays
  Clone ID: MRT4577_75803C.1
atggccatcaccttccacagcaagatcaccctccgtctcgaatccgtattctgctttggaacaatctcatccatagcagatgaagatggaactctacaccgcattgcagatccgccgaaaaagaagtctcctccaacaaactccgaaaataccggagaagcgcaacctccagctctccgaaaaaagatcgccttcggaaagtcaagggccgagagcccgctgacccggagaactccactgtctacttccccgacgaaagaatggacacagatcgcaaggaagaaggaggccaggaggaaacaagttgttctttccgttcctccgccctcaaaggagaacggaaaagagatcttcacgaccgccgtaccattctaccccgacgtcctcttcatcgggagagtggagtcgcctcccgtctccgacgacgagccgaccgcgcatggagaagaaccacctcagcgagaatcccgccgacggagaaaccgacgccgaaacattcagcgacaccacgaggccggagaacgggatctggagcaacctgtttcgcgggatgaggtctcggagataggagaaactccggaggaacgcgtcttcagagaacgaaggaactcccgacgacgtgatcgccgccgggctcaggaacaagccgagcaagatgcaaggcaacgctgggagaatccactcttcgggcgcaacctgaatcccgacttcgcccgagccatgaacacgccgagtgaagtcggaggagtactagctcggatagctaatggactccctcggactcctgacaccgagggctatcgacgactgttcatccaggcagccaaccatcttctaccgcttgctcacccgccgaatgatctacgatacgctatcaacagtcgtcgggacgcgcgaagctccatcaatgcttcgctatctgctcttactccacgccttagggccattcaatggccccctaacttcaaggtatccaatgtcgacaaatatgaacctaagcaggatccagggggctggttagccgtctacaccaccgctgctcaggctgccggggcgtccgaggacgtgatgaccgcatacttacccattgtcctcgggcaagacgcgctgcaatggctgcaacatctaccccgacactgcatcgacgactggggcgacttcagtcgatgcttcaccgccaattttcagtccctctccgacaaaccggcgcaaccgtgggacctcaaatccatcaagcgacggggggacgaaactctccggtcatacctcaaaaggttccagaccatgagaaatcgtatccctgaggtcacggaggcggccgtgatcgaggacttctacagaggatccaatgactcagccttcgtccgagccatattgcagaaggcgccgactacctccgaggagctgttccgggaagccgacctctacatcatcgccgacgagcgagcccaggacctcatcggaggagcgaagtccgcaccgacagcaccacgacgcgacgcgaaccagcaacccgacaaacgctgggagaagagacctcgcgaagaagtacatgccgccggaccacccgcctctcgcgcccggggaggacctcgtggaggcgagcgcacgctggatgacatcctcgacgcccagtgcccgtaccacaaggacatgcgccatactcttcggaactgccgggacttcaagcactccatcgggcacggtctacccttccaacctctacctcctcctccgccgcggggagggccagaagaaccacgacaaccccagcagcaggaggagggaggaggaggagctttcccgcgcgttgacagggaggtcaacgtcatcttcggcggacacggatcgcaggagaatagaagacaacaaaagctcaacgattgccggatattggtggcgaccaccagtcctcccgccccataccggtggtcggagcacccaatcactttcactcgggcggatcaatggctcaacttcgaccacctaggcaaatacccgctcctcgtcgatccggtgatccgagagagcagggtgaagaaggtgttagtggacggggggagcagcatcaacgtcaccttcccccggacactccaaggcttgggagttcacctcaaagagctccacgagtccgacactccattcttcggcatcgtgctgactgagggagaatacccgttgggccacatctacatgcccgtcaccttcggaacaccggataactacagaaccgagttcttgaggttcgaagtggcgaacttcgactgcgggtacaacgccatcatcgggaggccgggattggcaaaattcatggccattccgcattacacgtatatgatactgaagatgccaggaccacaaggaatcataactgtgcgcgctgacttccaaggcgccgcagagtgtttccgagtggccatccaagcggccctcaccaccaagtcgtcgacgtcttcttcaacacaggcgaactctaagcctgaggaggaccttgcagcaccggcgaatgaagctcaggtcgcgacctctatgcggccgactgaagaaactaaaaggatcaacctggggttcgctgatgaacgcaagactgccatcatcagctccagcctggacgacaaatag

SEQ ID NO: 158144 - DNA, 1645 bp, Zea mays
  Clone ID: MRT4577_75804C.1
cccactcttccgcccacgcgtgcggcacaatcccgtcccgatctcggggcacgcgagcgacgataaacttcctcgtggcggtgaggggcttggagtcggcgcagagctggacgagttgcaccttgcacgcggcagccacgcactagcctgcagctgcagggcagggcaggggcggagaccatggggagcccgcaccaaggacacggcgttgacggcggcgggcgcagcagcgacgaggagggcgacgccgggtcgtggcggctgcgcatggacagcggcttcagcgtcccggaccggttccaccgccagccgcccttctacgccaggatcttcggcggctcgcacgggaagcagaggaagatcgcgaagtactacaagaaacaagagaatctactcaaggatttcagcgaaatggagaccatgaacgaaatgggtggcctagatcagaatgctcctaccgaggaagagcagaagcagttggcgaagagcgagaggtttgccatcaacctgtcgaatgcagtcaacctggtcctcttcgtaacaaaagtcgttgcttcagtcgaaagcgcgtccatggcggttatagcgtcgacgctggactctctgttggacttgctgtcagggttcatactttggttcactgcgtacaagatgaaaaagccgaacaagtacaactatccaattggaaagaggcgcatgcagccagtgggaataatagttttcgcatcagtgatgggcacacttggcttccaagtgctgatcgaatcagggcgccagctcataactcaggagcacgcggatttcaagttcaagcaagagctgtggatggtcattagcatgtcctctgttgcggtcgtgaagttcttcctcatgctctactgcagaacgttcaagaatgagatcgtgagggcctacgcccaggaccatttcttcgacgtaatcacaaactcggtcggcctggtctcggcgctgctcgctgtccggttcaaatggtggatggaccctgttggcgccatactgatcgcgttgtacacgatcacgacgtgggcgcgaacagtgctggagaacgtaggcacactgataggatccagcacatcgacacggtgcgagcctacaccttcggcacgcactacttcgtcgaggtggacatcgttctctcgggcgacatgccgctgagtcaggcacatgacatcggcgagtcgctgcaggagaagctggagcagctgcccgaggtcgagcgcgccttcgtccatgtggacttcgagttcacgcaccggcccgagcacaaggccgaggtctgagtgcgtggttagtggttactgcagagttcagacttcagaccagctgtagcgctactgcagatttgacttcatatggtattaggccgtatgacgaatgcttgattcgctactgcagatttgtcttaaagaatcattatttcgttatacgaatgctatattcatttcccacaactcttcaaaaagaatctagatatttttttgtcatgtacgtgcagactggaatacaattttgtatagtcgttcatgaaccggtgaaaaatatattttttaatacatttggctaataaagaattattcatattagtttctttttattttctataaaacaaacataatagatattt

SEQ ID NO: 158145 - DNA, 2454 bp, Zea mays
  Clone ID: MRT4577_75805C.1
atgagaaggaaggagatcaaggagaggccagtcgttcttcctgttcctccgacctcaaaggagaacggaaagaaagtcgccgcggcagcaataccgctctaccccgacgtcctcttcatcgggagagcagagtcgcccgccgtctccgacgatgaaccgaccgcgcctggagaagaaccacctcagcgagaatcccgccgacgaaggaatcgacgcaggaatgttcgacggcatcacgcagctggagaacgggatccggagcagcctgtctcgcgagacgaggtctcagagataggagaaactccggaagaacgcgtcttcagggaacgaaggaactcccgacgacgagatcgccgtcggactcaggagcaagccgagcaagatgcaaggcaacgacgcgagaacccgctcttcgggcgcaacctgaaccccgacttcgcccgagctatgaatacgccgagcgaggtcggaggcgttctggcccggatagctgacggacttcctcggacccccgacgccgagggataccggcgcctgttcactcaggcagccaaccatcttctaccgctcgcccacccgccgaacgatctgcgacacgccatcaacagtcgccgagacgcgcgaagctctatcaatgcttcgcgcgaacggcggcacgagaacgaaattcgccgtcgggaggagtatgaccgagatcatggcttcccgactcaaagccaggccacccaaactgagtcggcaacagcttcaactggtggaaccaaccggggacgggccatccaatggcctcccaacttcaaggtatccaatgtcgacaaatatgaacctaagcaggatccagggggctggttagccgtctacaccaccgctgctcgggctgccggggcatccgaggacgtcatgactgcgtatctgcccatcgtcctcgggcaagacgcgctgcagtggctacgacatctaccccgacactgcatcgacgactggggagacttcagccgacgtttcaccgccaacttccagtctctctccgacaagccagcgcaaccatgggacctcaaatccatcaagcgccggggggatgagactctccggtcatacctaaaagggttccataccatgagaaaccgcatccccgaggtcacggaggcggccgtgatcgaggacttctacagaggatctaatgactcggctttcgtccgagccatactgcaaaaggcgccaaccacctccgaggagctattccgggaagccgacctctacatcaccgctgacgagcgggcccaggacctcatcggaggagcaaagcccacaccggcggcaccacgacgcgacgcgaaccagccgcccgacaagcgctgggagaagaggccacgcgaagaggtacacgccgccggaccacccgcctctcgcgcccgaggaggacctcgtggaggcgaacgcacgctggacgacatcctcgacgcccagtgcccgtaccacaaggatatgcgccacactctccgcaactgccgggacttcaagcactccgtcgggcatggccgacccttccaacctctaccacctcctccgccgaggggaggaccagatgaaccacgacagccccatcagccggaggaggggggaggaggagctttcccgcgcgttgacagggaggtcaacgtcatcttcggcggacatgggtcgcaggagaacaagagacaacaaaagctcaacgaccgccagatactggtggcgaccaccggccctcccgccccgtaccggtggtcggagcacccaatcacgttcactcgggatgatcaatggctcaacttcgaccacccgggcaaatacccgctcctcgtcgatccggtgatccgagagagccgggtgaagaaggtgctagtggacggggggagcagcatcaatgtcaccttcccccgtacgcttcaaggcttgggagttcacctcaaagagctccatgagttagacactcctttcttcggcatcgtgccgacggaaggggaatacccgctgggccacatctacatgccggtcaccttcgggactccggataactacagaaccgagttcctgaggttcgaggtggcgaacttcgactgcgggtacaacgccatcatcgggaggccagggctggccaagttcatggccatcccacactatacgtacatgatactgaagatgcccggaccacaaggaatcataaccgtgcgcgctgacttccaaggcgtcgcagaatgtttccgagtggccatccaagcagccctcaccaccaagccgtcaacggttccttctacaccggcgaactctaagcctgatgaagacctcgccgtgccggcaaacgaagctcaggccgcgacctctatgcggccgactgaggacaccaagcggatcaacctggggttcgctgatgagcgcaagacggccatcatcagctccagtttgagtgacaaatag

SEQ ID NO: 158146 - DNA, 1732 bp, Zea mays
  Clone ID: MRT4577_75806C.1
ccggccggggtggaaagaacaacggacgaggcgacgtacgcgcgcgcggccggcgcgcacctcgccgtcccagccacctgccgttgtgcatgcgctctcaatctctgatctagtcatctgatctgtgcgggagtgtggccgccaccaccacgaccaccaccataactgctcatctatatataaaacacccccaccacaccgggggttctcccccactgtcctgccgccgtccgatcctgtggttgcgccgactctctggccgggctagtccccattccttcatccgacgaatctatccttcccctcctcgatcggatcctctggccggcggcatgggcgacgacgacgaccacaatgaggggctgagggcggggccgacggcgtcgtggcggctcaacgtcagcgacttccacatgccggagcggcccaaggagccgcccttcgtcgccagggtcttcctccgcagccacgggaagcagaggaagatcgcgaagtactacaagaaacaagagaatctactcaaggatttcagcgaaatggagaccatgaacgaaatgggtggcctagatcagaatgctcctaccgaggaagagcagaagcagttggcgaagagcgagaggtttgccatcaacctgtcgaatgcagtcaacctggtcctcttcgtaacaaaagtcgttgcttcagtcgaaagcgcgtccatggcggttatagcgtcgacgctggactctctgttggacctgctgtcagggttcatactttggttcactgcgtacaagatgaaaaagccgaacaagtacaactatccaattgggaagaggcgcatgcagccagtgggaataatagttttcgcatcagtgatgggcacacttggcttccaagtgctgatcgaatcagggcgccagctcataactcaggagcacgcggatttcaagttcaagcaagagctctggatggtcattagcatgtcctctgttgcggtcgtgaagttcttcctcatgctctactgccgaacgttcaagaatgagatcgtgagggcctacgcccaggaccatttcttcgatgtaatcacaaactctgtcggcctggtctcggcgctgctcgctgtccggtacaaatggtggatggaccctgttggcgccatactgatcgcgttgtacacgatcacgacgtgggcgcgaacagtgctggagaacgtaggcacactgataggcaagtcggcgccggcagagtacctgacgaagctcacgtacttgatctggaaccaccatgaggagatccagcacatcgacacggtgcgagcctacaccttcggcacgcactacttcgtcgaggtggacatcgttctctcgggcgacatgccgctgagtcaggcacatgacatcggcgagtcgctgcaggagaagctggagcagctgcccgaggtcgagcgcgccttcgtccatgtggacttcgagttcacgcaccggcccgagcacaaggccgaggtctgagtgcgtggttagtggttactgcagagttcagaccagctgtagcgctactgcagatttgacttcatatgctattagttcgtaagacgaatgctatattcatttcccacaactcttcaaaaagaatctagatatttttttgtcatgtacgtgcagactggaatacaattttgtatagtcgttcatgaaccggtgaaaaatatattttttaatacatttggctaataaagaattattcatattaa

SEQ ID NO: 158147 - DNA, 280 bp, Zea mays
  Clone ID: MRT4577_75807C.1
tttttttttttttttttttttgccttttttttttcatttttgttgttactttttggttttcctttctccacaaacttcaaaacgacctcgggggggagggcactcacccatttcctcctacatgagggggggctccgatggtaaaaaaaaaagggctcataaaaaaaaaaacttgttttttgccaaaccgaatcataaaagccccaattgggtttttgttacccctcccggtccaggtccaaaaataaaccatctttttgaaaaccccgggcctggcagc

SEQ ID NO: 158148 - DNA, 576 bp, Zea mays
  unsure (1)..(576): unsure at all n locations
  Clone ID: MRT4577_75808C.1
cccggggtcgacgccancagcgtctcgcccaccgcgataccgcggaccgcgnttgggcccggccttctcgcgccggcttcgccgccgagcccagacgtgctgcgtgggtgaactctgcttgtgcgaagggacggccacnngccggcgaccatanntttgcgctagttggtnncggagcagtggagctagatgtnggtggcctttaatctatcngnnaccgtcannctgctggcttcnnatagcatctannngctgacgcaaagtgtcaattcgcgntttcctttcaaattggtttnnntccccctttcggtttggcttaaatnntcgattcaaatatgangatnnngtttttgtacctangtacccatantnnatataagngacngtntnnctataantnnatttgtntcaatcacncaaagaaagcnnatgggatgctcaaaaggggaagctcttgtatttggattgagggaagggaaccacccagtattttaccttgtaccgaatntgataaatatgtttntatatttaattgatatcactggatatatatataaaagatatcgagaggacagt

SEQ ID NO: 158149 - DNA, 195 bp, Zea mays
  Clone ID: MRT4577_75809C.1
agagtgtcataatgggggacttcgctctttattataggatgaccagcagacttggtcaaataacatgttaacacgtgtgcacaatagacccaaacccgtgtacagtgaatgatcgtgcgaacaggcgagcaggtgggcgagcagacacccccgcatgatgttgaacgcgtactcggcgtccccgacctcctccac

SEQ ID NO: 158150 - DNA, 362 bp, Zea mays
  Clone ID: MRT4577_7580C.1
atcatgccaaaggacattcaactggcaaggaggatccccggggagagggcctaatccccacctcaaacatcgtgacaaaaacatgaagtcctggggttattgctaatctggtgccattgtaaggacatatgagtagggtttgttttgtggatcgcaagtttttcttctgctactagtgctgctacctctgctgatgaaatagctgggggcgaatactacttaaaactattatcctctagcatggtgtaccagagttatgagcgctgctgctccttccgcgcaatgctgtggacgattaattcgttaatgtcaataattatgttacagtccgcgttcgcatacatacaacataatatcttttc

SEQ ID NO: 158151 - DNA, 2640 bp, Zea mays
  Clone ID: MRT4577_75810C.1
atggccgtcaccttccacagcaagatcaccgtgggtcccggatccgtattctgctttgggacaatctcatctgtagcggatgaagagggaattctacaccgcatcgcggacccgccggaaaagaagtctcctccaacgaactccaaaaaagctggagagacgcaacctccggctcttcggaaaaagatcatctccggaaaggctggagctggaagctcgctgacccgggagactccgctgtctacttccccgacgaaagaatggacatggatcgcgaggaagaaggagaccagggaaaggcaagtcgttctttccgttcctccggcctcaaaggagaacggaaagaaagtcgccacgacagcaacaccgttctaccccgacgtcctcttcatcgggagagtggagtcgctcgccgtctctgacgacgaaccgactgcgcctggagaagaaccacctcaacgagaatcccgccgacggaggaatcgacgcaggaacgttcgacgacatcacgcggccggagaacgggatccggagcagcctgtctcgcgagacgaggtctcggagataggagaaactccggaggaacgcgtcttcagagaacgaaggaactcccaacgacgtgatcgccgacgaactcaggagcaagccgagcaagatgcaaggcaacgccgggagaatccgctcttcgggcgcaacctgaaccccgatttcgcccgagctatgaacacgccaagcgaagtcggaggcgtactagctcggatagctgacggactcccgacgccgagggataccgacgcctgttcactcaggcggccaaccatcttctaccgctcgctcacccgccgaacgatctacgacacgccatcaacagtcgccgagacgcgcgaagctctatcaatgcttcgcgcgaacgacggcatgaaaacgaaattcgccgtcgggaggagtatgaccgggatcatggcttcccgactcaaggccaggccaccaggactgagtcaacaacagcttcaactggcggatccaggggggtggctagccatctacaccaccgctgctcgggctgccggggcatctgaggacgtcatgaccgcgtatctgcccatcgtccttgggcaagatgcgctacagtggctacgacatctaccccgacactgcatcgacgactggggagacttcagtcgacgtttcaccgccaacttccagtccctctccgacaagccagcgcaaccatgggacctcaaatccatcaagcgccggggggatgagactctcctttcgtacctcaaaaggttccagaccatgagaaaccgcatccccgaggtcacggaggtggccgtgatcgaggacttctacagaggatccaatgactcggctttcgtccgagccatactacaaaaggcgccgactacctccgaggagctgttccgggaagccgacctctacatcaccgccgacgagcgggcccaggatctcatcgggggagcaaagcctgcaccagcagcaccacgacgtgatgcgaaccaaccatccgacaaacgctgggagaagagacctcgtgaagaagtacacgccgccggaccacccgcctctcgcgcccgaggaggacctcgtggaggcgagcgcacgctggacgacatccttgacgcccagtgcccgtatcacaaggacatgcgccacactcttcgtaactgccgggacttcaagcactccgtcgggcacggccgacccttccaacctctaccgcctcctccgccaaggggaggaccagatgaaccacgacagccccatcagcaggaggaggggggaggaggagccttcccacgcgttgacagggaggtcaacgtcatcttcggcggacatgggtcgcaggagaacaaaagacaacaaaagctcaacgaccgccagatactggtggcgaccaccggtcctcccgccccataccggtggtcggagcacccaatcactttcactggagaggatcaatggctcaacttcgaccatccaggcaaatacccgctcctcgtcgatccggtgatccgagagagccgggtaaagaaggtgttagtggacggggggagcagcatcaacgtcaccttcccccggacactccaaggcttgggagttcacctcaaagagctccacgagtcggacactcctttcttcggcatcgtgccgacggaaggggaatacccgctgggccacatctacatgccggtcaccttcggaactccggagaactacagaaccgagttcctgaggttcgaggtggcaaacttcgactgcgggtacaacgccatcatcgggaggccgggactggccaaattcatggccattccgcactatacatacatgatactgaagatgccaggaccgcaaggaatcataactgtgcgcgccgacttccaaggcgccgcagaatgtttccgagtggccatccaagcagccctcaccaccaagccgtcaacggttccttctacactggcgaactctaagcctgaggaggacctcacagtaccggcaaatgaagctcaggtcgtgacctctatgcggccaactgaagaaaccaagcgaatcaacctggggttcgctgatgagcgcaagacggccatcatcagctccagtttgagcgacaaatag

SEQ ID NO: 158152 - DNA, 1276 bp, Zea mays
  Clone ID: MRT4577_75811C.1
ttgggtacctcgaggccggccggggttagtttccgcgagagacgtcgttattctcttcggattctggggagggcgcgcgcaaagcaaacctcaaacgccaaacgcaacacccgccagcaggccacctgtgagcagcgatgagctcgtcgacgcccggccgcgatgacgacgcgccggacctcgtctgccagatcgactgcgtccacggcatggtggacgcgctctcctcagtccgctggaagcgccaccaggacgcggtgatggagctgtcggagcacgggatcgttctctccgtagaggagagcgggtgtctccaggccaaggtcttcctcaagcgcgagctgttcgtagagtacgactatgcgggggacgggaggcagcggttcggcctcagcctgggtctcttcgtcgactgcctcaacatcttctcatcgccaggccacgcgtccgccgtcgagatccgttaccctggccccgacatgcagcttctcctcaagtctgtgggctctgctgatgcatgcctgtacgcagaaatcagaaccagaattccagacacagtctcctgggattaccattttgagcatgctgggaatagtccagtcagttttaccgtcaagtccgccgtcctgaaagaaacgatcgacgacctcgaatggccaggttccagcatccagattcgaatgcaaccagatcctccaacggttatactgaaaggcgaaggtcatggcgacttgcagaccgaattcccctactatgcaaacaccgacctcctaatcgtgttccaatgcgagcacgaagtgtcacacaggtacaaatacaagttcctccgagcgaccacctcgaacatccccagcagtgccgtgaaggagaaccgcaggaccaaggtctcgatcgggaggggagggatgctgaaggtccagcacctggtgtcgcttgccaggccaggcatgccgtacttccgtagcattggtggagggaacgagcagacgagccggatcgcgcatatagagttcttcgtgaagcccgaagaagacgataacggtgcctagctagcgttttgtggagtgtgttatcggcatgttgtttgagtagttcatgtgaaactgaagccgggtcttggtttttgaaacggctagtgtcgtctatcatacaggcatcacgtttctaatcatgtggatcctgttactaggcacgcattattttcctaatcaggtgaaacacatgtttgtggccttgtgatttgcctaagtgccctttcaaaaaaaaaaaaaattat

SEQ ID NO: 158153 - DNA, 6042 bp, Zea mays
  Clone ID: MRT4577_75812C.1
atgacgggcggttacccctaactcgcagctccctcgttcaggcgcgctctctctagccggcgaccactggcagggcggccctactacgcggttacccctaactcctagctccctcgttcaggcgcgctctctctagccggcgacgattgggcgaccggcgccactcaacgccaggtcttcgtgaaaaccatcgccggcgatgagtttcaaccagtctactgtcaaggggcaggccaggagggagaggcctagggctcgccctcatggcctgacgcagcagaggaggcaggaaataaaggaagcctttgatctgtttgatacagataactctggaaccattgatgcaaaagagctcaatgttgccatgagagccttgggatttgagatgactgaagagcaaattaggcaaatgattgctgatgttgacaaagatggcagtggagcgatcgactacgaggagtttgagcacatgatgactgccaaaatcggagagagggatagtaaagaggagctttcaaaagcattccgcattattgatcaagatggaaatggaaagatttctaacattgatatccagaggattgccaaagagctgggtgtaaatctcaccctcgatgagatccaagacatggtgcaagaggctgatagaaatggtgacggtgaaatagactttgacgagttcatcaggatgatgaggaggaccagctttggctactaggtgtatttatctgcgagtgcttgacacttccagtttgtttatgactaccgtgcgtgtgttaatcaactggtgtggttgctatgaacaatgtgctctggtttcgcttttatatataattttaatttatttttaattatcgcagttattacattattaaattttcaatttaatttgaaatatagagggatgatgacaagaaggggaagaagaaagaaaagaagagttactacaagaagaagggcggcgatgcccacgtgagtcaggaatgggactccgatgagagctccaccgactcctcctccgacggggacgccgccaacatcgccgtcaacaagggtctcctcttcccaaacgtcgaccacaaatgtttcatggctaaggacggcaagaaaaggaaagtacactctagatccatccccaaatatacaacatctagtgatgagggtagctctagtgaaaatgaagatgatgttaaagaattaaatgtttgcaatgattctatttcatgtcttagagatgagaatgctagattaagtgctaagatagaggaattaaatgtttgcaaaccctctacatccactgttgaccatgtttctatttgcactagatgtagagatattaatgtagaagctattgatgatcacattgctatgattaaacaacaaaatgatcacatagctaaattaactacaaaaaataatgagcatgaacatgaaaatgaaaagtttaaatttgctagaagcatgctctataatgggagacgccctagcattaaggatggcattggtttccaacaggggagcaatgtcaagcttaatgcccctaaaagattgtctaattttgttaagggcaaagtagttgccaaatatgttgggggcaaacataagagctccaagacttgtgtttgggtacccaaggtatatgcatccggtggttcaagttggataatcgatagcgggtgcacaaaccacatgacaggggagaaaaggatgttctcctcctatgagaaaaatgaagatccccaacgagctatcacattcggggatggaaatcaaggtttggtcaaaggtttgggtaaaattgcaatatcacctgacaattctatttccaatgtttttcttgtagattctttagactacaatttgctttctgtttctcaattgtgtaaaatgggctacaactgtctttttactgatagaggtgttactgtctttagaagaagtgatgattcaatagcttttaagggagttctagagggtcagctatacttagttgattttaatcaagctaaactagacacttgcttaattgctaagactaatatgggttggctctggcatcgccgactagctcatgttggaatgaagaatcttgacaagcttctaaagggagagcacattttaggactaacaaatattcattttgagaaagacagggtttgtagcgcatgccaagaaggaaagcaaattggctcccatcgtccacacaagaacattatgacgactgacaggccgctcgagctactccacatggatttattcggcccgatagcttacataagcatcggtgggagtagaaaatctaagtttgctcctaaggctatagaaggatttttacttggttatgactcaaacacaagggcatatagagtcttcaacaaatccactggattagttgaagtttcttgtgacattgtgtttgatgagactaatggctcccaagtggagcaagttgatcttgatgaactagatgatgaagaggctccatgcatcgcgctaagaaacatgtccattgggatgattgaggatgcactaagagatccagattgggtgctgttccatgtcctaaccaaaaatgttgtaggtaccaaatgggtattccgcaacaagcaagatgagcatggtgtggtgacaaggaacaaagcccgacttgtggccaaaggttattcacaagtcgaaggtttggattttgatgaaacttatgcacctgtagctaggcttgagtcaattcgtatattacttgcctatgctacttaccatggctttaagctctatcaaatggatgtgaaaagtgccttcatcaatggacccatcaaggaagaggtctatgttgagcaacctcccagctttgaagatagtgagtaccctaaccatgtatataaactctcaaaggcgctttatgggctcaagcaagactcaagagcatggtatgaatgcctgcgagatttccttatcactaatggcttcaaagtcggaaaagccgatcctactctctttactaagactatcgcaaaagatttgttcgtatgccaaatttatgttgatgatatcatttttgggtctactaacaaatcaacttgtgaagagtttagtaggatcatgatacaaaaattcgagatgtctatgatgggggagttgaagtattttctaggatttcaaatcaagcaattccaagaaggcaccttcatcagccaaacaaagtacattcaagatatacttaagaagtttgggatgaaggatggcaaacccatcaagacacccatgggaaccaatgggcatctcgacctcgacacgggagatgaagaaggaatcctacaccgccttgcagatctgccggaacagaagtctcctccaacaaactccgaaaatactggaaagacgctacctccggctcttcgaaaaaagatcgtctccggggaggctggagctagaagctcgctgacctggaagactccgctgtctacttccccgacgaaagaatggacacgggtcgtgagaaagaaggagaccagggagaggcaagtcgttcttcccgttcctccgacctcaaaggagaacggaaagaaagtcaccgcggcagcaataccgttctaccccgacgtcctcttcatcgggagagcagagtcgcccgccatctccgacgatgaaccgaccgcgcctggagaagaaccgcctcagcgagaatcccgccgacgaaggaaccgacgcaggaacgttcgacgacatcacgcagctggagaaagggatccggagcagcctgtctcgcgagacgaggtctcagagataggagaaactccggaagaacgcgtcttcagggaacgaaggaactctcgacgacgggatcgccgtcggactcaggagcaagccgagcaagatgcaaggcaacgatgcgagaatccgctcttcgggcgcaacttgaaccccgacttcgctcgagctatgaacacgccgagcgaagtcagaggcgttctagctcggatagctgacggacttcctcggactcccgacgccgagggataccgacgcctgtttactcaggcggccaaccatcttctaccgctcgctcacccgccgaacgatttgcgacacaccatcaacagtcgccgagacgcgcgaaactccatcaatgcttcgcgcgaacggcggcatgagaacgaaattcgccgtcgggaggagtatgaccgagatcatggcttcccgactcaaagccaggccaccaggactgagtcggcaacagcttcaactggcagtaccacccggggacggtcgagggaccgccaccaccactcccctccccgggacagacgtcatccccgacgacaggaggacacgtgcggagtatctgcacttactccgcgccttagggccatccaatggcctcccaacttcaaggtatccaatgttgacaaatatgaacctaagcaggatccagggggttggttagccgtctacaccactgccgctcgagctgccggagcatccgaagacgtcatgaccgcgtatctgcccatcgtccttgggcaagatgcgctgcagtggctgcgacatctaccccgacactgcatcgacgactggggagacttcagtcgacgtttcatcgccaacttccagtccctctctgacaagccggcgcaaccatgggacctcaaatccatcaagcgccggggggacgagactctccggtcataccttaaaaggttccagaccatgagaaaccgcatccccgaggtcacggaggcagccgtgatcgaggacctctacagaggatccaatgactcggttttcgtccgagccatactacaaaaggcgccgactacctccgaggagctgttccgggaagccgacctctacatcaccgccgacgagcgggcccaggatctcatcggaggagcaaagcctgcatcggcagcgccacgacgtgacgcgaacccgccgtccgacaaacgctgggagaagaggcctcgagaagaagtacacgccgccggaccacccgcctctcgcgcccgaggaggacctcgtggaggcgagcgcacgctggacgacatcctcgacgcccagtgcccgtaccacaaggacatgcgccacacccttcgaaactgccgggacttcaagcactccgtcgggcacggccgacccttccaacctctaccgcctcctccgccgaggggaggacctgatgaaccacaacagccccgtcggcaggaggaggggggaggaggagctttcccgcgcgttgacagggaggtcaacgtcatcttcggcggacatgggtcgcaggagaacaaaagacaacaaaagctcaacgaccgccagatactggtggcgaccaccggacctcccgccccgtaccggtggtcggagcacccgatcactttcactcgggaggatcagtggctcaacttcgaccatccaggcaaatacccgctcctcgtcgatccggtgatccgagagagccgggtaaagaaggtgctagtggacggggggagcagcatcaacgtcaccttcccccgtacactcaaaggcttgggggttcacctcaaagagctccacgagtcggacactcctttcttcggcatcgtgccgacggaaggggaatacccgctgggccacatctacatgccggtcaccttcggaactccggagaactacagaaccgagttcctgaggttcgaggtggcgaacttcgactgcgggtacaacgccatcatcgggaggccgggactggccaaattcatggccattccgcactatacatacatgatactgaagatgccgggaccacgaggaatcataattgtgcgtgccgacttccaaggcgccgcagagtgtttccgagtggccattcaggcagccctcaccaccaagccgtcgacggttccttctacatcggcgaactctaagcctgaggaaggcctcacggtaccagcgaatgaaactcaggccgcgacctctatgcggccgactgaagaaaccaaaagaatcaacctggggttcgctgacgagcgcaagacggctgtcatcagctccagtttggacgacaaatag

SEQ ID NO: 158154 - DNA, 833 bp, Zea mays
  Clone ID: MRT4577_75813C.1
cagatacagtctcctgggattaccattttgagcatgctgggaatagtccagtcagttttaccgtcaaggtagtctatctcgacgcgccctgtatatttgttggcactatgttattttagttcatgatgaataatatgattcgctgcctgaaattccagtccgccgtcctgaaagaaacgatcgacgacctcgaatggccaggttccagcatccagattcgaatgcaaccagatcctccaactgttatactaaaaggcgaaggtcatggcgacttgcaggtccgttttacaggttgtcctgttatatatgtccatttagctcccagctgtgcctatgactcactttcacttattacacaaattcggcagaccgaattcccctactatgcaaacaccgaccttctaatcgtgttccaatgcgagcacgaagtgtcacacaggtaaaaaaaaaatcctcgtgcccagatctgtgcctccgctgctccccgtgctaatctgcagagcgtcgctgttttccccttcaaggtacaaatacaagttcctccgagcgaccacctcgaacatccccagcagtgccgtgaaggagaaccgcaggaccaaggtctcgatcgggaggggagggatgctgaaggtccagcacctggtgtcgcttgccaggccaggcatgccgtacttccgtagcattggtggagggaacgagcagacgagccggatcgcgcatatagagttcttcgtgaagcccgaagaagacgataacggtgcctagctagcgttttgtggagtgtgttatcggcatgttgtttgagtagttcatgtgaaactgcggacgctggg

SEQ ID NO: 158155 - DNA, 731 bp, Zea mays
  Clone ID: MRT4577_75814C.1
cgggttctgttctcctgcgatccggttaccgaagagacgttgacctctctgtaacacgcgggaaggctccacctcccccctcctcctgctgttggggttgtcgcggttctcctggtcctccccgcggcggaggaggaggtagaggttggaagggccggtcatgtccgacagagtgcttgaagtctctgcagttccgaagggtgtggcacatgtccttgtggtacgggcactgggcgtcgaggatgtcgtccagcgtgcgttcgcctccgcgaggtcctccccgggcgcgagaggcaggtggtccggcggtgtgcacttcttcgcgaggcctcttctcccagcgtttgtcgggttgctggttcgtatcgcgtcgtggtgttgcaggtgctggcttcgctcctccgatgaggtcctgagctcgctcgtcggcggtgatgtagaggtcggcttcccggaacagttgctcagaggtagtcggctgtaacactcaaaaaaaatcttgacttcagatttaagggaatcctttagagataaatattaatagtaaatataatcatcgatataggtgctcttaaagaaatgaactttagaattcaacctctatgaagtaaatgctcatgataaaataagattagctcatcatattctaatgaagattacacaatacaacagatgttttctatgagggacatagggatatgaactttggaatatacctttgacttgactac

SEQ ID NO: 158156 - DNA, 228 bp, Zea mays
  unsure (1)..(228): unsure at all n locations
  Clone ID: MRT4577_75815C.1
ggngntgganaaaaaatcgngatgtnctantgcggttcgnggcgttnaagttctggcangatgtanttcgncgtggaatcgaanctctgtttgacgcagtgggagctaattcgggnggtggactgaggnggcgacgtcgccgngaantacgcnaagngctcgagagggcggatcgtgcttgnggattggtgaagngtggnanggccagnaggtagggagnggagagat

SEQ ID NO: 158157 - DNA, 379 bp, Zea mays
  Clone ID: MRT4577_75816C.1
aaacaaaagggcagcaccctgactaggaagcaaatttattccgggggaaccaaaggcccggccccaggggcactgcccgccaccccccgggggccctttaaaggacacgggggaagaccccccgagccacctggtatcggggtgggcaaaaactaagcaagccccccccggaaacacgcgggcccggcgcttttgattggcggactcacccagaagggggccttaacagctgggggcgcgctctccaattccaaggttgcaaaattaaaaagccaagcggtttttaaaaacaaccccccggcccaagacccttgaaaaaaaaatggtggttggcatacaaccggctaaagttttccaaaaaatacggggcctacggggc

SEQ ID NO: 158158 - DNA, 127 bp, Zea mays
  Clone ID: MRT4577_75817C.1
tgtttgcgaactttaagttgtgctgcaggtcgtatcatgttcagctcatctgagagaactctgctgaattttgtgttgtgctaggggaaccttctctgccgtgtaaccattaagccagagttatctt

SEQ ID NO: 158159 - DNA, 474 bp, Zea mays
  Clone ID: MRT4577_75818C.1
cgaggaaatatatggccatcttaaaaaatagagacaaatgtagataacacataaactacatcacttgtgttcatctccctgttcaatgtgattttagactaagaaccacaaatctaacaagccctgcgaaggcgggggggcgtctggctgaacaggacctgtctcttccgtgcttaaacaactcacgtttacctgaaatattgatttgtgtacatagcaattaggtttaaatgcaaagggaaaaaaatgcgatcacggagatatcttcaagcaaagcgtaatgatacaagcttgtccttcatgggcgaaagcctagtccttcttggacatgtgacggtggcgtcctggacctcactcccttcttgaaggcgtgacgtttgcgctcgtgtcgacctcggcgctgccttcgggtgatgctttcgcttcctagcgtctggattgtgggtggaggtggggtttgcaacctgaaggcca

SEQ ID NO: 158160 - DNA, 636 bp, Zea mays
  unsure (1)..(636): unsure at all n locations
  Clone ID: MRT4577_75819C.1
ccctcgaggnnccggccgggaccatccatctcacttcatataccacgtcctaggaggacccatgcatcacagcacagccgagctttgcttagagcagatcgaacaggaagccagagagactgggactgctagggcgtgccaggacctcaacttcagccgacgagacatatgcgcagcgcgtgcagcgagccacgtggagttgctgatcgtggcggcggaggaggaggaggcgactacgccagcttgggtgaccgcggtggctcctccttcggcggcggctttggcgctgctggctctgacgtacggcctggcgactggtactgctcctgttgccgcacaacttcgccagtcggtccagctgcttaaagtgctccgcctacaaggaggaggccgctgtgaacagaggcgctggcggctgtagcggcgacatgtcacgctcacggggctacggcttggggacgggggctgctggtgctggagctgacgctgccacgactaccaaccgccccggtgggaagtccggagactggatctgcaccagtatcagtatgcaggagcgcaacttcgccagccagatgggacgcttcaggtgtgacgcagcgngcaactctggcactggggggaaggatcgagcag

SEQ ID NO: 158161 - DNA, 299 bp, Zea mays
  Clone ID: MRT4577_7581C.1
aattcacacgacgcataatcctcacgatagacacgaatcgtcccaatctctcccgtggcgatgggactcaatgactgctcccgctagtctgtccacccgagcttcctccacatctcctcgcccagctctttactctgccactagatccgacgcgcggatcactgtttcctacccatagacagtcactactgaactccgaggcagaatgtcgtactcgactgctgatgctgagaacaagatcaacacgtacacaccttgctcctattccgccagcactgccgccacgaactgccatgctg

SEQ ID NO: 158162 - DNA, 272 bp, Zea mays
  Clone ID: MRT4577_75820C.1
tcactccgccatcatcaatctccttgctcccctaccaaaccctacctataccctcctctctctccacatcatccattctacccaaattctacccctctcatatattatatttcttattactcataactataaaccatttctactctgcatcatctctatcccccaatatcttcccactctctctctccctaaataatatctattataacatcaacaaaaatatccacaaatactaaaattaccttctcttaacctcctatttcaccttccat

SEQ ID NO: 158163 - DNA, 423 bp, Zea mays
  Clone ID: MRT4577_75821C.1
acggcgatgcagcgggagagagaggagcgtggcggagacgaccggagcaacgacgagaaagcatccatggctgcctgtgtgggttccctgtgtgcgcgtccgccggcgccgccatggcggcgtccgccttctccttcgtgggcatggactccattctccatccccatgattcccttcctcgcctgctgttgaagatcattcctgccacaacgccagaggagaacaggaggaggaatccacagcccaggtatgctagaaatcccccagactagctgccgctggatccggtcgatggcccctcgccctccacctccaggctgcatgcgcgtgttcatcgcctgttgtctcaagtgtaaaagtgtgcccttccttcattgtcgcgatccccttccccacacgatccacttccccaatccctgcgcc

SEQ ID NO: 158164 - DNA, 581 bp, Zea mays
  Clone ID: MRT4577_75822C.1
tttttttttttttttttttggatcaaaattgtttttttcttttctttcgatcacactacatctgcacatctatctacaaaaactgtacacatatgtagattggaggatcctctaaaacgcggaggccaatcgcatgacgcgcgctacacatgaagacgaggaggatctacgagctaaggacgttgagtagggcgactctggtctggaccatcctcctgaacagaagctccgctccacgctcaagctctccaacgacgacgcgctccagcgccagcacctggccctcctcgcagacgaccgccttgcttctcctctgcaacgccttggagacaagggacttcctgggcgtcagcgtcaccacctgcttcgccacgcccgcgaggcactgcagaggtcgatgaggtccagagagcgctccatctccgcgtccagctccttccgctgctgctggacggtgcaggcttggttactggggaggtggacgatctcctcgatgtgtccgtacacgtctccgagcctcgtcagaccgtcgcgcaacgccgcgacggttgcggaggaggaggaggaggaggaggaagagg

SEQ ID NO: 158165 - DNA, 337 bp, Zea mays
  Clone ID: MRT4577_75823C.1
tattcgtaaggaggagtgcagagaacaggacattgaattaccagaggtacttgttggaagctcagactcttaagataatggcatggagagagcgcacacgatggaaagagagatggaagaagacaagacagtggggcacgaccaagcctgattactgaggagatgtaactggagctgtgctgcctcacacaaggatggtgatgatttctggagtcgaagaggcatacctggactgaggatatcaggacttgtgacttcttgaccggtttaagctagtacaacagttatctgaaccagggccgaaaggaccaccgctgtccctcaaaagccttagaac

SEQ ID NO: 158166 - DNA, 300 bp, Zea mays
  unsure (1)..(300): unsure at all n locations
  Clone ID: MRT4577_75824C.1
cccacgcgtgcgattttgnncattcagaaacacaccaagcgaagcacattagcaacaacctaacaacaatggctaccaagatattattcctccttgcgcttgttgcgctttttgcgagcgcaacaaatgccttcattattccacaatgctcacttgctctaagtttcattgttacacaggtccttccaccagttacttgaatgggctttgaacacccagttgtgcgagcttataggcttcaacaagcggttgtaacaagcatcttacaacaaccaatttcccagttgcnccaacaattct

SEQ ID NO: 158167 - DNA, 293 bp, Zea mays
  Clone ID: MRT4577_75825C.1
aaaaagggaaaatccctaaaaaaaaacggtccggggcccttcccttgggaaggccggaatcatgcccggaaaaaaccccttttattccccccggggtcaaaaataaacccccccgaatcgggtttgggccccaaaaaattttcattcggggtttacccccgggtccagggggggtcgccaataaaggggccccccccggatttacaagcccaagggggcccataaaactgggggcccccggttgcccccattaaaccgggcttaataaaataaagccccaaccggggaaaaac

SEQ ID NO: 158168 - DNA, 282 bp, Zea mays
  Clone ID: MRT4577_75826C.1
acgtacaactgcaacaattgctgccattcaaccaactgggttacaaggtttaggaaaggggctgatactattgctaaaatgattcattttagctatacccttctatttcacccagcttgcacgttcgctattaggaaaaacacatttatggactcaaacaaagagtgatacagaaagtcattttacttccaccttaagaaccaatccacgaaaacagatatcaactgtgacgccacactcaaaaacttgttttgtgacaggcataacgttgcgatgcttgag

SEQ ID NO: 158169 - DNA, 362 bp, Zea mays
  Clone ID: MRT4577_75827C.1
agagatcacacccctccctcacttttaaaatgaaaagggacccctataaaacaataagcaaaggggccaggtccccaaaaagaaaaaaacacatgacccggggggccgattgccacaagacccccaaaaattaaatacacgcggtgcacacaggttccgatttatggttgacagaggaactaataccgatctgggatattgggccaaaaaacaaaactctataaacttatgccgtgagctttcctgtttctggcctttggtgcaccaaatgaacacacgttagccccacttccccgttcgatgctttggaaaaacataaaaagggtttggctttttgggttacaggctgaaggcgggggggg

SEQ ID NO: 158170 - DNA, 1017 bp, Zea mays
  Clone ID: MRT4577_75828C.1
atgtccggtgcacaccggacagtccggtgccatcttctagccgttggctcagccacgtgtctcgcgcagattgcgcgcccgaccgttggctcaccggacagtccggtgcacaccggacagtccgggacttcaagcactccatcggacacggccgacccttccaacctctacctccccctccgccgcggggaggaccagaagaaccatgacaaccccagcagcaggaggagggggaaggaggagccttcccacgcgttaacagggaggtcaacgtcatcttcggcggacacggatcgcaggagaacagaagacaacaaaagctcaacgatcgctagatattggtggcgaccaccggtcctcccgctccgtaccgatggtcggagcacccgatcactttcactcgggcagatcaatggctcaacttcgaccacccaggcaaatatccgctcctcgtcgatccgcatcaacgtcaccttcccccggacactccaaggcttgggagttcacctcaaagaactccgcgagtcagacactcctttctttggcatcgtgccgaccgaaggggaatacccgctgggccacatctacatgcccgtcaccttcggaactccagagaattacagaaccgagttcctaaggttcgaagtggcaaacttcgactgcgggtacaacgccatcatcgggaggccaggattggcaaaattcatggccatcccgcattacacgtacatgatattgaagatgccaggaccacaaggaatcataactgtgcgcgctgacttccaaggtgccgcagaatgtttccgagtggccatccaggcggccctcaccaccaaatcgtcgacgacttcttcagcacaggcaaactctaagcctgaggaagaccttacagcactggcgaacgaagctcaagccgcaacctctatgcggccgactgaagaaactaaaaggatcaacctggggtttgctgatgaacacaagactgccatcatcagctccagcctggacgataaatag

SEQ ID NO: 158171 - DNA, 1521 bp, Zea mays
  Clone ID: MRT4577_75829C.1
atggccgtcaccttccaccgcaagatcaccctccgtcccggatctgtgttccgcttcgggactatctcgtccatagcagatgaagagggaactctacaccgcatcgccgatcaaccaaagaagaagtccactccaacacgctccgagaatatcgggatgaagaaggaaaaagcgcagcctccagcgctccgaaaaaagatcgccttcagcaaaccaggggccgagaacccgctgacccggagaactccactgtctacttcctcgacgaaagaatggacgcaaatcgcaagaaagaaggaggcaaacaagaccgggaggaagcaagttgttctttccgttcctccgccctcaaaggagaatggaaagaagatcgccacgaccgcagcaccatctaccccgacatcctcttcatcgagagagtggagtcgccccctgtctccgacgacgagccaaccgtgcccggagaagaacctcctcagcgggaatcccgccgacggaggaaccgacgccgaaatatccggcgacatcacgaggccggagagcgggatccagagcaacctgtctcgcgagacgagctccatcaatgcttcgcgtgaacgacgacatgagaacgagatccgccgccgggaggagtacgacagggatcatggcatcccagctcggagtcaggccaccagaaccgagtcagcaacggcctcgactggtggtactacctggggacggtcgaggaaccacgacaactactccccttcccgggacaaacataatccccgacgacaggaggacacgtgtggagtgactgcccttactccacgccttagggccattcagtggccccctaacttcaaggatccaggaggctggctggccgtctacaccaccgccgccggagcgtccgaggacgtgatgactgcgtacttacccattgtcctcgggcaagacgcactacaatggctgcgacacctaccccgacactgcatcgacgactggagcgacttcagtcgatgcttcaccgccaactttcagtccctctccgacaaaccaacgcaaccatgggacctcaaatccatcaagcgccggggggacgaaactctccggtcgtacctcaaaaggttccagaccatgagaaatcgtatccccgaggtcacggaggcggccgtgatcgaggacttctacagaggatccaatgactcggccttcgtccgagccatactgcagaaagcgccgattacctccgagcagctgttccgggaagccgacctctacatcaccgccgacgagcgagctcaagacctcattgggggagcgaagcccgcaccggcggcaccacgacgtgacacgaaccaacaacccgacaaacgctgggagaagagaccgcgcgaagaagtacacgccgccggaccacctgcctctcgcgcccggggaggacctcgcagaggcgagcgcacgctggacgacatcctcgacgcccagtgcccgtaccacaaggacatgctgagagcacctagagggggggggtga

SEQ ID NO: 158172 - DNA, 276 bp, Zea mays
  Clone ID: MRT4577_7582C.1
aacaaatgcattcattattccacaatgctcacttgctcctagtaccattattccacatatcctacctccagatactccaatgcgcttctaacactcatatatgcaatcctataagctacaacaatctctcacttctatcgtcttacaacaaccaattttccatttacaacaacaatcctatatacatctaaccatacaaaccatagtatctaactatcttaacaactcattcaacaaaacatgataaaccctatatcctactttcaacaacagatt

SEQ ID NO: 158173 - DNA, 1209 bp, Zea mays
  Clone ID: MRT4577_75830C.1
atggccgtcaccttctacagcaagatcaccctgcgccctggatccgtattctgcttcggaacaatctcatctgtagcggatgaagagggaattctacaccgtatcgcggatccgccggaaaagaagtctcctccaacgaactccgaaaatgccggagaagcgcaacctccagctcttcggaaaaagatcgtctccggaaagtcgggggccgagggctcgctgacccagaaaactccactgtctacttccccgacaaaagaatggacacggatcgcgaggaagaaggagaccagggagaagcaagttgttctttccgttcctccggcctcaaaggagaacggaaagaaggtcgccacgacagcagcaccattctaccccgacgtcctcttcatcgggagagtggggtcgcctaccgtctccgacgacgagccgaccgcacccggagaagaaccgcctcaacgagaatcccgccgacggaggaatcggcgcaggaacgttcgacgacatcacgcggccggagaacgggatccggagcagcctgtctcgcgagacgaggtctcggagataggagaaactccggaagaacgcgtcttcagagaacgaaggaactcccgacgacgtgatcgccgacgggctcaggaacaagccgagcaagatgcaaggcaaccccgggagaatccattcttcgggcgcaacctgaatcccgacttcgcccgagctatgaacacgccgagcgaagtcggaggggtactagctcggatagctgatggacttcctcggactcccgacgctgagggctaccgacgcctgttcacccaggcagccaaccatcttctaccgcttgctcacccgccgaacgatctacgacacgccatcaacagtcgccgagatgcgcgaagctccatcaatgcttcgcgcgaacggcggcatgagaacgagattcgccgtcgggaggagtacgacagggatcatggcatcccggctcagagccaggccaccagaactgagtcggcaacggcctcaactggcggtaccacccggggacggtcgaggaaccacaactcccctccccgggacagacatcgtccccgacgacaggaggacacgtgcggagtatccgctcttactccgcgccttagggccattcaatggcctcccaacttcaagaaagagatcggaacacagcagccgatgtattgtccaagctag

SEQ ID NO: 158174 - DNA, 515 bp, Zea mays
  unsure (1)..(515): unsure at all n locations
  Clone ID: MRT4577_75831C.1
ggccgctttttttttttttttttcgggcaaaaaagaatggcttgagatttgcgtgtatgtagggataggctatctgacactcaggaatggaagaatctgtccttaatcagagaaagacagaaagattgcacatgggctgcaactcggataagactgcgggtatatgtatatatataaagttacgtaggttgcggaattaaattaggtggaagaatgtaatgctgtggagctagatagaattattagcgagtggtgaggctgattgataggggggtcagaaatgtgtgatccgcaacaaagttcgggtattgatgtcgaccgatagccaccggaacccagaaaaaggttaattggagagttgcgatagcctatcaataatggtggagagtttggtacttccgctggcgcccataacaaatgggatgaagtttctttggacgctgtactctcccggngacagctagnatccagttttcctagcccccgncttgctccaaggtgcancangtttctgc

SEQ ID NO: 158175 - DNA, 2754 bp, Zea mays
  Clone ID: MRT4577_75832C.1
atggccatcaccttctacagcaagatcgccatgcgtcctggatccgtattctgcttcgggacgatctcatctgtagcagatgaagagggaattctacaccgtatcgcggatccgccggaaaagaagtctcctccaacgaacttcggaaatgctggagagacacaacctccggctcttcggaaaaagatcgtctccggaaaggctggagctgggagctcgctgacccggaagactccgctgtctacttccccgacaaaagaatggacacggatcacgaggaagaaggagaccagggaaaaacaagtcgttctttccgttcctccgacctcaaaggagaacggaaagaaagtcgccacgacagcagcaccattctaccccgacgtcctcttcatcgggagagtggagtcacccaccgtctctgacgacgaaccaaccgcacctagagaagaaccacctcaacgagaatcccgccgacggaggaaccgacgcaggaacattcgacgacatcacgcggccggagaacgagatccggagcagcctgtctcgcgagacgaggtctcggagataggagaaactccggaagaatgcgtcttcagagaacgaaggaactctcgacgacgtgatcgccgacgggctcaggaacaagccgagcaagatgcaaggcaacgccgggagaatccgctcttcggacgcaacctgaatcccgacttcgcccgagctatgaacacgccaagcgaagtcggaggcgcagccaaccatcttctaccgctcgctcacccgccgaacgatctacgacacgccatcaacagtcaccgagacgcacgaagctctatcaatgcttcgcgcgaacggcggcatgaaaacgaaattcgtcgtcgggaggagtatgaccgggatcatggcatcccgactcaaagccaggccaccaggactgagtcggcaacagcttcaactggcggtaccacccggggacggtcgaggaaccacaaccaccactcccctccccgggatagacatcgtccccgacgacaggaggacacgtgcggagtatccgctcttactccgcgccttagggccatccaatggcctcccaacttcaaggtatccaatgtcgacaaatatgaacctaagcaggatccagggggttggctagccgtctacaccaccgctgctcgggctgccggagcatctgaggacgttatgaccgcgtatctgcccatcatccttgggcaagatgcgctacagtggttacgacatctaccccgacactgcatcgacgactggggagacttcagccgacgtttcaccgccaacttccagtccctctccgacaagccagcgcaaccatgggacctcaaatccatcaagcgccggggggatgagactctccggtcgtacctcaaaaggttccagaccatgagaaatcgcatccccgaggtcacggaggcggccgtgatcgaggacttctacagaggatccaacgactcggctttcgtccgagccatactacagaaggcgccgactacttccgaggagctgttccgggaagccgacctctacatcaccgccgacgagcgagctcaggacctcatcggaggagcgaagcctccatcggcagcaccacgacgtgacgcgaaccaaccacccgacaaacgctgggagaagaggcctcgcgaagaagtacacgccgccggaccacctgcctctcgcgcccgaggaggacctcgcggaggcgagcgcatgctggacgacatcctcgacgcccagtgcccataccacaaggacatgcgccacactcttcgcaactgccgggacttcaagcactccgttgggcatggccgacccttccaacctctacctcctcctccgccgaggggaggaccggatgaaccacgacaacctcatcagccggaggagggaggaggaggagctttcccacgcgtcgacagggaggtcaacgtcatcttcggcggacatgggtcgcaggagaacaaaagacaacaaaagctcaacgaccgtcagatactggtggcgaccaccggtcctcccaccccataccggtggtcagaacacccgatcaccttcactcgggaggatcaatggctcaacttcgaccatccgggcaaatacccgctcctcgtcgatccggtgatccgagagagccgagtgaagaaggtgctagtggacggggggagcagcatcaacgtcaccttcccccgaacactccaaggcttgggggctcacctcaaagagctccacaagtcggacactcccttcttcggcatcgtgccgacggagggagaatacccgctgggccacatctacatgccggtcaccttcggaactccagagaactacagaaccgagttcctgaggtttgaagtggcaaacttcgactgcgggtacaacgccatcatcggaaggccgggattggccaaattcatggccattccgcactatacatacatgatactgaagatgccaggaccgcaaggaatcataactgtgcgcgccgacttccaaggcgccgcagaatgtttccgagtggccatccaagcagccctcaccaccaagccgtcaacggttccttctacactggcgaactctaagcctgaggaggacctcgccgtaccggcaaacgaagctcaggccgcgacctctatgcggccgactgaagaaaccaagcgaatcaacctggggttcgctgatgagcgcaagacagccattatcagctccagcttggatgacaaatag

SEQ ID NO: 158176 - DNA, 269 bp, Zea mays
  Clone ID: MRT4577_75833C.1
tcgcactggtcaacatccatgatcgtttcgtccataacacgtggactgagaaatcttgctctcgtgggatgtccaagatggggacactacattatagctgctatactattggaccatccaatacaacattgttacgccagaaaataccattcatgttataagactccaggtattctggatttaccccaaatttgtcagatcctcatttagaaatatcccgaacttttgaaccatcattgccttatattcataatggctctcatatcaac

SEQ ID NO: 158177 - DNA, 2826 bp, Zea mays
  Clone ID: MRT4577_75834C.1
atggccgtcaccttccacagcaagatcaccatgcgtcccggatccatattctgcttcgggacaatctcatccgtggcggacgaagaaggaattctacaccgcctcgcggatctgccggaacagaagtctcctccaacaaactccgaaaatgctggaaagacgctacctccggctcttcggaacaagatcgtctccggggaggctggagctagaagctcgctgacccggaagactccgctgtctacttccccgacgaaagaatggacacaggtcatgagaaggaaggagatcagggagaggccagtcgttcttcccgttcctccgacctcaaaggagaacggaaagaaagtcgccgcggcagcaataccgttctaccccgacgtcctcttcatcgggagggcagagtcgcccgccgtctccgacgatgaaccgaccgcgcccggagaagaaccgcctcagcgagaatcccgccgacgaaggaaccgacgcaggaacgttcgacgacatcacgcagctggagaacgggatccggagcagcctgtctcgcgagacgaggtctcagagataggagaaactccggaagaacgcgtcttcagggaacgaaggaactcccgacgacgtgatcgccgtcggactcaggagcaagccgagcaagatgcaaggcaacgacgcgagaatccgctcttcgggcgcaacctgaaccccgacttcgcccgagctatgaacacgccgagcgaagtcggaggcgttctagcccggatagctgacggacttcctcggacccccgacgccgagggataccggcgcctgttcactcaggcagccaaccatcttctaccgctcgcccacccgccgaacgatctgcgacacgccatcaacagtcgccgagacgcgcgaagctctatcaatgcttcgcgcgaacggcggcacgagaacgaaattcgccgtcgggaggagtatgaccgagatcatggcttcccgactcaaagccaggccacccgaactgagtcggcaacagcttcaactggtggaaccacccggggacggtcgaggaaccaccaccgccactcccctccccgggacagacgacatcctcgacgacaggaggacacgtgcggagtatccgcccttactccgcgccttagggccatccaatggcctcccaacttcaaggtatccaatgtcgacaaatatgaacctaagcaggatccagggggctggttagccgtctacaccaccgctgctcgggctgccggggcatccgaggacgtcatgactgcgtatctgcccatcgtcctcgggcaagacgcgctgcagtggctacgacatctaccccgacactgcatcgacgactggggagacttcagtcgacgtttcaccgccaacttccagtctctctccgacaagccagcgcaaccatgggacctcaaatccatcaagcgccggggggatgagactctccggtcataccttaaaaggttccagaccatgagaaaccgcatccccgaggtcacggaggcggccgtgatcgaggacttctacagaggatctaacgactcggctttcgtccgagccatactgcaaaaggcgccgaccacctccgaggagctgttccgggaagccgacctctacatcaccgctgacgagcgggcccaggacctcatcggaggagcaaagcccgcaccggcggcaccacgacgcgacgcgaaccagccgcccgacaagcgctgggagaagaggcctcgcgaagaggtacacgccgccggaccacccgcctctcgcgcccgaggaggacctcgtggaggcgaacgcacgctggacgacatcctcgacgcccagtgcccgtaccacaaggacatgcgccacactctccgcaactgccgggatttcaagcactccgtcgggcatggccgacccttccaacctctaccgcctcctccgccgaggggaggaccagatgaaccacgacagccccatcagccggaggaggggggaggaggagctttcccgcgcgttgacagggaggtcaacgtcatcttcggcgggcatgggtcgcaggagaacaagagacaacaaaagctcaacgaccgccagatactggtggcgaccaccggccctcccgccccgtaccggtggtcggagcacccaatcacgttcactcgggaggatcaatggctcaacttcgaccacccgggcaaatacccgctcctcgtcgatccggtgatccgagagagccgggtgaagaaggtgctagtggacggggggagcagcatcaacgtcaccttcccccgtacgctccaaggcttgggagttcacctcaaagagctccacgagtcagacactcctttcttcggcatcgtgccgacggaaggggagtacccgctgggccacatctacatgccggtcaccttcgggactccggataactacagaaccgagttcctgaggttcgaggtggcgaacttcgactgcgggtacaacgccatcatcgggaggccggggctggccaaattcatggccatcccacactatacgtacatgatactgaagatgccaggaccgcaaggaatcataactgtacgcgccgacttccaaggcgccgcagaatgtttccgagtggccatccaagcagccctcaccaccaagccgtcagcggttccttctacaccggcgaactctaagcctgaggaagacctcgccgtgccggcaaacgaagctcaggccgcgacctctatgcggccgactgaggacaccaagcggatcaacctggggttcgctgatgagcgcaagacggccatcatcagctccagtttgagtgacaaatag

SEQ ID NO: 158178 - DNA, 749 bp, Zea mays
  Clone ID: MRT4577_75835C.1
cacaagcagctcaaagctctagttctagctagctagcaaagggggggaaaatggctccgcttctcgctgctgccatgaaccacgctgcagcccatcctggccttaggagccacctagtaggacccaacaatgagagtttctcacggcaccacctgccgtcttcttctccacagagcagcaagcgaaggtgtaaccttagctttactacacgatctgcaagagtaggcagccaaaatggagtccaaatgttgagcccctcggaaatcccacaaagggactggttcccctctgacttcaccttcggtgccgccacttcagcgtaccaaattgaaggtgcttggaatgaagatggaaagggggaaagcaactgggatcacttctgccacaatcatccggaaaggatactggacgggagcaattggagcttccagcagtaaaaaggcacatcagtgaactgacacaacgttttgccggtcgaaagataatgcttggtgttgatcgacttgacatgattaagggaattccacaaaagattctggcatttgaaaagtttcttgaggaaaacccagagtggaatgaccagattgttgtatcaataagaactgacgtccttgagtgcatgaacgctttttgtgttctaccttcatttgctaatacttaatgcaagtctgcaagcatgtgtgcagcatagaagggtcagaaatatgatttgcttgctctcatgaattcttaaaaaaaaaaaaaaaaaa

SEQ ID NO: 158179 - DNA, 220 bp, Zea mays
  unsure (1)..(220): unsure at all n locations
  Clone ID: MRT4577_75836C.1
cacccggcaaagaccacgagcagcacccccaggcaaacaaacgagggcagaggccaccagacaacgacaacgagggaaccaccgccggcagaccaagngcaaaaagaggggggagcggccccgaaggacgcacagncccacggacgcgccaccagcgggggccggggaacangcccaccgcgagaaaaggagccacacggccaagcaggagggcgcggcc

SEQ ID NO: 158180 - DNA, 1554 bp, Zea mays
  Clone ID: MRT4577_75837C.1
atgactgcgtatctgcccatcgtcctcgggcaagacgcgctgcagtggctacgacatctaccccgacactgcatcgacgactggggagacttcagtcgacgtttcaccgccaacttccagtctctctccgacaagccagcgcaaccatgggacctcaaatccatcaagcgccggggggatgagactctccggtcataccttaaaaggttccagaccatgagaaaccgcatccccgaggtcacggaggcggccgtgatcgaggacttctacagaggatctaacgactcggctttcgtccgagccatactacaaaaggcgccgactacctccgaggagctgttccgggaagccgacctctacatcaccgccgacgagcgggcccaggatctcatcggaggagcaaagcccgcaccggcagcaccacgacgcgacgcgaaccagccacccgacaaacgctgggagaagaggcctcgtgaagaggtacacgccgccggaccacccgcctctcgcgcccgaggaggacctcgtggaggcgagcgcacgctggacgacatcctcgacgcccagtgcccgtaccacaaggacatgcgccacactctccgcaactgccgggatttcaagcactccgtcgggcatggccgacccttccaacctctaccgcctcctccgccgaggggaggaccaggtgaaccacgacagccccatcagccggaggaggggggaggaggagctttcccgcgcgttgacagggaggtcaacgtcatcttcggcggacatgggtcgcaggagaacaaaagacaacaaaagctcaacgaccgccagatactggtggcgaccaccggccctcccgccccgtaccggtggtcggagcacccaatcactttcactcgggaggatcaatggctcaactttgaccatccaggcaaatacccgctcctcgtcgatccggtgatccgagagagccgggtaaagaaggtgctagtggacggggggagcagcatcaacgtcaccttcccccgtacgctccaaggcttgggagttcacctcaaagagctccacgagtcagacactcccttcttcggcatcgtgccgacggaaggggaatacccgctgggccacatctacatgccggtcaccttcgggactccggataactacagaaccgagttcctgaggttcgaggtggcgaacttcgactgcggttacaacgccatcatcggaaggccggggctagccaaattcatggccatcccgcactatacctacatgatactgaagatgccaggaccgcaaggaatcataactgtgcgcgccgacttccaaggcgccgcagaatgtttccgagtggccatccaagcagccctcaccaccaagccgtcgacggttccttctacaccggcgaactctaagcctgaggaagacctcgccgtgccggcaaacgaagctcaggccgcgacctctatgcggccgactgaagaaaccaagcggatcaacctggggtttgctgatgagcgcaagacggccatcatcagctccagtttgaatgacaaatag

SEQ ID NO: 158181 - DNA, 2522 bp, Zea mays
  Clone ID: MRT4577_75838C.1
atggccgtcaccttccaccgcaagatcaccctccgccccggatctgtgttctgctttggaactatctcatccgtagcagatgaagaaggaactctacatcgcatcgcagatccgccaaggaagaagtctcctccaacaaactccgagaatatcggagtaagaaaggaaaaagcgcaacctccagcgctccgaaaaaagatcgccttcaacaagccaggggccgagggcccgctgacccggagaactccactgtctacttccccgacgaaagaatggacacaaatcgcaaggaagaaagaaacaaacaaaaccggaatgaagcaagttgttctttccgtacctccgtcctcaaaggagagcggaaagaagatcgccacgacaactgcaccattctaccccgacgttcttttcatcgggagagtggagtcgccccccgtcttcgacgacgagccgatcgcgcccggagaagaaccacctcagcgggaatcccgtcgacggaggaaccggcgccgaaatatccggcgacatcacgaggccggagagcgggatccagagcagcccgtctcgcgagacgaggtctcagagataggagaaactccggaggaacgcgtcttcagagaacgaaggaactcccgacggcgtgatcgccgacgagctcaggaacaagccgagcaggaggcaaggcaacatcgggaaaatccactcttcgggcgcaacctgaatcccgacttcgtccgagccatgaacacgccgagtgaagtcggagggccaaccaccttctacctctcgctcacccgccgaacgacctacgacatgccatcaacagccaccgggacgtgcgaagctccatcaatgcttcgcgtgaacgacgacatgagaacgagatccaccgccgggaggagtacgacagggatcatggcatcccagctcggagtcgggccaccagaactaagttggcaacggcctcgactggcggtactacccggggacggtcgaggaaccacaacgactactcccctcctcgggacagacatcatccccgacgacaagaagacacgtgtggagtgtctgcccttactccacgccttagggccattcaatggccccctaacttcaagcgcaaccatgggacctcaaatccatcaagcgccgggggacaaaactctccggtcgtacctcaaaaggttccagactatgagaaatcgtatccccaaggtcacggaggtggccgtgatcgaggacttctacagaggatccaatgactcggccttcgtccgagccatattgcagaaggcgccgactacctccgagcagctgttccgggaagccgacctctacatcatcgccgacgagcgagctcaggacctcatcgggggagcgaagcccacactggcagcgccacgacgcgacgcgaaccagcaacccgacaaacgctgggagaaaaggcctcgcgaagaagtgcacgctgccggaccacctgcctctcgcgcccggggaggacctcgcggaggcgaacgcacgctagacgacatcctcgacgcccagtgctcgtaccacaaggacatgcgccacacccttcggaactgcagggacttcaagcactccgtcggacacggccgacccttccaacctctacctcctcctccgccgcggggaggaccgggagaaccgcgacaaccccagcagcaggaggagggaggaggcggagccttcccgcgcgttgacggggaggtcaacgtcatcttcggcggacacggatcgcaggagaacagaagacaacaaaagctcaacgatcgccagatattggtggcgaccaccggtcctcccactctgtaccgatggtcggagcacccgatcaccttcactcgggcagatcaatggctcaacttcgaccacccaggcaaatatccgctcctcgtcgatccggtgatccaagagagcagggtgaagaaggtattagtggacggggggagcagcatcaacgtcaccttcccccggacactccaaggcttgggagtccacctcaaagagctccacgagtcagacactcctttcttcggcatcgtgccgactgaaggggaatacccgctgggccacatctacatgcccgttgttggggacttgttctcaagtgctatgagttaaccctaaatgagtatctcagtactatggatccttcaacggttcagggattagtgtgtgcacaagattggttacgggatgacccaaaagttgttgctggttcaggtggtcatggagatgatggagtaccgcgtggtgacgaacttattgtggtgccaaaataaaaccccctgaggcatttgcggaccctcccccgaaggggggcgacgaaattagacaaatggtcgaagccatcatggacgaagttgtcaatcagctactaaacgaagctgcagaagtagttcttagggaagattaaatgctattgtaaaaaaacttggaacatgacatgtgtaaaactttgtaactttgaatgtaaaatatattctatttatggttcc

SEQ ID NO: 158182 - DNA, 1626 bp, Zea mays
  Clone ID: MRT4577_75839C.1
caagggttcctgggtttctcagtctttgactgagagcttctttgtgcaataccatggtgcggtttttcctcaccggccgagtatctgtttttgaaggtagggtttgtacttttcttcttttttaacaaagagataaattgctcgcctttgtgttccagaagaaaaatctcagcaattgtcaaacttcagtttttagttaaggttaatagataccaaacaaaggatactatactattgtttaatacatcgtatattatttggctagtgccagcctttgggctatagaatcctctaccaaataagtagcagatttatttggatggaaggagtgtatctcttattaaatacatacgacaaacatttaaggaacgaacgtcacaaggttatcaatagtaagcttgactgaccttgagttgaacaaaaactttcatgaagacgtatctttggcaatgaattggacaggtaaggttcaagaacacttcagctaaataaatgagtagagttaacatatatctttctcaagggatgggggactaggggagtcactagcattgattgtgcaccttgaatccctttcttttcttatataaggaggtatcctctacactaaactacgaacaagtatcagagacactctctgtcaggtgtctgcaatggacaacctcaaaacccattctgaatatgccgatcaacctcaggggccacaagcaaatgccgtttctttcgctttaccaacaggtcaggtcttagacttagatagtcatatgattggccaacagcacacgaatctgtcatcattctggttctcccttgagcagcacaggctgcagttggatcaggcccttcaactccataaccaacagttgcaggtgtcactgcagcagcaaatatctatgcagaactcaactctactgaaccttgtggaatctatgacaagagatgtgctgatgcaaaagaatgatgagatagccagcctgcgagtagagttgcagaggaaccaagaggatctagaaacaacactgcatgacagagatgagtggatgaaggtcgctatggccgcttatgaaattaatcagacacttatccgcatgcttcgtaccgtgcagctggaagcgaattctcatgtttcatctaatgatctagatgctccaagttatagtgaagcatcgagcatggcgaggacagcattggagacagcacagcccaatctgatctgcaaggtctgcaactctggtaatgccggcgtacttatgttgccatgccaacacctctgtgcatgtaagccgtgcgtagcctggcttgcgacatgtcctatctgtggtgctgtgaagactgatgctatcgaggctcgatttgtttataagaagtaaaaacgccaaagcagcaatccgaattcgtttataagagcatgtcagctttcctttttttcgtgttaggtgttataggctgtagccttgttctgttatgcattctggtataatgttctggtagtcttcatgccgatgccatgtttttggattctcaaaatgttttgatatagttgccacgttgtcttcggttaaaaaaaaaaaaaaaaaaaaaaaaaaaaaaaaaaaaaaaaaaaaaaaaaaaaaactcgagagaggg

SEQ ID NO: 158183 - DNA, 452 bp, Zea mays
  Clone ID: MRT4577_7583C.1
gaattcgctccaggggattccgaagaaggcgactggattgaggtgctcggggagcaatgtgaggccaacggtttggtaccaccgaccaaagaggtggccaaggagacggccagcgaagacgagtgccagctcctgatcctgagtggggtgttggaaacagaggttgacttcgtcgacgccgatgcagagggtgatcatcgtgctaggtgttctgtagatgtaggattagctactgttccgtcagttgagcagctgcaggaagagcagccaactgtttttcttacggaggcttgtcataacaatactgaaatgtcgaagtcatttttaaaaaaaaaaaagggggggagagttatatattaataataaaaataaaaaaaaaaattataataaaataaaaaattaataataaggcggcccccacataattggggggccccccactaatatttttt

SEQ ID NO: 158184 - DNA, 238 bp, Zea mays
  Clone ID: MRT4577_75840C.1
cccacccaatcttccactaacttcccatttatataccccaaaaccacacgctggggcctttaaaattatacattcactccccatcattcaaacttccctatactactctttttttcacaacactatatactttctaaatcttcctctttccctactatactcctcatataacactattttctttttcaataactccatcttaataaatattatctcatcactctttctatcaattatc

SEQ ID NO: 158185 - DNA, 302 bp, Zea mays
  Clone ID: MRT4577_75841C.1
cttaaatatccgaccactcgtgcggggacagcatacacctcatcgacgcaccctaccgctacattgcctacagctgactcaaggacccctactgaaagcctacaatacagacctgatctagctagctgggccgaagcactgaataactaattaagctagcaggataatactcatgagtgacaacattgtgctctgtttgttgacagataaatgccatgtgcataattctagcactatagcaggttgatcaatgatgggtaagctatcggcttggtcaaaaaagaggagtaatctgccctggt

SEQ ID NO: 158186 - DNA, 320 bp, Zea mays
  Clone ID: MRT4577_75842C.1
ccaaaaattttaatttaaaaaaaaaaaaaaaaaaaaaaaaaaaaaaaaaaaaaagatataaaaaaaaagaaaaataaaatgggggggcctttttaaaagagatccaaatttattttacgcgtccttgacaacattatggctttttttttggtgacacctaatttcatttttgtggccgtggttttacaaggttttgtctgggaaacccttgtttttctccattttattgggtttgcagcaattccccttttcaacacctggcttattttcaaaaaaggcccgctctgttaaaattttccaaacatttggccatttttgat

SEQ ID NO: 158187 - DNA, 676 bp, Zea mays
  Clone ID: MRT4577_75843C.1
atccatccatgatccatcccccgcttcctcctcatccacactccgcagtgtcggggtcgctcaactcccacaacactctgcagccagcgatgcaggccctcacagcgaggtcccctgcttcttcgtcctgcccttcctcctccaccgtacaccgccgcggcggcacgcgcacgcgcagcaccgcccgcttcgccccgccccgcgccgcagcggcagcggccaactcggtcttcagcgcgccgcccgcagccgtgcgctacgccgcgccgcccaagccggcggcgcccattgcgccagtgcccgctccggcgccggcggcgggcggcgagaaaggcctgagcttcctgcagcgcgcggcgtcggcggcgctggacgcgttcgaatccggcgtgatcgcgggcctcctggagcgtccccgcgcgctgccccggtcggcggacccggccgtgcagatcgccggcaacttcgcccccgtcggcgagcagccgcccgtgcggtcgctgcccgtgtcgggccgcatcccgcccttcatctccggcgtgtacgcgcgcaacggcgccaacccctgcttcgaccccgccgcggggcaccacctgttcgacggcgacggcatggtgcacgcggtccgcatccgcaacggcgccgccgagtcgtacgcgtgccgcttcaccgagac

SEQ ID NO: 158188 - DNA, 344 bp, Zea mays
  Clone ID: MRT4577_75844C.1
aaaccccaaaactttttttttggaactgggcggggaaaaagaccatcagcttccgggggggaagcgggcccctttaaaaaatccggcctacaatataaaaagggccgggggtcccccctttttgggcccccccaaacccaagggaaaaggggccaagggccccccatattggggcaccaaaaaccccttggggactattttggggggggggatttttttattcatggggcactatgaacacctttggccctttttggggggggggattatggttaaaaaaggggaaagagaaagctccggggggtctaattctcaacccaccggtttaagcttacccatggcct

SEQ ID NO: 158189 - DNA, 274 bp, Zea mays
  Clone ID: MRT4577_75845C.1
tccctccctcttgcctagctctagctagcgcttcctgtagcgcggcagagaggctgcccctgcctccaccacggcggctggcggcggcagcgctgctgctgcggcgcctgctgtctctcgcctcggcgggggacatgtcgatcgcgtcctacggggagcgcaccgaccaggaggcgcggcggatgcccgcggagtggatggcggcgcacggccggacctacttcgccgggggcgaggaggagcggcggcaccaggcgcgtccgggacatcctcc

SEQ ID NO: 158190 - DNA, 267 bp, Zea mays
  Clone ID: MRT4577_75846C.1
agtaccatgtccgtgcacaattatatttaatacccataaaaaaatatatgttctatacacatttggatcttctatacatatttagatctcgagatgtcccattcccttcatcaacaaaataagttcaagaaattttgtttgaggcctaaatgacctcagaacaaatgtttacgttctgacaaatattttttaagatcctagaacataaaagaaccacagattccaatctaaaaatcagcttgccggcattgacttggctccacgacg

SEQ ID NO: 158191 - DNA, 421 bp, Zea mays
  Clone ID: MRT4577_75847C.1
ccggcctgcgctatccctcctatatccccgctctgcgcctgctttatgtggcagctactggttgcgcctgtcgatccgatacgtcgagcgcatccagctcttccccgctcccatcgaagctgtggatcgccgagagcccccacaagatcgcatacccctacctcgctcccatgcgcaaggacatcgagcgggacgagcccatggcgatggagctccagaacatcctccatgtgcatcgatgacgactggcgccgcacgacgcagatcccatcttcctaacggaggctccaccatcgtagccgaggtgaccgagcatctgccacaagaacgtacatggcgacgtcggcgtcgcgggcgactctgatgccgaatccgacgatgaggatgccggatcccgacacaggagcggcgcttccgcgga

SEQ ID NO: 158192 - DNA, 429 bp, Zea mays
  Clone ID: MRT4577_75848C.1
agctcggaattcgtctcgagcgcgcttaaaaaccgaacaataacatcggcccagcccatctaactttagggagtctttttaaagacaagtacgggcactccctatcctggccctaggccagatagcgctagcgatcattgtcctcctcctggtcgtcccgcagaatagcggttgacagacaaactactgatgcagcaggtacggctactgcggcacgaccgacacctactgcggcgacgggtaccagacgggcccttgccgctcgagcggccatggccgcggcggcgactgaaggaggcggcgaaggcagtggcggcgccaacgtgactaatgcggacaccgacgcgttcttcaacggcaatcaagaacccaggccgggagcgttttccagctcctgaatcttcttaaaactagactcaattcctaaaa

SEQ ID NO: 158193 - DNA, 982 bp, Zea mays
  unsure (1)..(982): unsure at all n locations
  Clone ID: MRT4577_75849C.1
gccggtcaggttccggatccacagacacaggtactagtactaccatatcatgtgacgtggatgcggttgtgatgtgagcggccaaagatgcacaagggctcgaacggccgggtctcccccttttcacgcggtggagtcgagccgaactcaacccaacttctctccctctccctcgcctgcctgccgttccgcgtttgaccaactcccccgcaccgtaaccctagcagcagatcggccatggagagctgggcgacctgggtggggacaagcgtcacctccgccttcttcgcctccctcgagcgctgctcctgcatcaacctctccaccgacgacgacgacgacgacgaggaccacgacgaggccaaggaccggcccctcatcctcgccgccgccccacgccacgactccgccgccaagcccgatccagactccgccgccgaggaccaggacgaccagaagcaagagcagccgccgctgccgcccgtatgaatcgaacccgattccttgcttgtactagctgctactgctgttatgtcgccaaataaagtcgtgtgtgcgtgtgcagtcagtactactgctctgctgctactatcctagtcctagtatattagtatattatacagtcctctctgtgaaatttgaatcgactcgaaaaccaaaccccaccaacatgagcttgttaatatttgtcctcccgaatcaaccagcgcttgttaataatggctgatgatgcatgcttctactaaaaaaaaaaaaaaaaaacccgcggccactctgcaatcactttgaacttgaattttcatgtgtagtgtagtgagtagtgcagatttgtatatagatgtggcttgttgctgcttgctgcgtagtaagtaaagtaatccattcactgggaatgatcttccgatggtgttcatgaaaatagcaccatctgtactttctatccagcggtgcttgcaataataagaacgattnaagtttcccc

SEQ ID NO: 158194 - DNA, 211 bp, Zea mays
  Clone ID: MRT4577_7584C.1
tataatattgagtaacctttctctcggggttgcgggcaacataattcaatgttcatattatttaaatttcctctaataaaaaatttatactccttgctttaacctacctacatctaaatatgctgtagtttgccttacatgccaaacactataaccttacaagaagcatcccattgtcgtttcacacattttttcttccttttttacataa

SEQ ID NO: 158195 - DNA, 296 bp, Zea mays
  unsure (1)..(296): unsure at all n locations
  Clone ID: MRT4577_75850C.1
cctcgaggcggcggggggtatttaaatccgaggctgccccctgctcccgaaccgaaccagaacacaggatatctcgttaccattgtaggaggggatggatcaccgtgggagaaagtggggacgccgcgagcaggattcgttgagcacgacatcgtgatttccgtagcgaggttacgagaatcttgaagaccaagctggtacctgggaatcttgagtctcaggagaagagcaggtggttcaggaggagccacaaggcgaggagtatngatcntnngatctannggtggcnngtttct

SEQ ID NO: 158196 - DNA, 406 bp, Zea mays
  Clone ID: MRT4577_75851C.1
aaataaaaaataataaaaaaaaaaaaaaaaaaaaaaaaaaaaaaaaaaaggacccaccggtgtaaaaaaaccaagcttacgaacacataccttgcgacgtcctacctcttctttcgtgtctcctcatcccgtttttcctgtcccttgttcttccccttcttgacttggacacccctggcgttccccatcttattcgccttgcagcccgtccccctttcgccttttggcgttttaaccaattggcccggccggctcgcctttcctaccagcctcgcagcctgactggcgattgggactctctctggctctggcccttaagctcggttgctgtgggggtttcccccaaccgtggctcctttcacttgccagcgctcctatgccccctcctttggctgtctttcctttc

SEQ ID NO: 158197 - DNA, 791 bp, Zea mays
  unsure (1)..(791): unsure at all n locations
  Clone ID: MRT4577_75852C.1
cacctccccttgcaaccctccgacgaccggatcgacttcgctccgctcaaatggagccgctgcctatccctcatcctccagcaccgcctcctgctctcacgtccgccctcgcccacctacgctcccttctctccgccgcatcctctgccctcgccgctctaccctctcctctccaaccgcgcccgatcactcccatcgcttgtatcccttcacctcaggctaccaccacaaaacctccactcccgccgccggtcaccgctatcaacctcccgctcccagcagccccagctccctactccgactgccctgccgtcgtccgtttaaggccttccccaacctccacggccatctccctccccgccttcctcgctgccgtatgcgcagatttctcctcttccactaccggcccgagcccctcccatccgccccgcatcctgccatcggagctcagcctcctgcgccgggagttggactcctgggctacgggaggccaccacctcccggggtcatactcctacgctgtagcccgggtaggggcctcgttctgctcgggtgtgacgccacggtgggaggccgagctgcgtcagtgggtgcttgagaactcaccgaggtacggngtcaaggtcaatgtcacggatgcggaccatatcttggtgctattacggctcttgttgaaggcgatggcactggaggccatgtacttgctggaggggatgcagaatgtcgacaacaagagggtaggctttgatcccagggccatgagggttgagtgcccctagctggtcgagggc

SEQ ID NO: 158198 - DNA, 238 bp, Zea mays
  Clone ID: MRT4577_75853C.1
acaaaataacaacacatttttttatcttttaacaaaaatcttttgcaaaaacaaatacccaaaaaaaaaaatacccgctaacttaagggtcgccaggggtcccaataactaggaaccggccgaatatgacctggcccaaaaaaaataacccccacgaaagacccaccccaccacaaataaaattaaagggggcacacccgaacgggcccacacaataattcctggaagcgactgggcc

SEQ ID NO: 158199 - DNA, 226 bp, Zea mays
  unsure (1)..(226): unsure at all n locations
  Clone ID: MRT4577_75854C.1
ggccgaccgacgctgttttacaaagttccacctgctgagcttgctaacgtaccacagaactttcctgaatgcccatgctggaaaaaagaaggctatcctggccgtgtccccggaggcaagaagacggttccttaccagccgggtgctttcaacaagcggggggggccgtcattgnatagtttcccccacccacggaaatcactaaatcctctgcgaaggaaggaag

SEQ ID NO: 158200 - DNA, 585 bp, Zea mays
  Clone ID: MRT4577_75855C.1
gcacgaggagagagagagaactagtctcgagtttttttttttttttttgaagcaagcacagcacagcactctgaattcccttgttcagcatgaacctgacaatacaacagcagcccctaagtcatcgtcgatacacaagatgcgattgcgaaaggtacaagccgatttccaccatgggcaacaagcaaacgtaaggtttgcctgccctctagggtcaccttggtgacacgcccaatcaaggaactttcagccctctttacatctagcaaggcgttcgctagctacatcgctcctccatagcatgccctcacgaaacagggatctctccagcacgtccaccaccggttcacttcctcatgtgttcaggaacgatccgatggacaagctcgattgggagcccttcgagttcggctgctgtgaagtcgaacagcgctggcagcggtcgtccacttggcaagcagaccttggggtcccgcagctcatcaaagaatggatgggcacaagcatcaacagcagtgcagcgcaggtttggtgagtactgaagtagccttgacacgagatcaacagcttcaggtggcatgcgct

SEQ ID NO: 158201 - DNA, 540 bp, Zea mays
  Clone ID: MRT4577_75856C.1
aaaaaccaacccccaatttttttcatgataaacccatttgctgccccacaaaatttttgggaaaaaaaaacacaactggtccttaaaaccagtttagtaacgatttccgacccaaaccatacaaattttttgaaagacagccccatccttgggcaagggcaaaaaccctggataacccaaatcccgaggcggtttcaacgaatgggggtttaaaaacccccgcaaaaacggagcaccagggggggggggccccccttcgggatattgaaaccggaaggggggcaaccattctccaattgtttgccggaaaaaaaaaaacccttttggtcggggggaaccccccccttggccgggatcttaaccttaacattgccaatggggaaaaaaccctcaacctccagggttatggtcttgccagtaaagggcttcaaaaaaatttgtattccccccctcagggggagcaccaaagggggggggccccccttccggaatgttgagacccccaaggggcaaccattctccaattgtttgccggaaaaa

SEQ ID NO: 158202 - DNA, 356 bp, Zea mays
  Clone ID: MRT4577_75857C.1
aaaaaaaaaaaaaaaaaaaaaaaaaaaaaaaaaaaaaaaaaaaaaaaaaaaaaacaataaaaaaaaaaaaaaaaaaaaaaacaaaaaaaaaacaggcaggtcagtttaatggacccaagattcacaaccccgttcactggccgaactctgtcttctctcggcttagcttaactccttttacctgcccgtttcttcacacggcgtggtatggcaatgccctccgctgcccgaccttactaacagttcgcgcccactcccttttccccggttggcgccatgtggaatggcctcaagcgcgtcccctttagcagctcctccccgccttgcctgtgcactggcccgcgccctagcgcccg

SEQ ID NO: 158203 - DNA, 255 bp, Zea mays
  Clone ID: MRT4577_75858C.1
acagaaccatcaggccccgttttccattcttttttttaaaaacaacccctaaacttttgggaggcctttttaaaaattatttaacctccctcttttactatattcccaaataaacctaaagatatattgtcatgttataaaactcaaatagttcttttttaataattttattttttcttgccatctcaccagtgaccccccttcctcaccatattccccgtagctaggaaaattaactctgtaaaacccttacct

SEQ ID NO: 158204 - DNA, 392 bp, Zea mays
  Clone ID: MRT4577_75859C.1
gagcccacccccaaaagggccaaaattaaaaaacgggggcaaaaggggtttcccaggggcacaacccaaaaccccccagggaggggcccccaaggggtttcaaccgggagaggggaaacggagcccccccggggggggggccaaccccaaggtgaaaaaaggggggaaccccttaacccaaaggtcatctttgggggcggggaagcagcccccatcccaaaagggggggaatttcaactttgcagggggaggggggataccccaaacataaaaaaaaaaaatcctgcccgggggggggggaatgaccacaaaaacccgcaaattttcgcgccccttaaaaacccaaacccgggggggggtattcaccggggtccgaaaaagcgggcccgggg

SEQ ID NO: 158205 - DNA, 1069 bp, Zea mays
  Clone ID: MRT4577_7585C.1
ctgggtacctcgaggccggccggggccggagacgcaacacacatacagcccctcttgcccacaccacctcgctgaaccggaagacccgcacacacacgccacttgtagaccatggcgccccgggtggcggacaagtcgcctctaccgccggccaccggcctggggctgggcgttggcggaggagtcggaggcgtgggcatgggcccgcactacagaggcgtgaggaagcgtccatggggacgctacgccgccgagatccgcgaccctgccaagaaaagccgcgtgtggctcggcacgtacgacacggccgaggaggccgccaaggcgtacgattccgccgcccgcgagttccgaggcgccaaggccaagacgaacttcccgttcccctcccagtgctccgtcgcctccggtgctgccggtagcgccagtagcaacagcaccgtggattcgagcggtggcggtagcggctgtggcatccaggcgcctatgcaggccatgccgcttcctccggctctcgatctcgacctcttccatcgggcggccgccgtgaacgcagtctccaccggcatgcggtttccgttcaagggctatcctgtcgcctgcccgacgccacagcagtactttttctacgagcaggcggctgccgcggcatccggataccggatgctcaaggtcgctccaccggccgtgactgtggccgcggttgcgcagagcgactccgactcgtcgtctgtggttgatcactccccttcgcctcccgcggtgacggcaaacaaggtgggcttcgaactggatctgaactggcccccgccggcagagaactaggcaggccggagtttttggctgacgacttagtagcttccttttcccttttgccttcatcaggaatgttacttgtggttgttttggtcctgtatggctgtattcttgttctgtagactaagagatggggagtcttgtaaatattttttttccgtcgagacggaaatgaactgagatctgttcgtctgtctgatcaagccggcgttgatatgggcttaagctatggggtattgattagtaattgcca

SEQ ID NO: 158206 - DNA, 171 bp, Zea mays
  Clone ID: MRT4577_75860C.1
ccaacatgctgtcgatgtttacttttgaataagattctaggcgatcgcatatgccatatcatttagaatgccccataaacaaaccccgatctgtatttacattcgcttccataggatgtgtgctacatatcagaaaacagcaacttcattatttgacacaaaaaaaataaa

SEQ ID NO: 158207 - DNA, 395 bp, Zea mays
  Clone ID: MRT4577_75861C.1
ggggggaaaagaaaacaatttaaaacccttcaatttccaaaggggggggcttcctaaaggaggtcaaattcaaaaacccttagaaaaaaaaaaaatgggggttttttacttttttaaaaaaaaatttctttcctaaaaaaaggccaaggggttaaacggggaaactttgaaatccataaaaaatcccccccaaattttatgacaagggaaaaaaattttttaaaattttccggggaagggcacaattggcacaattaaaaaaacgggatttttggggggggccccaaatgggccttcttaaacccctcaaaatttttgagtttataagggttaaaaaacggggggttttacccggggtaaaaggccctcatttttgggggttcttttaggggggg

SEQ ID NO: 158208 - DNA, 199 bp, Zea mays
  Clone ID: MRT4577_75862C.1
ccaatcccctgtccatccagtgttgcgacgccactggcaaggtgcagttcaccaaggagcccaacaaccgttacaatgtgcactcctacaattactctgacctatcgaacaagaaaactgtatcgatccaaccatctgctggaaaggactccgctgcagtcctgtctactaccgataccaagaagcagaacacacccgc

SEQ ID NO: 158209 - DNA, 319 bp, Zea mays
  Clone ID: MRT4577_75863C.1
tcgtatgaggcgctgcactcgctcttcctctggctgctgctcctcgcccgcggcctccgccggtaccgggctgggactaggcgccgacacctcggcgtcggacgcggcggctggggccgggacctgctccacgcggacgtggtcgatgcggctgcaggccgctgacgaggaggacatgcgccgcatgcacggcgctcgccgttgaagtgcctatcaacgacgaccggggcactatcgtgggccaccttcatcgtcaccgtcgccagtaggaacgcccttttctgacgactctgtgctccggtcgttgacgaaatgaggg

SEQ ID NO: 158210 - DNA, 182 bp, Zea mays
  Clone ID: MRT4577_75864C.1
tgggttcaatccaattctcacggatcaaacaccactccaggccacgttaggaaggacatgacctggccggggaattcggctaaatttcacatcaaatcacttccacatacggaaaaatccgaggacaataacctaacggcatgcacacaatatctcactatcgataaaaatgggcactccac

SEQ ID NO: 158211 - DNA, 457 bp, Zea mays
  unsure (1)..(457): unsure at all n locations
  Clone ID: MRT4577_75865C.1
gggtcggccacgcgtccacggaacccggcgccctcaccgtcctcctcgcggacgagcacgtccgcggcctgcaggtccgccgcgccgccgccgacgactgggtcaccgtgcagcccgtccgcgacgccttcatcgtcaacgtcggcgaccaagtccagatactgagcaactccgtgtacaagagcgtggagcaccgggtggtcgtgaacgccgaggaggagcgcatttccctcgcgctcttctacaaccccaagggcgacgtccccatcgccccggcgccggagctggtggcggctgcgagcctgccggcgctctacccgacgatgaccttcgacgagtacaggctctacgtcaggaacaagggcgccaggggcaaggcgcagatcgaggctctcaangggcaggggaacacagaaagtcaattatagacgacgactagctagctactagctagtac

SEQ ID NO: 158212 - DNA, 192 bp, Zea mays
  Clone ID: MRT4577_75866C.1
cgggtggtaatattctcgatggcagtgagggatagaataagcagatgaatctggtggaggactgcagtaagtgctcatgggagtgtgtgtgacctccgtcttgtcgtgcgatggtataatggcacattattatgagatatgcaggctgaagggcattgtctcaaaggctgatgtgttccatatactttcagg

SEQ ID NO: 158213 - DNA, 268 bp, Zea mays
  Clone ID: MRT4577_75867C.1
acttaaatccctgcaccatgcactccgggtgaaatcaaggtatgtatgtatgcatgtacatagatagatagagaaggaggttcatcataccaaggcatgtacaccggtagacgatagagagagctgggtctgactcaggccctgggacgagcgcaagcccacgatttaattgatcttctcaaatatcaacagatagatggagcagccgagcttgacgatccatttctcccccttctttagcctgcttctgggctgggtacagtcgaaa

SEQ ID NO: 158214 - DNA, 2148 bp, Zea mays
  Clone ID: MRT4577_75868C.1
cgtggccgcctcctctctcttcttcctctttcttctagtttcgtctagtcttcaaggaagaccggaaccgaggcgccctggccgagaactggagccaccggacgcacggctgctgccgaaatccacgggagaatgacgatggccgaggccgaggctggtagggcggcgatccggcgcgccctgcggtcgctgaaacggaggcatctcgccgaggaaggggcgcacagcccggccatcgaggcgctaacccgtcccttcgccgcccacgctttggagtggaaggagaaggctgagaagcatgagttagagctgcagcaatgctacaaggcgcaatcccggctctctgagcagcttgtgactgagatagaagaaggtaaagtatcaaaagcactgctcaaagagaaggaagcgatggttacaagtttgcaggctgaacttgagaagacaagcgaagagaatgtacaactaaagcagtcgcttgacgaaaaaataaaagccttagatcttctcattcaagagcatcagacagtgaaatccgagcttgaacaagcattgacgaaactaaaagctgcagaggatgagaaccaaaatctggttgatcgatggatgctagagaagatgaaggatgccgagaggctcaatgaggccaatgcgatgtatgaggagatggttctaaagctaaagacagctggagttggtggtatacaacttaatgcacagcaagaaactgatggcatcatacggcgttctgaagctggttacatagaaacgccaatcccatcaacatgcacaataactatccgtgctcatgatggtgggtgtggagctttgatgtttgagcataactcagacaagctaattagtgggggtcaggatcaaactgttaagatatggggtgcatctactggcgctttgaccgccaccctacatggttgcttggggtgggttaatgatcttgccgtgacaacgataacaagtttgtgatcgctgcctgtagctccaacaagctgtttgtgtgggaagtcagtgggggacgtcctcgccacacgctgactggtcacacgaaaaatgtttcttctgttgatgcaagctgggtgaagagctttgttgttgctagttcatccagtgaccgtactatcaaggtttgggatctacagacaggtttctgcaagagcaccataatgtccgcgagcaaccccaactcgctagctttcatcgatggtgacaccatctgttcgggtcacagggatgggaatcttcggctgtgggatatccgcagtgggaaatgcaccacacagatagctgctcatctggatgtcacctcggtctgcgtgtcacggagcaggaattttgttcttacaagtgggagagataacgtgcacaacctttttgatgttagaacgctggagatttgtggaacattcagggccatgggcaacagagtggtgagcagctggggcaaaccttctattagccctgacgagaactgcatcgctgctggttcttctgatggatctgtttacatatggtcgaggctgaagaatggaacgccgaccatcctagagggtggtcattcttcgcccgtcctggcaagtgcatggtgcggactaggagctcttgctacctccgacaggaaccatatctatatctggtcttgagagatgtacaatttcatcaaggcgtggaaactggagagtttcgcatcatcagtatgctaatatgtgttctcttcatttcttgatgacactagttttcatgtgattatgtgaacgggttaactggttctgatttctggacgttgtaaatatcagaagtgattgttcatcgcagtgacgactacttcagttcgccatctgtgtgatggtttgcaaggtttttatggctgaaatttattggtattgatggttcaggtttgctgttattttaaggctaaacttttgagacaccagtcagctcagcaaacatcgtccagcattaaggaaaaaacaacattggcttgggaatagttttcaatgttaattttgcttcaattaatttattaagcactacatgatcctttcttgtgttctgctgagttgggatgttctggccttacctttcctatatttgtatagttaagtcaggatggcaatggaatatcttgcagaa

SEQ ID NO: 158215 - DNA, 385 bp, Zea mays
  Clone ID: MRT4577_75869C.1
attcggctcgaggccttgcaaggcctaaattttttcaataatggatcggaatcaagaggatccaaggaggtccgtttccttagagaggctgacaaaatggtgaggacaagagtgactcctgccaagaggcttctgcatttgttccagacgacttggcagcgcaacggataccatggttagatgcacctgctatactgatggcgcagatgtaccctagtgcaagaatctcagcttagattcatttaacgtactgagtgtgaaggcacaggaacacagatctgggctgagtggctggccgatggaacacctacccggtgctgcgtgcggtgcctacaaatatctacgctcgggacggatggctgctctctaaggagatggaacaaat

SEQ ID NO: 158216 - DNA, 995 bp, Zea mays
  Clone ID: MRT4577_7586C.1
cggacgcgtgggcggacgcgtgggctcaaggctcatattctatgtattttgtttgtcaatgaaagtggtggttatttaccaaaaaatataacacaactagattgacaagcatatacaactttacctcattcatatcatttccaatgatcatctgtgttaatgttccttgcatcctttcatgctgctgcacaatttttaataagcctggtaaattgcacttcgattgtgctaaatttacaccacctatgcagctgtaatttcctcttttgtgcactgtaatttctatatacttgtagtattgttttacctgcctattactgtcagattgatcatcttcctgtgaattcctgatttgttccagcataagttcagtgaagcctccctgcattgaaatacaatttagtttaaaaataaccttttgttatcttcagatttttgaatgtaagcaatgatttcctaacctttttgtatctgtaggtatttgaagggcctgcaacagatccgttgcaacatgatttgtagcttctgaacagtcaggtgttatattcattgtgaagtttctacaagatcatgttgttgatgtattcaaagcagatgtaaaagggcatgcatatatgcagatgtggaaagccaagcttttgttttctgctgttcatcagtgagtcatctgaaccacaagttgcaggttgcatgaaaaatcttcatagcaggaagcaaggaaagcgaatgaagtaactcgagggaactatagaccacacaagttcaagtccactaaatcaagttttattttgaagaccagtaattggactgaatccactactcctggaaatcagatttttttatagaaaaaatatatgaactgttactgcttgtgccactgcattagttagacattactctttcaacttcagagttcagacctactgcttacctaaaccagaatagtacgtctgagcttctgcatggtaataactaacgccacatatatttggggt

SEQ ID NO: 158217 - DNA, 346 bp, Zea mays
  Clone ID: MRT4577_75870C.1
gttcaacgagctagttccattcacgctgacaacgcatcttgcatgctctcttctctaatcggggtgttgaaaggctcgtggtgtctgccatgtgctctgctgtccagccagtggtttctcctaaacaaagccaacgcatttggcatcatttggctatgagcttcccagatgaactgttatcttcttcgtgaaagcggcctccgggcatttcatcagtccctgccgctgatggaatgatcaacccatcacatgaccaacagatggtggcaaacaactgtgcacatgtcatcagtcgtatcatgataatctcggcacattgtctggctgacgaagatgataatgcaac

SEQ ID NO: 158218 - DNA, 728 bp, Zea mays
  unsure (1)..(728): unsure at all n locations
  Clone ID: MRT4577_75871C.1
aaggaagatcggaaccgaggcgccctggccgagaactggagccaccggacgcacggctgctgccgaaatccacgggagaatgtttggaatccttcaactcggcagctaacgcagtttatttcttctttgctgtttgcctgacacgaggggtcgctttgctgttgttgccgggtgtgtgcaggacgatggtcgaggccgaggctggtagggcggcgatccggcgcgccctgcggtcgctgaaacggaggcatctcgccgaggaaggggcgcacagcccggccatcgaggcgctaacccgtcccttcgccgcccacgctttggagtggaaggagaaggctgagaagcatgagttagagctgcagcaatgctacaaggcgcaatcccggctctctgagcagcttgtgactgagatagaagaaggtaaagtatcaaaagcactgctcaaagagaaggaagcgatggttacaagtttgcaggctgaacttgagaagacaagcgaagagaatgtacaactaaagcagtcgcttgacgaaaaaataaaagccttagatcttctcattcaagagcatcagacagtgaaatccgagcttgaacaagcattgacgaaactanaagctgcagaggatgagaaccaaaatctggttgatcgatggatgctagagaagatgaaggatgccgagaggctncatgaggccatgcgatgtattgaggagatggttctaaagcta

SEQ ID NO: 158219 - DNA, 540 bp, Zea mays
  unsure (1)..(540): unsure at all n locations
  Clone ID: MRT4577_75872C.1
gccctggttttttttttttttttttttttttttttttttttttttttttttttttttttttaggggctgtccacttcagggcgaccccccggtgtcgttgcaaaatcaaacaagggatacaatatcacatgtgcaacgtacggtagtgatatagaggggggcgatgacaaggagcctccggcgagcgaggatgccatgcctagcgacacttcctggccctccgcccccccgtacgtagcgacacctttctgtttctgccccgcgccgaggttgcctttcttgtcgtgtgccggacgaggagggctaccaagagtccgttcccagacggccagacccagcacgttctatttccaaccaccagccacgtngtcagactcaactgtttgcttcagcaatcagtcgtcgtcagccacggacacacgacacgagcagaggaagctgagctcttgcttgttcctgcagncgtctgcaacccgtgccgacaagcggggcgcccgcccgttacgtgacatcgggtcccgtcggggccatggggatcta

SEQ ID NO: 158220 - DNA, 234 bp, Zea mays
  Clone ID: MRT4577_75873C.1
caaaacaatgaattttacgagggagggagcgaactatttaaataaaatttccctccaaagtaactttttttgttacacaggacactccaagtcctttctgcacaatacgtttgcacaacggaaagctgtccaaactatttcatacaaaatatgccggtatctcacaacatcctatgtgccctcgaagctcggactgtactctcaaaagaagcccacaactgcagccacttaagt

SEQ ID NO: 158221 - DNA, 648 bp, Zea mays
  unsure (1)..(648): unsure at all n locations
  Clone ID: MRT4577_75874C.1
ggggggggggggggggggngnngggggggggggnnnnnnngcgttcattgcctacatccagccggncgggaaccaagtatcttgcaatcacaacgaataaaagctctcgatctcgcctacatcgaggcaagaagagatcaatggcgtgcgagcagggaaggcgtgatacgggtgtgacagaaagggtgagtttgccgccccgcatggccaaggccgaggaagtcgaggagctggcggacatcgcacttcactgggcgtagtggagcagaggcatgcgcgcgtacatcgtctccactggttcgtctaacacaggaaaagaagttcaatctcgacagccttcctgaaggtggacgcggacgaagtgaaggaagccaccgacggccctacgcacgctcagaggcgatgcccgacctttcctgctgccgtaagaacggaagagaccaggcgccgaccatcgtgggtgccaggaaggacgaggtcctggtcctgatcgagaagcatgcctgccggctgccggctggccacatgcgccctgctgtacattgagtagcagtagtcacgtcagagcagccgatcaataaagggaataatcacgtgatggagtgttcaaatgttgggcgggtattacgtgcctggcctcatggacgg

SEQ ID NO: 158222 - DNA, 685 bp, Zea mays
  Clone ID: MRT4577_75875C.1
gtgttccatttgcttcggctcatctcagatcaagctagcgcacctgacacccaccacctccctcccagatccaccaccccagtcatgggcaccgcctttgactccccgacctcctgccccgcggccgcgaaccttccacgacaacccttgcccacctttggacggcgcgagacgcgccggggcatgagcgttgccgaaaacccggacacgcttacgccccggtacgattgcgcttggcgagatccgcaagtaccacaatacgacgaagctgttgcatccagcggctcaccttcaagcggctccgccgctagatcgcgcaggacttcaagacggagctgagggaccactgctccgacgaggcggcgatgcaagaggccgtggacgtgtacctgaagagactcttagaggacaccaacctctgcaacatccacgtcaagatggacaccatcatgtccaaggacatccagatcgacagccgcatcagggacgagagggcttgatcagcggcgatgctgcagttcttggctgcaatgtctgaagaatatggagcctagggctgatggtgatacagggtggcccttactggcccgaccagacgtcgcagctccaatatgctagcatttgggaggacgcgccgccgcaaggcatgttcatttgagcatgaaactcagaagctgcagatctc

SEQ ID NO: 158223 - DNA, 361 bp, Zea mays
  Clone ID: MRT4577_75876C.1
tatctattaggctaactctaacacacagcctgaagatatacatttcaccataagtgtgtttgtatatgctccgtctagctgtggtgctaagcatattgtgaataacacctcaaacttttctagggcgttcattgcgtgattgagggccaagtaacaggcctgcagttcttcactaaactccggcctgaattgccacgcactctaaaatgcgggtaccaggcgagaagtacccaggcaatccaaggacactactgactctgtgatcagcgaatgccgcgatacactttcaaggattctagcccttacagtgatcagctgtactgccttcggcctacaactcttgtgccagaagttagattgc

SEQ ID NO: 158224 - DNA, 131 bp, Zea mays
  Clone ID: MRT4577_75877C.1
agcgtccgtttttacagcctctgtacgcgcggctcgctggatctaatattacacatctagtgtacgctccacatctacaggttatatctttctccctgtggtgactaccccatcaatcgctctttccgtgc

SEQ ID NO: 158225 - DNA, 189 bp, Zea mays
  Clone ID: MRT4577_75878C.1
caagaaaacaaacagtaccaaggcaaatccattattaactttaccttttttagtaggatgcaacagagtcttttccattccacaatcacctgactagattcaggacggatacaccacaaactcacaaaattagtgaaacgcttctaacggtccgccatgcctcgccgaaaaattgttggacctctaacc

SEQ ID NO: 158226 - DNA, 764 bp, Zea mays
  unsure (1)..(764): unsure at all n locations
  Clone ID: MRT4577_75879C.1
gtcggactgctgcagcagctgtaatccatagatatctgtggttttgaacagccatatgatgtggatgtggggctgaacgtcacccaactatcaccgatcaagaagtactgtacattagagcagccttttgaccaacggcggggcccgagccccacacggcagcctgtgcgagccatgcgtgagatccgcccttctttatgagaacacgcgcgcggcgtgagctccgctgcaaaagcaaagcgtggaggtgtgaggtgctgggctgggggccatgccgggtacgcgtcacgggctcgtctttcttcgggggatcctttcaggtccaactgcagaagaacgaattcaacgcaagggctcacaaggctggtggtcgaacaggggtcgctatcagctgctgatatggcctgatgagcggtgggtactactgatccagccggttctaacagccgtcggctagatagacttgtcgtgtgcaaccagtcacgttgttggttaccaccgtgcaatcaggcgatctggtgcatccaatcaaaaatccaacaataaccgccattttatacttaacctcttctatctaaaacctattatccattttacatttgacgcttccactaaaataggtgggcattgtttggattttgatttgatgcactaggtcgtttggttgcacggttgcacttacaccattgcgcatggatatatccctgatgntggagacaccctaagagnccgttcgnttttatatcaatccaaatgcatttgag

SEQ ID NO: 158227 - DNA, 364 bp, Zea mays
  Clone ID: MRT4577_7587C.1
aaacaggaaacatccagataaatttccctttgggcgaaacaaccccgttttttgattatgagacctaagggggcaattcgatcatgcaacgttttttttttggtttacaggccaaaccaaaacaacgttggccaagacccattacctcaatttaaagggtccaaaccctaaaacgaaatcgctggggaaaaaaggctggggccttaactcatccccctaccaaacaaaaaaaaaattttggtcgatcataaaacaggtgacccccccccccccaattttgccggaacatccccaaaataatggggcccggccatggacatttggtaaccggggggctggtggaaaccttccttaatacccgggt

SEQ ID NO: 158228 - DNA, 850 bp, Zea mays
  unsure (1)..(850): unsure at all n locations
  Clone ID: MRT4577_75880C.1
ttgggtacctcgaggccggccgggaaccctcatcatcgccttcgcaggcatcgccctctcgccgggccgtccgattccgccatggcttccgatgagagcaaaaattcaaaaccagagaagccatcttcagcagctggacccatcgataagagagatggctgagcaaattgcaagtgaccctgtgttcaaccagacggctgaacagcttcagaaaagtgctcagggtgctggagaacagggtattcctgcattggatcctcaacagtatatggaaacaatgcaacaagtcatgcaaaaccctcagtttgtgtcaatggcagagcgtcttgggaatgcccttatgcaggatcctgccatgtccagtatgcttgagaacttgaccagtccagctcataaggagcagcttgaggagaggatggcccgtatcaaggaagatccatccttgaagccaattcttgatgaaatagagaatgggggtccatctgcaatggtgaagtattggaatgaccctgaggttcttcaaaagattggccaggcaatgggtgttaaccttcccggagattctagtgtgtccactgtgctctctggacccgaagagactgaggaggaaggaggggatgacgatgagtccattgttcatcacactgcaagtgttggtgatgaagagggtttgaagaaagctttagaaggtggagcagacaaggatgaagaagatgccgagggaagacgggcattacattttgcatgtggctatggtgaggacaaaatcttctcattgcctccttgaggaccataaacacagttgaagtgtgcagaaattctccttngagcgnnggccgcagttgatgcc

SEQ ID NO: 158229 - DNA, 355 bp, Zea mays
  unsure (1)..(355): unsure at all n locations
  Clone ID: MRT4577_75881C.1
tcctccgcggtgagctcgggctcgaagaaccgctcgcgcacgtaggacctggtgccccagcgcggcacggtccccggcgacgccggtgtcggcggcacggccgcctcggcggccatcgcgggcgggggcggcgcgggccggcgcgcggacagcgcggccgtggccgccagcgccgcggacgcggccaccgccaggcggcgcgtggtggacggctgcggcggcggcgcctgctgctgctgctgctgctgcgtgcccgcggcggcgtcgggcggcagggggcgccggcngcgctgcgatggcgnggnggagcacaggatgaggtgcctggcgagcgtggccctggcgaagctgaatg

SEQ ID NO: 158230 - DNA, 1130 bp, Zea mays
  Clone ID: MRT4577_75882C.1
attgggaccctcgaggccggccgggaacactcttatcgccttcgcaggcatcgccctctcgccgggccgtccgattccgccatggcttccgatgagagcaaaaattcaaaaccagagaagccatcttcagcagctggtgcaggcctccccaatccgtttgatttttcttctatgagcaacttgctcaatgtatctctcttgctattgccttaatatgttttgattaagaatttaagatgcttatgttgtacatagttttttctgtcggctgaaccacattcagattcatttggaattgttaattttactatagtgttgtatgctcgtcatgtgcaggacccatcgataagagagatggctgagcaaattgcaagtgaccctgtgttcaaccagatggctgaacagcttcagaaaagtgctcagggtgctggagaacagggtattcctgcattggatcctcaacagtatatggaaacaatgcaacaagtcatgcaaaaccctcagtttgtgtcaatggcagagcgtcttgggaatgcccttatgcaggatcctgctatgtccagtatgcttgagaacttgaccagtccagctcataaggagcagcttgaggagaggatggcccgtatcaaggaagatccatccttgaagccaattcttgatgagatagagaatgggggtccatctgcaatggtgaagtattggaatgaccctgaggttcttcaaaagattggccaggcaatgggtgttaacctttccggagattctagtgtgtccactgtgctctctgggcccgaagagactgattctccttgaggcgggggccgcagttgatgccctagataagaacaagaacactccgttgcactatgctgctgggtatggtcggaaggaatgtgtggatcttctgttgaagtatggtgctgctgtcacgctccagaatctggacgggaaaacccccatcgaggttgccaaactcaacagtcaagatgaggttctcaagttgctagagaaggacgctttcctatagagaagagaaccgccgattaagtgtattaaggccgtcacactattggttttgcattggtttatatctcgtcgtctggtatggttgtctgtagcttgtgaatttg

SEQ ID NO: 158231 - DNA, 1881 bp, Zea mays
  Clone ID: MRT4577_75883C.1
ggagagggagtgttttgttagagaagcgctagcccgcgcgcccgggattttttatcatactattggtttcattccattgtgatagcttttttttcgctcgctcccggcgggcatggtgttttgcggcaagcccacaagcgttttcctctccgagtcctccctggcctctcaaccactcatcatcgccttcgcaggcatcgccctctcgccgggccgtccgattccgccatggcttccgatgagagcaaaaattcaaaaccagagaagccatcttcagcagctggtgcaggcctccccaatccgtttgatttttcttctatgagcaacttgctcaatgacccatcgataagagagatggctgagcaaattgcaagtgaccctgtgttcaaccagatggctgaacagcttcagaaaagtgctcagggtgctggagaacagggtattcctgcattggatcctcaacagtatatggaaacaatgcaacaagtcatgcaaaaccctcagtttgtgtcaatggcagagcgtcttgggaatgcccttatgcaggatcctgctatgtccagtatgcttgagaacttgaccagtccagctcataaggagcagcttgaggagaggatggcccgtatcaaggaagatccatccttgaagccaattcttgatgagatagagaatgggggtccatctgcaatggtgaagtattggaatgaccctgaggttcttcaaaagattggccaggcaatgggtgttaaccttcccggagattctagtgtgtccactgtgctctctggacccgaagagactgaggaggaaggaggggatgacgatgagtccattgttcatcacactgcaagtgttggtgatgaagagggtttgaagaaagctttagaaggtggagcagacaaggatgaagaagatgccgagggaagacgggctttacattttgcatgtggctatggtgagttgaagtgtgcagaaattctccttgaggcgggggccgcagttgatgccctagataagaacaagaacactccgttgcactatgctgctgggtatggtcggaaggaatgtgtggatcttctgttgaagtatggtgctgctgtcacgctccagaatctggacgggaaaacccccatcgaggttgccaaactcaacagtcaagatgaggttctcaagttgctagagaaggacgctttcctatagagaagagaaccgccgaataaagtgtatcaagccgtcaaactattggttttgcattggtttatttatctcggtctggtatggttgtctgtagcttgtgaatttgatgttcttttcatagcgaatgccgtttttgaaccagtacttgtgtaagaagtacctaggcttgttcttgtcctccatatatgaatctttcacacttgtcaagaattgattacagttattttcaaggctatttcctccgttccaaaaaactcgagactagtcaaaaaaaatgttttccaaaacatttctcccgaagctagatacagtttgctatatccacaatttcaagggagctaaaggggaacgccttttcaggtgctaccctgagccttggaaggtcatgagtaaaggcatcgtcctacagctacatctgcctgcatcaacaagaggagatgccttcgttgaaggaagtgtccctcgacatccttccttctgtttagctaggacctctcgagagttgttgtgtcaataagagagtttacgcgactagatcttcatttctcacttctttggtttatacctatgctgaccggtgactgctaagttgcatattgccgctatcagaagttttccatgcagctttgttatctatgcaggggtttgtcagtttggaattctaaataataaaagggtgagagc

SEQ ID NO: 158232 - DNA, 464 bp, Zea mays
  Clone ID: MRT4577_75884C.1
acccgggggggggcccggggggtggccccgggatttcggggcgggcccggggggggttccaagtttcccttttggggggggggttaaaactggggggaattatgggcgtaggggatttctggggggaaatggtttccccttaaaatttcccccaaaaaaaaaagcgggaagataaaggggaaaaacggggggggctaatgaggggagtaacctaaaataaatgggggggggttaatggccggtttccaggcgggaaaactgttttgccaaattgtttaaaaaaatgggaaaaccgcgggggaaagggggttccggtttggggcccccgggggcttttttttttgccaaaggggaggggcaaaaaatgttgggcttttacgggtgggcccggaaaaggtcaagcaagggggcccccgtgggttgtcccaccgggggaaaaacccttttgggggggggtaaagggg

SEQ ID NO: 158233 - DNA, 573 bp, Zea mays
  Clone ID: MRT4577_75885C.1
gtccggaaccccggggtcacacatgccgacaggtctcctcaaaatccatccgttggggggtggggtgaacaaccaagctcatacatgtagaattgactatggcaaactcagtaatccttttggggactaatcaaactcacaaactaaactttatggctgatatccaacgaccaggatggcatttgcctcctagacaccattggataatcttatgcttggggacagcattgatactgccgcatcctaggactacttgcaccattccgtatgaaagcaccctacacctggaacagtctctcaacgtgacgagtgcttgaataaagagaacaccctcaccaggatgactatgaccctcaaagaagagttctgctacaccagtgccgacgtccaggacccaaacctaggccaggaggttctacctccaggccagcagcggataattgttgctactaagctagtcgaggacggactcgcgcttgacgatctacaacatacagacggagagcaccactgcacttggtgctcgctctgagaggacgtatacaaaactccatgtggaccctggcctggaag

SEQ ID NO: 158234 - DNA, 399 bp, Zea mays
  Clone ID: MRT4577_75886C.1
ggaatgattgtggcgggggagcgcgtgcaaccaggcgctgttgtcccgattgtacctgaggatctcgccctatcaggaacatgactgaggaagacttctgtgccttcaccctgctatgcggcattgaactcagccagtctgaggtgacatgctttgaagaaccagggcatcagattgtttcagaaatgggacgtgccgcgtagttactaggctttagagcgcgtttgacaaagttaacactggatcgccgtgacggtttgcctcctaactggatttgctcctccactgacgatcgcatggtgccccaaaaggaactatatcaaaagcatgataatacacctgaagatcgtactcacgatatgttataagcctgggatccctcattgggggccgtgaggc

SEQ ID NO: 158235 - DNA, 329 bp, Zea mays
  Clone ID: MRT4577_75887C.1
agaaaaaccgataaattcatgacaggcagatttccctataatttacataggggtttttttagttaaaacttggtacaggggaaataaataatggggcagggcccgtgcaaagacttattaacatttttgactagggggggggaggcctaaatttattcacggggttcttttaaaaggtatggctctactaaaaacttaactggggcgatgacagacccgccctttttttgtcccacgtaccctttattggacatttttttgggagcatgcctatccagggggggaacccaaattttttttttgaccccggctaaatttaccaaaatttt

SEQ ID NO: 158236 - DNA, 284 bp, Zea mays
  Clone ID: MRT4577_75888C.1
gactgtctaatgccatgcttattcttttgatgcacagcaggtgatgccataaaaagatatgtcgccacagatagccgaatgcggcccgcgcggtgtccactagggagacttaacgggcagagacagagagatgcacttgccgctgaggcagggaaaatgatagacgtccaacacatcgtcatcatcgcggccggagataaagaggtcgacgtagcaggtggccctctcaagcgcacaccaacctcttgagaagcagccctagccgtactcatagaagcatgcaa

SEQ ID NO: 158237 - DNA, 398 bp, Zea mays
  Clone ID: MRT4577_75889C.1
atgcacacatttcttaccattacttgccatacgatccccccttcgcatccaaatccccatctcaccgtggatggatgggtcccaaggccgagaactaacccgcggcgtacaagccggcagaagaggagcccgcggccgataatgcgcccgccgggaagaagccggaggcggggaatcgggtccccgcttgcaaggcccctgccaaggaaagcggcgagggcaataagggcaagaagaagggcaagaagagcgcggagacctacaagatctacatcttcaaggtgctgaagcaggtgcacccggacatttggatatcctccaaggccatgtgcattatgaactccttcattaacgatatcttcgagaagctcgctgctgaggccgacaagctcgcgcgc

SEQ ID NO: 158238 - DNA, 194 bp, Zea mays
  Clone ID: MRT4577_7588C.1
cgcacggatatctcggctcccgcatcgatgaagaacgtagcaaaatgcgatacctggtgtgaattgcagaatctcgcgaaccatcgagtttttgaacgcgagctgcgcccgaacccttctgccggtgggcacgtggcctgggcgccctgctcagggcctgcgttcacgcgcaccccgggcccggcccgggggcg

SEQ ID NO: 158239 - DNA, 429 bp, Zea mays
  Clone ID: MRT4577_75890C.1
actctatttctttcctttttagctttttctatttttcctttataccttttttatttttattctttattttttctatccgaaacaacacccaaacacaaaaattgataaatccaaaaaaccccatcccggaaaaaggcccccactgccaagacccccgcccccaaccaccctaaggccaaaccccgcaaaaacccaccccactggcgacccctcaaccaacccttaaaaggccccaacccccccaaaagcaagccgaataccaatccaccgcccgccgtttaacaacgacgaaacgggaaaaaccctggcacaccccaactaaagccccttgcaacacatcccccttcccccaggtggggaaaaacaaaaaaggcccgccccaatcccccttcccaaaaatgccccaaccgaaaggccaaacgaaccccc

SEQ ID NO: 158240 - DNA, 144 bp, Zea mays
  Clone ID: MRT4577_75891C.1
cgagcggggaaagtcggtggaatcaccgtatttgtaggattgacatttgcaagcataacattatttacttaacttgaacccggatttgagcaacaaatttttcttccacaaaaattccaattacaggaatattttgatgaccct

SEQ ID NO: 158241 - DNA, 113 bp, Zea mays
  Clone ID: MRT4577_75892C.1
aaattgtgaatgctaggcacgaggccttgaccgatcgcgcttgactagagtcgatcattccgagtggcgaatggtacgagcactttaaacgagcttaaaatgctgctgatgta

SEQ ID NO: 158242 - DNA, 314 bp, Zea mays
  Clone ID: MRT4577_75893C.1
tttttctttcggatttttttttatttcttttttattttttttttatttttttcttccaaccaaaaaaaactttatttttgaactatatctcataaccaatttaaaagagggccccaccaatggtgggttgtttgaaaaaccctgctggttttcgaaaaaacaatttgggacaatggcacctattgttacaattaaaaaagggtgccaatcttaggcccaggtggcaggaaaaacggcaacaaattttggtgggtaaaaaaagcaccatggctcacaacagctagttggctaaatgggaaaaatttttttttttg

SEQ ID NO: 158243 - DNA, 451 bp, Zea mays
  Clone ID: MRT4577_75894C.1
cccctcgagtttttttttttttttttttttttttttttttttttttttttttttttttttttttgttaatttttttttttttgagttactacagggcggtgaacagccaacaactgctttttccagatgtattactaaggaaaaagttgcttggttgctgccactagggcagtgttaaagccagtcccctgtgcctaagttagttctttggtcgggagggtgcggaaattgttcaaaattaaactcacgcttatggccacgtgaagagtggtttccttgagacctctctgtctagatggaggtgcaaaggaacaatgcggggacaccgtcaaccaggccgaccaccagagggcaagatgggtccacatggaccacgccggccttgacgaggaccactacgttgccgcacaccttgattttcaaggagagaaacgctccgcgcccagtggtt

SEQ ID NO: 158244 - DNA, 465 bp, Zea mays
  Clone ID: MRT4577_75895C.1
atggtccctgtccctaccccagcgcccccacccccgttaccccccgccacgatgctcacgttcgtgaggcgtcacgcgcacatcgtgcaacccaaccccttccccatcccccaccagcgatgcacaaaaccccactcaacaccatccaccactccccggcgtggaggtcggaggctcctcaatccccatgccgccattgaccccaactccaagctcgagttcgatatgcccgatgtcttgcgtgtgtacaagatcgattgtgtcgagcgctccgacggtaccgagaccgtcccatcgtcccccaatggcaattccaccaacggcgtcgcgtccaaggacttcgctacagacatctcctcccgcctctacctacccgcgggagtggatcccgggaagaagcgcctccttccgttgtaccacatctacgccgcctccgtcgatgccgcggtgcccgccagccgctga

SEQ ID NO: 158245 - DNA, 482 bp, Zea mays
  Clone ID: MRT4577_75896C.1
ggattacaagcattttataagccacaaaatttgttacaaggcggttatgccaactataaacaggtgtcaaccccaatccaattggttacaagggtgttaagccagttatcaccagttgggtcacatgcaccaaatgctaatgctattaaggaaatctttactgacttactaatctccttcagctgggacatttgcccctcctggaatacttgcttgtccccaaggaagtgcatttggaaacctagcccgaatcacattatagtcctcccaggtagttgctgttactggcaaacctgaccatttaatcaacacttgggtaagggccgcccctccctttttgacgagacgtttgtccagaatatccattggttgaacaatttcatgtcccaaatccagcacctttggtaattttgagaagactggcccataattgggagtaaatggtttgagttgggaaacatggaaaaaaggggggttttggg

SEQ ID NO: 158246 - DNA, 256 bp, Zea mays
  Clone ID: MRT4577_75897C.1
cactattctctcgaatctcgttttcactgagttacaacacgttatcagcactgctcgcgagaaagcgagaacagagagaagttgttgttgtagaaagaagaagaactatcgtagacgtcggcggacggacggagattcttccatgcggaacactggcatgcactggacttcatgcgtctgtcctggcagtgcttgtgcgccgcccctgcgtgcccaccgtgctcggacgccttgtcgtgctcgtgccctggctggc

SEQ ID NO: 158247 - DNA, 395 bp, Zea mays
  Clone ID: MRT4577_75898C.1
aaaagggacccaacctgttaaacccgatggggggggggggggggccaatttttttaaaatgggggggccccccccaaaaattgggaccccctccccaaaaaaaaccccccggccctaaaaaaaacaggctttcctagcggaacccggataaggggaaacccttcgaggcagccccccgaaaccccccctttcccacttggaaacgggttcttaaatcgggaaaaaaattttaacaaaaaatatccccccacccccccaacataattgctgttccctggggcaaaaaaaaaaaaaccggggaaaaaaatggggggggcccttgcgaggcaaaaaacaaaggaaaggtcaggtccctgggccggaacccccctaggggcaaatcccaccccccgggg

SEQ ID NO: 158248 - DNA, 2949 bp, Zea mays
  Clone ID: MRT4577_75899C.1
acgatccatacattgccacttgtcggggaggagagtccggagctgagacggcgagctgcctagctccggtcctgctctatatctcagctcctccgttctgtcctgtggccccgacctgagctgccaaggatacgttacgtcttgagggaggctgccggtcgccctcttctctcgtcgacctcgtcggggttatgcggaggagcaggtcgtgcttgtcctgcgtgcccatggggacggcggcgctgcccattgagaaccacttcgtcgctccggctgcgctaccgtcggtgcccgcctcagattcagaggacggaggatttggcaagggcagcatagaccttggaggcctagaggtgcgccaggtcaccacgtttgccaaggtctggtccaccacacagggcggccaagacggcctcggcgccaccttcttcaagccctcgccggtgcccgccggcttctccgtgctcggccactacgcgcagcccaacaaccggcctctcttcggccacgtcctcgtcggccgggacacgtctggcgccggcggtgcgctcctcgccgcgccagtggactacgccctcgtctggtctagtccggacggcgccggccacttctggctccccacggcgcccgagggctacaaggccgtcggcgtggtggtcacggccgcggcggacaagccttcacccgacgaggtccggtgcgtccgcgccgacttcaccgacgcgtgcgagaccgaggagtcggtgtggagcagcgacaaggacggcttcagcgcgtccaccctgaggccggcggtccgcggcatcgaagctcgcggcgtgcacgctggcacgttcctcgcccagagcagcgcgacgccggcggcggcggcgggcgtgtcaacgacgctggcgtgtctgaagaacaacagcgcgagctacacgtcctccatgcccgacctggcccagctgaactccctcctggcggcctacgcgccgcacgtgtacctgcacccgaacgagccctacttcccgtcgtcggtggcgtggttcttcgagaacggcgcgctgatgtaccagaagggcagcagccagaccccgacgccggtgcccgccgacgggtcgaacctcccgcagggcggcggcaacgacggcgggtactggctcgacctgccggcggacgggaaccagcgggagaaggtcaagaggggagacctcgccggcgcgaaggtgtacgtgcaggcgaagccgatgctcggcgggacggtggccgacctcgcggtgtggatcttctacccgttcaacgggccggcgcgcgccaaggtcggcctcatcccgtcgatcccgctcggcgagatcggcgagcacgtcggcgactgggagcacgtgacgctgcgcgtcagcaacttctccggcgagctcctccggatgtacttctcgcagcacagcgcgggcacctgggtggacgcgtcgcggctggagtacctcgacggcggggacggcggcgggagcaggccggtggcatacgcgtcgctgcacgggcacgcgttctacccgaacgcggggacggtgctgcaggggaactcgggcctgggcatcgggatccggaacgactgcgccagagggagcaggctggacaccggcgcggggcggtgcgaggtggtgtcggcggagtacctcggcgtcaaggagccggcgtggctcgggttcgagcgcgagtggggcccccgggatgagtacgacatcgggcgcgagatcaaccgcgccgctaggctcttgccacgttcggtgagggagcggctagccaagctggtggagaaggtgctcgtcggggagggcccgacggggcccaagatgcatggtaactggagaaacgacgagagggaagcctgataaaggcttcgtatccttaaccgtacgattcgtgaggcatatacggatcagacggtttgcgattgtaaggatagcgtgctgattagatgaggaggtaaaaggattggttgtgtcattgtgtgtgcgcgtgcctgcgtggctgaagcgtcccgatcctttgggactcaaatgtgaaacaattactagtcccaggaggctagtaaacacattccttacttcaaatagtacagagtttagataaatttgttacaataccggggtacaagctcgagagagccaaatagagagcgcagaaggaaaaatacactagcccaagccacaggcagaactgggtgcagacacagccctcttaatcgagcatagcagaaaagaagtcctcggctgctgaaaaacataataaatctgggtgaatacactaggtattccgcaagcccaccccgctcccatagagagaaagagacctatgatgtacatgctcaatttggtggagttggagtcactcatactttttcatagaaaggcggtactcaatgtttagggttttcccaagacaatagaagtaacactcgcttgaccaccactgagcttcccgctcccgtggtaccattttctttccagaacatacacacgcatttccctgttcccagttgtagtagaaacactaattgtcataccataccagactcgtccataccagtggacacggactattcgaataggtttagactctgcgcagaggggtacactttacccactagtccggctctgcgatctcatggccaatgagacccgaatccgaaactctttccttccttgtacgtccgaaccttaacggttataccgggaaggagtcaggccaccaccatgtccaaaccggacaaaacattctccctacttatcctcccggtgctaccccagccttcataaccctgggatgggaccgtacgagttcggattgagtggctgcccacacagcctcgagtggttgtactttttgggagtacaggtaatgaaagatgacaaaccggtccttatatagaaaacgatccttctgctcacgcctaaaccagctgagccc

SEQ ID NO: 158249 - DNA, 201 bp, Zea mays
  Clone ID: MRT4577_7589C.1
tttcttccggtgatgttaacactaaccgacaccccagcgcagctttcattcctcgaggaggcgccccttcttgtaccatccctgccctcatattcttcttgtacactaaaacccccatctatctcccttccctctatgcctaacttgtacacttaaccgatcaaattgataactcattttctcatgatgacatcaaagtct

SEQ ID NO: 158250 - DNA, 155 bp, Zea mays
  Clone ID: MRT4577_758C.1
cccacacgtccaatctctgatcttgaactgagcgccaccagtctccaggtggagagttcctctttttattttataggctcaacaggatatcttcacacatgcaatctcatcacacatcacaagtaaagaatctactatccatctccaaacttgaa

SEQ ID NO: 158251 - DNA, 713 bp, Zea mays
  unsure (1)..(713): unsure at all n locations
  Clone ID: MRT4577_75900C.1
ccggccgggatggctccaagccatcccaggtgccccaaccgctcgaaccctaatccaaagtcgccgccgcgtgcagccatctctgcccctcgccgcgccgtctaggtgcatcacccatagtcgctcggtacaccgtcgtctccgtctccttccccgcgcactttcatccagcgcgcacccatagccgatatccacgacgaatttgtcctccctctcgccaaattgtttgcctactacaggatttggagacaagagtgaccaagagaagcacctgcccctgcatgcacaagaaatcggaaccgatcggccaggatgcgccgacgaaccgcttcaggtatcgcctccttactcactccagcggcatctaaagacagaggtggcatgcgctgataagatctggctgagattgtgggctagttccatgctagcctcacgtggatcccaatccgcggtgtcggcgctcaggatgctctgcttctcgaaggaagaggttgacgcactggtggagcatatgaatggcgatatgcgcgtcagatttgttggtgttcctgtggcgctgaacaaggaatcataaaagcatatggaggaactatgtataagctacaaagaagcatttttatagcagaagccaagtgttctgatgattttgttttttcaattgtgttttctgttattggtntagcatgcacatatattgaaatgatttatgacga

SEQ ID NO: 158252 - DNA, 323 bp, Zea mays
  Clone ID: MRT4577_75901C.1
acgtaccgatctacagagtagactcagcgcccccaccctggactctacgacctgacgccagaatgtgcatgctgtacgaagtgcaagtcctgctacgcaaccactgttccacaacgctgactagctgctagagcatgaggttcttcctgccgtgacctcttaccaccggacggggtcggtatgtgaagacctcaagatcagccctacttgatgcaacaggccatagcagctggcatcttacctctatcagcctcgattctccaacaatcatcagccctactacagcaggtacctcatgtgcatttattggcgcaaaacatcat

SEQ ID NO: 158253 - DNA, 271 bp, Zea mays
  Clone ID: MRT4577_75902C.1
gcgtctcctccctcggccggccgctcgtccgctcgctctcccccgcacgaatctccaggtgatggcggcgcgccgctgtcactgacgtctgcagcggtggccgcggcgagcgcgcgatcgctggcgatggccgtcgaggccagcatggagcgcgcgcgcgactgtcggcgccacgagcaccagctgatgcatcagccgcgcatccaccggcggtcggctcttgcgtccgtgacctcgttcacgatgcagtgggcatcagggtcggcgtctg

SEQ ID NO: 158254 - DNA, 831 bp, Zea mays
  unsure (1)..(831): unsure at all n locations
  Clone ID: MRT4577_75903C.1
gacgcccgcggtttcggtccggaattcccgggtcgacccacgcgtccgcggctgcgtccgcgcgctccgggcggctacggcgacacgggcagtggcagcaagggtacagctcctgccccttcagtgacgggcggcggagctgacaggagccggggcggggcggcggcggccagcgaaggagcgcacggcggcccggccccgcccctggtcctcccgccagcctcagtgaccttcactggttcgggcggcgggtgcaggcccgggcggcggcgcgatgttcgtgcaggaggagaagatcttcgcgggcaaggtgcttcggctgcacatctgcgcagccgacggcgccgagtggctggaggaggcgaccgaggacacatcggtggagaagctcaaggagagttgcctcaaacatggtgctcatgggagcctagaagaccccaagaatgtgacccaccacaagctaatacatgctgcttcagagagggtgctgagtgacagcaaaacgatcttggaagaaaacatccaggaccaagacgtcttgttattgataaaaaagcgtgttccttctccactccctaagatggctgacgtctcagcagaagaaaagaagaaacaagagcaaaaggctccagacaaagatgctattcttcgagcaacggcaaacctgcctgcctgcagcactgaccggactgctgtccagaccaccatgagagacttccagacagactnncggnagatcctcgtgtctctaattggaggtgcacagaagctgttagcactgaatcccgatgcaggttgaattgttttaagaagcaaatgctatgctggatg

SEQ ID NO: 158255 - DNA, 532 bp, Zea mays
  Clone ID: MRT4577_75904C.1
gcccttcggtttgggtcagtggaacttcaccttgttgtagcagagtaactccagcagaaaacgaagaagagagtgaggtgactcaagagaagacaccaccacctttggaatctcaggcagggacttggctctacttcgacatctgcgagtccgagcctgactcacctactaacaaagaaaacgaagaagagagtgaggtgactcaagagaagacaccaccaccttcggaatctcaggcagggacttggctctacttcgacatctgcgagtccgagcctgactcacctactaacaaaggtgaggaagtagcagatttctgctgcttctgtgccaaggtggttccccatgatgaaaaacaagactgaagtgcgggaggacttggtcctccacataggatcttttgcttaagaacttatcgggaggagtttgtgcctcccttggtttgtataatattactactctgcactcacttttagttctggtctgtaataagtaacttaatcttactttctaaataaatgtaagtttatag

SEQ ID NO: 158256 - DNA, 316 bp, Zea mays
  unsure (1)..(316): unsure at all n locations
  Clone ID: MRT4577_75905C.1
ngtcttcctttttttttctttttttttttgggcatctccgggcccgcgagagggcgtttcttttcctcctttctttttcctttcgggaaacgaaacccggcacccggggcgtagtcaaacttttttttttaaaaaggaaaaacaatccctgggaccgggggctgattacacctggccccatttgtgaccgctgccgggcaaaaacaagggggctcgcacacagaggcgcgtaaacctctcgggctcgtatccgaccatcggcgggggcatcatctacctaatcatgcggacgccaaagaccccccccctaaagggg

SEQ ID NO: 158257 - DNA, 347 bp, Zea mays
  Clone ID: MRT4577_75906C.1
aggaggttgaatgcttaaattactgccaaatcaaaatgggggctatgactcatctgctatgtaccatccctagcaacgcactacttagatgatggtacaggaaaaagtattcgaatatacaaactgtggactagatggctatagacggatatgaacgacccgagcctgccaaagcaacactcaaataaatgacatcctgcataccgtgctccatctaattttgcagttgcctgaatatcagaatggccaatcccggacgggcaatactcgggaccagctcgattacgtgtcaggaagcacccgaatcccacgagaggtgtccatcacccgcattcctaatgtcatct

SEQ ID NO: 158258 - DNA, 355 bp, Zea mays
  Clone ID: MRT4577_75908C.1
gttgacaagacggtagtaagcttttttttttcgctttccagtagaaattacactccaaaattgcctgttcaatacactggtagggcgggctccgctgtaatttacaaaactctgctttgtccaaataagtacaacagaggttagaaaaagaagagttaaggagggaagaaaaaaaaagaagcatagcgaaaggctaggatgctcctatttcaaactagttgaacggctgggatctgatcgcgggcgtttcaaatttcaattccaagcgcttgaggctggatggagccagggctcgccttcgtccagcttcatcaggtctgcaagccttcacagaaaagttgctccccctcgcttc

SEQ ID NO: 158259 - DNA, 1289 bp, Zea mays
  Clone ID: MRT4577_75909C.1
cgagaaagagcagagggacaccgaaacagagaggagcagaggggagcgacgacaggtcagcggagatggaagcagcggcaggaggagtggaggcggagggggtgatgagggtgctggtggtggacgactcccccgtcgaccgccgggtggcgcagctgcttctcagcagcgactcctgcgccggctcattccacgtcatcgccgtcgacagcgcgaggaaggcgatggagttcctcggcctcaaggacggcggcgaggagcaggccgtcgacatggtgctcacggactactgcatgcccgagatgaccggctacgacctcctcaaggccatcaaggcactgaaccccctggagccgatcccggtcgtcgtcatgtcgtcagaagacgagccccagaggatcagccggtgagccagccggctctgttctttcctctttttgagcaccgtttcctttggtccctatcccgtcccctgtgaatgcatgctgaatcatcccgtgagatagaatagcagacggggccaaaagccctggcccgtgtgtactgacggggtaacatttattcattcatccactcgacccgtgtgtactgacggcctcgttattctccggagcagatgcctgagcgccggcgccgaggacttcatcgtgaagcccctgcagagcaaggacgtgcagcgcctccggaactgctccgccgccgcgaggcccagcaagggcgccgcgccgtgcgaggccgccgtcgtggccaagaggaatcaaaagccgccgcatcctgccggcgccgcgtcgccgtctggacggcgagcgagcctcgccggagtcgccatggtgctgcactcgtcgggcgtggagtacctgccgctcctgctcaagctcgtcgtgctggcgtacgcggcgctgtgcctgggagagctcctgcacaggtgggcgtcgtcggacggccgctgctcgctctccccgtggtgcgcctgagcagcggtgcgtgtcctgggcaccagcaggagactggtgatgcaaatgcagagtttttcagctgctgaaccaaaaaaaaaaacctccaacagccgtggaggtctagcttagcctttaatttaggcactgtagaagattgactgctttgggattgggtacgctcgcgtctgccgtctgcgtggcgtttgtttcttgatttgagggagacgtatgtatgtacgtacgatacgaggccacggggggtacgctcccctgtatcctctcctctgtatagaatccactgaatcagaatgcaacgcgtgacccgagccccgt

SEQ ID NO: 158260 - DNA, 417 bp, Zea mays
  Clone ID: MRT4577_7590C.1
cgcacgcgtccgaagaccatttcccttctcctgatcgtcctgttcctcacgtcatcgtccatttctgccgatccggagaagcaggcggcccccgcggcacatgagactgccgtgcacatcgtgtacgttgaccgtccctaggacgctgaccctgatgagtttcacattctcaccttttattttttcctttttagtttacatattgtttttgtttctttgtttttattattcttttacttcttttttttttttttctttttttttttttttttctttttttttttttttgttttatttatttttttttttttttttatttttttttttttttttctttttttttatttttttttttttttttttttttttttttttttattttttttaatttttttttattatttttttttttttttt

SEQ ID NO: 158261 - DNA, 437 bp, Zea mays
  Clone ID: MRT4577_75910C.1
ccggaattctcgggtcgacccacgcgttcgtgcagacgtgacttccactctttccctctgatctttacaccttgtttgatggctttgacatcctcaactcattcagagcgaatccacctataccctggtattgagcttggacctgagttcaagaaggttgacaagtaccttgctcggatcaagtacatccccagcataggtgagcttgacaccttgaatggttcttgtgatggctgagctggctctggaatgacactcaagggctaggttacaattagcgccaagccttcaactaaattgttgatttcaagaaggcaacgtacttgagaacaaggatgtcaatgggcctgaggatctttaagctatgcttgtgatcaccagtttttcccaaagacatgtaagaggaactgtcgagcctagggactgctactgagctc

SEQ ID NO: 158262 - DNA, 2240 bp, Zea mays
  Clone ID: MRT4577_75911C.1
ttgggaccctcgaggccggccgggacgttgcacctcgggcggggaacatgtggatatcacacgcacgcgcctacgcttattagccctcattcgaagtcgacggcacccgtcttctctccgcactcgaaaccccatccttgactagctccgatctggtacgagatggccggcaagatgaaggagttagacggcgccagccctgccaagatcttcattggcgggctctccaaggatacaagcatgagtacattcaaagaacattttgggaagtatggggatataattgatgctgtcataatgaaggaccgctacacacaaaagcccagaggctttggctttattacttttgctgatcccactgttgttgacagagtgattgaggatgaacatgttatcaatggaaaaccggttgaaattaagagaacgatccctaagggagctgctcctttgaaagatttcaagacgaagaagatttttgttggtggattaccctcagctctaaaagaagatgaattcaaggaattcttttccaagtttgggaaggttgtggagcatgaaatcatccgtgaccatgcaaccaaccggtcacgtggatttggttttatagtctttgatgcagaaaaagcagtagatgatttattacataagaagggcaatatgattgatctaaatggttctcaggtggagatcaagaaggcagaaccaaagaaaccctctaaccaaccacctcgttcacttgatagtgagcctaggggccgtccatatgcagacagttatgatggatttggcagctcttacaattatggtggtagttttggtccctatagatcacctcgaagttttggcgctaggcctagcagctacagtagtgcttatggtcctggtgattatggtagtggctatgctacttatggtggagcattagtaggataccgtgaaccttccctttattctagtcgctatggtagcacttatggaggcagccttggtggtgggtatggtggtgttagttatgatggtggattagctggtgcatatgagcgtgatgctgggggctatggtggttctagctatggtcgtagttatgactcttcctgggctaatactggtgatgggtttggcaccggtggactctatggtgctaggacaggctatggtggcagtggcggcagtggtgctgctggtcgttaccatccatatggaagatagaaaatctccagtgctgctgtttgctagagaagcttgcagaagatgaattctagatgtgtgctcaagagatcatctgcatctaaaagatgcactgaagttcaatatgctcagttttctgtattaggaagtactgttagatcaacttgtagaaatttaaacctttgttttggtatttggaattggaatttaagcatatttgataagcgtatgcacttttatagatagaaaatctagtgacccgtcaaaactagctgctagtacaagcatgagttattctttgttagtatagtttgctttgtctttacgaatattatggagtggtcaaagttaacctaagggccgaacgcagtttctttacatgtagttacagaagtgttatcttgtttctttatcttgttccgcgtaggttatttgtttggagttcgatggattaagttgtacttagaactagattggtctttttatagtggttcgcatgctttcaccgtttaacatgccgatgttgttttccccattcattatgtaatcggtgatcttgatatcatcacgctggtaattacatcttaattacatttgggtagcatcatcgttctacatcagttcaggcagctctgagggctcatttggccatcttccgctaagaggcactgtgcgatactgtaacgtatagggctttttctctgcactgggtaaaatggattggggaagcagagctgttctgtagaaagacattcattcggatcgaaggatctaattctgttgcattgtcagaattcatgtgttatgactggaaagggctacaatagaaggactaaggatggccaggggcaatccgcctaatagggacaatctgttaggatattgtgttaggatattgtgcagcccggtttgtttggataaagtcctagtcattagatattattagttgttagatctcatatctagggggattctgtaggggccggcgtctttaaaaccaaggcctttgtaattaatagtcaagcaagaagtaataaagagtatttactttt

SEQ ID NO: 158263 - DNA, 414 bp, Zea mays
  unsure (1)..(414): unsure at all n locations
  Clone ID: MRT4577_75912C.1
ggtctggcgcaccgcactgtccggtgcaccaggggtcgtacattccaaannnttcagcttcgggtttcccaggcacagctccgctttaattcaccggactgtctggtgcaccagtggagcaatggctatctgcgcgcaatggtcaactctgatggatgaacagtgcaccacagtaacgcggcagaagtcagagcagaaggtcagaggggcaccggactgtccggtgtggcaccggactatccggtgtggcaccggactgtccggtgtgggcccggactgtctgctgccgcatgaggacaaagcctccaacggtcgaccagctccagaccctaacgacagggtgacatggcggcgcaccagacactatccgatggcgcaccggactgtccggtgtgcccatcgccagcagccttc

SEQ ID NO: 158264 - DNA, 3085 bp, Zea mays
  Clone ID: MRT4577_75913C.1
cgaccaacagcctccacctcctctcccaccgcgccatggccgccgcctctccccccacctcctcatctccccctcctcccagagcagccgacggtgacggggacggggttgggtgcggtgccgcccgctgctcctcgcccacgcccgcgcaacgcaggaggacctcccccaaccacagcggcgggagctcccgtaagagttcaggatcaagagattttgcaggaggttcacttttgaaatatgtgaataaatcaacattgcacttcaagaaatctaagaatcgaagaagtggttcccctgtcaactggacccctcggaagaagactgaatcatacatgaagagaaaaataaagcatcttcaggaaactgatggaatgaccgcatccctccatgagactctaggaaatgcaaatcctcactatactaggatggcaagggagaagatagcagcgagagaggcagctagaaaggcaacagatgctcgcaaagctgctatggttgaagcttcatggtgccgaattcttcgagcagccaggatccaaaataagaatgccgaagaagttatggagaaggcagtgctacaagcaactgaagcattcgaggaagctcgggcattgggtgtgatgatgtatgacagacctgactgtccacataagcagtatgaggtggaatcatcgttgcatacaggagcacaatcaacccataaagttatcgcatcgtttcagacagcttttcaggttgatatggaggtttctgctgcagtaaaaaaagcatttgttcaactcgcaaactctccggattcagcaaagagagaagagtttaaggaactattatggaaaatcagccaaaatcctgatttgacagaacatgaagataaacaacaactggttgactgtagcaatgaagatgcaattgtgttgaaactcaataaagaacacctcagcggcagctgtgttgcttctgatttcaataccacaaaagttcaagaatccatagatgttgttagcattatgcttgaacggctaaaagctctccatgaagaagaacttgcctccttagcagtcattgtagctacatctggccttaatgctgaactacaaaatgaaagaagcaaatatcatgaaacaggcgctgtgaataacactagtgctgggtcactcagatcacaagcaaggaggtattcgactgcagcgagttttattggtgtccaaggaccaaagaaagaagtcacttctgagttaccgagtctggataagttcttggtgaagcatctttcaaaacttgaaagagaagttcaggaagcaagagaagcaagcagaaaatccacattagtaaagtctgtcacacaaggtgcccacatccaatttacaggcagcaatgcaaagacaccagaatcaacttcagaactcagcagcattctggtgaagcatgtgtctaagcttgagaaggaaatcctggaagcaaagaagatcaaccaaagaattcaccaggtggaaggaaattgtgaggatgtcaaatcaaatgtgcagtcaagaaacaaagaactggaatttaacaagattcagccagaagttgaaagtaactgtgattcaaagggaagctgtgagtccaaggaatcctgtatagacaacaatgacataaaagataatgatgattgtgtgcaagaagacaaagagaacaaaaactgctattcacatcagttaccaccatctggtgcaaagggcaaacatggtggcaagaggttaactcgacttgaagctgctaggctggaagcacttaaatccttttgtactatagatggcaatgcattggatgctggcctggataagatcttcgtcaagccaatccatagattggagaaggaaaagagggaagcacgtgaaggacaaatcaatgtgcagaaacatccccagaagcttggtcaaagcgcaactgtgacagagggcttagatgatatcttagtgaagcatgtatcaaggctggaaagagaaaagattgattaccaaaagaggaatgaactgggagtgggagaaagatggagcaatgtgccacatgatcagcggagtaatggtaacaatgtaaaatcatctgatagtttagatcaagttttagtgaagcgtattagtcgactggaaagggagaagttggaatatgaaaagaggaatgcactagaaggaggttccgatgtggaaccaaagagggaaccacactgtaacaatgctgcagcttctgatagtttagatcaaaacttaattaaacatgtctccagacttgacaaggagaagatagagcatgagaagaacggtggtatgataattgtaaagaagggtcagacgcaatgtacaaatggagccgaaggaggcctggctgacgtctttgtgaagcgtccaacgaagctcgagcaggcgaaactggcttctgctgccgaggagaaaccagctagtggctttaaccctgtcgaagagcgtagaagagcaagacagaaggagcttctcgatgcgtggggaggaatgggtttggggaactcgatgaagccccatgtatcaaggattgagagggataaggtcgcttggaggatagccgaggatgaacagaagcagatggctgctgcaagggaggcgtgacttcactgaaacctggacaaattatctgatgcgttgcgctccagcttggaggaaaatgcatcctctgaagtctgatcctccttccttttgacaaccgacagttgttttgggggaggatcagatgtccagggcgtcatgccatgtaccagtgccgcaaacaaagcgtgaaactgtcgacaggttacttggttcgaatcctccttttgtatttgttgttgcctctggtacattctcctttggttgttccttccatgtaattacgtatcgttgtccaattgtctagcatataattgcgagcaagttcaagtgaaattaactcctttggagatgacgaatgaaaaggcccagtgcagtttcctagatgccagttactaactgctggagtgctgtggcttatatagatactgttattttggcttaaaaaaaaaaaaaaaaagaaaaaaaaaaaaaaaaaagcggcc

SEQ ID NO: 158265 - DNA, 238 bp, Zea mays
  unsure (1)..(238): unsure at all n locations
  Clone ID: MRT4577_75914C.1
cgccgccagggaggaatcgcagattcgcctaagcagggaacaacgagagactttttttttttttttttttttttttttttccctttcttttttttgttgtgttgctcctcctccgccggcgcgccccgacccggcagggcgagcgcgccgattcgtttcttcggtntttggactggggggggggggacgtatgctggctgccctgcgggaggagggttactggcggcaccatatgggg

SEQ ID NO: 158266 - DNA, 772 bp, Zea mays
  unsure (1)..(772): unsure at all n locations
  Clone ID: MRT4577_75915C.1
ccggccggggaagacaaaccactgggcatttccaactgacaacaagaagaaaatttccagcccacgcattttaccagccagagaacccgatataccgctacaatggccgtcgatccctttgattcagctctcgacctcctgcgccgcctcaatcctaagcagacaaccgaccatcttaacgctattatctctatcgcccctgatctgaccgaagatctgctctcatctgtcgaccagcccctcaacgtgcgccgctgcaagcagaccggccgagactacctcctctgcgattacaaccgtgatggcgatagctaccgctcaccgtggtccaaccagttcgacccgcccctggatgaggctggatcgggaggtgtaggcgctggcggtaatgagggtgcgggcgagggtgcgatcccgagcgagcgtgttcgcaagatggaagtcaaggcgaacgaggctttcgacgtctaccgtgatttatattacgaaggtggcgtgagcagtgtctatttctggaatcttgacgatggnattcgcaggagttgtgctcctcaagaaatcttctccccaaggcggaatttcccgagggtgtctgggactccatnccatgtttttgaggccatcgaacgaggaagaagcacccactataagctaacatctactgtgattttgacattgtncaacttctggtggtaactttgggtggaatggacctgagcggaacatgacacgccaggtcgagcaggatctccccgtcgagaacgacgatagt

SEQ ID NO: 158267 - DNA, 342 bp, Zea mays
  Clone ID: MRT4577_75916C.1
agcatctgatgacctgttccaatctcttgctcatcttgatggataacccaatcaacaccatgctggtcatctacctacactagcttccaccaaagaatcaccacaccacgaataccattcatccgaatctcaaacactaaatcatgaacatacccagattgcagaacactccctcacccacttgaacctcaaatcacaaccttcaacaattatttaactgtcaccttcttaccaaccagaaattccacaaagatctactcagaactcatttcaaaatatatcttgccttcctttcgcacttccctttcttaatcatataacatttccatttttttttaattt

SEQ ID NO: 158268 - DNA, 311 bp, Zea mays
  Clone ID: MRT4577_75917C.1
tgggaccctcgaggccggccgggtattctggtgtcctaggcgtagaggaaccacaccaatccatcccgaatttggtggttaaactctactgcggtgacgatactgtaggggaggtcctgcggcaaaatagctcgatgccagaataattcacgcacctagggttttcgcgccgccgccgccgccgccgccgcagccgcaacaatgccgtcgcacaagaccttccggatcaagagagctggcgaagagatgcgcagaacgcccatccctactggatcgcatggcactgacatacatcagtacacgccagcgca

SEQ ID NO: 158269 - DNA, 470 bp, Zea mays
  unsure (1)..(470): unsure at all n locations
  Clone ID: MRT4577_75918C.1
tgcacagcgacgtaagctcggaatttggctcgtggagatggatggtagggacggttagtgcgggcgcagcgcccccaggacgnggacgcggagtttcggcgacgggagctcactattccaggatgcagcttctccgccgcggggctgctcttcccctaccacctcggcgccgcgcagtgcctcatggaccgcggatacatcacctgatcgcatctgggaacacaatgcaagatgctctgcaggtgaccaaagttctagctgacaactgccgaagtaaaggcacggcgtttcgccttggggctgtactcaaggatgtccttgttgagcttctcccagatgatcctcacattagatgcaatggaagaattcgggttgctattactcagctatcctggaggcctagggccatgctggaggaccaatatgacttcaaagaagatgtcattaatgcagcaagtacaggccccttg

SEQ ID NO: 158270 - DNA, 461 bp, Zea mays
  Clone ID: MRT4577_75919C.1
acgggagaaaaaaaaccccgacccaactgtaaaatctttaaaaaaaaaaaaaagcgcctgcacaaccaaacccaaaaaaaaaaaaaaccaaacagccaaaactggaaaacaaaaaggaagcacccacccccatgcatgcacgggcgggctaaaaaaattttacactacaaaccaagacaccaccaccaaacatgggaaacttttttgcggtccccccccccccccctaaaaaaacccaattcaacaaacccatcatgcaagtcggccaacccgcccgccgtaaacaaacaaaaagggaccttggccccggtgcaccgggaaagggtaaaataatgtccccctttgtgcaccccgtgcaaagacccgggccctggccccccgtgcgggggggtttcccgcttaaacaaggcccccaagcggaaaaactcctcggcggaacaaggcaagcccaacgggccccc

SEQ ID NO: 158271 - DNA, 526 bp, Zea mays
  unsure (1)..(526): unsure at all n locations
  Clone ID: MRT4577_7591C.1
aaacccnacttttagccagcgcnccgccggcagccgccggggaggaggcgnngnaccngcngnncgagncggcccccggcnacggcccannccangcgnacggnancgangagaacgggcagagcgnngaggccgngcgcnccnccgngcnggaccncgaccgcnncggcaaggccgncaagcgcacggccggcaanccttttttttttgccggcgacgcgcncaaccagngcaacgcnancggggagggaanangaccgacgaggcgaggagcnnncnggagcngaacccgccgaagccnaaggaggggaaannggacnnnacagccncggcgnngncgagcccaaggncggcncccacancnccgaggncaccggcanccccgggcagagcaacgagnnncgnccaggagcngcnccgcggngnccgccnccacnncgaccggggcancaacgagcnnaaggannccngacnnggagaaggcccaacnnggccgggggcanagccacagcagggcnaaggggaa

SEQ ID NO: 158272 - DNA, 1614 bp, Zea mays
  Clone ID: MRT4577_75920C.1
cctcgaggccggccggggattctccacacgtgctacacctacacgacgcagaattgcagccgaatccatcggagcccacggccgcacgcccgcagcccggccagcggccaccgcatcgcctcgtatgctccgcgcttgcacacgcgtcggcggcgcgggcgcgggcggctgcggccgacgagaacgcctcatggcctccctcatccccttcctccctccctcaccttactccactcacctcccgcgccagccccagtcccagccgccgacagccgctacccagcccgccgcagcggcgcgcccatcccggttccgcctcctgttcgcgcgcgccgcggcgcagcggcagcgcgactccgagccggcgccggcggccgaggagaggcggtcgctggccgtcagaacgggggagctgttcctggggctggcggcgctgctgctgcgcgggaccggggccgagcgtagcggtggggccgcggtggaggagatggaggcgagggacggggtggtgtgggagcagcgcccccaggacgtggacgcggagcggcggcgacgggagctcactagcccaggtttcagcttctccgccgcggggctgctcttcccctaccacctcggcgccgcgcagtgcctcatggaccgcggatacatcaccgagacaactccgttagctggctcatcagctggtgccataatctgtgcagtgatcgcatctgggaacacaatgcaagatgctctgcaggtgaccaaagttctagctgacaactgccgaagtaaaggcacggcgtttcgccttggggctgtactcaaggatgtccttgttgagtttctcccagatgatcttcacattagatgcaatggaagaattcgtgttgctattactcagctatcctggaggcctaggggcttgctggtggaccaatttgactccaaagaagatgtcattaatgcagtaattacatcctcctttattcctggatacttagcacccaggccagctaccttcttccgtaataggctctgcattgatgggggccttacattgtttatgccgcccacttctgctgcagaaacagtccgaatatgtgcttttccagccaagccgtttgggattgcaagatattgggatcagtcaagatattgagatcaggcccgattgcaacccagagaacagggctagcccaagacagctgtttaactgcttatcgccaagaatgatcaatcccttgtcgctgattgaattgagttcagtttgcccagaagtaattttggtatccaaagctgagttcatgagaatccatgcctgtaatatattgtaaagatagcaccgtcattgtcgaaggtggcattgttctgcattggatttgggtgtttatgccagcattttcgtagctgtgacaatagtgtagaacaggttgctagcatggccataaaaactgatcagcataatcaaatgtatagattatagatgatgaggtttgacctgagcctaaaacagggggataatggtcctatttgtttctgcaggttgctagcatggccataaaaactgatcagcataatcacccgtatagattatagatgatgaggtttaccaaaaaaaaaaaaaaaaaa

SEQ ID NO: 158273 - DNA, 593 bp, Zea mays
  Clone ID: MRT4577_75921C.1
ttttttttttttttttactttaaatttatattaatacaagtgttaaaaatgagagtgacattacaaaaatggcaatcagcttatagcagactcctaatagctagccacaaagatatctagaacgtcaaatatctatcaattatacaagtgtaatgtatattaatttattatgaataaacaatgcacagaaataaatgcaattcctagttgcgacctaaacattgcataaaatttatttaacataattggaatgacccatagttaaactttaaatgtatttctttatgactgggaaggtattacttaggaggacattgtgttaaacttaaaatattgtattacgcgttcatattacagaattaacttaggatagctgtccacagtcagcgatgacaactttcttcgaaggcttgccggactgggagccgagggcttcgacttgtttgacaacgtccatgccctcgacgacgtttccgaagacgacgtgcctgccgtccagccaggaggtcttgacggtggtgacaaagaactgggagccgttggtgttgggcccggcgttggccatggacagcacgccggggccggtgtgcttc

SEQ ID NO: 158274 - DNA, 1304 bp, Zea mays
  Clone ID: MRT4577_75922C.1
ctacccagcccgccgcagcggcgcgcccatcccggttccgcctcctgttcgcgcgcgccgcggcgcagcggcagcgcgactccgagccggcgccggctgccgaggagaggcggtcgctggccgtcagaacgggggagctgttcctggggctggcggcgctgctgctgcgcgggaccggggccgagcgtagcggtggggccgcggtggaggaggtggaggcgagggacggggtggtgtgggagcagcgcccccaggacgtggactcggagcggcggcgacgggagctcactagcccaggtttcagcttctccgccgcggggctgctcttcccctaccacctcggcgccgcgcagtgcctcatggaccgcggatacatcaccgagacaactccgttagctggctcatcagctggtgccataatctgtgcagtgatcgcatctgggaacacaatgcaagatgctctgcaggtgaccaaagttctagctgacaactgccgaagtaaaggcacagcgtttcgccttggggctgtactcaaggatgtccttgttgagtttctcccagatgatcttcacattagatgcaatggaagaattcgtgttgctattactcagctatcctggaggcctaggggcttgctggtggaccaatttgactccaaagaagatgtcattaatgcagtaatcacatcctcctttattcctggatacttagcacccaggccagctaccttcttccgtaataggctctgcattgatgggggccttacattgtttatgccgcccacttctgctgcagaaacagtccgaatatgtgcttttccagccagccgtttgggattgcaagatattgggatcagtcccgattgcaatccagagaacagggctagcccaagacagctgtttaactgggctctggaacctgctgctgatgaaactctagacaaattatacgagcttgggtacctggacgcagctgtatgggctgagcagaattatgctgagcttatcgccaagaatgatcaatcccttgtcgctgattgaattgagttcagtttgcccagaagtaattttggtatccaaagctgagttcatgagaatccatgcctgtaatatattgtaaagatagcaccgtcattgtcgaaggtggcattgttctgcattggatttgggtgtttatgccagcattttcgtagctgtgacaatagtgtagaacaggttgctagcatggccataaaaactgatcagcataatcaaatgtatagattatagatgatgaggtttgacctgagcctaaaacagggggat

SEQ ID NO: 158275 - DNA, 696 bp, Zea mays
  Clone ID: MRT4577_75923C.1
cattgggtacctcgaggccggccgggctacaccggtctctgcctgtgctcgtgccatgccactggaaccctcgtcgtggagctgttcgtcaccatgctcgacaagctctagtcgcgcgcctgtccacgtcgccgtcacgagactccatcttgcagcactcgttgtgtttggcgtccgtagtgctttggaacagcgtagttgacctcccttcttaatgcgctcacatcgccgactggagagaaaaatccaaggagattgatagagaggaaaacaaacacgcacgatgcttgttgtgtattcggtaaaaagctcgaacctggaagtcatcggcgtgcttgtgaagtttttaattgcttgatgctggtacgttaattaatcacgtgatgtggaggaccaaagctgagtcgaccacaagatatcgctacgcgtgagcttctccacgagatactattgatgaacgaacctaaagacgggtaatctgacgaatgccggaacaaaggctggtcgtcaattggacgtcgtctaacaacactaacatagtgttatctaggcaagccccggtgcatgcaaccccttccttgtgtttttaaattatttttacacactttaagtctagcgaaatgtgcattaggtttataggagttgcttggaaaccctttgatgcattgtctaaaaaaaaaaaaaaaaaaagcggcc

SEQ ID NO: 158276 - DNA, 399 bp, Zea mays
  Clone ID: MRT4577_75924C.1
ctcccaaaacaaacaatcccttggggttttatggcaccccgttggcagaaatgttggcggttccatccatcagagggccttatcaatggaatcaagaagggggggaatcccaaaaaatcctttctccatggggggggggccctgcaaactggtggccaggaaggcccaaccgggggggggggttatcgcacggaacattttttaagaccacattttccaagaaacatttttgatcgggggtttatccaaggggcacaaatccttcgggggcttaggggttgggttaatgggacctaatttttggcccctttattttattctatttggggctttaaccggccaaatccgaaacctaaaatggaggggggttccgggttggggaattttaagacttaaagg

SEQ ID NO: 158277 - DNA, 253 bp, Zea mays
  unsure (1)..(253): unsure at all n locations
  Clone ID: MRT4577_75925C.1
cacacgtacaggctgtgcttaagtcctgcaaaccgagtccacttaactttttggngcaagncacagataccattggggagggcgaggtgcatggtatattgtgcattaatcggtctacatacgcttgcgtatgccttaatgattttataacgtgatgtaaacttgctggtctttaaccgagcattaccntggtgggcctggattctataacctgatgcaaacaaaaaaaaataataaaatataaacagggcgt

SEQ ID NO: 158278 - DNA, 1114 bp, Zea mays
  Clone ID: MRT4577_75926C.1
ctaggctgctgcaatgggagctgatcttattgtaatggcaataagtgcagtcgatggatggactgatgatgacactaaacttatggagcatgtttcggtaaataggaagtcctcaggttctgcagttccgatggttcttgtaatcaacaaggtagattgtgcgccatttgttcctggagaacagttcaaacaattcagtggcctcttcagaaaacacgtacagacatgtgcagtcaccggtaaaggcatttctgatttggagagcgctgtaatagaggtcaggggtattgagcatgtgccttctgagggacgaaggtggaccgtaaatcagaggcaatttgaacagctgttgaggactaaagaagctttcgcacgtctagagtcatcaatcaacgagcagttaccaatggacttttggactgtggacttgagggaagctgcgcttgcccttgcaacaatcagcggggaggacatctccgaagaagttttgagtagcatattcagcaaattctgcatcgggaaatgatctcgcaagatgctgcatccagtagtttggagcagaagctttttccttgactgagaacaggaaccaacatgctgagtggcacttggttcgcggcatcagaatggtgaacaggcgtgcttgttctctgaggtgccacaaagaacacaagggaggtgaagccctgtccatcctagtgcacaccgtatagatgctaaggatggaaccatcgagttcctgtcttcgacgtcggatacgaatcctgtatactcgtggttgatatgagaaaattttattagacctaattgagaacgcaaacagtttcattcatccgtcttgctgtacgggacgcaacatacccgaattgtgaccaggagacattaaggtgccgtctggttcagacgttgtaacaggaatcgtaatgagatcccttaccggcggtaatgtaatggttattggctgatccccttaccggcggtaatgtaatggttattggctgtaattagattggatagtaccagatactacttgaaagagctcagtcaaataaaggtatcggtctaatccgtttgcgttgaaaaaaaaaaaaaaaaaaactcgagggggggcccg

SEQ ID NO: 158279 - DNA, 849 bp, Zea mays
  unsure (1)..(849): unsure at all n locations
  Clone ID: MRT4577_75927C.1
cgcccccggtcctcgttcaaggacancgccggagaacggtagctgcttcttccccggctgntccaccgatccgcgcgctcgacgtgggtgcggcgatgcatgaccgggacagcgacgtctccaacgcacgcctgtcccagtgcgcgcgcatgctcgaagcgaggggcattctcgtgaacagcttcgactggctggaggcacgggccctggaagcgctcagccgtggcctctgcacgccggggcgctcagctccgccagtccactgcatcgggccgctggtcctcgctggaaacaagggaggggccagcgagaggcacgcttgtctggaatggctggacgcccagccggaccggagcgttgttttcctcagcttcggcagcctggggaggcacgcgttgccgcagctgagagagatagcacgtggactggagaactccgggcagaggttcctgtgggtcgtccggagcccgcctgagcaccggagcaactccgtggagccggacctggacctggagccgttgcttcccgagggtttcttggagcgtactagggaaaggggcttcgcggtgaagaactgggcgccgcagagcgaggtgctacggcacctttccatcggtgccttcgtgacgcactgcgggtggaactcggcgctagagggaattgcgtctggcgtgccgatgatctgctggccgttgtacgcggagcagaagatgaataaggtgcacatggtggaggagttgaaagttggcgtggtgatggaggggtactaggaggagctggtaaaggcggaggaggtggaagcaaaggtgaggctggtgaatgcgcccggatctggcgacggagaggagc

SEQ ID NO: 158280 - DNA, 374 bp, Zea mays
  Clone ID: MRT4577_75928C.1
gtttgctttcagaataatacacgccttctggacgatggtgataatttatctctagttctctaaaagtcatgttgatcttaggtacttctggatcgaatggttcagctgctcgatcagacggaggagatttgacaaacacaacggtatttgtgggtgggctcgacccaaatgttagcgaagaggaccttaggcaaaccttctcccagtacggagagatttcttctgtaaagattccaattgggaaacagtgcggcttcgtgcagtttgctcagaggaagaacgcagaggacgcattgcaaggattaaatggcagcactattggcaaacaaaacgtgcgtctttcatggggccgcaacccagcaaacaagcagagg

SEQ ID NO: 158281 - DNA, 249 bp, Zea mays
  Clone ID: MRT4577_75929C.1
atgccaaccaatttttttttcttttctttctttcaaagggtaaacacaaatatcaaacccaaagaaaagggaataaacctcctcaaaattgcaaaaaatccaaagcttttgaaattctcaaacttttacactctaaacaaaaatcctcactttttttaccaaaaagtccaaacaaacttaaagtaaaccgtctttcaccttcactttcaaaatgtccgccccttttctcacaaccaccattttttcctt

SEQ ID NO: 158282 - DNA, 719 bp, Zea mays
  Clone ID: MRT4577_7592C.1
ctcgaggccggccgggagttttcctgaacgatcgtatagacatactcattgctgctgacgctagctccccatgtcgatgtggatacccccggcctctttcatactgtgctctcctccggcttcactcggcgcgcaataccgacgcagcttgaccccaaccacgtgcccaggagccgtgacaactcccccccgctgtactgggcgtacaatgccataagaaagaccagcaaaacactccactactcggcgtcttccttccaccgcagcatcccttaatgcatgaggcagaccagctctgtcacccccacatatggaatacaacctgagatcctctaggtgcagatcatgcccctacagaaaatacatggcatgctcatcatgccccagacgatatccttggccaactacgatccaccattgaacgacatatcattcttcatattgaacccgcttacactctcggctgtatagcatgagcaccttttgttattgcagtccatgcagataatgttgctgtttctggtcatcagagaacgcgaaatctctatacgaggccatctccgaaggactgaaggtatgtgactgtagaccttctctcaatttctgaactgaactcctgacataactttgaatatgcgactcctgctgtgctcgccaattttaatttgctaagaacattatatacccacctcaatctatactgatggacttaacatccg

SEQ ID NO: 158283 - DNA, 274 bp, Zea mays
  Clone ID: MRT4577_75930C.1
cttatattatctgggcatccttgggggtttttgttctttttttgctttcttccttcccattcttcttttttgttcgaaaaagttaccctctccgcccctattacgacctcacaccccgggcccgacaagggcccccacactggggaaaccaaagcccaattcttctgcgacgtcgctctctacaacatatgtagccacacgtgaacggctactgttttcagcccaaacaaacactcaaattctgcgcctcctggtcgtacaggggaacacgcaa

SEQ ID NO: 158284 - DNA, 253 bp, Zea mays
  Clone ID: MRT4577_75931C.1
aaaggcggtttttccaacttattttttgagaatttaacagacacggccccaataaacggaaatgtaggattcatccgtgggtcatcgggcccccacagggattgatacacatccaatctcacatgtctacataaccaaatgcccacagccaggaggaagaaacgatttgggaaaaaacgagggcatactgcttggaaaaaaccccagggaagaacactatagcacaactggcgggctgcttactatttaggac

SEQ ID NO: 158285 - DNA, 343 bp, Zea mays
  Clone ID: MRT4577_75932C.1
acgcgtcttaagctcggaattcggctcgagcgaacagagaagacaagtcgtcaggtcaacatgtccccggccagccagccagccagtcaacacccaacgcatgctttaccacgcacacgtttgaccacggactctcggctggccgtctccagtcccccactccgcagctccgttcacacctcgccgcgggaacgggagtcctggactcctggtggtgttttttattctgctaagtggcccggcccggtcgtctttgctgcctcttgcgaagcgagtgcgccgtaacttccaagaaccgaggggtgcgtggggggccggagccggacgtagcaagcaacaagag

SEQ ID NO: 158286 - DNA, 429 bp, Zea mays
  Clone ID: MRT4577_75933C.1
cattgggtccctcgaggccggccgggattgattttccatcaccaccacctcctcctgcttcctcaactcccgagcgctttctccgcctgcgtgtggtgtatacatgatgactgcaaacgggatgataaaagggccgttcgaggtggccgaggtggaggtcaggatcaccaagttcttcatcgactctagactccttcgatctctgctccggcaagacgaatcgagaccctctaatcctcccaccggcaacgtgatcgccttcatcctcggacggacgcaaggtctacgattacctccgcccgatcgccgcgcgcgaggccttcaacaacaggccctgccccaagatgacgctattcgatggtgcacgcatcctccacaagtgcgactactggatcgaccagcaatcgcatgacctgccggcgctggaca

SEQ ID NO: 158287 - DNA, 145 bp, Zea mays
  Clone ID: MRT4577_75934C.1
ttgggcggccgtgctttttttttttttttttttattagagcgcgaacatatatttataccaacaagagacagagtgggccttaaagtcaaatttgaccccgtgattcgggtcgtccattgtatatgcctctaactaactactaat

SEQ ID NO: 158288 - DNA, 376 bp, Zea mays
  Clone ID: MRT4577_75936C.1
tcgctgggtcttcagaccattagctttatctacttcagagcgcaaaagaacccgatcgacaccatgagggtgttgctcgttgcccttgctctcctggctctcgctgggagcgccaccttcacgcatacaagcgggggctgcggctgccagccaccggcgccggttcatttaccgccgccggtgcatttgccaccttcggttcacctgccaccttcggtgcattttccaccggcggttcacctggcggcgtcggttcacctgccaccgtcggtccatgtgccgccgtcggtttatttgtcgtcgacaccatgccactaccctacttaaccggcccggtcttaggcttattcctagccatactcattcccgtgccaac

SEQ ID NO: 158289 - DNA, 761 bp, Zea mays
  unsure (1)..(761): unsure at all n locations
  Clone ID: MRT4577_75938C.1
gccggccgggctgggggaacaaatcacacggacaatacggccattgccacgccactacctgctccagggatgctacgctgcacgcgctactcgctccagctgctccaaccccatccctccttccccggtggcgccacctgctcttgctcatgcccgtgctccccgccttcttcctccttcggcaaccagcaccagaggctccatcagccagccgctctgtccccagctacttcccgctccagcacaccactcacccatgcgcctgaccatgacggagatggtccctccgacgacgccctcctggcgctcctccgcgcccatgacaccgatgccgcctacagcctcttctcctcgaagccgtctctcctcccttcctcccccaccacggcgtctcgcctcctcgcgcagctctccttcaattccaacggccccgatgggtttccccgcgccgcccacctcctccagagcctccgcgcccgcggtgccctcgacctcctcgacgccaactccctctccctcgcggncgcggcagccgcccgctgccgtgacgcccgtctcgcccattccctcctcctctacgtgctccgccagggcctcctccccgaccgacgcgcatncaccgccgccgtctcccgcctcacgccgcccaccaaggcgctcncgcctcttcgacgccgtcctccgcaacctccgcagcgcaccaccagagctcgtctccccctcctgccntccccgacgcggccgccttcaacgcagcgctc

SEQ ID NO: 158290 - DNA, 708 bp, Zea mays
  Clone ID: MRT4577_75939C.1
cccacgcgtccgcccacgcgtgggaagcaagcaagcggcggccggagcatcttggagacaggaagaaggggtggtagtaggtgaaaccggaggcggcaggatagggagagggagcgagagtagaggccacgcctgcttgacagcaaggcccgtgcgctcggcggcggcggcggcggatatgggcgactctggcggctctgttgtgtcggtggacgtcgagcgcatctccttcggcggcaaggaacatcatatacaaaccaaccatggatctgtatctgttgccatatatggtgaacatgataagcctgctcttattacctacccagatattgctttgaaccatatgtcttgcttccaagggctactcttctgtcctgaagcagcttcattgctgcttcataatttttgcatttaccatatcagccccccaggacatgagttaggagctgctccgattttgccgagcacacctgtggcatctcctgatgacttagcagatcaaatcgcagacatacttgatttttttggactggattcggttatgtgcttaggtgtcactgcgggcgcatacattcttactctgtttgcaacgaagtatagggagcgagtactaggacttattctcgtttcacctctatgtaaagctccctcatggtctgagtggttttataataaggtaatggcaaatttactgtattattatggcat

SEQ ID NO: 158291 - DNA, 580 bp, Zea mays
  Clone ID: MRT4577_7593C.1
aaaaaaaaaaaaaaaaaaaaaaaaaaaaaaaaaaaaaaaaaaaaaaaaaaaaaaaaaaaaaaaaaaaaaaaaaaaaaaaaaaaaaaaaaaaaaaaaaaaaaaaaaaaaaaaaggttggcggggcccttgttgttccggcccaaacctttcggtttatttcttatccgtccccccggttttatgggggcccccccccgggggcccgggggagggtttttttggggggccagggggcaaagccccgaaatttcaaaaacccaatgttgtcgcaaaggggggcaaaccgatttttttttacggggggttccagtttcctcctgggcctaaaatttaaagtggcttccagagggagtcagggccccgtaaaactaaatgggggctgggggaaaactaatttttggggggcccacccccttggggaaaaggttactccgttggaccatatttttggagaccggaaggggtaaaattttttaaggggcttcaggaaagggaccaggttgcatttggcccccttaacaggggggagggcatgggtatttttggaaacccttttttttgaggcagccgaggctttaaa

SEQ ID NO: 158292 - DNA, 737 bp, Zea mays
  Clone ID: MRT4577_75940C.1
ccggggacaccgtgcagatagttgacagcatccaagatcgtgacataaatcaggtctatgtaattggtggagatggtactcaaaggggtgctggagtgatattcgaagaagttagaagacgcggtctcaaagtttctgttgctggcattccaaagactattgacaatgacatccctgtaattgacaagtcatttggtttcgacacagcagtcgaggaggctcaacgtgcaataaatgctgctcatgtggaagctgtaagtgctgagaatggtataggtcttgtcaagctaatgggtcggcacagtggtaagcttctacgagagacgaataaattatgctagtaatatacgatatctgtcaaatatatgtgtcaattaattaactaactcttgagtatttctctgctaatatcttattctgtaagtgacatcttcaattaactccgttgcttctatgaaaatcttagatttgtttatgttttcattgggccatggatgtctaggaatttaaatagcactttgaatatctatgaacatatatttggttaattgttgctttgaatcattctttcttgagtagaagcaaaagagcctccagctgaataggttaaacgttctgactagcacttctcagctcctgaagacctgagtttgactcttcgttggggtgaatttcaggatgaggttaaaacaatccgaactttctcatttgtccccctccaaagcacatgtctaaag

SEQ ID NO: 158293 - DNA, 406 bp, Zea mays
  Clone ID: MRT4577_75941C.1
cgggccgggctccagcgttgtgtcctatcgccggcgcctgcccatctacgccttgcgtggcggagaggtcgtcggcttccgtacacgcgagaagtgagagcatggacacccagccagaagctcgatgcggagtagaaagggatgaacaggaccgaattcagggaccaggtgacccactagatagcttaagcctaggatgaccatagccggatcatagtgagggaagtactggggccagttctggaggaagacagccgcacccaggtaaacacctagagggaggccatgaaggtactgtgaaaacgtaacggccgtgggggcctacacgcatgaacactgctagtcgcggaatccgtgcggagcacgaaccgtcgcgtgagggagcatgagagaagcatgatctagc

SEQ ID NO: 158294 - DNA, 306 bp, Zea mays
  Clone ID: MRT4577_75942C.1
tttttttttttttttatttttgggttgggttttttttaagttgtttgttttaatgttttttacttttttatatctgtgtgactttttttttttttcttttattaaaaaaaaaaaacgggggctttttcaacaccaaacggagaattttttaaaaaagccgcttgttccgccaaaacttcggggcgtcaaaacttaaaaaacacacgaggggctcgttttttccagaagaccaagcaattccccgcctgcaacaaataataaaaggggcccctttcccaaaagaggttttaaaaaaaggatcaattt

SEQ ID NO: 158295 - DNA, 2322 bp, Zea mays
  Clone ID: MRT4577_75943C.1
atggccacgacagcgggagagaagttgtcacatcgtggcgttcgacgacgcggtgagggtgggaagcggcggagccccgatattaggtcatctgcatttcttctagttccagtgtatctctcgacattcatagacctagacgaaggctatcagaaattgaatatccgttgcattcctcatgatgttattgtctcatcttggataatgagcgatcggcagcatgatgttgtcgctaggttgggattttctagtatatttgatttgcgaactgatgccttagagagcagatctctcatcaggtggttgatggataaattggatccacatgacatgaccatacgcccaggggctggcaaggaactaaagataacaaaagagacggttcgtctgattctgggtttgtcatgtgctggaggaggcagggagtttaccgattggtacggtgaagtggatgctgctgcaaaactgagacgtggtctcaaagttggtaaagaagaatttgatgttgtcaaacttcaggacaagatagtgcttggcaatgatgatgagttatcaatcagatgcttttttctgattctattcaatcgacttctttttccttctgcttcatggggcattacaaacaatgaggtactaatgacttcaaacatgcctcaaatggctgatattgactggtgtcaactagtttacaccgatttgtgtgatgctgccacacgttggcacaaaaggaacaaaacaaacctcacagcaacaatatatggatgttcactcattgttctaatttactatcttgatcacttacatcaccctgcatctcctgataacaaatatggtactccccgcattaagttttttgataatgagaccataagagatttggctaggggtgacagacgtccccccgtaaaactgtttcgtagccgttcagaaacgtgttacgttattgctccagaacggcctgtttctgccattttcaacatatatgtgccacgtatcaagcatttgattggcaacaagttgcaatgtttgccctcccagcatcgaccaatgtttcaatcaatgtttgatgctcatgacaaagaggtggataagtactgtgattcccttcagctgagccatcagatgattgtttcaaagcagattgaactatctgaaacatttgataacccccctacctcaatgcctccaacaaatgctccagtatcctctccacctgttcccacacctgataatcagcaacatgatcaggaaagtcatgttcctactgatcatatcaaagtatcagatcatgaaggacaaaaatctattacacatgatactctcgtatctggtgcaccacagtttgataaaaccccactgacagatgcaactactgaacttgttgcaagggatagttcctctaaatctgcagttgctgaacctccccacgtgtcacgcgaagactgtgctcgcaacctacttaagttcattttgtcaggacaactagatccgagcatgtctatcataaattttggaggatttggaggttctatcctcgatgttgtccagtcgtttggtcctaataaatgccttgagaatattttcatgcagggatttatcgactgtattcgtgaggatgatgtattatacaatccagattctgtaatcaacactctaatactgaatgtcaatgttgggaccgttttgaatatcgaggagttcgaacagcacagttcaaatccccagcccttctcaacatcacttcttaaagaacaacttgaaccaacgctttctccagatgaagttctgaagcaaattaaattgatcctggttcctatgctacgtcgtagtcactggacactttatgcaatcaactttgagaagcgtcgaatagacatcttagattcaaatccttatgggacattgcttggaggcactacctggaaacaaatccacaatgatcaattgctgataaatggaacgaagataccttggtccagattaataatgagaagacttagcattgcgttacatgaagctcgacctgattcaactttaccaaagtttggcaactacaagattgggcttcttcccaattgtccaaccatgttaccaggttcaaacgattgtggtttttttgtcgcaaacttcctccaatactacaattttgttgatggagacttatcagaattttatactccggatgaaccattggaccaacgtgcctttgttctgcattacctgacctttcatcgcaacaacagggttgtccccctccctgcagaactgctgccgttcaagtttgctccaaggagacggcgttgtttgaaagccaagacttga

SEQ ID NO: 158296 - DNA, 510 bp, Zea mays
  unsure (1)..(510): unsure at all n locations
  Clone ID: MRT4577_75944C.1
tctttaaatattaatagagctcctgcagagatctggggggggggggggggggctgctcttccacggagctgcggcttcgcaggcaggctccttccggtctgcatacctcgtgcaggcccacaccaccactgcgcgtcaaggctccccatagtaaataacaacgttacgtacatacatgattaattgttactttacactagcacacccctcctccctccaccataacacacatacatacacacgcattcgatcgaccgcaccaacccccgaccacaatcctctatcgatcattacatcgagttcactcacatgtgcactttgggcggggggggacattcgggaagaaaagaaagaagaggagaaggttatngaggggcaggtcgttgtcgtttactatttggtaattaaacagaaggtctttcagatctacgtttttaacatctaggtaaagttagtcgtaatcatccacaaggttgtacaggagataatttttcaggtctaagagataat

SEQ ID NO: 158297 - DNA, 281 bp, Zea mays
  Clone ID: MRT4577_75945C.1
cacacaccttgtaccactagtaatttgccaggatagacctgacgatagctgggcaggctacaggccactaacggaaagcatgcccaataggagaatttctggcccagaatgggtcctgtaagcgctgcagtagatagtttttctttttctgttggcagtagtgaacgactttatgatatatatcggagatggtccgagtggatgagactaggatgtgaactgaagattgaaccggctgccttcgggagcgcgctccttcagataaatctccagtgattcgt

SEQ ID NO: 158298 - DNA, 267 bp, Zea mays
  Clone ID: MRT4577_75946C.1
aaaaatgaatggcacaggccatcgattgattgattcatccactggtgacgattcatgcgtttgtgcttagtttacattgaccgctttcagcaggcagcctttgacattgtttggtgaggacacatcgatcatgagcattcgccggctggtgcaacttctacacgccttcgctctgaacctggtgggtgccggggagaccacactgttcactcgtcggtcggccgttcttatggttggatcttgtggtggttcccttgttcggctttt

SEQ ID NO: 158299 - DNA, 806 bp, Zea mays
  Clone ID: MRT4577_75947C.1
ccggccggggcactataaaataccctcgccggcccccccgcacgcgtccgatcacatcctctcccaccttactcaagctagtgcgagcatagcaatggggttcgcccggaagagtggagttgcagcagtaggggtttggtggctcctcctgctcgccggcgtgctgttgcctttggcggcggcatttggccggcacgccgatgccggcaacgacatgtgcgacatcaagtgccagcatcacagcgacccggccaggaggcagcagtgcgtggatgagtgccatagccgggagcaccatcaccctagcagagagttttgcgagatgaagtgtcagcaccaccaggaccctgcaaggaaagagatctgcgtacagcagtgcatgagctatggtctcagccaccgtgcgagtgccagtgttgatgatgagggtgaaaagcgcttccatggctgggaaacgacggtggccggaggaatcctcgaggtggtgtgacgacgtacgacgttatataacagtagtacgtcttaattaataaaataagctacacccgcgtttcccttatatatatgtcttgctatgcatagagatatcatggcaaaggcataggaataaagtgcgtgcgatatgcatgtacgtgcatgttcgtagtaatcttacagagattacgcagaaattttattaaaagcagtttgatttcacataaggaaggaatttaggaacacaagaaaaaaaaaaaaaaaaatcctgcactatagtcctgcggttatattagttgtcttgtctaaacaagcttatatataacactagc

SEQ ID NO: 158300 - DNA, 938 bp, Zea mays
  unsure (1)..(938): unsure at all n locations
  Clone ID: MRT4577_75948C.1
ctcgtgccgaattcggcacgagtagcaatggggttcgcccggaagagtggagttgcagtaggggtttggtggctcctcctgctcgccggcgtgctgttgccagccaccgcatttggccggcacgccgatgccggcaaagacatgtgcgacatcaagtgccagcatcacagcgacccggccaggaggcagcagtgcgtggatgagtgccatagccgggagcaccatcaccctagcagagagttttgcgagatgaagtgtcagcaccaccaggaccctgcaagaaaagagatctgcgtacagcagtgcatgagctatggtctcagccaccgtgcgagtgccagtgttgttgatgagggtgaaaagcgcttccatggctgggaaacgacggtggccggaggaatcctcgaggtggtgtgacgacgtacgtcttaactaataaataagctacacccgngtttaatatatatgtcttgctatgcatagagatatcatggcaaaggcataggataaantgctgcgtaagcatgtatgctctgcatattatgcgtatgngatatgtacntgcatgttgtantaatcttacanggttacccggaaattttattaaaagcagtttgatttcacataaggaaggaatttaggaacacgaaaaatctctctcaacatgccctataaatatagtcctgcggttatattagttgtcttgtctaaacaagcttatatataacactagtacaaacaaactatgtacaaacacgtctttcaaaaccgccggtagtgctagatgcctctagaaatcgttcttttcacaggcggccagttaaaatctcaattccagaaaacataaattaggtttcaaaataacaaaaaatattttaattaggggaggccttatccaaccatctccgttaaagtcacaagtcacgatatttttcgca

SEQ ID NO: 158301 - DNA, 327 bp, Zea mays
  Clone ID: MRT4577_75949C.1
acatgcaggtgcctgagtatatatcatactacaacacatatgctactggcgcgcacgctgtaatgctgcataggcatggacgcgcacagatatgctcgcatgagaacgagtaagtccatgcgaatgatgtcaactcttcctgagtcggacacatcatatatagagactgcacatacctgtgcacaacacactaccttggacgcctgaaattcaagtcctcaactgaggtacacacgctcagagagcatagtgttgtcaaagtagcttttccttgatcttctacatgaaacccttctactagtgcgtcccatgagcgtgcttacccga

SEQ ID NO: 158302 - DNA, 586 bp, Zea mays
  Clone ID: MRT4577_7594C.1
cattgggtacctcgaggccggccgggggcacacgaattgttatctattaactctctcgttccccaccaccaccttcgatccttctgatacgcccgtacacctccaacaaggcgatctcccaacatgaattacctgatcgcctctgcacgccttatgattgtttaccaccttgaccttacaaagcatgagcatcatgacgaggataacctgtgcctgcttaaggatcgccgacctgagggaatctgcttacagctgaagattcactactatgcttctcgactgcaagatcaacaacctccttacaaggcacattaaacaaagagaagactatgctaactacctacctcactatcatgtctgcctgccaatgacataacatatgacgacgaactgtgtcctgaggtatggtgataagaatatctgaccccaacatgccacaggaatattgactgtacacatacactgtgagctcttctgagatgaagcttcagcaccagacacaactgcgcccgtacaacgtcaactatattctgcgatatgaagactgtccagcacgtgataaaatctgatgtcgacagattgccac

SEQ ID NO: 158303 - DNA, 348 bp, Zea mays
  Clone ID: MRT4577_75950C.1
aagttataaattttgagcccgcgcagtgtctatgggcatgcaagtggtggatgtgataaactataggagaggtcatgtgtattccagatatatagaattgtttcccctttccctttctctcccctgtaatgcgagcgagcgacacatcttgcgatcaattttcagcgagaaatatgcgatacaccacgcacatcatttcatcagtcaggccgcggggcgcgggacgcgtaagcatctggcgcgctccttccagtcaagctatggccgtggcctcaccggctactggccagctggtacgtgcgcttcaagaactggttggcggactcgtccgcagggtggcacatcacc

SEQ ID NO: 158304 - DNA, 394 bp, Zea mays
  Clone ID: MRT4577_75951C.1
gagaactggtgatgacttagcaacagcaggccactcaggcaattcttccaatggtccaccctcagcttcagaagaacaggaccattcaacaaactctaaagacaagctccaaaaagctagctctcaaaacacaaagaaggtttttggaaactcaacaaacggcaagcaaggtgcatctaatttggaacaggaatgtgcaaatgaagatgggtctcatgtgctagttgctgctgtgtacaaggatattgataatgaaagaagctctcaaaagattagggatgatgtatcagatgcacaactggatacagcttcatctgatgacaaaagttcagaagaagtcgaagacgtgaaggtttgtgacatttgtggagatgttggtgaggaggagaagctc

SEQ ID NO: 158305 - DNA, 145 bp, Zea mays
  Clone ID: MRT4577_75953C.1
cggctcgagcttgaatccctagacacttacgaacgaaccgcaaacatggctgccgcgcccgatattggaagtttcttcgcagtcgagatccccgtaacacaacttgagcgcgcacagaagttctattcagaaatatttgcctggg

SEQ ID NO: 158306 - DNA, 627 bp, Zea mays
  Clone ID: MRT4577_75954C.1
aattcggcacgaggaggaaggcgagttgatgatggggagcgatgtggagaatgaggaacaaaagggaggcaccaagtccaaatatgaagcagaggttcttccaccagtcccaaaaattgaaatacagtgggaaccacatcatcagactcttccagtagggcgtgggatccagataatgggtgaaagagtaattgttgaaggttcagtccaacacaaccccctgaatgagggttcaattctctggataacagaaagtaggatgccgcttggtatagttgatgagttgtttggacctgttaagaacccgtactaccttgtgcggtacaactctgaggaagaggtacctgctgggatcagtgcaggaaccgatgtctgttttgtagcggagtttgcagaccacatcctgaatatgaaggagctctatgcaaaaggctatgatgaatctgattctgtagacaaagatgcagaagatttacctgatttctctgatgatgaaaaggaggctgagtacaaacggtcattacgtcaagcaaaaaggcagactgatagacagcacgagcctatgaagacttcttgttacatgaaaggatcacaggctataagtagcggaatacggaagcccatgcc

SEQ ID NO: 158307 - DNA, 1746 bp, Zea mays
  Clone ID: MRT4577_75955C.1
atgtcgtccccgccgcgggggcagcccgccaccgccgccgtgccggcggtcgcggccgccacgtccccgcagttgcctgcggcgtcccacacgctcccccgcgcgttcctcgccacatcctctccccgtgccatagtggcagcaccggcgcccccgctattcaccggtcggccgctgaaccctaacccaccggcccacggctcctccgtgccccacggcatcctctaccccgtcctgaaatccgcctccacgtccaactccgcggccgcggccgtgacagcgcagctccgccgcgttcctcccatggccgtggggtaccctcggacccacgccgtcgccatccctattgcacagcagcaccagcccctggtgcacgcgcaaccccggtccttcgcggccgtgcctcgggcccttgtgacgggcgtgtcgacggggtccgaacagcctccccgaggagttcctataggctcgcagcccaaggttaatccagtacctcctgttggcccatccaatgagcagagtaacccaaaagacagggaaaagagcagagaagaacctacagttgtggtgattaatgaccgcaaagttaacctgctggatagtgagtcgggatccttttacgctctctgtcgatcttgggttcgtaatggtgttccacatgaaagtcagccaagctttggaaatggtgaaccacttcttccaagacctttgcctgcttcagttgtagattctagaatatcagacaaggacgataatgatgttgcaggtgaagattcagatgaagagccacagaagaatgccaacggtgaatacaatacaagtgatttattgaagcagcatgtaaagcgtgcgaaaaggatacgtgctgggttgcaaaaggatcggcttcgtcggattgaaagatacaagcaacgccttgcacttcttttgtagaatcggcctgtgactgtataaagctgaaaccataggtgtttgtcttgcaggttttaacttccgtattggaatttgttaagatgttttattgactagcattgtatgttaggaccatctggatgttttattgccaacgttatctaataaaatgtgaaaaagcctttagctaaaaaaaaaaacgataatgatgttgcaggtgaagattcagatgaagagccacagaagaatgccaacggtgcatgcgactcatgggacctgctggtacagcgtgcgaagcgggcgcgtgcggggcgtgcggggtttgggttttgttgttttcgcccctctccccccgccccaccgggcttatcagtcctatctgaccttaggaagatttggggcattgctggcgttgctattggtccttgccgccccggcctcggcgtggatgtggttagtgagcttggtcttctggtccttgtgttccgcgttttgtgcttgttcttctgctgcttctgctctgtgtaagctctgcatggccagcttgtcatcccggtgggcccggcgggtctggcggtcccgttcttctctttcttttgtttcttttgctggttgcacagggtgcggctgcgtcggcttcgtcggttcgagcgacgcctgccacgccttgcgctgcttcggccggtgccgcctgagaccggataccgctggtgcctgtcgtgctggttgtaacttccgtattggaatttgttaagatgttttactgactagcattgtatgttaggaccatctggatgttttattgccaacattatctaataaaatgatctgaat

SEQ ID NO: 158308 - DNA, 350 bp, Zea mays
  Clone ID: MRT4577_75956C.1
ttgttttgttctgtaagaaacacactgtataaaccattcatagaatcaacaggggtggcaagcaagccggcgacacatagatcaaaaggaatcggctaaaccaacacatgcgcaaagaaaacgagccgtgctgaaaccaaggttgggggaaaataatccaaaacttagggaaaaacctaaacccacgaaaaaacaaataggcaatgaggagggaatgggccgcccgaacgcaggaaccccaccaaaccagcagggaatggggggccaggccctccaaccggtagaaaaccgggggcggacctcttcgggaaaaatcagctttagggttcagacaaaccaggaaccgaatc

SEQ ID NO: 158309 - DNA, 609 bp, Zea mays
  Clone ID: MRT4577_75957C.1
cgcccgcagggaccggaaccggaaaacccgggtacgacccacggcggccgcccacgcggccgcccacgcggccgcccacgggtccgcccacgcgtccgcccacgcgtccggacccacgcgtcgcccacggggccgggcagaggctctaataggaagggacgagaaggttggccttggatgtcggccagaggggggaaatacaatacccgggggaatgggttctggaatcatcatagggcgctttacgcggagatacttgttaattattatttaggatattgtggttaaccagatttgattcaccttcacaacttttttcccatttttactttagtcaatggaaccgttatttagtcattttaattttttttgagattctttttttttctttttttttattgttatttttttgtttagttatgattttttttttttttttttttttattttatgtttagtttttcttttttattttttttatttttgttttttttttttttgttttttttttttttctttttctttttatttttttttttttttgttttatttttttcttttgtttttgttggtttttttttgtttttttttggtctttttttttttttt

SEQ ID NO: 158310 - DNA, 347 bp, Zea mays
  Clone ID: MRT4577_75958C.1
tacgtcggccgggccgacgggttctatacatcacacgctataacatgcgctatccagtatcacaacagtatcacagtggggaccatgatattgcatgtgcttatgctctttgctcttcccgcatgcgttgatcacactacaaaacttcctcatagctaacaagctcctatcgcttccatgattatctcatactttctatgcattgatagccttcagtgtgccgaaaacccaggtattcatgcctataggctccaacaagccatcgcagcacgcaagatacctttatcacccttgttgtttaaacaatggccagccctatctttggtgcagggattggtacctgccag

SEQ ID NO: 158311 - DNA, 148 bp, Zea mays
  Clone ID: MRT4577_75959C.1
taggaatgtgcgcgagaaaatgccaaggtaggcaacatactgatactgaacaccttgcatttgtaactcatggggctagcatgataagacgacaagggtgaacataaaggcaaaaacaaggagaaaccaagatgaatggcgcgatcat

SEQ ID NO: 158312 - DNA, 717 bp, Zea mays
  Clone ID: MRT4577_7595C.1
aggatgggttccactggtaatagcccaagggacacggtggtcggcaccccgacgccaccggcggggagcaagacagcgctagagcctgaggcctttccggtgaccgcgtctccggcgccaagatggccacggctgggcgtggttatggtggcaacccgagctgcagccatggtgacggcactgctctcaatgtcgctgatggtctcctccaagcagcgaggcactctcgccatcttcggcatcgagatcccgctctacgccaactggtccttttcttattccctgcaattcctggttgcgatgtctacagcttcagctgcctactcgctggcacagctcctcttgatctcacgcagggtcgtgaagagagaccccattgttccttctcgacgccacgcatggctgttttttgccggtgatcaggtgttttcgcttgcaatgatgagcgctggatcggcggcggcggcggtggccaatttgaaccgcaccggcatcagacacacggccctccccaacttatgcaagtccctgccacgtttctgcgacctctcggcggcctccatcgcctgcgccttcctcagttgcgtcttcctcgcgacttcagctgtaatcaatgttatctggttgtcaagtccgtgagactagtgacgggactgtactgctactgcactcgagggtataacccatgtcccatgatatccacagtcacttgatgcg

SEQ ID NO: 158313 - DNA, 583 bp, Zea mays
  Clone ID: MRT4577_75960C.1
gcgattcaaaatcaacactaggatgagcgaagtgtggataccattgaccctctgccttccattacctacctaggatgcgttgaacgctcgcgagaagtgccacttgtatgtctaacgcacacatgaggccgcgaccagcgacaggatcgggcacgacgatcacacgcgccgccatccggaacttgacctccaagcgggggccgtgaacgtcgccgtcattcggcccgacagttgcgccgactatcagacgaagcccatgagacggcttgacatgcgcgagccctaagagctgacgaactagaggacaatcctggatgacatacctctgctggaccaatacacgtagatgagggtcgcagagctgaccgaagccggacaagcacttcgatttggtactatacttcccatgactgggtgagactttgtgcggcaggtatcgcaagcacaatgacatgtttgaggggctgccttcctctacactgatgatatacctggatgtgaattgcttcaaaattggtcggaagaactggctactaggtatgcaacgaccacatgttttaaaattatctccacatactggatc

SEQ ID NO: 158314 - DNA, 171 bp, Zea mays
  Clone ID: MRT4577_75961C.1
attcggagcgcagccgagaggcatatgcgacggagatgtcagacaagggcaacggctgcaacgtgctcgacaacgtcggcaactccgctaccgtaacgtgcttcgaggtaacatccagggaatgaaacatccggaaattcagacgctcccgacctccggtgacctggaaca

SEQ ID NO: 158315 - DNA, 559 bp, Zea mays
  Clone ID: MRT4577_75962C.1
ttcttttctctgaatatctcttccatttccagatacatagaaagcacaccacaccatcacccattctagccatggctagccagcaaaacttcttttctctgaaggcgaacatctcttcacctttggctaccattgaaacaatgttcgatgactttaggaggtgtgtacttgtgtacaatagcatcaaggagatcatatgcagccaaattatcctttgccagagcaacaaaggtaagctgtggagctcgagctcgagcactttcttgcattgatcgacatctgcaatgccatcctagagagcttttctaagctcaagactggtactcgggaaattacattggctctcaggccaagatacagtccttcattcatctgaccaagatggcgcaaaaacagtggaagaagatcaatggaaatctccttcagctgagaaggagggtggccaaaccgttggccggagcaagagaggtcgttacttcgatgcttcagtcatccacgtggctcctactgaagcaaattgtgatgccgagctataacaagccgtatcttgtctccaaga

SEQ ID NO: 158316 - DNA, 667 bp, Zea mays
  Clone ID: MRT4577_75963C.1
gccggccgggccgggaacttgaatctgaagctcaccagagattcctaccttctgaagacggaaaaggattcctctcccccacctgacgcctcgccgctacgcccgcatttcccaatccatcctcgtcgccaggtgctcatctcgcgtcgacatttacccggtccgatccccggcacgaaaaataaagaagctagtgggtacagacacaagacaatattatattgggactcaattagtttgatgtttggcaaagatcatgcaaccggtgaagtcgcaaagaccctagctgatggcgcgagagacatgagtaaggaagaggtgatgcgcgcaagtacgattccttgttggcacttctggtgatccttaggaagagatggctgctgaagcaactgaaaaagtgaaccgagttgtggtttggtgaattgaactactgttggatgtgttgccgagtgaaaaattgttggtctgttgaatctaataattaatttggtcttaatatatgttggtcacttggtcttagtaaaaaaaaaaaaaaaggcccctatgaatgcttttattaaaaaataaagcattagatcccaaaatctcgctttcatagggacgttgcggtttttggctatgaaactgcttttggtagacgtgccttcgttcttaattttaaaatttt

SEQ ID NO: 158317 - DNA, 305 bp, Zea mays
  Clone ID: MRT4577_75964C.1
gggcggggggtgattcattttggggggaatcccaaacccctgtggtgggtgaggagttacaaagggcttttacaaggcaacccttaattttcattggttggtccaaattttaataaggtcaacaaccctttggaagaatccccacttgtttttcaaccaaaaaataaccttgaccattttgttccccataaccattgtgagggaggcttcaatggtggaggaaaccttttaacaccttaatttaacggacacaaccggtactttgtaaacttttaggattcccttaaactttttggccgaggttt

SEQ ID NO: 158318 - DNA, 370 bp, Zea mays
  unsure (1)..(370): unsure at all n locations
  Clone ID: MRT4577_75965C.1
aggaaaaaaactctcttcttgccctttcaaagggcgcatcagaggcggggcataaactgacacggcccaccaggggggaggggcaaaaatttataactaatcccccccggtaaatgaatgaactaggaacatacacccgggctatcctaaaggcaaaaattatctcttggggggaaccccccgcaacaaccaaaagggcccccgcgacccgaccctgggggcatctggccctgccccccatcgcgaggcaacaagcacaacattttctgccatcgctgaaccacctagcaatggggaaccctggcgcctacttgcgacagcaacctggttgcatcctacccacttgctctggcgaacggagctgcntacc

SEQ ID NO: 158319 - DNA, 108 bp, Zea mays
  Clone ID: MRT4577_75966C.1
tctgctgttgatgaaccagatccggcgggtcgtttgtcctagaaggctacatattccggaccgccattacctagaagtgtccacctgctaagagcaaaaacactttct

SEQ ID NO: 158320 - DNA, 258 bp, Zea mays
  Clone ID: MRT4577_75967C.1
gggcatgttgcaagaggtctgttttacaatctgaataaccccaggaagactcagcatgcgactgccgtgggtcaggttccgcttgcgcttttttgtgaaggctacagggggattttttacaaaatgttgctgggtcttttgcttaaagggcaccctcagggtgaaccaagggtttttcgggctctttaaaactggaggggtactgatattgttactgaaattccacaaacatctcgtatacaatgtgacaaacccttt

SEQ ID NO: 158321 - DNA, 423 bp, Zea mays
  Clone ID: MRT4577_75968C.1
attcggctcgagcgcttctcgctgttttatcacagttgtcaacctaactgtccgctggagaattggaatcagaggggctgctttgccccctcaatctgttgctaaaccacttgcacctgataaccctccactgaaggttagatttatcgacaacatctatcctagtgggattgatcatgaaattgctgaactaggatctaaactggcaactagctactcttgctataagtcatttctaagaacactcgagggagggggaactgctgactcttgtatcatgaatatccaagcagtgcatgagctattgattcatgatgaaaggagcagggcacatgatcgataggatcatgcgaacccaacgaaggtcttataatttgttagccactcagactccactatttatgattcatgaactacacatgc

SEQ ID NO: 158322 - DNA, 2045 bp, Zea mays
  Clone ID: MRT4577_75969C.1
cattgggtacctcgaggccggccggcaccaaatatctattagatgggaaagttctgcactttggatgttatatcgccaatcagaagctcaaacccttgcaaaaaaaaaaaaaaaaaaaaaaaaaaaaaaatggaccacagtgtgtactactgccttgtagtagctcttcttccacttgtgtacttccttctcaagtcgtcgtggaagaaagctcccttcggatctggtagccgccatggactaaagctccctccaggcccatggcagctccctgtcatcggcagcatccaccatctccgcggctccctcgtgcaccacgctctgagggacctatcgctccgccatgggcctctcatgttcctcaagctgggcgagctcccagtggtcgtagcatccacgccggaggctgcgaaagaggtgatgaagacccacgacgccatcttctcgaccaggccactgagctcaaccattaggacggtctccaaggatggcctgggcatcgtctgggctccgtacggcgaccactggcggcagctccgcaagatctgcaccatgcagctgctcggcgcgcggcgcgtccagtccctgcggcccgcgcgcgaggaggaggcgttccggctggtccgagccgtcatgtcctcgtccaccgcggcaggaggagctgcgccgccgccgctcgtggacctcggcaagctggccgccgtgtacgtcgccgaggcgtcgttgcgcgccatcttgggcagacggttcaaggtcgaggaccgggacacgctgctgcgctacgtggaatgacggcgtccggctggccggcgggttcacgcccagagacctgttcccgtcgtcgtggctcgtccgcgccctgacccaccgggccgtgcgcgaggtggatgcctaccgagactccttgttcgccttcatggatgtagtggtaggtgagcgcttggatcgacgaaggtcaactgaagaagaggaggaggagggagaggatctgattgacgttctcctccggagccacaaggaaggaaacctcccgttccctctcaccatgaggacaatcgaagcggtcatatttgatctgatcggagggggtatcgagacagcaacaacaacgctgcagtgggcgatggctgagctgatgaggaatccaggcatcatggccaaggcacaggccgaggtcaggggattgttcatgggccaaaccaaggtaaccgaagaccggctaggcgagctaccctacctgcagctggtcatcaaggagacgctgaggctgcatgtcccggggccgctgctgatcccaagggagtgccaggagcagtgccggatactgggctacgacgtgcccaggggagccatggtgctcgtgaacgcctgggccatcgctcggagcccggatcactgggaggagccggacgcgttcgtccctgagaggttcgtcggtgacgcgagggatttcaagggcaacgacctggagttcatcccgtttggcgccgggaggaggatctgccctgggatgtcgttcgggctggccagtggccaacgtcgagctcggtctcgccagcttgctcttctacttcgactggagtctcccggcgggcgtccttcctgctgagatggacatggccgagaccatggggatcactgctaggaggaaagcagacctcttcttgtctgctactctgcgtgtcaaactgccttaattttcatctgatctgatggtactctatgcctatgagatatgcagtgactgttacgggacgggctatctgtgctgcagcgtgtggagcagagtatttccagtttttctcccttagaccgtcttccacagttcaccgcctaaaacactattttacgttgtatatcccaattttcgtgatgtggagtatgaatatgtggacgtggatggataaactattagaggtaatctaagactatctctaatagcttactaattcatcttcatctccatgcttaaacttcactctacgaacaatataatttacaatacaaaacaatatttttccaaaaaaaaaaaaaaaaaagcggcc

SEQ ID NO: 158323 - DNA, 323 bp, Zea mays
  Clone ID: MRT4577_7596C.1
gcagttccccgaccacaccgttcctccgagcccaggagcagccccccgccaggaggaagattgatcttttaacaatatgtcgagggaggagaatgtttacatggccaagtgggctgctcaggctgaaaggtacgaggtgatggctgagtatatggagaaggtggctacgactgtagatgtggtagagctcactgtcgaggagcgtaaccttatgtatgtagcatacaagaatgtgattggggctcgacgcgcttcatggagcactgttccttgcatggaacaaattgaggagttccgtaggatcgaaaagcatgtgcacctta

SEQ ID NO: 158324 - DNA, 447 bp, Zea mays
  Clone ID: MRT4577_75970C.1
cccgacaaacggccgtttaaaaacaaggaaaaagaaaaggggaaaaaggggaaacccacccccccaagcagaaagcagccaaggcgggcttaggggaggggggggcaaacccggggtatctcgccgggggggccggtttggaggccaaccctgccaagctgggccagggggggaaaaaaggccttaaaaaaggggggggggtggggggaaaaaaggggaacggggggccggaagcggcggccggaaaaaaaaaccgggccggaggaaaacaggcccttgtggaaacggagggggtaaaaaaaggcgttgaaaaaaacccgggggggggggacccccaaaaggggaaaccccggggggctgaacctgggggggcacacccccccgaaggagggcagaaagtccaggttaatgggggggtcccaccccacccggtgttgaaacgggaaa

SEQ ID NO: 158325 - DNA, 227 bp, Zea mays
  unsure (1)..(227): unsure at all n locations
  Clone ID: MRT4577_75971C.1
gttgatgttctatactaacgccaacacgggggtgcaccttacactatctcggccacacncaaatatacagaacacctccaccctcgcctgaacaatccgtataccacatcccccaccacacgagaaggctaataatgtgccatgctccatctataatttttacaacaccatattaaatactttgcacatgacatccccaccatagagctacacactgacaacttatg

SEQ ID NO: 158326 - DNA, 585 bp, Zea mays
  unsure (1)..(585): unsure at all n locations
  Clone ID: MRT4577_75972C.1
attatttgaagttcataatgagatcatttccacttgtcaacttctcctccggctctctctctgccgtaccgaaggaggtaatctcagatctctatgcagtcgccgtgctgccagttctcacgacccttcttcacagaccaaagtgcgtgctccatgacatcccatactgctctatactacctaccagccttcccttcgcgttcctactgggacgtaccggttactgtatctccgagatcggctccgagtgctgcaacaacggatggcgctacaccacataagagtgcctccacacgcccggaacgggtacgacccaggacgaaatgacatctcaacaggttcaacgagaggaggtgacaccaacaggacgagcagctggcacgggnagagttcaacgacaacagcaagaaggcggcgaggcatgaaactggctggacaaacgagaaagtcgatgcagaaagcacatcatgatccacgcggtgcaacatgaattccctgagggcgatgattcgacgactagagagactccaccgtgtgatgctacaaggaccacaactttgagccgccgagccggaacaacatctg

SEQ ID NO: 158327 - DNA, 329 bp, Zea mays
  Clone ID: MRT4577_75973C.1
acacatcaagcgaggcccaaagaaggattttgggatacaaacaacaaaatagaaacgctttgacagaacaatctttttgaaaggggaaaacagcgaaggatctagaactagctgcatttcctatcttcaggcatgaagcccgtccctccaacaatacactggaggtgtgttagacaccaaattgccataaagattaggcgtatccagatgcattataatcttaacaacttggaagcctacccattttggtgaaagaataatgttgcaagctggccaatcctgcagtgtgaacttggaatacgaaaatggcattggaacccaggggccaa

SEQ ID NO: 158328 - DNA, 381 bp, Zea mays
  Clone ID: MRT4577_75974C.1
ccaaaaaaagggctcaaaatggggggggggggggttccaaaaggcctaaaaaaaaaaaaaaaaatgtaccccaggggggtaaaaaaaaagggatggaagggggccccaaggcaaacccttgggaaaaaaaaaaaacccggagggaaaaggttttttccaactttcggggatccgggggcataattaatgggaaattttaataaaggggccctcaatctaaaaaaaaagaacttttttccaaacccaaaccttcaggggggaaacaaccaaccaacccgcgggggggtggaggtttaaaaaggggggaggggaaattcgggcccacccggggggggtaaataagggccccaccgggaaaccttgggggctttcgggggcccc

SEQ ID NO: 158329 - DNA, 207 bp, Zea mays
  Clone ID: MRT4577_75975C.1
agagtagaagcaggatagaaattttttcacagtcagacaataaccatgtatggaacataggtttacatagcatggggacaaataccactatctgtgtgattcggcggctgacaacgcacgcgggtgcgggggacggctaggcgtgttagctgaccctaaaggaggagtaccgagcgctcatctactacagctgggcgaacaaggcca

SEQ ID NO: 158330 - DNA, 424 bp, Zea mays
  Clone ID: MRT4577_75976C.1
actccacgctgccttcggcgctgtgactggaccctggcacctacctcccccttccatcacactcgccagccggcagatgtgataccgtgctgcggcacctgtgctgatatcgagaagagatgagcaggcaatgggtgatgggccggcaatcggcatcgatctcgggacgacgtactcttgcgtcggcgtgtgccagcacgaccgggtcgagatcatcggcagagaccaaggacacccgaccacaccctggtacgtagccttcaccgactccgagcgccttataggagatgcggtcaataaccaggtcggcatgaacctcataaacaccgtctttgatgcccagcgtctcattggcaggaggtttagagactcctctgtccagagtgatattaagctgtggcccttcaaggtcattcctgggccc

SEQ ID NO: 158331 - DNA, 421 bp, Zea mays
  Clone ID: MRT4577_75977C.1
tcctcgcgtccggagaaaagcagagggggccggaggaggatggacctctcatgggggttcgctaccgccgcatcctcttcctcggcagccgacgcgctccggggctggtgggacgacatcaacaagtcggcccagcggcaggacgcggccttcttctccctcgccgccgcctacgccctcgtctccgacgtcgcactgattcaggtcgtcaggacccagcaccggacgcccaagcacggacagaccaaccataaggagcgccacctcatgaactaccttgtaaacggggcccgtgctctgggattcggctgccatgagcacggcttccttgtgccatcacagcttgacatctacctgaacgctcacggccctggtctgttgttcttcatcacctacaccaagggcgtgctccccagggcag

SEQ ID NO: 158332 - DNA, 267 bp, Zea mays
  Clone ID: MRT4577_75978C.1
cggacgcgtgggtgggtggtggctggtgtgcttggataccacaggaaaaatgaggaggggagagttatcaggctcacaggatggagcatgtcactaccctattttggatgctagtctagatttattttatctaaagcaatagtggacttttttactatttgcagaggcgccgttgcttcttctactgtatactctggaaaattggactggcttttgactggacgtaattgcaacaactgcttctacattcagatactgttttactgt

SEQ ID NO: 158333 - DNA, 367 bp, Zea mays
  Clone ID: MRT4577_75979C.1
tttagagttgagcaagctgttatggcgaccggagcagatattgtaaatcgagacgacagcaaccatgaaatacagcgggccatagaggagtgccgaaacaggatacatgaggaggtagcaatccacattctgaaggaaaaggttgcagttttcaatgaagccaatctctccgtggaacaagacaaaacgactgcggaggagctagcaaggacactttgataagagcgaaagaaaactgctataaccgtgtaatgaaagaatcgttgcagcactcggcctactgagccatagcggtacccaaagttggctaggctacagacacaacgctgggaggccatgaaactgtgaaaaatggctgcagggtcat

SEQ ID NO: 158334 - DNA, 243 bp, Zea mays
  Clone ID: MRT4577_7597C.1
aaagccaaacatcaaactttttcatgatttggcataggtttggggaggacgcacacacaacaaaaccgggcctttttttaaccaacccttgccccgcttttgtccccaaccggcttttctttgaccacctccctttggggggggggcccccaaccaccccggccctttggcagtttaaaccacccctttctttctgtccaccccggggaccgggcccaagggggggggggctctccttttgga

SEQ ID NO: 158335 - DNA, 328 bp, Zea mays
  Clone ID: MRT4577_75980C.1
ctctctctcttgcccatcccccacctacgttgtctcatctcagatcctaaacccgcacgtgcctatatgcctgatgccacggcccctgatcctgatttacacaatcgaaagtccgagacccgagatgaggcacaggcacctgcgctagctgcaaaatgaaaaacgctcttcagagatacgcggccgcctacttcaatactgatcgcaacagcgcccagagacgtacgtgtgcgcccgcagagatcgtatcggggaaagacgtacagagcagatctgatcagaactgactctgacgcttgatgcccgctcttcgctgctgcagctggcg

SEQ ID NO: 158336 - DNA, 1077 bp, Zea mays
  Clone ID: MRT4577_75981C.1
ctccacacacaccacacacacagacacactgacacacccacacactagttgtatgtgctagagctgcagttggcttggcatcagaggccatgaaactgaaacaggagcaagcagacgacgactgcagcaagatgcagggaggtcgtggcctgatgagcagccttgagctcaggctgggcatgtcttcagacaatggcgacgccagctgcggcggtgatccgtggcttggcgttggagtgcacccctggagccttgccggcaggcaagcagagaaggtagccctggagcaagaccaccagcggcctccacctccgcagccggtgggatggcccccggtgggtgcgttccgcaggagccacctgcaggtgggcgcgaaggccgttgaggaaccgacgagcaaggtgaagctcggcgagcaggggccggcgccggctcggtccaccatgttcgtgaaggtgaacatggagggctgcgccgttgggaggaaggtggacctgcaggcgcactgtgggtatgcgtcgctgtcgcgcgcgctgcaggccatgttccatggcttcctgtcagatggtcagtggaggatcgctggcagagaagaagatgacgacgacgacaatgagcagcagccggagccgacgaagaagggggagagtaagagcaacaagaaggcgtacattcttctgtacgaggacaacgagggcgaccggatgctcgtcggcgacgtgccgtgggagctgttcatggcttcggtgaagaggctctacatcgcacaggacccaaggaagacgaagaattagctaattaagctagttagggcctggctaggagaaacgttgctggctgccttattatttctacaaatagctccaagtcgaagcagatagctaagctagcactcccttcttcgatcctgtaatcctgtcgagcatcagttcatatacagcgcgtgtagtcggcatctctagtccaatattaatatataggaaattttgccttggacttctatatgtcctgtagaccttgaacaatacttctaatgtctgacttaagttattgatcatctgaactccgttcacaaat

SEQ ID NO: 158337 - DNA, 518 bp, Zea mays
  Clone ID: MRT4577_75982C.1
aggtggacctgcaggcgcactgtgggtatgcgtcgctgtcgcgcgcgctgcaggccatgttccatggcttcctgtcagatggtcagtggaggatcgctggccgagaagaagatgacgacgacgacgatgagcagccggagccgacgaagaagggggagaataagagcaacaagaaggcgtacatccttctatacgaggacaacgagggcgaccggatgctcgtcggcgacgtgccgtgggagctgttcatggcttcggtgaagaggctgtacatcgcacaggacccgaggaagacgaagaactagctaagctagctagggcctaggaaagacgttgctagctgcctttattttatttctactctctatatagctcgaagcagatagcaacagtgtatgctgctagtgtttaactacctcccttctccgattatgtaatcctgtccagcatcagttcatatacagcgtagtaggcatctctaatctaatattaatatataggaaattttgcttaatgtc

SEQ ID NO: 158338 - DNA, 397 bp, Zea mays
  Clone ID: MRT4577_75983C.1
aaaaaaaaaaacccacccacgcctacggttctagatccccagcatccactatatattttccaacccaacctacacctacatacctcgtcatttttaaaactatactctcacctaaaaccaattcacatcccatcgtataacaacatcctcactcctaaaaccctcaccttacccaacttaatctacttccaacacatccccctttaaccaactaccattatatcaaatactcccacacccatcctccttcccaacaatttcccaacctcaatcaataataacactccccctgtaatcattcattaaccccacatcttttcatccttacacacatacttacctctacactccccaactccctaactccagatcctttccctttatttccttcctttca

SEQ ID NO: 158339 - DNA, 450 bp, Zea mays
  unsure (1)..(450): unsure at all n locations
  Clone ID: MRT4577_75984C.1
aaaccacgggggggcgccacgcatccgcggacgcgtgggtctccatcgtccccggcgaaccctgccttccctccttcccggtggctccataatacgggggggggattcncntnnaacaactcccaanancggtgacaatgataacacctccacncgcccngcgcgcctccgcgtcatgcgccctgttttcaaggaatttctgacgagtcctcgccggagacgccccaagaagcaaccgcctccgcctccgcccccgccgccacgaaatgtgaagctgaaggagaggaagaacaaggaaaaggggaaggctgcgacggaagaagacaaattcgagcgcgcgcaatacaactgccccttccaagacgagggcgaagggggccgcgacttcncgccgccggaacttgtctggggtaaagtacagagccactccttgtggcccggacaggtgtt

SEQ ID NO: 158340 - DNA, 404 bp, Zea mays
  Clone ID: MRT4577_75985C.1
agccacaggaatagggtcaaagccgggtgcattattgggggggaaacccatgcctcaaaaaattcaggaaaacacaaaacggggggttacaacaaggggggcacaaaaaaaccaggggaaaaaaggtcccccccgcttctctctgggggaaaggggatatagatcccaaatcatattcaacaaagggccctggcaaacaaacaaaaaaccctttatgggctatcaccaaacccaactttaaaggtggcggacggggagaccttgggaggatatgggatattggaggccctggcgttcacaacagcagccataccgggggcagggaaaaaccctaacccttcggacaagcaccccaaagccttgtactttcccatgtgcggggcaagggggtccatgcaaggttc

SEQ ID NO: 158341 - DNA, 163 bp, Zea mays
  Clone ID: MRT4577_75986C.1
gtgttcttcaggacgggctggctagctttctccctcccagcgcatggctacgccggacaacagggggcacgggcgttcgttgcccaagtttggggagtgggacgtgaagaatccagccacgttcgacggcttcaccgttatatttcagaaaggctgtgacgac

SEQ ID NO: 158342 - DNA, 338 bp, Zea mays
  Clone ID: MRT4577_75987C.1
gcgccaacacctacaacttcatataccttaaggaacaagagcaaataccaaccgtttcttccttagcgcgacctctaaaggggtgtatatccaacacttctttatacttataacacccatatgtgttggcggactactacaagtccttcgatccgtgcccggccttagactttgaatccatacatgacagcatcgtgcaccatacatttacctgcttctacgactgcatatcggacactctgttcaacattttctttttaaagaactaatgcttctttttcaactatgtaaaggcctagtttctatatagcatgataaactaagaatcattatgcatt

SEQ ID NO: 158343 - DNA, 350 bp, Zea mays
  Clone ID: MRT4577_75988C.1
ccacccgtccgggttttggtcgtgtatataaaggacgcttggagaatgttcaggttagtatctcttaaacatgatgcatggccattttatctgtaaagctaaatccttccaaatttggcctctgggttgaaacattaagtaaaatattggttggaaatgctaacataacgattatacttaagccctggattagtcctggatactaacagagttttacttcccaggctgttgctgtgaaacaacttgatcgtaatggtctccaaggaaacagagaatttatggttgaggttctcatgctcagtctcttacatcacactaacctggtcaatctaattggctactgtgctgat

SEQ ID NO: 158344 - DNA, 843 bp, Zea mays
  Clone ID: MRT4577_75989C.1
ctttgaagaacccttgaaagatatgtgcgtgctgtacaatctataaaagtgagcatttccctctctgtctctattgtatcatattatttgttgtaatgtcagaaattttaactaatttgggtttcattacaggccactatgcttgatcgagccaatgctttcaggcagcacttcgatttggatcaggagaggaagtataaagagcttaatcttgaaaaattgaagttcatgaaccctgaaagtatgccgaagcagaatctgagtttcgagaggcaagtttgctgtaacttctcattgagaattcttaatgtaatcttgtcgacgaggtttacataagtttttgttcattgatgtcttgctccttacagttgaaagcagacagtgaggaggctactaagaagtttgaacacatagttagactaatgaatgaagagcttgctcgtttccaggagcaaaagacagctgatattggactcgcattccatgaatttgccaagggtcaggctaagctagctaaagacattgcggatgcatggcgcagcgtcctccgaaagctcgaagcttgttccacatcataaatgtgatttgtgtttcctcatgatgtttgggaatgggatagggggttggcagctggtgagtttaggctgttttttcccagcctgttttgacactgattactgtatacttgaactgcggtttggaaatgctccagctgttaggttcagttgacgtcatttcttgctgtttgagcttttaaccgtctcttttcttagatcaactgaaatagctactggaatctcgtgatattgataatcaatgatgtaccatgatgctacttcctgg

SEQ ID NO: 158345 - DNA, 544 bp, Zea mays
  Clone ID: MRT4577_7598C.1
tcgtcctcatcccatctccatcgaactccatccccacgcacgcctccttggacaccatccccgcgaggtccatccccacacacgtctcctccaccgccatctccgcgagcacctccgcctccttcccgcatgctccttttgatctcgacaaggtttgcgcgggatatcatagtgccgcctgtggaatggtccgttgctggtgctacttgctcatggagttatggtggtaggcgtaggccacttcgtctgcctcctggatttctcactgctgcatcggctccgaaagcaaattagacaactatagttctgttatggtgattgtattctgtttcagctctaacctatggaaaattgaatggcagttgcactaatctgttggtggaatgattttcccagtaatttcctgggcaagcagatggctgagaaccatctaccttatgagaaatgatgccttgtatggttcagtatagttcttgtattgcttgtttgaattaattcctgtatggcagttgcactaaactgaatggcagttgcactttgaggg

SEQ ID NO: 158346 - DNA, 362 bp, Zea mays
  Clone ID: MRT4577_75990C.1
ataaaaacaaaaccgattttggtgtatatatggtataaaatgaaataacaatgcgaccaattaagatctggtaccaggggcagcatttgacaaaaccaacatgacacgagagcatactccaattatacggtcacatggactgatccaaaaagtgcgtgagagagatgcagatttacacaagataaggcccacacaacacagccacacaagacaatactcaggaaaggcagataagtatagagcgctcttattatcgtaaatccactaccctaagctggatggtctatcatcatactgataccggactaacgatgttaatagtattagcaccatgaacctttacctgagcacaccgatttgca

SEQ ID NO: 158347 - DNA, 591 bp, Zea mays
  Clone ID: MRT4577_75991C.1
ctctgtctctattgtatcatattatttgttgtaatgtcagaaattttaactaatttgggtttcattacaggccactatgcttgatcgagccaatgctttcaggcagcacttcgatttggatcaggagaggaagtataaagagcttaatctgtacgtattgcaaaatccattttctttttttgttctgtccagtccagaataatgttaagtgatcaggaaaataggaatcactgtgtttgcaataccaaattcagagccctcaaccaactaggactccctgatttgttagtaacatggttgttacatactgcaactttctaatgttgttctcactgcagtgaaaaattgaagttcatgaaccctgaaaagtatgccgaagcagaatctgagtttcgagaggcaagtttgctgtaatttctcattgagaattcttaatgtaatcttgtcgacgaggtttacataagtttttgttcattgatgtcttgctccttacagttgaaagcagacagtgaggaggctactaagaagtttgaacacatagttagactaatgaatgaagagcttgctcgtttccaggagcaaagacagctg

SEQ ID NO: 158348 - DNA, 343 bp, Zea mays
  Clone ID: MRT4577_75992C.1
tctttttttcatagagtaggggacatatatatttggacggtataccagccatttacaacaaatacgctagagttcaactggccaggccctaacatttaatgctcccacctcacaataaggaggccctcggttcaaaaccccacttcgcccaatttctctgcagagaggtctcattaaatggacaacgtgggcaaattaaacaggccgtccccgcacgggtaccacgccaaccggccgttcctgggccgcatcttctacacgtgagcccactgggcaccacccgtatcactctcgtacttaacggccccgagcccaaccaataccagccccacgttttttaccc

SEQ ID NO: 158349 - DNA, 442 bp, Zea mays
  Clone ID: MRT4577_75993C.1
aaaaaaaaagccagggccaaaactagggggggaaaaattatttaaaaggttcttccaaatataaaaaacccacgggggccttaaaaaagcatccaacgggaggggcccaaaaccagggccatccaagaaaaccggaagcccccccaccctttttatttaagaaataatcaccccaagccacccaggggacccaaacaaaaacaaattgggggggaaaaaaaaaaaaatatcccacgggaagacttcgaagggaaaaaaagccccaaattccttaaagaacttggattcgctaaaccccgctttgggaaaaaaccccccccaatttttttaaattttttggcggccttttggcaggggcaaaaagccgagggccaaaagggggggaggttccaacaaaaacccagaagggggcaaaaaaaatatcaccgattataaatttccc

SEQ ID NO: 158350 - DNA, 182 bp, Zea mays
  Clone ID: MRT4577_75994C.1
attaaacaggaaacgaagatatatgggggctgaacgcaagtaagaggacggcaaacaataattgttgcgtgccaggtattagacctcttacagacaccgccacaacaaaattaactatactacttttttggttagtaggtttacttgccataccccattgtatacctgcaggacggtaggca

SEQ ID NO: 158351 - DNA, 315 bp, Zea mays
  Clone ID: MRT4577_75995C.1
gacgcgggtgatgaacacgttcaactcagtaactgatcatctgagttgtagtgcttgctttgtgtgggtaaccaacacatgatggtggtgtgcttagcttaatgcgtagatatcaacaactgggttgtgtgtccaaaaaaaaaaaaaaaaaagggggggggaaaaaaaatttttttttttaaaaaagaacctgcccggacggctgctaaaaaagggaaaattatgaaaaaatccttccctctcggggcggctgttaaaaggggcaaattggccaaatttccactcaaattgggggccgttaaaatttacttttaa

SEQ ID NO: 158352 - DNA, 579 bp, Zea mays
  unsure (1)..(579): unsure at all n locations
  Clone ID: MRT4577_75996C.1
gtttggagaaaaanatacaggcaactgaacgagacaacaccctcgcgcaagcaccgctcgcagcctcccgccgagatggagatgcacccactcgacagactccaccggcaactctccccttctctcctccaccgccatagcacactgcgcggtcgacctcccgcttctgacgccgactttctctggcacgagatcacctcgtcattaccttgcgtgtccggccagtacaacactccagacagactatcgcggcaccttcctaaccgtagcggccgccatgacctccgcctcggactccatcgtaacgctataccgtcgcttctgcaaggctaccgtgtacctggtaccgtccaacaatgcgatagtggggacgagaagatctctcccattgctctagacgaaactacaacttcccaagaaacaatagatctgtagactgcccgatgtcaaatgatgagaatgccgttggaacgtcctccctacacagagagatgtcaaccttaaacctgttgaaagagctcttagtttctaactgctgagaatcgcagaacagctccaactactggtgtatccacggat

SEQ ID NO: 158353 - DNA, 327 bp, Zea mays
  Clone ID: MRT4577_75997C.1
gggaccaacgctggttacggggggttccattccatttaaatttccatatggcccaacacccgtggttgttgtagacggcccgtattataaataatacaggccccctttgggggggccccggccgggggtttaaaaacaagatacgtacctgttttccgcccataaatcgatttccgttaacatttggagcgtttactaatcgccttgaacagggggatcgcccccgccgttgaccgaaaagaatcctttccgttttttggggaacagggggggcgattttttggtcctccacggggttttaaaccttgcattggggggcaagtatac

SEQ ID NO: 158354 - DNA, 312 bp, Zea mays
  unsure (1)..(312): unsure at all n locations
  Clone ID: MRT4577_75998C.1
ggaggccgagcgcacgggcagccaggcagacaagcgcccggcgnccaccgacagcgcgcgcnggccaacggacccagacaacagcacaagaaaaggcaggagccaccggcagcgggggggggggacancacgccacagcccaagccgcggaccgggcaaaagcagcggaaggcgcgagcgagagcgagcaaacgagcgcgcccccgcgacggaacgacgccaacgcgcgaacgagcagggcacggccgaccccgagaaaaggggggagacgagagggggccgaagccagcagggagccccccaccgagccca

SEQ ID NO: 158355 - DNA, 201 bp, Zea mays
  Clone ID: MRT4577_75999C.1
aaataaaaaaaaaaaccaaagaaaaaaaaatgaaagaaaaaaaacctaattacgaaaggggtggaaaaaaaaaagaagtggtgtaacagttctctaaattcatttctatttccgcgtgggtccgcacgtcttaactattcaaactttttctctaaacgtaacttaattggacttcattttatagcgctattcaaagttaat

SEQ ID NO: 158356 - DNA, 618 bp, Zea mays
  Clone ID: MRT4577_7599C.1
tcgcgatcatccaggcgccgcagtgtaggtctagatcatccaatccaacacaccggtcgagcaatggcggcagggctgcaggtgttcggacagccggcgtccaccgacgtcgcgagggtgctgacctgcctcttcgagaagaacctcgagttcgagctcatccgcaccgacaccttcaagaagtcccacaagctccccgagttcatcaagctaagggatcctactgggcaggtgactttcaagcacggtgacaaaacaatcgttgattccaggtcatcaagatgcagagggagcaccccggcgcgttcgagtgatcggtcggcggtctacgcggtgatgcatgcatgcatgcgccgcggcgtgtcgttcctctatcgccgccggccaccggaggcttcgtcgtcgtcaggcttcgtaccttgatggagttgtcgacttcatcgtttcgtcgtacgtccctatggcctgtgggctaaaataacgtgaagcctgcctacacggtgtctcgtgttcgtgtagcttaccttttatgttgtatacgcactgtcttttctgggtatttgttgtattgtgatgtattcatcaactccttttgcaagattggtcaattattcaggc

SEQ ID NO: 158357 - DNA, 101 bp, Zea mays
  Clone ID: MRT4577_759C.1
ctcgagccgccggccggccgtgcatcggaactgaagtgtgggcaccaatagccacatcacggcaagagtgatggctccgctgccccggatcgtgctcctcg

SEQ ID NO: 158358 - DNA, 768 bp, Zea mays
  unsure (1)..(768): unsure at all n locations
  Clone ID: MRT4577_75C.1
aaggaattactatagggagagaatctctcgcctcccgtcggagagtatcggtgaccgatgtgtcccgacggcggcggaagctgagggaggtcctggcggcgtcgtcagctcaggggtggcgctgtggcaacctgcgcgcgcgcggttttggctaccgagaggcgggtcgggcgtcggcgggatggcggcgtcgctgaggtggtggtggtcggcggtggtattttcggtggtggtcggcgtgatcccggttgtcgccaacacggagggtgatgctctatacagcctacgacaaagcctgaaagataacaacaacaatctctcgggaggggtgccatcaagcggttcgttttctctctttacacctataagttttgctaacaacccaaatctttgcggccctggtactacaaagccttgtcctggggctcctccattttctccaccccctccatacaatcccccagcaccaacttcatcaaaaggcgtgtccagcactggagcagtagctggaggcgttgcagctggcacagcgttgctgatcgcagtgcctgctattgggtacgcattgtggcggaggcgaaaacccgaagagcaattcttcgatgtccctgccgaggaggatcccgaagttcaccttggacagctcaagaggttctcgctgagagagctgcaagtcgccacggacaattttaacaacaggaatgtcctggggaagaggcggtttttnaaaggtgtacaaagggagactaacggacggttcactggtag

SEQ ID NO: 158359 - DNA, 306 bp, Zea mays
  unsure (1)..(306): unsure at all n locations
  Clone ID: MRT4577_76000C.1
agcagaacagggcaaagncagagcagccgaagcccaagggacacgaaaggccggggggggggggggcagcgccctttatagcttacacnaaagggaggagttgctccancaaagcaggagcaagaccctcaatttaagacgcacanncgcacctaaggcagatggcgcaccacatcctacagccagctccaacgctgcagcanttttggagaaagccaacgccntccggcaggctgtggccagngatgagggnggcgatgatgacccatggagcgatacacgaccacctaattgcagacgtgcatg

SEQ ID NO: 158360 - DNA, 249 bp, Zea mays
  Clone ID: MRT4577_76001C.1
gccggccggtttcaaaaaggcatacacttactggttgttgccagtagcgaattgcctcccggactatatccactaatatagcaggtgtatcacattagcagcaagggcctcggcgacgaggtcttccgctcggtcccctggtccagcaggcagatcagatcgacccaacgacgaacaggaaggaaggcaggaggcctgaggcgatgaagttgaaccatgagtgccgacgtggctccgccgtcactgaac

SEQ ID NO: 158361 - DNA, 456 bp, Zea mays
  Clone ID: MRT4577_76002C.1
aaaccaaaactgggatgacattttcaggaatcaggaaccaccgatccattcttttatccacgttctaatttttactctcctgtggaggggaaaggcaatgccatacagatccataagtaatgggacaactaaaaggcgttatatttccccatatgggaagtcaactggttttgcattgaatactacgggtaaaacttacgtgctcggcccaggcggaaaaacaaaaacactaaacaaaaactccttcaaaaaaaaaaaaataaattaatcgcccccatgcatggataatttgggctcaagctcagtgattgaaacttttttaagcaaaatgggcaacctgttcgcggactgaaaaactcctggcgggtacacttttgagttgatctttgagttaaagcccttttcggaaagaaaaacccggcctcaatggagcttggagggtaaccgggctgttac

SEQ ID NO: 158362 - DNA, 784 bp, Zea mays
  unsure (1)..(784): unsure at all n locations
  Clone ID: MRT4577_76003C.1
taatccacgggtgggatgaattgaaggggagagggaaacatgaagctacaagagtagaaaactgtccaattgaataatgcttgcatagaactgattaccgagctccaacacaccattcctactaactacaatgtacagcataaaaatccaagcataaagctggtccttaaagctgtcctctatggcctataacttataacacacctaatttaacctcatttaccacagcaaacaagagaacagagtgatcttggtcagtgtttacaccttccataggcaagaagtggactccggttactactaccaggacctcccttaatggcgccttgcagctgctccatcggggagttagctatgctgttgaccggagctcagctgcgggcttggaggagggcctggagtggctacagggttggccacgttattgctcatttgctgcagagttcctgagctcaactgggggctcattgcagcctgctgtcccatctgctgagggcttatctgctgctgctgctgctgctgctgctgctgcatcatcggcgattgctgtgagccagcaggtgagcccacctgtgcctgctgtaacggagatcccatttgttgttgctgctgcagttgctgttgttggagctgctgctgctgctgctgctgcagntgntgtatttgntgctgntgctgnagctgntggagctgctgctgtgggttctgttggagctgctgcaactgatgctgnaggtgtatttgctgntgagcattcagctgaaagttacctcctggcattttt

SEQ ID NO: 158363 - DNA, 132 bp, Zea mays
  Clone ID: MRT4577_76004C.1
cggacgcgtggggaaaatgtttgcttacagcatttattgaccatgtaaacgcacaaggcaaactaataagtatcctaggattaatactttgatatatgaaaaggcagcgactagtcaaaatgaaaaaataaa

SEQ ID NO: 158364 - DNA, 309 bp, Zea mays
  Clone ID: MRT4577_76005C.1
aggggacagacttaaaaaagaaggataacattttataaagcaccaaggggacggaaaaatttggccttttaaggagcaaaaaaggtacggaaaaaggggggggggggggggtccaaaaaagggaggagggggaaaatacgggaacaaatttgggaaagtaaaagaattcggaaaaaggggtaaaataaggggatgttaaagagagagtaggggaaaaaaaagaagagagtaggggagtagaataagaggaaaaatggagaaaaaggggggaaaatcattgtaaggttaaacccctgtggaggaggaaaa

SEQ ID NO: 158365 - DNA, 684 bp, Zea mays
  Clone ID: MRT4577_76006C.1
tcccggcagccaatcatccccaagacggcaatggtgggaccaaaggacctttagcctagtgattataagagggttccccgcccgcccctcaggcgtctaacaaagcaatccgaccagctcgatccggacgagctagcagagcagatcgagaaggcggccgtgaatagttcaatagtctcgagaccggctgcgggagcgaggatgagccatccgaggtacggcggcggctacccatatccggggcagcaagggtactacaaccagggcccgtacccgtaccagggcccgccggtgatggcgccgccgcagtaccagtacgcgcagccgccgccgccgcctcggtcgcctggattcctcgagggctgcctggcggcgctgtgctgctgctgcctcctcgacgagtgctgctgcgacccctccatcgtcttcgtctcctgagtcctgcatgcggtcgagacaccccatttgcttcagtccatttttccgatttcctcagcgtgtatgctgtatgtaccaaacggtgtgaatgtgtgatatattgtttgtccttcagttcctgacgaactcttcttgctgctgcctgtatggatagagttttgttcatgtgttcgtgtgcaacgggatttttttttccaggggcctttttctggttatgaaatctgtgtggaattgtgtctttgcagc

SEQ ID NO: 158366 - DNA, 244 bp, Zea mays
  Clone ID: MRT4577_76007C.1
gaaaccaaaataccaaaaaaatttgcaataacttttttgacccacttagcactagcagcccgaggcacggagcaccttctgtatgcgttttttactgtcctctttaaaaaaaattctgttagaactatacgtattttctgtattattttaattccataaactaacattatgatgatgacatataacagacacatcttaatggaaaacgtgaactcaaaaatatctcttaacaatatgtctcatg

SEQ ID NO: 158367 - DNA, 305 bp, Zea mays
  Clone ID: MRT4577_76008C.1
cgacccatgggcccggaaacttcaataaccgctttgatggtgttaagtgcacgttcatgtacatagatgtttagtacggaatcatacttctcaacatcttcaaagttcagaatatgacagttttactcatgtatgcaatggagctgcgtaacattacagtaagagtacagggcaagaatccttactaaacaggcacattcatacagattgcaacatagacatttatgtgtttatccagatgtcgaatttgtgtactctcgtcatattgataaacagaactatacaattttctgttgatgtttgta

SEQ ID NO: 158368 - DNA, 262 bp, Zea mays
  Clone ID: MRT4577_76009C.1
agcatgttatatgcatgtatatagccagcccaagcccccacacgccggatcgagtactggcactggatgcgatgcaaatacgtgcggacgacgaatactgtataatataatggtacaggcagaggaggcagtacgtacagtacaatagtacaattaatatactagtagtagtgtatagacgaggaggatctgacgacgagaatggaatggaatgatgatggcatcatggataggatggatcatgatgggttaactcccctgc

SEQ ID NO: 158369 - DNA, 470 bp, Zea mays
  Clone ID: MRT4577_7600C.1
cttaaacagagaacaacgttctagtgcttactttgcatggcctaacaccaatgcagacatagtttcaacgctcttaaaaaccaattaaagcgcccattcaggttatcatcatcttctgaacgcataggcggggggaggacttcaatttaccatcctttcctcaatgggaaagacgcgacaaccaatcaccctcttgaagttccacgtcttctttaggtgaccacttactgatcaaaaacccttttcttccacctctaattcttaaatcttttgctctgtgggaaccatcagctttgctcccatcgaagcatttcaccgagaacgaccaacccaccatgttctggattcccaactaatgctactacagactgatcatctcacctgcggaatcctggtttgtagtgggggaaacaactgactgccggccaactttgctcattcgagaggcctaccctcctgaatatcttaaa

SEQ ID NO: 158370 - DNA, 817 bp, Zea mays
  Clone ID: MRT4577_76010C.1
ccggccgggcccgccctccccgcccgcccctcaggcgtctaacaaagcaatccgaccagctcgatccggacgagctagcagagcagatcgagaaggcggccgtgaatagttcaatagtctcgagaccggccgcgggagcgaggatgagccatccgaggtacggcggcggctacccatatccggggcagcaaggtacgtggcgcgtggcttatactgctcccaagttccagttatagctaggctagctatactgcgtcgtactcgtaccctcctcgaccagccctgctagctagctgctgccacacaagctgatgaccagagtattctgcctgtcgttcttgccaaatcaaattaaaagggtactacaaccagggcccgtacccgtaccagggcccgccggtgatggcgccgccgcagtaccagtacgcgcagccgccgccgccgcctcggtcgcctggattcctcgagggctgcctggcggcgctgtgctgctgctgcctcctcgacgagtgctgctgcgacccctccatcgtcttcgtctcctgagtcctgcatgcggtcgagagacacccctgcgccaagaggaggggtgtgcacgccattttcttcagtccatttttccaatttcctcagcgtgcatgccacgatcatgactttgtatgctgtatgtattaaacagtgtgaatgtgtgatatattgtttgtccttcagttcctgacgaactcttcttgctgctgcctgtatggatagagttttgttcatgtgttcgtgggcaaaggtgctgggggccaaaaaaaaaaaaaaaaaacccgcggcc

SEQ ID NO: 158371 - DNA, 881 bp, Zea mays
  Clone ID: MRT4577_76011C.1
aaaaactaacagccattacatacatgatcagggtttccaaggagcagacatgcacttatatgaacgactcactagtcaccaccaatacagcagtacttgataaataccatctgcggctggaacttcacaattactccctccgttcttttttatttgtcgccgtttagttaaaaaacgcactagctttttttttttttttttttttttttttttttttttttttttttttttttggcttataaaaaaaaacctagttttctaggttcagtaggtacagcagcagcaaacaacacttggggacaaacacatattctcacctttcccactctccccaatccaaattacaagacctgttgactattatgagcctccccgaggggggatacatttagagctgctgcccttctcctggttaggggcccagggctaaaaaatgccgctggatctcttgttggaggggacgcggccttccttctcgtcgttgatcctggagtacgggaggcagtaaatgctctccctgacgccttcttcctgctcccggggaaattgggaggaagggcatgacccattgggtcgttctggttagtattttttatcatttcagtaggtggtgaaaacactccaaaagctggtgggggcccactctggccatccaagttaccatgggccttttcatcagggctgcacagggccggtaccaaatccggtggggtgccaccccacaacgggagggcaaccataaaagcaacgatggcagcctctcctgggtcgaaaatggcggtggcctcggcgcaccactggggcaccttcttcatcagctctgcctgaatggcaacctgggcgaggagctcgtcaaaaacggaggtcgaggaggaggagga

SEQ ID NO: 158372 - DNA, 419 bp, Zea mays
  Clone ID: MRT4577_76012C.1
gaaataagaataaaaataaagtatgataaaatatattccaatgaacttatttgaataaacaaacactttgtcgtatgtatttaatatcattctcgtaagatgtaaaaagtgtacgttgttggaaaacatttataatatgatttattatgtttatagtttcttatatatatttgaatcatttctctctgtttaggagcaactcatcaaattatttttttaaactcactttgggtgaattcactcagccaagaagtttcttgagaatctaggagattggatgttgcaaatgggcttggggggaggagcaatcttttacatttcagaaatgtaaccagtctattcgttggcagcttcttgtctcaattcgaagagagcttggttgagggcattcttaacgggaccttcagggaggaaatggg

SEQ ID NO: 158373 - DNA, 774 bp, Zea mays
  Clone ID: MRT4577_76013C.1
cctcgaggccggccggactcaactctcagccggcgcacaatggtggttccgtgggacgtcgagaggaaaaaaaaacttccaaacccaacgcaccacccatacttctctagtagtattagggtcgacgactctggcacgtactgcgctgcacccacggcataccagcgacctacaggtcgtagacgacgacgatgtctgaggaggccgatcggcgagcgaggcagcaacggctgctccccgtcccgatcatccccgtcgtcctcttcctcgtcgcgccgttcgccctcttcatgttcacgtcgcccgacctgcggtggcagctcccacgcatccgcatagagtacggccgccacgacgagccctccagcgcgcccacggccgacgggcgcacatccacgccgccggttcttgcaggtgccaaaagtgacgacgaagagcaacggctcccgccgccgcgccagctgacggacccgccgtactcgctcggcacggccgtgtcggactacgacgcgcgcagggccaagtggctccgagacaacccgcagttcccggccttcgtcgcgccgggcaggccccgggtgctcgtggtcaccgggtcggcgccgcgcactttttttgtggcgcggacgacggcgaccacgtcctcctccgcgcgttcaagaacaaggtggactactgccgcgtccacggcttcgacgtcttctacagcaacgcggtgctcgacgccgagctggccgggttctggacccagctgccgatcctgcgcgcgctgat

SEQ ID NO: 158374 - DNA, 506 bp, Zea mays
  Clone ID: MRT4577_76014C.1
ccgtacctgcctcttccttccgtttcaccaccgcgcgcaatcgaccggtctcccctcttcctatcgcccgccgccgccgcccccgccgaccaaccgcttctgaaccacgtcgaacaaagagaggtatgagatcgcttgtcgtgcgacatgtataaaaaattctcttcctaacatatatctgcacatgtacatgaagccacggcttctgtacaacgagacattctgacaagtatcactgatgagtaccccaatcttgaacctttggtagatgacttgctcccacaaaagtcaccgatgactgtggttcaatggcaaaatcatcttaatcgttgtaatgatgaataatgttcctctattgttcgatatacacgatgatgcttacatgtcaaccctgcgatcgtcttcgtcactatcctgatatcagtgaagagctccaagtgtctaaaggcgctatccatattgatctatctgttgcaaaaataaagtggcctgctgagacttcacct

SEQ ID NO: 158375 - DNA, 348 bp, Zea mays
  Clone ID: MRT4577_76015C.1
gcgtgatgtgacagattagacagtctactttatatatgaaaacggagagctgggggtgtccacgagacatataactggccatcacgataaccaaagcttacaggagggtcaacggtcacgctggggattaaagtgaggaacacgaagatattgcttcgtagcctagaaaggaacttgggggatcatatagccagattagtgtgacatactccacaagtctgagaggaacgcggcaaatcagtgtgtggaggaagatgccatctgtgtcatcacaccgacatgttagccccattcagccgttttctgcagacagacaatttgagcatgctacctcttgagaaaactgat

SEQ ID NO: 158376 - DNA, 263 bp, Zea mays
  Clone ID: MRT4577_76016C.1
atggatacgtgatacgccgataccctgatacactatttctcaaaaaacaccgatactgggatacacaaatatatattataaaaaaataaatgctgggatattggaccacacaagttctcaaccagtacatagttaataaagtttaggccatcaagccattaaacctaggaactttagtctttaggttctaacagactataatattccatcaagccagaggacttttacctccacacaatagtagggacagttaccatcattta

SEQ ID NO: 158377 - DNA, 289 bp, Zea mays
  Clone ID: MRT4577_76017C.1
ttttgtggctgtgtgttgtctctaataccgacaggtatccttttttatatatcccctggctgcatttttccctttatggttttatacatattaaacaccatgcaacttatgtgtgatttctgctaatctttaacattctaactcaaagcttttcataaatctgggtcttgatatgcatctaataatgaacctgacagtttgggaacttgagaactacagtggtctgtcttgagctctttccctgtttgaaatattagttcattttggctttgtcctaagtcgaattttc

SEQ ID NO: 158378 - DNA, 357 bp, Zea mays
  unsure (1)..(357): unsure at all n locations
  Clone ID: MRT4577_76018C.1
gccggcaggtgccgggcctnaattgccggggggagcgcacgcgatgcgcgattcctttctcccaaacaatctgtctgagtcaatgccaaacgtactctctgtttcgatgtagggggggcagatgctttcctataaaaaaaaaaaaaaaaaaaaaaaaaaaaaaaaaaagaaaaaaaaaaaaaaaccggggggggggagaaacggaaaaaaacaaaaagcggggggcggggaaagggagcccagggtaaagaggacgggggggggccgggcaatgggccaaaggggcaaccaactgaggagcgaaagggacggtcccacgagccgaaccaaaaaaaccccaggggggcgggggggggg

SEQ ID NO: 158379 - DNA, 667 bp, Zea mays
  Clone ID: MRT4577_76019C.1
gaagatgaattgatttgcttcccccttttagctgctccgtccttttgctcgccgacgacgcgccaccctcttgacttgattcgattcgcaggacagccaggggttcttgtccgctccgcctccgagttgaagttgaatctccccgccgactggattcgctcgccatctttttcctccgccggaaaacgacctcccgccgtactcgcgcggcggagcgacctccgccaattaatcctcgcgccgtggaagagacccggtcggttgttgttccgctgaaaagccccgcccttaacttcccgggcggaatccaaggagacccgacatccggttaatctgcgagcggccgccgccatgatcccgctgctgttcctggtgctgttcgcggagggggcggtggcgctgctgctcatggtcaagatcgggccgctgcgggagctggcgatgcggggcgtggagcaggtcaagaccggcaagggccccgccaccgtcaagacgctcgcctgcacgctctccgtcatcctcatgtccagcgtcgccgccatcgtcaggatccaggacaggggccacaagatcggcaacgtcagccccatggaccaggtgctctggcggacgcacctcctcgaggcatccctcatcggatacacactattcctcgcatttgtcatcg

SEQ ID NO: 158380 - DNA, 256 bp, Zea mays
  Clone ID: MRT4577_76020C.1
ctaagatctggaattaggtacgagtgtactaatcagccaaggttttaacatcatcaaatggcacacacatgctcgagctaacaggcatattcaaacaatggccacttaaaaggaaccatgtttaacaaacttaaccccgatacttaattacagaacttaggtactaaggcttaattgatcccgacggagactccctactgctcgacttagagccagtcgttacggcatcactgttgcctgcagataaggcactgtg

SEQ ID NO: 158381 - DNA, 630 bp, Zea mays
  Clone ID: MRT4577_76021C.1
aataaagatgtaaacgatgccccctggacgctgatatccaatgctggatttcggaactatgtgcgttttattagatgtagcttaactgagaacaagctggagaaaacaggcgccggacaccgaccatcaagctagaggtacccctgtccctctctctcacttcgacgtacaaagctccgcacaccaattgaatccacacctcactcagatgctgcagcaagttcttcgtccgtgtcgatcgtggaaatgaagatagaaccacagatctatcctacaacattgtcataaccgtgaatgaatgacaggatcccacttcatatggtgatgaggctgttatcaacactccttatggcttccttcctgagagaaaaatgcaactactgcaagagatccatgtagctgttcaaaactggtgatggtaagaaggaagacgctttactctgattgaaatatagagctgagatgctcgtcgaccttggtgatcccaggagacattcttggacactctgaaaggagagttctgctggtagaatcaaatgaatttgttgaatacaaggctgcgtatgccctgtctcaaggactaaaggtcattgcaatgtgttgtccgatacccttgagcagagggaggct

SEQ ID NO: 158382 - DNA, 559 bp, Zea mays
  Clone ID: MRT4577_76022C.1
ttcttccccggccccagtcgcctgacccccttgccctcgctcatgcgctctccgcggcctcccgctcctccaggtcaccgtcgcgcctccacgcgcaggtcctcaagctcggcatgtccggcgacactttcaccacgaaccacctcctcatctcctactccagaagcgggctactcgggagcgcgctggccgtgttcgacgaaatgccgcacaggaacctggtttcctggaccgccatggtgtccgcctcgacacgcggtggcgcggctgaactgggcatcgggctgttcgtctccatgctgaggagcggcttcttcccgaacgagttctctcttgccagcgcgctccgtgctgcctgtgatcggtccgctgcccgtgccaagctccagtttggcgctttgctccatggcgtcgcggtgaaggtcggcgtggatgccgatcctttcctgggaagctcattgctgctcatgtatgccagacatgggtgggtcgctgctgcggagcgcgcatttgcggacgtccggtgcaaagacttgacgtgctggaacgcgatgctgga

SEQ ID NO: 158383 - DNA, 454 bp, Zea mays
  unsure (1)..(454): unsure at all n locations
  Clone ID: MRT4577_76023C.1
gggtaccctcgggttggccggatcttcttctgggaggacaaaaggctgacaggcacaaggtctccttcctcgtcggagaagactgaatcctgtacaaacatatatttgccatgctactgccatagtgcgtaccacgcgtccactccaaaaggttcacaaggcagcacgggacttcgtataagttacttactactggatcacagtcacagcacacttttgtgacaggggagtcatcgacgggcagggtgaggtgtggtggaacatgtggaggcggnggacccttgagcacaccaggccaaaccttgtggagttcatgcattccaccggcattcacatntncaacatcgttcttaagaactcacccttctggaacatccatccttgttactgcgacaacgtggtcgtaaccaacatgatgatcttggtactacgtgactccccaaacacagacgga

SEQ ID NO: 158384 - DNA, 2644 bp, Zea mays
  Clone ID: MRT4577_76024C.1
ctcactgtcggctactgccgctagccgcgcctgcttgctgcttccccctctctttttctctcgtctccattcgcacatcgccaccaccagtccaccattccagcatcaccaccacccgagacaaaaaaaataaaaaaaacccaacaacactgtaacgagaatatacggcaaaaccctagatctctctctcctctcggcattgctggctggggtgtgcggcggcccgcagtggtgagggacgcacggcgatggcctccgccgccgccgtcatcgcctcgccggcccccggcgccgccgcggccgagcccgccgcctggctcgtcgacgagcgcgacggcttcatcacctggctgcgcggcgagttcgccgccgccaacgccatcgtcgaccacctcatcttccacctccgctccatcagcgagccgggcgagtacgaccacgtcttctctctcgtccagcagcgccgccaccactggccgcacgtgatccacatgcagcagttcttccccgtcagcgacatcgccttcgcgctccagcaagccagctggcgccgccacgcgccgccggcccaggcgctcggggctggcgcgtcgccggccgcgctcccgccgccgcctcctcgccgcgcctcgttctcgcagtcccatcactcccaccagcaccatcgccacggcgcccactaccgccccgatccagcgcgcggcgccgccactgcggcgactggatccgagaaagatggacgtgaagttcataataacaaggaagggagggggctgaaagaagcggggaatgtcgtcgatactaaaagtttgcggttggattctcctataactgatgaaggtgaggaaaaatcaaagctgcaagctgtttctgaagaaagtagcaaaatggttgcaacccctgtagagtattcaaccaatgagatcattgatggcagcatggttaatactgttgaagggctcaaggtttatgaaggattactaaatgtaaccgaggcaaataagatcctttccttagtcaatgaaacaagagcctcttaccggcgaggggggcttgaagctagacagaaggttattattgctaaaagaccaatgaagggtcatggacgggaaattgttcagctgggtgttcctattattgatggccctcctgatgatgaaaatctaagagagacaagggtggaggcgattcctgggctgctgaatgatctgtttgatcgcttgtctcagcaggaaattatacccttcaagccagattattgtgtcattgacatcttcaatgagggagactattctcatcctcaccaatccccttcttggtatggtagacctctttgtaccctctgcttaacagattgtgatatggtgtttggccgttatatatcaggagaaaaaggcgatcatagaggtcctctgaagctctcgctcgcaactgggtcacttctactcatgcaagggagaagtattgactgtgcaaagcgagctattcctgctacacgcaagcagagagtcatactgaattttggaaagtccgtagcaagaaagcacatcccagctgaaagtgcctggtctactccattaacacctcctatgccctggggtcagtcatcaaggccagttaacggctcccgccatccccaaagtcctaaacactatgggtatgctccaatcagcggtgtacttccagcaccaccagttggagctcatcacgtcccaccgtctgatgggatgcagccactatttgtagcccctgctcctatttctgctgcagccatacctttcacgccaactgttcccttgcaaaatacatcagctgcttggatacaagaagttactccaaggcctgctccgccacgattccctggtcctggtacgggggtcttccttcctccgggatcaggccaccctctgcctcatcagatgatgccggcttctcatggccatggcgaacccaactctccacaaggttcatccgcttacctgcatagtaaggtcaatggcaaggagacatctaatggcaatctttctcctaagaactcgccgagaaagacatcttgcacagccgaggagaaaccagaatgcaatgggagcttaaatggtggtggcggctctgcggatgagaagtcaactgtaggtatggagcagcagaatggtgttcagaagaatgttgggagtagcaaggtccagccacatggacatgcaactgaatagagtgggacttatagtacatagacaacagaaaactgaagagacgaggagttgaattttgggccgtgaatttgcggtagtgcgcagagctcagcagaggtctttgctggcactctcttgtccctgacaagaatcatcgtgtcaagttctcgagacggaaaacatttgtcctaaactttgtagctgcactgttgcaaatctagattatcgacattgcctcgggttatcatctgctatcagagtcgtgggcagtgaaaaccatttctgatggtttatgttgcccaaatattatcgacctagtacatctgaaatgggaaaaaatgtggacgaaatttcttgcatcgaactctcttgtgatcgactggcctttgatgcatctgtagcagactgtgaacttatcactcttttgggtccaaaaaaaaaaaaaaaaagcggcc

SEQ ID NO: 158385 - DNA, 559 bp, Zea mays
  Clone ID: MRT4577_76025C.1
ggcggggggcagcggcatccttttattacatgacccttgttggcacatgggtaaaaatgctcaggtgaagcacacaccagagctacgaatatgaggcggactatgctacagactgacaccagatcattgcctgatgatatcatacgaagggtttgcattggccatgctaacactgtgaggagcgcttgaggttcaaagacaggggggacagattcctatgctacacaaggggggcgtcagaccaaaatagacaactactgctgccgcccacattcacagaacaaggggggggggagggcatgctaaaggttacatagggctagaataagcctacgtctgtggctcacttgaggaccaggtcagacacaccgttactttcatctttactggagccgttgccgaacacctacttgtatgacattgctcaattgacaaaaaattaggccttttcgaaccagttctgaaaccgaagactcactgttttgtgtcacaatgcgtaccaaataacccttgttctgcaccaccacaaaggccgcggacacttctgtagagatggcca

SEQ ID NO: 158386 - DNA, 233 bp, Zea mays
  Clone ID: MRT4577_76026C.1
tttcttaggggaagatcccacatgagtttgaagaccctggacagatttggataaatgacagggggaatctttgcaaaatcttggttagggcgaaatggactttcacccgttcaggcaaaaggaaaaagggggccttatttgtgctccacaagggtcatcgcctgcattagtgggtcattgaatggcatcggtgttgtgaaatcaatatccgttttaagggtggctaaagttgg

SEQ ID NO: 158387 - DNA, 781 bp, Zea mays
  Clone ID: MRT4577_76027C.1
gcagcaacgtcgacgtgctgctgatcttctcgcagcgtaacgcgaagtggggaacctccatgaacgacaattcgtactcggtgatggagtcgttgggcacctcgtcgaaaataggctctccatcgaagcatgggctgggcatttgatcgaacactgtgagtgcatagcacgcctcgtcgaagaaggggttggcgccgtcggagaagagggcctcgtgggtggacgagaggtgatactgcgcagatttgtcgttgaaggtgaactcgtcgaagcgcagttcccgatctaccatggaggcggagacagagtcatctgcgtcgacgctcgtggcgtcctcgtcccacacatcgagttcatcgatgcgaccgtcgtcgaagaaggcagtgcatccgcgagcagtttgctcaccatgactgccagccaacgcagctgtcaagcgcttctccatcagtgccattgcatcgagcagcttgcggacgacaacatctgtatgatccatcacggacgatcacgatcgggggcgccaccgcacagcagagaacagatccaggatgacctaatctgataccaaatgttagctactcgtaatacacgacctccaaaccaatagctagaggaacactctgtatattattctggcaaatcagggtacatcagaatgtattagagatagaagaaccggtaacatgagagggaaggagaggaagcagatgagagtaatagagaaatgtagtctttagtttgtaaattgattctttgatcccggcccggccggcctcga

SEQ ID NO: 158388 - DNA, 349 bp, Zea mays
  Clone ID: MRT4577_76028C.1
ctgtgtttcatggcctcatagacataatctgaagccagatatctttagtgacaggtggaaattcttgagtggatgctgtttttctgaggtcaaattgctaacatctgaacatgcagatacagttggcattggcactcgatccacgtgccattttgcaacaaggctctcagaggaggaagagcttcaaaggttgattcctgtgctgggtgcagtcgttaaagatacttgagatagaaagaagcttatccatgaatacaattatatgcagaagtgcaggtgaaactgtaaatcgaggagcatatatagtgaatgatgtatctcgcaggtgccttaacctctgcttctcaca

SEQ ID NO: 158389 - DNA, 493 bp, Zea mays
  Clone ID: MRT4577_76029C.1
ggaccaacgggggagggaaataaaattagcgaacaaaaaatggcagtttattaacagggcattcaaaccgcccgggaacacccagggcctattaaatggccccggcggaaaaaaacaacgggggcaaataacaaatctagggcccaaccccactatggggcggggtggcccattatcccccaaacacccgagaaattttccccttaaccaaacttttcgaaacgggacccgtttttggggcggaccccaacatccctgggttgggggtatttttaaaaaaaccctttcaccttttgttcaaaagcagggggaacacccataaaaaacgcaggtgcatttccttttaagggaccaaaaggattaggatataacaaaagggggggaaggaaaaccccgaaacattaacaagaaaaaacattgggccccatggcggggggatgacatccaaacagactgaaccaaactttaatcgacattggggggatatatctta

SEQ ID NO: 158390 - DNA, 1156 bp, Zea mays
  Clone ID: MRT4577_7602C.1
ggccggctcgagggtgttcatcatccaggcgccgcagtgtaggtctagatcatccaatccaacacaccggtcgagcaatggcggcagggctgcaggtgttcggacagccggcgtccaccgacgtcgcgagggtgctgacctgcctcttcgagaagaacctcgagttcgagctcatccgcaccgacaccttcaagaagtcccacaagctccccgagttcatcaagctaagggatcctactgggcaggtgactttcaagcacggtgacaaaacaatcgttgattccagggccatttgccggtacctgtgcacgcagttcccggacgacgggtacaagaagctgtacgggacggggtcgctggagcgggcgtccatagagcagtggctgcaggcggaggcccagagcttcgacgcgccgagctcggagctggcgttccagctggcgttcgcgccgcacctcaagaacgtgcggcccgacgaggcccgcgccgcggagaacgagaggaagctgcacggcatgctgggcgtctacgacgacatcctctccaagaacgagtacctcgccggcgacgacttcaccctggccgacctctcccacctgcccaactcccactacatcgtcaactcctccgacaggggcaggaagctcttcaccgccaggaagcacgtcgccaggtggtacgacaagatctccacccgcgactcgtggaggcaggtcatcaagatgcagagggagcaccccggcgcgttcgagtgatcgctcggcggtctacgcggtgatgcatgcatgcatgcgccgcggcgtgttcctctatcgccgccggccaccggctggcttcgtcgtcgtcaggcttcgtaccttgatggggttgtcgacttcgtcgtatcgtcgtacgtccctgtggcctgtggcctaaaataacgtgaagcctgcctacgcggtgtctcgtgtcttacttttaaatttgcaccatatatacgcactgtctttttctgggtatttgttgtattgtgatgtacggagtgttcatcaactccttttgcaagattggtcaattattcaggcaaaaaaaaaaaaaaaaaaaaaaaaaaaaaaaaaaaaaaaaaaaaaaaaaaaaaaaaaaaaaaaaaaaaaaaaaaaaaaaaaaaaaaaaaaaa

SEQ ID NO: 158391 - DNA, 309 bp, Zea mays
  Clone ID: MRT4577_76030C.1
ttgctggaccagcgcttgtcgaccgtgcctcagcaccagtggatcagccccccccgtccccccgcccgccccgtcatgtaccgtccaggacgcctcaacgtcgtagcggacgcgttgtcccgccgcgacactgaggagggcagcaccagcttcgggtcggccttatgcgtgcgctcggggccgtctttcaccttcatcgacgacatacgccgcgcgacgtcgcacgcggacgatgctaaggatgtgcgtcggcgcttcgaggcgggcgagctgcagggcccatggcgcatcgacgacgggctactactc

SEQ ID NO: 158392 - DNA, 401 bp, Zea mays
  Clone ID: MRT4577_76031C.1
tagttctagatcgcgggcggccgctcgcgatctagaactacccacgcgtccgtgctggcctctgttgtctaaaaagccttactagtctttatcgtggaaggtcaggtgataaatccttattgcattgataatttatgattcctcattggaaatcctttctgtaaggtacttgtgatgttacattatactttccataagtacgataggtaaatcttcagattcattactttctgttatatcttctcataatatgttatttcagttgtccaaccatccagatcctccatcaagaaccaacctcccattgaggacaacatcatcgaacagcctgaactcaggtgctacaacccgccgaccatcatcgtctggaggtcttacttctaattcatcaaggccttcaa

SEQ ID NO: 158393 - DNA, 155 bp, Zea mays
  Clone ID: MRT4577_76032C.1
caattctcacacgcacacagccaaggagcatacacataggcagcaggcagcggctcggtacaacaccaccaccgaacaaccaagaatccacaaccacgactgagctgacggctcggtcaaccatgagcgtacccggctccaaccatccccatccg

SEQ ID NO: 158394 - DNA, 266 bp, Zea mays
  Clone ID: MRT4577_76033C.1
atcacaacactacaattaattgggtcaggcaacgaatgatccaacattcatgtaaccaatacaaatactagaaaacgaaaagtaactaggaatgcttatagatccaacagtgggagcaattagccacttacaccttgaccatcatcataagtcaactttttgtgctcaaggagcacatttcccctgtcccgcatatgcccgtacattcaccggcacctctcctgacgcacatttccccctatcgcccccatcaccgaccccacgat

SEQ ID NO: 158395 - DNA, 144 bp, Zea mays
  Clone ID: MRT4577_76034C.1
gtggggggaagagaaaaaaaccgtagagggcgcacgtactaattggacctacccattgtgggtaatgtggggtgcacggagccgacgcaaatcgaatggattgggggcgcagtcgcgtcccgcgcagcggattgccggcagatg

SEQ ID NO: 158396 - DNA, 392 bp, Zea mays
  Clone ID: MRT4577_76035C.1
ctaaatctcgagcagcacaccatgcgtttttcactagcaacaacctaacaacaatggctgccaacatattaaccctccttgcgcttcttgccctttgaatgagcgcaacaaatgcgtccattattccacaccgctcacttgctgctagtgccattatgccacagttcctgccaccacatacttcaatgggcttcgaacatgcagccgtgcaagcctacatgctacaactagcgcttgcggcgagcgtattacaacaaccaattgcccaattgcaacaacaatgcttggcacatataaacctacaaaccatcgcaacgcaacagcaacaacagtttctgccatcactgagccacctagccgtggtgaacccctgtccctacttgcaacagcag

SEQ ID NO: 158397 - DNA, 1466 bp, Zea mays
  Clone ID: MRT4577_76036C.1
ttggggacctcgagccggcggccggggcccagtgcagtgcgaacctcagactcctcccggaccagctgacctccgctccattcaccccacaccttcttcttcgtcgtcgtcttcccctgctgcggttagcctggccgtggccgcctcctgctcttcgatctcacgctgcgatggagcggtacgaggtgatcagggacatcggctcgggcaacttcggggtgacaaagctcgtccgggacgtcaggaccaaggagctcttcgccgtcaagttcatcgagagaggacaaaagattgatgagcatgttcagagggagattatgaaccaccggtccctgaagcacccaaacataattagattcaaggaggtcgtgctaactcccacgcatttggcaatagttatggaatatgctgctgggggtgagctatttgaaaggatctgcagtgcggggagatttagtgaggatgaggcaaggttcttcttccagcaactgatttcgggagtgagctattgccattccatgcaagtatgccatagagatctgaaactagaaaacactctcctagatggtagtgtcgcaccccggctcaagatctgtgatttcggttactccaagtcttctgtgctgcactctcaaccgaaatcaactgttggcacacctgcatacattgctccagaggtcctctctagaaaagagtacgatggaaaggttgctgatgtctggtcttgtggagtaacactatatgtgatgctcgtcggcgcgtatcctttcgaagaccctgatgacccgaagaacttccgcaagacgatcacgagaatactcagtgtacagtactcaattccagactacgttcgcgttacaatggagtgcggacatctgctgtctcggatatttgttggaaatcctgagcagagaataaccattcctgagatcaagaagcacccgtggttcctcaagaatctgcccatcgagatgaccgacgagtaccagcagagcatgcagttggcagacatgaacaccccggggcaaagcctggaggaggtgatggcgatcatccaggaggcgcggaagccaggggacgccatgaaccttgccgggcagctgccctgcctggggagcgtggaccttgacgacattgattttgacgatattgacgacatcgacactgagaacagcggcgacttcgtttgtgcagtgtgactgtgtgaggctcagcagggcaggagctagcttcctttggtcgttggtgtctgtagatccttgttgtgctatgcttccattcgttcctggatcagatatgttgttgtgtaaccgagaaaattggcgttgctgtggacaatagaaacagacccataaacttatgcggaaatctaccccccaaaaagaaaaaaaaatcctctgtgatctgttgaattagaaaaaaaaaaaaagccatcttggcaatggtacagcttgtattgctttagc

SEQ ID NO: 158398 - DNA, 661 bp, Zea mays
  unsure (1)..(661): unsure at all n locations
  Clone ID: MRT4577_76037C.1
gcacttcccgttttcagtcttctgtgctgcactctcaaccgaaatcaactgttggcacacctgcatacattgctccagaggtcctctctagaaaagagtacgatggaaaggtaatggctgttgcactagtgcatttgtcttgatgtgctaagcattgcagctgaaaccctggaacaccgcatgtgaaacattaggttgctgatgtctggtcttgtggagtaacactatatgtgatgctcgtcggcgcgtatcctttcgaagaccctgatgacccgaagaacttccgcaagacgatcacggtgagtacacaccagtaccccgtttttacggtatcacgaaaacaaaaaaaaaaacaatttggttatcagttataaaatctgaacaatgatatgcaactcattggtgccttgcgcagagaatactcagtgtacagtactcaattccagactacgttcgcgttacaatggagtgcggacatctgctgtctcggatatttgttggaaatcctgagcaggtacactntttctaatcttgaaattatttagcttacaaggacagacctagtgttagaggctctcacatggatagagtctagagaaaatcgagacaagcctttttgccgcacatgcggagaggcggctcaaatctgtgagctagtgac

SEQ ID NO: 158399 - DNA, 1431 bp, Zea mays
  Clone ID: MRT4577_76038C.1
cttctgtgtgtccttggattcgatgtctttagtttaattgtttggatacggtacaagttacatacatacgatcgaaattgcatgctaaaattaatttcctcgcacccaaaaattacagttcgcatgcagtacacaccgcacacgacacagttggcgctgcacacgccgggaacgcgcaagtgcaaaggtgggtcgacgtggacggccggccaaatggcaaatgaaatggtcgtccggacgtcggacgtgcggctagagggagtagagcttcctgaggttcatgggggagatgtacttggagtcgccgtcgacgatgtacttggcgagcagcacgttggcggcctcgcttgggtggtacgggtcccagaacacgtgcttgtcccgggcgtcgcacaggctcgtcgtcggcccgcacggcaccagcccgtcgtacgagccgccgttgccgcagcacgccacgctggccgtctggaacccgtagttggggtagttggtgatgagctccatgacgaggtcgtagacgttggcgaggcagaacctggcgccggggaggccggcgttgaggtcgatgatgagctccctgagccgggagttgtactgcgccgccagctggttgggcagcttcacgcactcgtcctcgcccactcggttgatggtcttctggtacgggatgcagcccagcggccccacgttggccaccacgaacttgcgcgcgtccagcgtgtacagcctcgtgagctggtcccggaggtggaagatgaggtcgtcgacgaaggcgtcaggcgactcgcggatcctcgtgcccgtggacagcacgggcatgaggtagttgttgaggaagtcgttggatccgacggtgacggagaagatggccttcctcctcaaaaactcgcgggccctgtccctgcccagcagcgcgtccagctgcccccgcgtgacgttgaagtagtccacctggacgtccatcccgatgcggttcacgaacaccttccccgtggcgttcaggatcccgccgccgcccgacgcgtagttgacgccgttcaggatggctccgcccgtcgcgttgggcgccaggaacggcggcgagtagtccgcctgccccagcatctcgccgatgatgtccgcgatggtccgcccgttcgtgaaccgccccgtgggcgccccgcccgacgccgcgaagtcgatgccgttcggggtcatgttggcccgggacagcgtcgggatgtagttgttgttgccggcgtccaccagcgagtccccgaagatgaaggacgccccgccgccgaactcgtccaccacctccgctcccgccaaggtcacgcagaggcagagcaccgccacggcggccagcgccgccgccagccgacccatatgctagctagctagctagtttctggcggtggacactagctgcttaattccacgcgtccg

SEQ ID NO: 158400 - DNA, 1999 bp, Zea mays
  Clone ID: MRT4577_76039C.1
cattgggtacctcgaggccggccgggccgggaacctcagactcctcccggaccagctgacctccgctccattcaccccacaccttcttcttcgtcgtcgtcttcccctgctgcggttagcctggccgtggccgcctcctgctcttcgatctcacgctgcgatggagcggtacgaggtgatcagggacatcggctcgggcaacttcggggtgacaaagctcgtccgggacgtcaggaccaaggagctcttcgccgtcaagttcatcgagagaggacaaaagattgatgagcatgttcagagggagattatgaaccaccggtccctgaagcacccaaacataattagattcaaggaggtaatttctcagacatcttggaaaggaaatgttctggtacgaatttgaagttggatgattggtagctacacacgtaagtgtcttcaaactgttacttttgatgcttttaaagaagaaaaatacagactttttatattctttgcctgttgaacgagatgtttgagccacacttgtgaacattgtgctggtgactgcacgttcttagaaccccattcatttaccacttatacttatctctcttttttttaataaaggagttgtctttgtcttgtacttatctctatgacattctttccattcatcattggacacctgctttagactgattgtcaaggtctaatcatcagaaaccatttctaggttgaaaattaaagtagtacttagtttttcaggtcgtgctaactcccacgcatttggcaatagttatggaatatgctgctgggggtgagctatttgaaaggatctgcagtgcggggagatttagtgaggatgaggcaaggttcttcttccagcaactgatttcgggagtgagctattgccattccatgcaagtatgccatagagatctgaaactagaaaacactctcctagatggtagtgtcgcaccccggctcaagatctgtgatttcggttactccaagtcttctgtgctgcactctcaaccgaaatcaactgttggcacacctgcatacattgctccagaggtcctctctagaaaagagtacgatggaaaggttgctgatgtctggtcttgtggagtaacactatatgtgatgctcgtcggcgcgtatcctttcgaagaccctgatgacccgaagaacttccgcaagacgatcacgagaatactcagtgtacagtactcaattccagactacgttcgcgttacaatggagtgcggacatctgctgtctcggatatttgttggaaatcctgagcaggtacactttttctaatcttgaaattatttagcttacaaggacagacctagtgttagaggctctcacatggatagagtctatagagaagatcgagacaagccttttggccgcacatgcggagaggcggcttcaaatctgtgagctagtgactcagttcttaccactgtatcagacctgtccttctaagtgacaatctgtatcatctttcaccttacactcataatttgcgtcgccgcagagaataaccattcctgagatcaagaagcacccgtggttcctcaagaatctgcccatcgagatgaccgacgagtaccagcagagcatgcagttggcagacatgaacaccccggggcaaagcctggaggaggtgatggcgatcatccaggaggcgcggaagccaggggacgccatgaaccttgccgggcagctgccctgcctggggagcgtggaccttgacgacattgattttgacgatattgacgacatcgacactgagaacagcggcgacttcgtttgtgcagtgtgactgtgtgaggctcagcagggcaggagctagcttcctttgatcgttggtgtctgtagatccttgttgtgctatgcttccattcgttcctggatcagatatgttgttgtgtaaccgagaaaattggcgttgctgtggacaacagaaacagacccataaacttatgcggaaatctaccccccc

SEQ ID NO: 158401 - DNA, 554 bp, Zea mays
  Clone ID: MRT4577_7603C.1
gcctgaataattgaccaatcttgcaaaaggagttgatgaatacatcacaatacaacaaatacccagaaaagacagtgcgtatacaacataaaaggtaagctacacgaacacgagacaccgtgtaggcaggcttcacgttattttagcccacaggccatagggacgtacgacgaaacgatgaagtcgacaactccatcaaggtacgaagcctgacgacgacgaagcctccggtggccggcggcgatagaggaacgacacgccgcggcgcatgcatgcatgcatcaccgcgtagaccgccgaccgatcactcgaacgcgccggggtgctccctctgcatcttgatgacctgcctccacgagtcgcgggtggagatcttgtcgtaccacctggccacgtgcttcctggcggtgaagagcttcctgcccctgtcggaggagttgacgatgtagtgggagttgggcaggtgggagaggtcggccagggtgaagtcgtcgccggcgaggtactcgttcttggagaggatgtcgtcgtagacgcccagcatgccgtgcagc

SEQ ID NO: 158402 - DNA, 141 bp, Zea mays
  Clone ID: MRT4577_76040C.1
ggcggggccccaacccaatcgtacttaggtgcggcagtgaggggccgatagcttgggcgccctcttccaatcgtaagaagcgactctggccatgtcgacgaagaagaggatgccgatgctcaagaagaaactgcggcaaat

SEQ ID NO: 158403 - DNA, 1098 bp, Zea mays
  Clone ID: MRT4577_76041C.1
attatacctcatcggagggattacaaagaaagggtttcaaaaaaattacaatttgaaatgttataaagtatttgtaaattttaaaatacatgctagcttaagtgacaatcctcaataaagaagttaaagatgggatatacttatataagaaggccgagcccaccggcacttagcaccatccacaatagaacaaaattacaacttggcgagcacctcctatcctggcactgggtcagatcatccatcttgaggttggtccgtcaatatcatcttgtggtccagtctagtccatgcccttcatatcgcataatcatctagcgtaccaattcacaaaccgaccaaaaaatgcgcgagaaaggcgaggttcccggttcggaccttccatcaaacacttggcaaacatcgcacggacctcgcttctttatcggttaactccctcatcaacacacacaattcacacattagtaatcgacgtcgagcgctaaaacgatagggcaagaacaggacctcaccgggggtcgacggtgtcgcagataggctgcgaaaataccaaacatcccacgccgctaatagggttgtccatgacacaacactccacttgaacattttatcaaataccatacggttgcggatggtgcgggactaccggatgatgtccggcagcgaggggctgctacagataggtgcgcaaccatgggaaaaaaaaacagaggggcgctgacctgctgcagcagtaaagggagcggtctgcaggcacgaccaagttgaaaccgagcagaggatgggcgagctcggactgacgacgaactccattgcagggggataggaacggcaagcagggagggcgctggacagagggcagggacgagctccagagaggggcatcggccatgggagggagcacggtgtgctgcaggaagggacgacaccatccacgggagagggtcctcgcagggagggatccagggggagccgccatgggagggcagggagaggagcgcccaagtggtggctgccgtagggatgaacgccagggaaaggatggcgtgagggagttcggctggagcttgaggaagagatgcctcgtgccgaattcaa

SEQ ID NO: 158404 - DNA, 211 bp, Zea mays
  Clone ID: MRT4577_76042C.1
ctatgcgtggggcgacgcggacactgaggactgggccttgctgatccctccgcaaagcgccttgtgcgccgcatctaacatgggtgcacacaaggataccgcccacacccggtagtcgtaccctaccaagtacggccgtggctatcaaaagaacaagaactgcaacaaccgtaatctcaaggacaaggtgaacaacccgatgctcttcgac

SEQ ID NO: 158405 - DNA, 592 bp, Zea mays
  unsure (1)..(592): unsure at all n locations
  Clone ID: MRT4577_76043C.1
atgacatcaagtccatgctccaatgagcctcaacatgcgatgggtatgacagtgccaggcattatattaagaagacattctcacgcctcagtcgttggcgctgcctcctccatcgacgcctcgatggctttggttgtgcagcggatcaagatggcgctcaggatggttgagcgctgctgcatcgccgcgtcatccctatcggtgcctcaactatcggtgttgccttctccgatggctctggtcgtgcatgcggccaccggtgtttcacaaggttgttaccatacctatgcttgatgtgtatgcaagcttggtctcgtgcagatatgttaggtgatcaatcttgttttataaatgcactaacaatttgtttggaggatgaggaggaacaaatggatgaaccagattgttgataagttgatagattttgaagttgacggcttgatgtcgaaccaaggtaataatgatttttagtatcattttctttactttgattaactactaaatacttatattttnttaatttctttgctctggtgnctggtggccaagtggtgtgtggtgctgtctatcaagtgaccaggatcaagtattt

SEQ ID NO: 158406 - DNA, 611 bp, Zea mays
  Clone ID: MRT4577_76044C.1
gcagcagaaataaattctttattgcaaaatgattacatgttacaataagtttacattatacaattatcggagtgattacaaaagaaagtgattcaaaagaattacactttaaaatgtataaaatatttataagttttaaaatacatgctagcttaagtgacaatcctcaataaagaagctaaagatgaaatatacttatataagaaggccgagcccaccggcacttagcaccatccacaacagaacaaacttataacctgggataacactaggttagtgtttgttagacgagacttgcttgccgatcctctctctcaggtgggcacttgcttgatttatccatcttcaggttggcccgactgacgacatcatcttgcagagtagcccacgcttaacagcatcttgtggtcgactcatctttggtcctccacatcacgtagttcactagcgtaccacatcatgatccgacttgattttttttttgcaagaacgacgacagcctttgattgaagtcttctatcgaacatctggcgagcgatgcgcatagaccttctcttcatcacccaaccctggggttcctctctccaacaacgccaaggatttcagtccac

SEQ ID NO: 158407 - DNA, 2188 bp, Zea mays
  Clone ID: MRT4577_76045C.1
cttagaagctacggacctcatttctccttcatcctcgtctcttcctcaagctccagccgaactccctcacgccatcctcttccctggcgttcatccctacggcagccaccacttgggcgctcctctccctgccctcccatggcggctccccctggatccctccctgcgaggaccctctcccgtggatggtgtcgtcccttcctgcagcacaccgtgctccctcccatggccgatgcccctctctggagctcgcccctgccctctgtccagcgccctccctgcttgccgttcctatccccctgcaatggagttcgtcgtcagtccgagctcgcccatcctctgctcggtttcaacttggtcgtgcctgcagaccgctccctttactgctgcagcaggtcagcgcccctctgttttttttttccatagttgcgcacctatctgtagcagcccctcgctgccggacatcatccggtagtcccgcaccatccgcacccgtatggtgtttgataaaatgttcaagtggagtgttgtgtcatggacaactctattagcggcgtgggatgtttggtattttcgcagcctatctgcgacaccgtcgacccccggtgaggtcctgttcttgccctatcgttttagcgctcgacgtcgattactaatgtgtgaattgtgtgtgttgatgagggagttaaccgataaagaagcgaggtccgtgcgatgtttgccaagtgtttgatggaaggtccgaaccgggaacctcgcctttctcgcgcatcttctggtcggtttgtgaattggtacgctagatgattatgcgatatgaagggcatggactagactggaccacaagatgatattgacggaccaacctcaagatggatgatctgacccagtgccaggataggaggtgctcgccaagcgagtatcatctaacaacactgacgtagtgttattctaggcaagccccggtgcatttgccaccttccttgtgttttcaaaattttatcacttatatgttgcattaggtgatagaagttgagtgattaaacacttgatgcattaccatccttgaaaggttgattaccacaccttgtcatccgttttataaaagctagagatgcttagtcttgctgatagattaagaaacatatttttgatctatgactcatgttttttacaaaaaagaaaatgggcttgggataatgaaggcatcaagacgttgataaattcattgtccaggcatggcccctctgtcaggcgccaaagttttgaaatagtttaaaatgggacctgacgttgagcaggaacggtcgcccgtctttgtcgattaaggaccgtaccgattgttggcctgatgatctaggaccttttaactggccacatacctcgtcatgggtaagcctgaacccggctattccatacgtgaaaagacaaccgcgcactgggcgtgggagatggtgggagtagcagttatcctcctggcaagaggctggatggtagggtaatgtgctcccgggtagcgcagaccagttcatgtagtggaggatccgtgggaatggttgacatatgcaagggttaagtgctacatatgtcgtgtggttggagatccccagctgggtattaatcaattcggatcgccgttacttctcggatatgaagactggatcgctgcccttcatcgtagataacaaacgaaacaaaatttggatttcaaaagcaacctagtgtaggtcaagtgaatgatctagattaggaaaatgctagattcaggctagaagattcaggtaataaactaacttgtgaaataaaacttggcttaaggacccacttctagtaagcttttctgcaaaatgagtcctcgaactttgatgagctttaccttgattcccaaaagccagcatacccttgagagtcttttctttagtcgggtaagtcttgctgagtaattgcgtacttagggttttatcccttgttgtttttgtaggagaagttttattcccttatctttgggttagctacttcatgtggatgacttgaagcttagaatgtttatgtatatattttatggaaaggcttcacccttccaattgttgtaataagttatgcacttcgagtactatcaggacttgtaataaatacatctctttctaccatgtaaaacttgagttctggaatgtaaagtatactttgt

SEQ ID NO: 158408 - DNA, 573 bp, Zea mays
  unsure (1)..(573): unsure at all n locations
  Clone ID: MRT4577_76046C.1
ctagtatgcatgggctcgagnccggccgcnncagtgtgatgggatanntctgcagnaattnncgccctttcgaagcggcccccgcccgggcannggtacaagncnnttttttnntttttttatttattattatttttttttttatatttttttttttatttttttttttttttttttttttttttttttttttttttttttttttttttttttttttttttttttttttttttttttgggggacaaaaaggggcgggcaaaaaccaggaatccaaaaatcccaaaacggggaacccaaagataaccaacaattcccagccaagccaacccaaggggggaaaaccaaaaccaggcgggaaaaaaaaacccaggccgggggggggcacctggggcgggaccccccgaagggggaattccaaccaacgggggggcgataataggggaacccagccccggcccaaaattgggagaaacataggaaaacgcctttcccggggggagaaagggatacgggaaaaaacccaaacaaaaaaagaagcggaagaaaaaaaggtaaaccccggggcgcccaaa

SEQ ID NO: 158409 - DNA, 359 bp, Zea mays
  Clone ID: MRT4577_76047C.1
tccccggccgaccacccttccggaagctgttgatgaaggcaaggcatatctccttcccctgcccgaagctgatcctcccgagggggaacctaactttaaggagggcccagccttccccagccccggttttgcctgcagtaacagaggacaacggcccgaactgggggtgggtgtcggacctgggattgaagccaaggcatttccaagccccggcccgttgcctccccccaaaattaataaaagccaaaacgggacccccgccatttcaaaagtctcctttggccgtttgaaccaacttttttaactatatttaatttttagatttgcgaggaattgattaatctattttagaaataaca

SEQ ID NO: 158410 - DNA, 796 bp, Zea mays
  Clone ID: MRT4577_76048C.1
ttttttttttttttttttttttttttttgcagcggaaataaattctttattgcaaaatgattacatgttacaataagtttacattatacaattatcggagtgattacaaaagaaagtgattcaaaagaattacaatttgaaatgttataaagtatttgtaaattttaaaatacatgctagcttaagtgacaatcctcaataaagaagttaaagatgggatatacttatataagaaggccgagcccaccggcacttagcaccatccacaatagaacaaaattacaacctagaataacactacgtcagtgttgttagatgatactcgcttggcgagcacctcctatcctggcactgggtcagatcatccatcttgaggttggtccgtcaatatcatcttgtggtccagtctagtccatgcccttcatatcgcataatcatctagcgtaccaattcacaaaccgaccagaagatgcgcgagaaaggcgaggttcccggttcggaccttccatcaaacacttggcaaacatcgcacggacctcgcttctttatcggttaactccctcatcaacacacacaattcacacagtagtaatcgacgtcgagcgctaaaacgatagggcaagaacaggacctcaccgggggtcgacggggtcgcaaataggctgggaaaaaccaaacatcccacgccgctaatagagttggccatgacacaacactccacttgaacattttatcaaacaccatacgggttgcggatggggcgggactaccggatgaagtccggcagcaaggggct

SEQ ID NO: 158411 - DNA, 307 bp, Zea mays
  Clone ID: MRT4577_76049C.1
gcaaccgacgacaccagacaggggtttcggacccatccaaaccgacctcgagggccacgggccaaagccgaggagaaacacctaaggggcttccggacccaaccagaacggggtgcaccgcccctctccggacgacaggggggacaccggtgccttggcaggcacccaccattccggggggcccccaaattttacgggcgacattcaaaacccggatacactcgctaccacccaataaacccagtaccacatcacaactgccagtgactttcgacacgatggaacactatctataagtttttaggca

SEQ ID NO: 158412 - DNA, 1071 bp, Zea mays
  Clone ID: MRT4577_7604C.1
cgggaagaacaagagatgagctagagggggccggggccgggagagcccagggcccgagggagatggagaaagatgtgaagctatttgcttctgagtggaatgttgtctggttcaaggtcttttgctttgtgatccatctgtgtagagcttctaagtattccttggatctgcaagatctcggaccaggcttcattcccctcagaaatagcttcaaaaatgatatcgcggagagttaggagagctactagctagtgtataaatttgttctagttttttttttgaaatatttgtttgagtgttcgtgagattcctggccgttcttagtagtatgcatggtgtggagcaccgtacttccgctcctggatctttactactactccactgtgcttttttgtttgtttgtttgcttgcttgcttgctgcgaaatcgaggagcagcgcaagattggtgtaatgatggcctgccttttgacccctcctttctctgtgcatctctgtgcatctggcaggcatgcagcaggtgatgaaagttcccatcattacctcttgattgggagaatcttcgctttctctctctcggcttcttcttcttcgtgttcattttttttcctcctctccgtcgtctctctttgtttgcagcatatggctttgctggtacggtgctcagattgtttccaagaacatggcattcacaaagctggtgcaaagctttacatctgcatcgatctgatgactatatatatattcttgttttcagatatctgttgcttatttctaagttcgaggatagtttttgcgtggtgcgctggacctgctgcttcaaagtttttggagagcttgggacgagatccactatttataggcgtgtattttcttcatattatgttgacacccatggaggttgatgtaaacaacgggagctcatgcatgcatgtattcctagagccaacaataataacatgatatataacatcgatgtataataaatataatgctccacatcaggtgtgtgtttgttcttctcaaaaaaaacaggcgtttctgatacatgaggtatacctgttgcctattg

SEQ ID NO: 158413 - DNA, 394 bp, Zea mays
  Clone ID: MRT4577_76051C.1
gggggaagcttttgcaagcttttaaggtgatttaaacaccaagcttgccggaaaacagttcactgattgtaaagggactctcacccactcaccccaggcgaaaaaaggataggacctgcccacttgggattttctaacgctaacactaaaagcggtggccatgtgggctggggcctggaaaccaaaacaattttttgacggagatgcccggatctaggcctattgggggttgggtcatgcctcctcccctgggggggggtgcgaccgtgtgggtcatttcttcatatggagtcacacggttctgcttgagaaaatggcttggctaactaagcatattcctggcaagggacggagaacaaacagaataattcttatctcggggggactatggggg

SEQ ID NO: 158414 - DNA, 250 bp, Zea mays
  Clone ID: MRT4577_76052C.1
ttcgttcgcactcagcaactccgtttctatggggggcgtattctacgcatcctcggttcctccgtctagcatccttccaccctcatgggctcgatcactatcgggatccatgggttcggcaagagcagacagctggtggccagggtcgccctgcttagcgacgacatctagctcgccggcttgaacaaccccttcatcagcaccgattacatgacctacatgttcaagtatagacactgtgcacgcgaca

SEQ ID NO: 158415 - DNA, 292 bp, Zea mays
  unsure (1)..(292): unsure at all n locations
  Clone ID: MRT4577_76053C.1
ttcancacgcngcccgttgggaagggagcttcgangcggcccgcngcggcgcgtcggccgggcgggctgagccaatggcacgggcccttggngctcgancgcnctaacgtgggtcggtncgggcngcgagcagaggcnccggttncnagcttggattctnactgagaggcgttnagtcagnatccggcncacggnagcttcgcgccactggcntntcaaccnagcgcgatgaccaattgngtgaatcaacggttccnctcgaactaggatgaattactatcgcngcgcggnc

SEQ ID NO: 158416 - DNA, 408 bp, Zea mays
  Clone ID: MRT4577_76054C.1
attcgtttcacgaaggatgtggcagcccacttttcgcagggcgaggtggtttgcttccacggtgcaattgttgtttttcatttggagaacaactattgcatcatgcatgcacccctgcgcatccactagcaaggagcagggggaaatctactgcatgcttcaatgggatcattacctgcaatggcaccatgagatagcactacaactaacaccttgcacgagcggataccagagtgctgcgagccaaacacctaaatcattgcctataggcacattctgatctttcatgtacgagcccttgcatgctcatcagcatcttaatatcagactacatgaacaggcattgacgcttgatccaattaatgattaacttgggccttaacatactagtgatcgaagttccgttgg

SEQ ID NO: 158417 - DNA, 389 bp, Zea mays
  Clone ID: MRT4577_76055C.1
gaacacaagctggggcctcgagggccccttttttttttttttttttcttaagaagaacgcctcccgtatttctttttaaatttgacacttgggcctctacagttcgaactatcaatttcaacaccgcggtcttcgacaaaggaaactaattttgggcaccctgttgtacactgtcttcagcacactcgcctattgacagcagcgacctaaactggagtgatagccgtcatcgacatgacactgctcatagggtcgtgacacggcacggacacaccgttcactgcgacgcaaacacttttttctgtggtgctagcttcctaccggcgcaagggtactgcaggcaacgcgacgcatctttgctcgagtgtctgtcagggcaccgacgcccc

SEQ ID NO: 158418 - DNA, 1131 bp, Zea mays
  unsure (1)..(1131): unsure at all n locations
  Clone ID: MRT4577_76056C.1
ccaagaaggagggagccaagccctacaccaaggctcccaagatccaacgtctcgtcaccnccgaacgtcttcaacgccgccgtcacttccgttcgctcaagcgcagaaagactgagcaacaaaaggttcaagtcgccgagtacccacaagttgttgccgagtgtctccatcagaaaaagcagcctcctttgacccagatagctaatgtgagccctattgccttcttgacacagcaacagttgttgccgttctacctgcacgctgcgcctaacgctggcaccctcttacaactgcaacaattgctgccattcaaccaacttgctttgacaaacccaacagtgttctaccaacaacccatcattggtggtgccctcttttagattgcttatgagttatagttcaataatgaagttttttggatgatgtttgtggcgtcccagaaataagaaagtacatttctagattcaaaaaaaaaaaaaaaaaaataaaagtgacataacaaagatcgccagattcagtgtatcgctgccggtgatcccaagccgtgattgtcgccgccgttgcgattcgtgctcggtgaagtgcagataactgctcagggtaagaaatatcgtgttgcggatgtgctcgggacactgtttcgccctggccgtcgtacccccttgccttacggccggtccagataacctcaccggagttggccgcctgctgatcgggtgccacgtgcctaagcgcaataccacatcacagtgacttgccttagcatatccggtcatcgttggtggtctggccacagtgaaagccacgcatctcttgcaccagtgctctcctctctctccggcccctagcgcgccattccaaattcaagagccaccaccctcgggccctataaattaagcgtgccatcagctccgttgggtcatcacgaagccaaagcacccgctcctgcctccaattagctaccagagagctccaatttctttctctccccaaatcggttttccgcacaccgtgaaccaccgcgtcgtggcaagccttctacaggttagctcatgcatccttaattgatgttctagcgtccctcaagttctttggtactcatagaccctttgaattgaactagatcgccct

SEQ ID NO: 158419 - DNA, 224 bp, Zea mays
  Clone ID: MRT4577_76058C.1
aatctagaaaatgtactttgttacatctcgggaagccacaaacatcaaacaaaaaactctatgtattggactataactcatcagaaatctaaagagggcaccacctacgatgggctgatggtggaacgctgatgggctagccaagatacgagctagaatggcagctatagccgcagatgtaaaaggggggcagcaccaagcgcagcgggctagggaaatggaaa

SEQ ID NO: 158420 - DNA, 175 bp, Zea mays
  Clone ID: MRT4577_76059C.1
tgtattttaaatatgtagtacaaagttaacttttttcgctgagatcctaggaagaaaggtggctgtgtcacaagctcttaacagccctcctactcgacatgctgatgcagctgaacgcagaggtcgagccggtggcggaggcagatgcgcagacttgccaatcaaagagccacat

SEQ ID NO: 158421 - DNA, 1270 bp, Zea mays
  Clone ID: MRT4577_7605C.1
agggagcgaagcggagggtcccgcgagcccggccgggccgggggaatccgggcccaccgcatcagtgtctggctcacctcacctgcagcaggtctcgtctcggtcatccagcgggctggtctcgatcgctgcagcgcatccagtccaaacacacaccggtcgaatcgagcaatggccgcggggctgcaggtgttcggacagccggcttccaccgacgtcgccagggtgctgacctgcctcttcgagaagaacctcgagttcgagctcgtccgcaccgacaccttcaagaagtcgcacaagctccccgagttcatcaagctgagggatcctaccgggcaggtgactttcaagcacggtgacaagacaatcgttgattccaggactatctgccggtacctgtgcacgcagttcccggacgacgggtacaagaagctgtacggcacggggtcgctggagcgggcgtccatagagcagtggctgcaggcggaggcgcagagcttcgacgcgccgagctcggagctggcgttccagctggcgttcgcgccgcacctcaaggacgtgcgccccgacgaggcccgcgtcgccgagaacgagaagaagctgcacagcatgctgggcgtctacgacgacatcctctccaagaacgagtacctcgccggcgacgacttcacactggccgaccttctcccacctgccaaactcccactacatcgtcaactcctccgacaggggcaggaagctcttcaccgccaggaagcacgtggccaggtggtacgacaagatctccacccgcgactcctggaggcaggtcatgaagatgcagagggagcaccccggcgcgttcgagtgatgcgtcgtgcttccttctctctgcatgcatgcgcgcgtcgcggcgtgttcctcgtcgtcgccggcttcgtggtcgtcaggcttcacaccgtggtgtgtggttgtcgagttcgtcgtatttcgtatcgtatcgtatcgtatcgtacgtacgtcctgtgggctaaaataacgtggagcctgcgcctgcctacggtgtctctcgtgtcttcctttcgctgcatatataagcagtgtctttttctgggtattgtatggtgacctaatcatcaactccttttgcaatattggccaattcaataaaaatatgtccgggcattattttgctcgttcgcactaaaaaaaaaaaaaaaaaaaaaaaaaaaaaaaaaaaaaaaaaaaaaaaaaaaaaaaaaaaaaaaaaaaaaaaaaaaaaaaaaaaaaa

SEQ ID NO: 158422 - DNA, 552 bp, Zea mays
  Clone ID: MRT4577_76060C.1
gttggtgaagctgtttcaaacttacactaaaacatcaaaaactgatacaattacaacgctagcccaaactgaacgccttccaagtaacggctaacattttcacgttcaccatcccattgattgacaaactaagcggagagcttatcacacatgggtgcaccactacccatttccatatcttgaccaaaagagaaattaaacgcgggatcaatggtgctcctttatatcttttagggcaactccccactcacgggcatgggtctttgcaagcggcttttttggtgactgggccaacggggttgtttccagaacggagagtcgggcaaaactctcctgtaaagctccacctcattttaatccgagagattggcgctttgttcctagcttctccatacctatcacctccatttctgtaggtgaactggactggggcaggaccaacggctctccataaaagttgctggtgccaacatgcggttctacttgaggcacctctggattgggccggatagaaatagcttaagcacggttattattgcctgctttccgcac

SEQ ID NO: 158423 - DNA, 315 bp, Zea mays
  Clone ID: MRT4577_76061C.1
cgcccaggtattcaaacagcattgtatgtcctcgaagttggcaacatgaaccaccaggaccaggccgtccacaccggtaacgtgtacccagcgacgggcgtgaagcgagaggctaggcacgagcgggacaagatcattgatcaaggagatcagctggtcggcgccctccacgtcgaccagacagatgttcgcgccgatagacgtatgggcaccgacagcgcaggcggacaggtgatggcacagatcaccgtgcctgtgccgcgcaccagggtgcggatgccacggacgcggtcaccctctgcgaggccctctatg

SEQ ID NO: 158424 - DNA, 774 bp, Zea mays
  unsure (1)..(774): unsure at all n locations
  Clone ID: MRT4577_76062C.1
nnccggccgggaaaaatgcagcttaataaaaagtcaagactcctccagctcccgcatttttcttccttcaccaccacaactacatcgtcacttatttctagtagtcgaccattctcactttcttctatcaaaatgtctaacgaggagatcacccaccccaccatcgtcgatggctagttccgagagatctcggacatgtggcccggccatgccatgaccctccgagttgagaaggtcctcgtccacgagaagagcaagtaccaagacgtcctcatcttcaagtccaccgacttcggcaacgttctcgtcctcgacaacgtcatccagtgcaccgagcgtgatgagttctcctaccaggagatgattgctcaccttgccctcaactcccaccccaaccccaagaaggttcttgtcattggtggtggcgatggtggtgttctccgtgagatcgtcaagcacgactgtgtcgaggaggccaccctctgcgacattgacgaggctgtcatccgtctctccaaggagcacctcccctccatggcctgtggcttcgaccaccccaagtccaagacccacgttggcgatggcttcaagttcctcaacgactacnagaacgagttcgacgtcatcatcaccgactcctccgaccccgatggtcccgncgaggctctcttccagaagagctacttccagctccctcacgacgctctccgtgagggcggtgtcatcactactcaagctgagagcccctggnttcacctccccctcatcgctcgt

SEQ ID NO: 158425 - DNA, 593 bp, Zea mays
  Clone ID: MRT4577_76063C.1
ggctcttccatgttcacaatcgtatacatgcatcctggtgatagttgatctcttcactaagtatgcaaatttcttacctcttaaacatccatatacggcattgtcagtcgctaggctctttcatgatcaagtgtacaagcaccatggactaccccaatcgattgtatctgacagagaccgtgtgtttctcagccacttgtggaaagagttgtttcacctggctgatgtgcagcttcagatgagcactgcgtatcatcctcagtccgatgggcagtcagagcgtgtcaatcagtgcttagaaacttttcttcgttgttttgtccacgcctgtccgcaccagtggagtcggtggttgtctgttgcgcagttctggtataattcttctccacactcagctataggcatgtctccatttcaggcattgtatggttgcccacccaagcagtttggcattgcagatcagactgttattacatcttctgaattgagttcctggttgaaggagcgtcagctaatgtctgagctggtgaagcagcatttggagcgtgccaaactacgtatgaagcgtcaggcagacaaaggtcgttcggagc

SEQ ID NO: 158426 - DNA, 4119 bp, Zea mays
  Clone ID: MRT4577_76064C.1
aaggagttggcctaacccaacgaccagacgcaacacgacggcgacggccatggcttcgccggacctcgccgccggcgacggcagctacgactttcaccttcgctctctctccgcggcctcacgggactccgctgcggcctccgaccccgcctctgaccccaacctcctccaatctgttaggagggtgtgcgagatgcgccgaacggcgaaggaagcgaaggacgagatggtggcgcgggcgttccccgtgatgggcaagctatttcagcgatgcgccgccgctcccacgcaggccgttgcctccaccggcgtgctgctcctcaccattttgcaattcttcttggattttggggaggctgttttgcatgatgctgatggtagcttgaaaaccttcttccgctcttgcttaagtagggagtttgcagatcctattgttgcagagcgcacagttgaattccttgtaacaaacaagacaaagatccttagctcctttcccaatttgattccacagttctatccattgttgttaaagcttattgcatcaaacggtgagagactggagaataagttttcggaagtacttccattaatgatgtcagcaggatcttttcttcccctcttcctatcccttatggatttgccaatgttggtggtggcactggaaaaggtggaaagaagttctggaactcttattggtagtagtatagctacaatccagaagagcgctgctcctgagatgcttcttgcactgatggacgaggcatatactggttctgccgtagaagaacctagtggtaattcaggttctgatgatagtggtcccctagaccttactgacccaatgttcttagaccttctaaaagatgagaatgatggcattgccgcaaaacattggatatcccctacgatatcttcaacgttacaagcagcatttaacagcccacagtcggacagattgaaacagtcactggaaatggcacctcgctttcttactttatattttgcaacagcattgcgagacgttaatgactcactgctgtgtgctcttattccagtagttatgtcaagatatgctgcaatgttcccagacaaagttttctctttcaaggtgagggaaaggctttcagacttcattttggctgcattccagcggtctcccaacatcattgcagtactgaagaaacctattactgacagacttggtgaggctcatgataatcttgccaagacagagttagcattgcacttgtgctgggccattggtgagcatggagctggaggggtgggtcacaaggatgtagctcgtgaactatttgaaaatttggagttattattgtatgaaaacctggcaactagccgtttgggattaagccaagagccaggatctgattccatgggtgcatcatctagaaagtcatcccaagccaggcttctctgctttgtggtgactgctattgcaaaattagcaacatgccacagtgagttgcttccgagggcacgcgtgtcattgggtaaggtcgctcgttcccgaacctcagacaggagggtctggcaacgggcctgtgactatttagggctcatgaatgaaccagccatctgtttatctgtactgggaccgtccaccgcccaaggaaatggtcctggtattgtgaattggagtgaaggaggaacaaagatggtagctcatgttcctttttaccttttagcccagcaaaaaggtccaccgtctcataatttttcatttgccgacctcctcccaacagaatgaagaaaatatctgcatgagtgcattggtgcaggcatgatttctctagcagaaggccatataacgattttgttgggaggaggtcggcaaatgaaaaattatgagacggtggacctttttgctgggctaaaaggtaaaaaggaacatgagctaccatctttgttcctccttcactccaattcacaataccaggaccatttccttgggcggtggacggtcccagtacagataaacagatggctggttcattcatgagccctaaatagtcacaggcccgttgccagaccctcctgtctgaggttcggtacgatccaccatttagaaatgtaataccatacattccataactcgagtgcatagtcaaccatgtaagacttgttcgattagctctcaatccatatggattgagtgggattagatgtgttgaattcctaagcaagtcaaagttcttctaaattttttttaattccatcaatccatgtattataggaataaccgaacaagacctaaaagtacaggactctttatgagtattatgctagagaaataagcctgaatgttcagaccagccccttttttaaaaaggaacttggatcttcaaaacaaaatcgttatatggccttctgctagagaaatcatgcctgcaccaatgcactcatgcagatattttcttcattctgttgggaggaggtcggcaaatgaaaaattatgagacggtggacctttttgctgggctaaaaggtaaaaaggaacatgagctaccatctttgttcctccttcactccaattcacaataccaggaccactcactcggccgtggacgggtcggtgaaaaataaaaagtaggaaggcgaagtgccatgtccaatgtatgttccagtccgtcccactgtccgctgttcagtggttcgtgtaacagtgacgatatcgaatgacatatccaatgttgtgaggaaatcccagcagcatcttgctttagaaggtctaagaacattgggtcagtaaggtctaggggaccactatcatcagaacctgaattaccactaggttcttctacggcagaaccagtatatgcctcgtccatcagtgcaagaagcatctcaggagcagcgctcttctggattgtagctatactactaccaataagagttccagaacttctttccaccttttccagtgccaccaccaacattggcaaatccataagggataggaagaggggaagaaaagatcctgctgacatcattaatggaagtacttccgaaaacttattctccagtctagaatgttagaaaacaaattaggtagttcaacgggattgctattggatatttatggtacctgtactgagtcatttaaagggaacatggatgatagagctatgtgaagttcatgacaatacgagcacatacctctcaccgtttgatgcaataagctttaacaacaatggatagaactgtgtataaacaaggatacacaagcattggcatgtgttaacaagattaagtcgaatatggaaaataggaagagaagagagatattctataaagaatcttacaaaagattggttgagtagcttatcatacaaatatggttttttctgttttttctctacctttttggcctacagcctcctgtattgtaaatatttctttgcttctgttagtgaagaaatacatgtaggggcctcccccaccattcacataaaaaattgacaaatatgctataaaacaaagaaggaagctggatttatatctttcagtttttcaaagcaatgatctgcaacagcatgaataataggagctacatgtgggaattgtcaattccaagtaagtaaatatttcaagtgttggcacctgtggaatcaaattgggaaaggagctaaggatctttgtcttgtttgttacaaggaattcaactgtgcgctctgcaacaataggatctgcaaactccttaagcaagagcggaagaaggttttcaagctaccatcagcatcatgcaaaacagcctccccaaaatccaagaagaattgcaaaatggtgaggagcagcacgccggtggaggcaacggcctgcgtgggagcggcggcgcatcgctgaaatagcttgcccatcacggggaacgcccgcgccaccatctcgtccttcgcttccttcgccgttcggcacatctcgcacaccctcctaacagattggaggaggttggggtcagaggcggggtcggaggccgcagcggagtcccgtgaggccgcggagagagagcgaaggtgaaagtcgtagctgccgtcgccggcggcgaggtccggcgaagccatggccgtcgccgtcgtgttgcgtctggtcgttgggctaggc

SEQ ID NO: 158427 - DNA, 237 bp, Zea mays
  Clone ID: MRT4577_76065C.1
gggtctatacataacccgagcctcatgcactgggacaacatcacagatcagggattgaaagctgtattaatgagtaatgtacagttaacaaagacaaccatttttggtgctttaccgttaacttatgaaggtcttattgacagtgtgtggtcattaaatatggaaacagatattggcataaagaaactcagggttacaaatcacttcactgcatgagaagcgcaatcttaaaagttg

SEQ ID NO: 158428 - DNA, 1351 bp, Zea mays
  unsure (1)..(1351): unsure at all n locations
  Clone ID: MRT4577_76066C.1
ccctaccactcctcgtcgtcgtggccctcgtacctgcagtcgacgacgacgtcgccccttggcgccgtggcgccgccggcgtccgaccccacggcgtcgtcgtacctctcgccgtccgcgtaccaccggatgctgtcgagcaccggccggctccacctccagggcgtgctcgccgacacgctccgcggctacggcggcgcgcaccaccaccgccagcacttgggcagcctggccgcggcccgctacatgccgaaactcccggcttcccggcgcggcatgcgcgcgccgcggatgcggtggacgagcagcctgcacgcgcgtttcgtccacgccgtcgagctcctcggcggccacgagcgggcgacgcccaagtcggtgctggagctgatggacgtgaaggatctgacgctagcgcatgtgaagagccatttccagatgtataggaccgtgaagagcactgataagccgcctgcagcaacctcatcaggagggggagggccgcctgtggacggtggtggcgggtccggcgacgacgaccacccgagcgattggcggcgggctccatcctcatcagctggtcgggacgtcagcccgcaggcgttcactggacaccggtcagcctcctcggacggcgcggcaagccatgcgggcggcgacgttgaatgctcctccgccgacgattccgacggtggcaggccgcgcagtgcttctccgccaaggctgccgccaccaagtgcgtgcaatgcaggacacccttcattcagttggcgtaccatttccactactgaggatatggagcctgcttgtcgatcagctggcttacaacattcactcaaccatgaaatgagctgccctcctagcctggagttcacgctagggcggccaaactggaatggtgcagaacatgactagcatcaccagctagctagacacatatgcatggatatatggcacattattagttcaacacttcatctagtactgcttacaacacctgattggttttttgcatctattagaaatttagatagttccatgtttaatccaaaaatatcatatagtagatttatgacaacatgtacgtgcacgtgtgaaatattactactcacaacaataacagacacctacatgaaaaaaaaaaaaaaaaaaaaaaaaaaaaaaaaaaaaaaaaaaaaaaaaaaaaaaaaacaaaaaaaaaaaaaaaaaaaaaanaaaaaaaaaaaaaattatattaaaaaaaaaaccaaatattaaaaaaaaggggggggttttttttttttttttttttaagaaattatgtttttttttttattgggaagggagngaaaccccagggaaaaaaagggttttt

SEQ ID NO: 158429 - DNA, 146 bp, Zea mays
  Clone ID: MRT4577_76067C.1
tctcaatttaacacctttgatttcaacatcatcacacccattacccgacaagatctttttcaagatcacgtatcctacccaccactatcctactaaatcaacaaatcctatttaatattcctcacaaattaacaccatttaccaca

SEQ ID NO: 158430 - DNA, 302 bp, Zea mays
  Clone ID: MRT4577_76068C.1
catcaagcctaatcaccacagggggggatttaataaaatacgggcggccaacaaccaagacgggtcaacaatggcctttacaaccaacctgaccacgaaccagcaaagctgaccgttaatgcatgtcccggcactcgcattaccttgtaagccactaagaggcaagaccgacagcctctaattccctagccgcacgatgttctccaacgccaacctcaacccgcgccccggcgtcccaacgcagcacaacccacgggagcccgatcccaaggactttctgaacctcaacaactgcgacatca

SEQ ID NO: 158431 - DNA, 783 bp, Zea mays
  Clone ID: MRT4577_76069C.1
gttgatttcattttactttcattcctttccaattcaactattaacataacagaaataacaattcagtggaatgaattatgctggaaagaagagggccttttttcatgtcttttgaagtagtttatcactattctgttattagtttcacactggtatttttcatggtctaattcactaacggttttggcataatattgataaagaaagcgatttgatacaggtaaagctagctttcttctttttctccctgctccttctcgtctcttcaatatatataagtattcataagtctcttgtgagcgatcaacgaccattcatgtgtgatagtaattctatacttctgttcattttcttggccctgcaggtaattggtttttgaccaaattattcaactagaccgttctatattaaatggcacaacggctttgagcctgtctgtcaatgtacgaaacaacggcgggcgcaaagagcaaatcgggaaggaatcagccagtaccagcaaatgcgtcagacaactgatgtatccttcttctgcattccaattctgacttattttaataaaacaacctttataatagtattagacggaaaaaaaaaaaaaaaggagaggatattggatcttctatatatcttacttggtcctttatcattttcaaatgccaatcagtgaacaccaaatttcaggtttgttaaatgcctgttaccagtcaggaatgagatattatcttcagataataaataaaataactgggaactgggaattgtaccaaaaaaaaaaaaaaa

SEQ ID NO: 158432 - DNA, 376 bp, Zea mays
  unsure (1)..(376): unsure at all n locations
  Clone ID: MRT4577_7606C.1
atttgttcatgatgctcactagcgggatgcgcgacacttgtacacctattttaatatttttggattgaggaccgtggattagagatagatctggtaaaaacaactatcgtgagtaacgtggtatatggnagactcaggacatagcagtactcgtaaatcgggtatatcccatgtgacctgcaagatatacaacatattgcttaaaaaactgtcataagcaacaaatagcgtaccgttgagataaatgtgagggcggctgtaattttacaagaacaatgcagtgaaccagctatgatggtgattgaataacatcacggactttcagtcttatttctctacaatatgtgtctggtgaaatagatacaaggtttttatt

SEQ ID NO: 158433 - DNA, 180 bp, Zea mays
  Clone ID: MRT4577_76070C.1
ggagcggagcgtcaggttttatgtgattccacagaaaatctcattaaatttttacaggggacatgaaaaaaatccttgggtcgaaatataaaaaaaccggcggtcatgtactttatttttacaggattatattgcgttgcatgcatgggattatggggtggcttctagtgcttcgcattc

SEQ ID NO: 158434 - DNA, 209 bp, Zea mays
  Clone ID: MRT4577_76071C.1
acgacttggcgagcgtctatctcctcttacgatttacctagttgattcttgaggctaggactggggtaagggtgtatttgcttggtggtgtgactctccgatggctacgactagttctatgtgtacttgctcacgcatacaatcactcaagctgtgtaattcattctctgggataagaatacttctatgtgaatattttggtctaattt

SEQ ID NO: 158435 - DNA, 243 bp, Zea mays
  Clone ID: MRT4577_76072C.1
ggaactacctgctatcgatcgccctctcgctgacgacactcatggacgacaacgcgatcggcaccaactgccggtgtatcccgctgcccttcatatatacccagctccagcgccagcaccgtgccactcttcatacccaacgtcgcctccaagcgtcacgaagacgacacggagaccgttaaaggttgcggctcgaaacctcggggcgagcccactaacctggcgacggatggcatcttcatc

SEQ ID NO: 158436 - DNA, 641 bp, Zea mays
  Clone ID: MRT4577_76073C.1
gcatctcccgatcctctcgtggccgtctccttgctcgggccaccagcgaggccccgcgcccgttccccatctctctgcctctcctcccgcttctccttgtcgccaccaacccaccgtgagtcccgccgccggagcgcagagccccttctcgcgcgtcaaccactgacgcggcctcctgctagcctcgccaaggccagcgccgccagctcctccttccaccttacctctctgcaacccccgcggatgccatcttccagcatcgccggatgccgtccagggaacccatggcgccgtcgtctcaaggccacgccaccggcgggatcctgcgtgcctccgcccggatcggcccgtgcgtccgttcccgccgcctcaagattcgcctgcatccctgttgctccacctcatgccttgttctggcgtcatccgcgacatccgacgaccacgacgaccacaggagccaacctccgccatcttcctggtcaagttgacgccagggccgaccccaaggcgctcctctactcctctcgcctcgagcccctgccactgaccaccaccttcgtcttctgctgctgcttcatcggtgagcacatgccgccgccgtgttgccttgccttcgcctcccggcttcgtccgcgtcccgc

SEQ ID NO: 158437 - DNA, 273 bp, Zea mays
  Clone ID: MRT4577_76074C.1
cacacatcctgggaacatagctcaccgtgcaggcatagagtggtgtgtgctgagcctccgagccaagcctgtgagtgggcagactggacggctgctttgtgtctgtttagttggggctgaagcacctagtgcagggtgacggcactgtccttgtgcagttcagagtgcattcagttgttgctgcaggacctctctttggtgattgtaaattattttgggacctaaaattcccactttaatccaaagtaaaaaacggttatgctaaagtgtaaa

SEQ ID NO: 158438 - DNA, 159 bp, Zea mays
  Clone ID: MRT4577_76075C.1
ccgtgctttaactaagaacaggggcataaaggttcgttaccctggcaaacaaatagctccattgcttcacgcattgactgctactcggaggctagcacctctgtctttggccacactttgcgtgagcatgtcgcggagagactggaaccctatgacaag

SEQ ID NO: 158439 - DNA, 121 bp, Zea mays
  Clone ID: MRT4577_76076C.1
gtagactccgctgctgcatatggctctcaccggttccgctccatatgtagcgccggtgctagtggtcgctacggtgatgactgtacctctggccatgattgtgacagcggtaaggcggact

SEQ ID NO: 158440 - DNA, 649 bp, Zea mays
  Clone ID: MRT4577_76077C.1
gccggccgggttccgaaccatcactccctcactgctgtctcactcccgatccctgtaccactaccgcctcctccgcgtaacccctctcgtcgcctcttgcgatgaacggcgcgggatcgttggcggggcaagagcaaccatgggtgtcttcaccgagacgaagaaggccaccacccccttcgaaggccagaagcccggtacctccgctctccgcaagaagggtactgtattccagcagactcattatctgcagaactttgctcagacaacattcaatgcccttcctgcataccaagtaacaggtggaaccattgctgtctctgcggatgcccgctatttctcaaaagatgctgttcagatcataacaaaaatggatgctgccaatgaagtaagacgtgattgcattgaacaaaacagtctcatgtctactcctgttgtatctgctgtcatccgcgaaaggattgaagcatatggatcaaacggtactggtgacctcatcttgacagcgagccataacccaggcggtcctacggaggacttcaggatcaaatacaatatgctaaatggtggacctggccctgaatacgatgacgacaagattttctctaatacaacgacgatctctgtatacctcatctctgaagacctt

SEQ ID NO: 158441 - DNA, 339 bp, Zea mays
  Clone ID: MRT4577_76078C.1
ccttgttttttttgttttgggactgaaatgatatgtgaccattggtgataaatctcggcaacgaaccgaccccgtgtacccgctcggcacaaaaacatcatcggatgatttgggtccaatgtactaccaaagaacaagttgcatttatagaacattgttcacgatgctcatgccgaaccaagtaatgattggtatgataccaacacgttatgatcggctacaggtgctgccagctaatgcgcgggcattctctgttacagtatggacactctggccattttgcaaacaggagtgaacccgctgatagactggagaggttgtcaacctactagggaccta

SEQ ID NO: 158442 - DNA, 1150 bp, Zea mays
  Clone ID: MRT4577_76079C.1
taaggatccagctcgtagtcgcagcccatccatgccccatgcggccatgcctatatatactatactggacgcactccggcccggcgtgctcgtgctcgtcctctcccagcaccgtaaccaccgacagagcacgcaccatgacgaggaccaccaccagcagcacgctgctgacagcggcgctgctctgcctcgcgctgccgctgctccccggggccacggccaataaggcggcgcggcggcggcagggcgacaacctggcgcgcctgcgcgggtcgccgtggccggccgagtcgtcggtgtcgctggcggtcgcggcgacggatgacagagcgtcccggcacgcggcgtcgccgcccgcggggcgcagcaaggaggacgaccgcgtggacaagctgcccgggcagccgtcgggcgtggacttcgagcagtacgccgggtacgtgacggtggacgccgcggccgggcgcgcgctcttctactacctgaccgccgccagcaagccgtcgtcgtcgcccatcaacctcagaggcatcatgatcgggaacgcggtgatcaacgactggacggacaccaagggcatgtacgacttcttctggacgcacgcgctcatctccgacgcgacggccgacgcgatcggcaggcactgcaacttcagcgccgccgccgcacgccgacgccgcgggctccaacgacaagtgcgacgaggcgacgtcggaggccgacgaggccctgcaggacatcgacatctacaacatctacgcgcccaactgccagtcccccggcctcgtctcgccgcccatcaccccctcgatggacaggtttgacccgtgctcggattattacgtgaacgcgtacctcaacgacccggacgtgcagagggcgctccacgccaacgtcacccgcctcgaccacccctggtccgcctgcagcgatgtcttgagacgctggactgacagcgccacgaccgtcctgcctattctcacggagctcctcaacaacgacatcagggtctgggtgtacaggtacgccagcacatcatctgtgtcacctccaccgtcagggcctgttcgtttcgcatggaatgaaggggtggaataaatctggcttggattccttcaataattactataagttttggagatttagaatt

SEQ ID NO: 158443 - DNA, 1577 bp, Zea mays
  unsure (1)..(1577): unsure at all n locations
  Clone ID: MRT4577_76080C.1
gtgcctcgcccagcaccgtaaccaccggacagagcacgcaccatgaaacccaccaccagcagcacgctgctgctggcagcggcggtgctctgcctcgcgctgccgctgctccccggcgccacggccaaggcggcgcgggcgcggcagggcgactacctggcgcgcctgcgcgggtcgtcgccgtggccggccgagtcggcgtcgctggcggtcgcggcgacggacagagcgtcccggcacgcggcgtcgccgggcgtggggcgcaaggaggacgaccgcgtggacaggctgcccggccagccgtcgggcgtggacttcgagcagtacgccgggtacgtgacggtggacgccgcggccgggcgcgcgctcttctactacctcgccgaggccgtgggcggcgggtcggcgtcggcggccaagccactcctgctctggctcaacggaggccccgggtgctcgtcgctggggtacggcgccatggaggagctgggccctttccgggtgaagagcgacggcaagacgctgtaccgcaacccgtacgcgtggaacaacgcggcgaacgtgctgttcctggagagccccgccggcgtgggcttctcctactccaacacgacggatgactacagccggagcggcgacaacaagacggccgaggacgcgctccggttcctgctcaactggatggagaagttccccgagtacaagggccgcgacctgtacctcgccggagagagctacgccggccactacgtcccgcagctcgcccacgccatcctcgggcacgccgcgccgccggcaagccgtcgtcgtcgcgcccctcaacctcaggggcatcatggtacgtgtgacgtacgtcaccgtgaccgtgcgggcaataatgctggcggcggcgggcggtcgtgcagcgaataactgacaggcttcgttcgtgccggtgcgcgtggcgtggcaattaatcggcaccgcgattgccaacgactggacggacaccaagggcatgtacgacttcttctggacgcacgcgctcatctccgacgcgacggccgacgccatcggcaggcactgcaacttcagcgccgccgccgccgccgccgccgcgggctccaacgacaagtgcgacgaggcgacgtcggaggccgacgaggccctggaggacatcgacatctacaacatctacgcgcccaactgccagtcccccggcctcgtctcgccgcccatcaccccgtcgatggacaactttgatccgtgctcggattattacgtggaagcctacctcaacgacccggacgtgcagagggcgctccacgccaacgtcacccgcctcgaccacccctggtccgcctgcagcgatgtcttgagacgctggactgacagcgccacgaccgtcctgcctattctcacggagctcctcaacaacgacatcagggtctgggtgtacantggagacaccgatggganagtgccggtcacttccagcaggtactccgtgaaccagctccagctccccanttgccgcaaaatgganggcatggttcaacaacactcaaggcgccggaaaagttgggccgctacaccgt

SEQ ID NO: 158444 - DNA, 155 bp, Zea mays
  Clone ID: MRT4577_76081C.1
gtgggtcttccgacaaggagcctttccctcggaccagtaactaaccaattgcgacggttcttcccgatcacggcataataagctcggaagacgctgcgcacaagatcgtcacaaaacagccgaaccaccaagaacaactacaggtgccaaacaac

SEQ ID NO: 158445 - DNA, 1096 bp, Zea mays
  Clone ID: MRT4577_76082C.1
gagcgtcccggcacgcggcgtcgccgcccgcggggcgcagcaaggaggacgaccgcgtggacaagctgcccgggcagccgtcgggcgtggacttcggggggtacgccgggtacgtgacggtggacgccgcggccgggcgcgcgctcttctactacctgaccgaggccgtcggcggcggggcggcggccaagccactcctcctctggctcaacggaggccccgggtgctcgtcgctggggtacggcgccatggaggagctgggccctttccgggtgaagagcgacggcaagacgctgtaccgcaacccgtacgcgtggaacaacgcggcgaacgtgctgttcctggagagccccgccggcgtgggcttctcctactccaacaggacggaggactacagccggagcggcgacaacaagacggctgaggacgcgctcctgttcctgctcaactggatggagaagttccccgagtacaagggccgcgacttgtacctcgccggcgagagctacgccggccactacgtcccgcagctggcccacgccatcctccggcacgccgccgccgccgccggcaagccgtcgtcgtcccatcaacctcagaggcatcatgatcgggaacgcggtgatcaacgactggacggacaccaagggcatgtacgacttcttctggacgcacgcgctcatctccgacgcgacggccgacgccatcggcaggcactgcaacttcagcgccgccacgactggacggacaccagggcatgtacgacgtgcgatggagccacgtcctcatctgcgacgcgacggccgacgccatgcgcaggcactgcaacttcagcgccgccgccgtccagggctccaacgacaagtgcgacgaggcgacgtcggaggccgacgaggccctggaggacatggacatctacaacatgtacgcgcccaactgccagtccggcgacctcgtctcgccgcccatcacccccttgatggacaactttgatccgtgctcggattattacgtggacgcctacctcaacgacccggacgtgcagcgggcgctccacgccaacgtcacccgcctggaccacccctggaacatctgc

SEQ ID NO: 158446 - DNA, 407 bp, Zea mays
  unsure (1)..(407): unsure at all n locations
  Clone ID: MRT4577_76083C.1
cccacgcgtccgcccacgcgtccggtttttgtgtgtgaggttnnnntgagataaatccctggttgtcatgtggagaaggctttagtgcggagctcaccgtgtgtttgacgtaatgcttaactaggactcatcgtcgattttgcggattcgagtcaggtttgtactggtgagctgatttgctaattctgttcttggttcgatggtcggattaattaactatattaattacatcggttctcttatcggtagcatgtgtgtgtgttgtgattttacgatgttttttaatgctttagtgtaagtggtaatttagttatgttcatgattgggaagcaagattcttcggattcgtgctcatttatgttagaggtgcaagttatgtgaggagtgttttgatgaaggcatacgtc

SEQ ID NO: 158447 - DNA, 906 bp, Zea mays
  Clone ID: MRT4577_76084C.1
atggcagatcagggagggactcataatgcatggcaatcagatttttgtaccacaatcctccagcatacttcctactatcctgcacacaggcacacatcccacttcgtaggccatggtggcatccagaaaaccctgcaaaggttgaggacatatttctttgttcacagggacaaggcattggttagagattgggttcgttcttgtgcagtttgccagcaaaacaaaatagaaacactccatccagcaggactattgcaaccccttggaggtaccatcttagatttggttagacatctcaatggatttcatcaaagccctaccaaagagacccccccccctccactcatcccataccagcaaggagcagcagctacaccaactatagaagaaatgtttcgcgaacgggactgctttctcgcggaagtcagagacagactcctacaggcccaggaacatgctaggcagtttaatgatggccatcaccgagacctggagttcaaggtgggcgactgggtttggctacgcctgttacaccgacaggcacagtcgctggttagccgaccaaaagggaaactgggagtctgggaccaaggactactcaaacctttcagaggatcacctcctgttctaccaccagctctgccagtactagaaaacggcaggcttctgcccacaccacaaaaagttctcaaagctcgacttcagcgtggtaaatggttcatcctagttcagtggagtgcagagcagctagagcaggccacatgggagcccatgcaacagttcaaaacttcctacccacaatttcagctcgaggatgagctgttcgtcgagagagggagagatgttatgactggaaaagtatataggcaccggcctaagcagccagtggaagataagctagactga

SEQ ID NO: 158448 - DNA, 684 bp, Zea mays
  unsure (1)..(684): unsure at all n locations
  Clone ID: MRT4577_76085C.1
ccggccgagtgggccctttccgggtgaagagcgacggcaagacgctgtaccgcaacccgtacgcgtggaacaacgcggcgaacgtgctgttcctggagagccccgccggcgtgggcttctcctactccaacaggacggaggactacagccggagcggcgacaacaagacggccgaggacgcgctcctgttcctgctcaactggatggagaagttccccgagtacaagggccgcgacttgtacctcgccggcgagagctacgccggccactacgtcccgcagctggcccacgccatcctccgccacgccgccgccgccgccgccgccggcaagccgtcgtcgtcgcccatcaacctcagaggcatcatgatcgggaacgcggtgatcaacgactggacggacaccaagggcatgtacgacttcttctggacgcacgcgctcatctccgacgcgacggccgacgccatcggcaggcactgcaacttcagcgccgccgccgccgcgggctccaacgacaagtgcgacgaggcgacgtcggaggccgacgaggccctggaggacatcgacatctacaacatctacgcgcccaactgccagtccgncgacctcgtctcgccgnccatcaccccctcgatggacaactttgatccgtgctcgggatattacgtggacgcctaccctcacg

SEQ ID NO: 158449 - DNA, 163 bp, Zea mays
  Clone ID: MRT4577_76086C.1
gagaactgtaggacgagatgaagaagaaacgggaggttgaccgaggagactgtgatagaaggtccaaagaaaggagcggtgaacgttccagggaaatcgagcatgtatcgtttataaaccgtagacatagatcttgtcagggtgtatgaccgtaaaaaaaaca

SEQ ID NO: 158450 - DNA, 528 bp, Zea mays
  Clone ID: MRT4577_76087C.1
acctcgagccggccgggacacgctactaaagaggggaggactcggcttctgttaccgcagtgaagcgtgttactatcaccaccacctacactgccacgggaggttataccttatcctcccgtccacaatctgatgctgttcctgattttctgccttgcctactatgcctactgcctcaccgtgcgccatgtacgccgtcgtactagcaccacattaaactccgagaccaataccagcactgccacaaggaactgaggcacagctggaacgggaaggacgaacaggttcatccggatttcgagctcatcatgaggggcaccggactcttcatcaagaactagtgcgaacaatgccattgcgtgaagctgctgtcctaccatacatatatatctggacgagacagctgctgtatattgatactctcgacctggactgggatttccggtgtgtccgcctgactgacaatatcctgctcgacttctacgacttccgcgttgacgaggattactacttcgtaggcgacactac

SEQ ID NO: 158451 - DNA, 389 bp, Zea mays
  Clone ID: MRT4577_76088C.1
cgcccgcacgcggccgcggccggaactggccgggaccgacccacgccgtacagtttctttagcctcggatcgggccgcccgaggcgtcgtcggcacagagcgggccactcgggcaagctcagcggactgcgccatgctaccatgccaggagaccagaaacccggccaaagccgaggtgagcagggactggcgcatccgggagagcgatcacgcggtgcacaaccgggtgagcccacgctggccaagagcgaggcggggtctggaaaacggtagcacgggagacctatactacagcaagccacagacacagagctcgcatcactcgcggagtgtggcaccgaagaggcaaaatatccggcataggccataggcactggaagccctacaag

SEQ ID NO: 158452 - DNA, 221 bp, Zea mays
  Clone ID: MRT4577_76089C.1
gtcgacgacgccattgtgccggagtatatatgcagatgcgacgagtgatctatgacgatgtcccagcatgtgtatatatgcatgtcgacgacgccattgtgccgaagtatatatgaacaggacatggcggctgcgcacgaatagaggcaatcatctagcgtcaaggaatctgtccatgtaaagcggcaagtgcgcgtgcccgcgcttatgcagtgcccgca

SEQ ID NO: 158453 - DNA, 342 bp, Zea mays
  Clone ID: MRT4577_7608C.1
accaacaacaacaatttaaccatggcccccgaccatttgtttttgaaagggtcccccggggcactttttttttatccttgaacaaaaaatttagacgccggcttttaccctgggggggaaaaccaatgggccagacatggtctcacaatggcaactaaaaatcacaatttttgggtacaggtatgaacatcatattctattagcccatttttccaagaagggggtccactggaggatgaacatttccagggggaggggccaagggtcggatgtttttttggggggaaaaaaaacccattttttggagctgagctaattggggggggtacagtttttttgggg

SEQ ID NO: 158454 - DNA, 152 bp, Zea mays
  Clone ID: MRT4577_76090C.1
gcgggtcgagcgggaccgtgttcatcgcgacgccgacggggatctccccgccgccgagaccgccccccttctggcgcacccaccgtcgccgggtgagccttgggctgcgaactttgggtcatcggagataaccgacgaggagatcgacgccg

SEQ ID NO: 158455 - DNA, 357 bp, Zea mays
  Clone ID: MRT4577_76091C.1
gaactccatcaattcatcgagccatcatgttcaaagccggctaccacaacttcagcgggggcgctctggactaccgcaggaaccctagcctgatccacactcacagcatgcttaacatctatgcctagcacctcatgctcatctacgcattctaagtctacctcatctcctccatcaccatcgaccaggtcgctgacccactttaactcggctagaactgctaccactactgactcggctactactactaggtcttagctcgatctcaacgtcaatgtgctcaagaacaaactgctcaccatagactccatctgcggattattcatgcataccatggtcaccctaaaggatccaatc

SEQ ID NO: 158456 - DNA, 228 bp, Zea mays
  Clone ID: MRT4577_76092C.1
gcacgaggcgaatctgaagcggcgacggcgaatctaaggcggcggcggctcaatcgggggcagcggcactgaatggcgggggagagaggcaacctagggttgccagaggaaggattatatgggctggctggtgggctgggtctcctaccccttccttctccttttttctttttttttctttttcttcctcctccatggggctgttttgctgattctcaggttgataag

SEQ ID NO: 158457 - DNA, 246 bp, Zea mays
  unsure (1)..(246): unsure at all n locations
  Clone ID: MRT4577_76093C.1
ggaagttaaaaggagttaaatggctttgggccagggggggtaatggcgcaaattaccccaagtattaggttaggggacccaagtttaaaattatttttgatgcctaatgaactagccgacccacctcattgacctataattacgataccctagtatagaggtaccctgagttaggttgactgtgatgaggtgggctattggttaaccttcccttaggtggatagctgttgcgctggtncttgtttg

SEQ ID NO: 158458 - DNA, 219 bp, Zea mays
  Clone ID: MRT4577_76094C.1
atgctgtgtaagttgattcatagggggacggagagaatttcaatacagtgaacacaacaattctaccttgccgatagaaccctgttaccgttagtaactcacatcaaagtacacactcggaaccaacgcgccctcacccaaatcctatcacttatatacccacccttgcgtccgcttatctgattgtctttcaccccctcacttactagtcacaaccct

SEQ ID NO: 158459 - DNA, 377 bp, Zea mays
  unsure (1)..(377): unsure at all n locations
  Clone ID: MRT4577_76095C.1
gatttatgtgcttgagtcggtccacccgtcctagccgaagacgccgagtaaatttactttaccccaatcgacgagatcagcttcacacggctaagcgaggagtaagcagatggcctccgcttcgtactggaaagttgggagtaattcgccttccctaaggcggccacatctggattacggtacgacgcgttaaacagtacttcaagactaaggttcntcctaaatcatctatagcttacgtaaggactagactcacacgccggaaacgcggacgcaccggactccctcaaggagtagccggatctgaggccaaaattcgaagaataaggagtggaggacggtccacccgttctagcggaacacgccgagtaaatata

SEQ ID NO: 158460 - DNA, 383 bp, Zea mays
  Clone ID: MRT4577_76096C.1
gccaacatgcaaatcattttagaactgaccagatgcagaggcaggaattctcgaggcgggctacacaagtgagcaccgagcactgcaatgcccaacaacaagattgaagcagcaaacatggaacataaaggctctgcgggcaaggcagcagttccgcatgaccagttaccgcggtttacaatcttcctgatacccaaccgtagagaaccccccctagatcttgtcaagattgcctgccttaaccaccggattaaccttggcaatggcgtccctgggcagcattacgagaattcgtacttgcagaaagtgcttgtcaagagaaaccggtggagtgctgtattaacaagttccacacccgcagttgaatcccgatagtccaaccc

SEQ ID NO: 158461 - DNA, 363 bp, Zea mays
  Clone ID: MRT4577_76097C.1
aaccctagctaagggatgggactcaagaacatggatgcctccaagatccgagagcttagcaacttatacgagagcggctataaaagtccttcgttcctcgccgaccataacctctccttgtcagcaggatcacctccagagttaggagagccaaaattctccacgtccaccccttatctcaaaagaaccagcagatctatccaggacgacatggatgacttcagtgatgactacgacaatttagatatgaagaaccccactcctgagcgagacaagctcgatgaatacattgcggagtcagacctagagccccaaagagaaattgatcagtctgaccatggaaacccatcacagaagatggga

SEQ ID NO: 158462 - DNA, 323 bp, Zea mays
  Clone ID: MRT4577_76098C.1
ttccttgcggctggctaagcattacctgccctggccgtcgtcgcctccgatagtttggctgagaggagccagaaccgaggaactgagcgagggctaggtggagaattggttgttctcgtgttatgccgggtcctgcggtgcctactggtagtgaacggtacaaattggtgcgatctgagtcggatcatgcgtgcgaaatgggtaatcgagtgttacacacatagctgctgtggttggaatgtgacgcactaagggagcctaaacggtggaccaagggacagtggacggcgttcgatgttgactgtagctgcagttgtttacac

SEQ ID NO: 158463 - DNA, 316 bp, Zea mays
  Clone ID: MRT4577_76099C.1
cggccgctcgagccgggccggccgggtttccctacctgcacgaccgaatccacctcttcctttcctctcctctcctctgccgtcccctccccagcacgcgttccccacaaattccccaaatcgaaccccagacagaggcgtcgcgcgagctccgtcgcccccatcacaccttctactccaacaaggagatcttcctccgcgagttcatctccaactcctccgatgccttggacaagatcaggatcgagagcctcacggacaaaagcaagctcgaagcgcagcccgagctcttcgtccacatcatccccgacaaggc

SEQ ID NO: 158464 - DNA, 1079 bp, Zea mays
  Clone ID: MRT4577_7609C.1
cgggggaattcggcacgaggcgggatcggatcggatcggatcgacacccagccagcgcgtggagagtagaacaccccaaagaggccaggactgagactgaccatgggagaagcgtgcagggacgcggcggctgcgggccagcagctgcggcaggacgaagcgggcggaggaggagggcgtcacgcggagaaggagctcgtcggtgacccgacccacgactcggtcgtctcggcgaagctgtacgaggacgtgccggcgacgccgatgatggcgctcaaccacatctcccgcctgtgcgtatccgtcgacgcctccgtccggttctacgtcaaggcgctcggcttcgtgctcatccagcgcccgccggcgctcgacttctccggcgcatggctcttcaactacggcgtgggtatccacctcgtgcagcgcgacgacgcgcggcgggcccccgacgtgaggccggaggaggcggagctggaccccatggacaaccacgtgtcgttccagtgcgaggacatgggcgccatggagcggcggctgcgggagatgcgcgtgcggtacatgaagcggaccatcaacgaggaggaagggtcgcccatcgaccagctcttcttcagggacccggacggcttcatgatcgagatctgcaactgcgagaacctggagctcgtccccgccggcgccttcggccgcctcagactgccccgcgaccgccacaacccgcccgtgcgcatggtcgccggcagcgacgagtagagggggagggggctttcgcgtccacgtgaccctccgccctacaaggccagcacccccagcccagggggaaatagtttgtggctcatataatcgccgagggctcttaattatgctggattctgggccgagttcccagttttgaattcgaatttgtgctagttttggtttgcttcggttatcaggagattcttagcaagatgaaccgtggaataactatggaactaaaccgtggaagatgaattctcaaacaggtctaaggggttgtttggtttaaggggttgtttggtttcatgggaataaactttagtctctcccttttagtc

SEQ ID NO: 158465 - DNA, 454 bp, Zea mays
  Clone ID: MRT4577_760C.1
cacacgcgttcggggctatgaagccactctcctctgatcgtcactctcaagaagggacagcagcatccgcaggcgaaacctatactgctgtggcgcgttcaccggcggcacgcgcctagtgcctaatgcaggcggacctggtaccgcgggtgcagcgcgagggcggattatgccaccgtgcgctgcgggtagagaatcatacataacacagggctcgggatctaagactctttcggcgcaggctacggcgacataataattgctgacgctctaatcgcgctaccgagccaggtggcattacgactacgcccgcccaccagtgccaacggacgacatgcttgtacagctcggctaacaagtcccggatgaactatgggctatgacgatgagaggagagtgactgtatatacgaagagggccttccttgcactcgacggcataaaccccgcggcgg

SEQ ID NO: 158466 - DNA, 317 bp, Zea mays
  Clone ID: MRT4577_76100C.1
tcgcggactcgtgggcggacgcgtgggttggggagtaatgtcccattatgccagtactgtatggaggctagacatgcattaaggtctgatttagttaataaggtgcgagaatatcctatatgtgttggagtttttgcacctgttgcaaactgcgggctacagtatagtttttgcgtttctaagggaaactggattgagatttgataaggatgcggtttgtaggaatttgcatgaacagttgagaacagatggcaaaatttacagggtactgcatacatgattgagaatgtccgaaaaattgatgtgaaatgccaaat

SEQ ID NO: 158467 - DNA, 345 bp, Zea mays
  Clone ID: MRT4577_76101C.1
tcgagccggccgggccgggaaatcaaaaaagcggacgcgtgggtgaaaactgaacgggaatgaattgtcttcagccgctccgcgatcacagtacaagctggctacggctgctcttcctccaccatgttgatcacggcccgcgccacctcgacgctgccgcaccctgcagcgttcacgacgcggcaccgctctccggtgacagctccgcagcggcggacgttgacgcccctgcacagctcgacctcgacggtgccgcaccagtcggcgcgcgcgggcttgcaccgggccaggcgcaccccgtcgaagcttttgacgttagcgcgccggcaccgcgtggcgcggagc

SEQ ID NO: 158468 - DNA, 302 bp, Zea mays
  Clone ID: MRT4577_76102C.1
tcctctttttttttttttttttttttttttttttttttttttttttttttttttttttttttttttttttttttttttgggaaaaaaaaataagagttttaagggccccttggggcccaagggtctgggaaacaaatcccccccaacaatgaaatccatagcttttggactacttgggaacaacggcggcggtagcggcaacactccgggggggggaaccggggaaaaaaactttttttcggggggggggggaattcccgatccccttaaccccggaaaagggtgattcgggagcacccccg

SEQ ID NO: 158469 - DNA, 321 bp, Zea mays
  Clone ID: MRT4577_76103C.1
atgtcggcgagcagcacgcccgtagacgctttgggggagccgatcccgacgtcgtcggtgctgatggcagcgtcgaagcacatcgcagtccggtgccgcccggagaacgtcgccttcctcaactgcaagaagaaggaccctaatcctgagaagtgcctcgagaagggtcgccaggtcacaagctgcgtccttagcctgcttcggtacgttagcgaagcggtttgtgaggttactgatgatacagttgaacagctacctggcattgcttatctgggtaaccatcagcagtatatgcaaatgctatgcagagacatgatttga

SEQ ID NO: 158470 - DNA, 531 bp, Zea mays
  Clone ID: MRT4577_76104C.1
atcgtttcatcaccgcctatgctgtcgacaacttctgagtgaaatgcagttcccgatagggctggtcagagtattaccgatccagaatgtcaacggaggaggctgttatgcgtgaggtcgcggtgaccgaggcgccagctgacgacccgcctgcccaagaggccgaagacctccgatcggacgagtcagccccaccataataatcctcctactgagaagatactttccgcggtgaaaaaaccggcgcggcaccctccctacactgagatgtttgtatcaaggattcctgcacctctttgcttcgacgggaacgagctcggcggccatgggctagtacatccagaggaagtatggtggagagatcctcaccaacttccgtaagcagatcactgtgcatgtgtacaatctcgctgacgccggtaatctgactatggtgaataactccttcaagctggctgtctctgacgccaagcccgatgccgccatagcccgatgctcccgaggatgaggacaagtccacgtcctctgccg

SEQ ID NO: 158471 - DNA, 519 bp, Zea mays
  unsure (1)..(519): unsure at all n locations
  Clone ID: MRT4577_76105C.1
acanaaaacgctactaaagagctgaataggccatcatatataactatacatatgatgacacaatagacattgacacaactcagaaggccatacgaaaaaccaagtgacaactttcacttctggaggatctgatggccataaatttgccgacgcgaaaaggaccttgaacgaaccttatacgtggcgattcaatatgtatctgatcggccctcaccttagttagggggcatggtataaacgctggctgtttccttatcgagcaaccatctcacactggagctattgatattacttctagtgtgcactgccaccatgcaacaaatataaggattttaaactgccaatactcactaaatcttaaaatgaacaaacgataatggagtaaaacaaatcgaacgcgttacacactgcgttgctagtttcagaatatacaagcttacttactacagcagttaggaaccgaaacacataattctaccaaagttggaaatggtacagaactctcaataacatcaggta

SEQ ID NO: 158472 - DNA, 153 bp, Zea mays
  Clone ID: MRT4577_76106C.1
acctctagggggggcaggaagtgcttccacacaaacaggatcatccactgcccacgaccatgcctctgtccagagcaacattgtccacttcggatgcaaacggcctgtgtgagggcccctacacaaccgcccggtctctctgggatcgcccgt

SEQ ID NO: 158473 - DNA, 149 bp, Zea mays
  Clone ID: MRT4577_76107C.1
caataaggtaaggggtgacgagaattggtcgaaccagggttaccaatgacgctattgagtaccgccacgaggacaggcgcgagctgtcagcgtctggcgacaagaagctgagcaactacaattttccgaggtcaactggtcaaccttat

SEQ ID NO: 158474 - DNA, 724 bp, Zea mays
  Clone ID: MRT4577_76108C.1
agattgaatccagtacatgagacatcatcaaaggtttcacaaagtatgagctagcagtatttagacgacacagataacaggccaaaaatttcgactcagccagaccagatgctacaaactgctctaacgaataggcagataggttatgtagagcttccttctctaggccttcctggcaatctgggactcagcctccttcttcaccggctcttccttctccgacaagatcagctcaatgtggcatgggttggacatgtaggggttgatgcgtccatgggcacggtaggtccggcgccgctgcttctgggcctggttcacttggatgtgtgaaatgtagagagcatcaacatcaagacctttcacctcagcattgctctcagcattctttagaagatccagaacgaacttagcagacttggcaggccagcgtccctgaccattgggctgacggttcttcacctgggctgtgcgtccaacaccacggcagtacctccggaaggggatggcttgcttgtgtgccaacacatcctcaaggtacctcttggccttgttgagcgacatcttcctcagggcaaacgctgtttccctagtgttcttgaaatgaacacgcaggtcccggcccatggccttggcggacttggtgggattggcgggatccgtcgagtacttcaccatggctgcggcggcgcgggagagaaggcagcggcggcggcgagagcgaggg

SEQ ID NO: 158475 - DNA, 475 bp, Zea mays
  Clone ID: MRT4577_76109C.1
cggacgcgtgggtgacgccgccgccgccgcctccgtgcctcgcctgcctcctcaccctggtgctcctcgccgccggggcggcgccaccggccggcgccatctgcgtcccgcgcaatcccggtggccacagcaagccaggagcgccggccaagcccgcgccaccgaaactgaagcccctcacgcccgcggcgccggcgccgccgaagccgacgccgatggccccgggcgccgacatcgtgcggagcctgtgcctgaagaccgactaccccgacctgtgcatgtcggccatcgcgaagcagccgcagccgcagctgccggtcgggaagcggctggacggcgccggcgtgctgcggctggccatgggcgccgtgcgcaccaaggccgtcgaggccaaggccgcggcgggcgcgctcgccaacgacccccggacgcagccgctggcgcgcggcccgctgcacgactgcgtcgagtcgtt

SEQ ID NO: 158476 - DNA, 418 bp, Zea mays
  Clone ID: MRT4577_7610C.1
cccataattcttgtcccacaaaccaccccacaccttatacaacactacctcaatatctactacaataaaaaaccaatccactttcatcataacaaatagcaaaagtccacacaccacttcttgcaaaacaactcactcaaagtcattttctaagaccacaaaataacaatttttaccattcaaacacaaacctactataactcttcttctgcctgcctcttactagctaactaggtatcccatacactaatctcggatcacatcttacgcttactctactccatctataactaaaccctctaagagccataactcagcaaaatttaatctttatcattatccaaatgcatactatttctctatatcacaacacttctcctgacgcaaagattatgtcttggtctgactttccatacca

SEQ ID NO: 158477 - DNA, 700 bp, Zea mays
  Clone ID: MRT4577_76110C.1
gccgagttcatccgctcggggcgctcggagccaggcggttatccggatggctcagagagtccgtatgagaggttgtctattatcagcaaaggcctgccatttcaagaggctgacggtgacggatcaccatcacctgaatcatctgctcggaaggatacaaacccaatcttagtatcctccaagtcgaggagagtgaggtttgtgctcccagaaaatgcgcagatcaacagccaagtgcgcaacgagctgcaagagctgactgaggcaagagaggcaggcatgtccttcatcatggggcgctcgtatatgaaggcgaaaagtgggtctagcctgatgaagcggattgccataaacttcatctatgagttcctgacgaggaatagccgaggtcccgcctacgcggctaacgtgccacatgtttccacccttgaggtaggaatggtctgccaagtctgatagatatgatatcactgttgccatgtcacgttgtatagaggtaaaaatagttcttatacctgtacacacacacatatatatcctaactaacaaaagggttagattgtgttgatgaagcggggcatgcatcattgtggcctgcgagtgcagatgttggatagacaaagtgtgcatagttttgtgttttctctataatatattcttttgtgttaggctcaagaaaaaaaaaaaaaaaaaagcggcc

SEQ ID NO: 158478 - DNA, 394 bp, Zea mays
  Clone ID: MRT4577_76111C.1
agtgtatatgtatccacctaacatgcgggagggtggcaccaaaaaggtagtgggtagtgccacctaaattgagttcattctgctgggtttacaactgatgggagttgcaccaccctgcatggacccaccttaatcgccttgagccacatccgactggttccatctgacgacatccagaggaagcacgctccgatcgaccttgcgatccactgcgcagacttgctggtacatgacacgcgtcatttatggttgcttctagcactatgatgagcgtggctgctacatgatatgaacgttcactggtgcttgacgctattattctgtactttagataagtcactacttctctcacacagtatgcccggttcgaccaccaacgtacgaatatgatgtt

SEQ ID NO: 158479 - DNA, 740 bp, Zea mays
  Clone ID: MRT4577_76112C.1
ggaggctctgccgttggtgattgcacagtacccatctatactcgggctgccactgaaagcgaagctagcggcacaacagtacttcttcaccttgaagctccagatcgacccagatgggttcgcacgtgcgattgagaagttgccacagcttgtaagcttaaatcagaatgtgatcttgaagcctgtggagttcctccgtggacgagggatctccaatgaggatgttgctcggatggtggtccgctgtcctcagattctactgctgcggatcgagctcatgaagaacagtttgtacttcttcaagagtgagatgaagagaccaatgagtgaattgttagaatacccagaatattttacttacagcttggagtcaagaatcaagcctaggtatatgagagttacaagtcgggggattaagtgtagcttggattggttcttgaactgcagtgatatgaggtttgaggacaggatgcaaggggattttatagaaggggatgcaccaggtccttcgtttacgatgggtgggaagcttcagatgccaggcagccagctagtgtcagatgatgacgaggatactgatgatgaggtgctatataggaggacggtcatgatctaatttggtggaagataatcccaatggtctttcatgacatgtttccctgcagtatcatataaacaagtgataagacaccagaatatgattgatgagtgttctcttggcaccagccgcagtagtttga

SEQ ID NO: 158480 - DNA, 154 bp, Zea mays
  Clone ID: MRT4577_76113C.1
cagcccatcacatggtatcctcacctccgtatgctcggcttcagctcgagggacgaatctggtgagcgtatcattgctggagctggtaagcttcaccttgagatttgcctgacggatctgcacgaggacttcatcggaggtgctgcaattattg

SEQ ID NO: 158481 - DNA, 505 bp, Zea mays
  Clone ID: MRT4577_76114C.1
actgcacaatgcggcgtcgcgtccacatcgctccctccccagctctactctcctcctccagtactccagaccgcacccctcctgatacgtcgcctcccgtcattaagaccaagaccagacgagaggattagactacgcagccgtcttaacatgagacataggtaagggcgactgacctggtgccccctgcatcgtctgatcctgaagatgtgtggcagcaacacctcctgccgaggccggagcgggcgctcggtgcaagcacacaggaggaagggtgggccacatcgtctcttgatcctgagctgcggcgccagcaccgtgtgtgcctactgcttccgtggccgtaaacattttgggacctcccactatctttgatgcagttgaagctcaaagaagaagttctgcgctcaaagaggtccgggctcctttccccagagtctacctcatgacgcatctacgacctgacggttaatcttacgctgtccatgatgaataacgagcaagt

SEQ ID NO: 158482 - DNA, 496 bp, Zea mays
  Clone ID: MRT4577_76115C.1
gccggccggggagctcaatcgaaacaccttatctcatggtcaccgattcatctctaacaaatggaaatcccgtctcaccggcgaccggatgtctcgatcgtctatgacaggctcacgacgatcttgtcgtcggagggacggctctaccacgcgccgtacggagtgcaggggatacgtcacacgtcgatctcacaccctccgaagatcctagacggctcgcatgcgcgtagggcctgtgtcgaagcagcaataaggggacttatctgctactccacacctggcgatcctcgcgatatgatgcaagagatctattcccaactgccttgcgtagagccagcaatcatgtcctatgacagcctccgccttgagagcgtccgactcgactgatgagcgcatactcgatctcttaacagatcccatgcctcaggctagaatgtctgttcgccctgctgcgacgctgcctggttgacacccagattagctgcgctccgcctct

SEQ ID NO: 158483 - DNA, 300 bp, Zea mays
  Clone ID: MRT4577_76116C.1
ttccgaggccaagcccaactgcaaaacgtcggatcaccggtgggcctagtaagcaaacatatgggccggattgaggatgcatcatcgttatcatcatctattctattctaattctattcagattgaagaggcacagatagatcgataacggcaggggagagtagtggagtggagctgctgccaatggccgtagtcgtcctccagctcttcgtatatttccatccatacatcgctgctcctcatcactatagccgtcttctgtccttacttgtacacactggagctcacagattcgttcat

SEQ ID NO: 158484 - DNA, 353 bp, Zea mays
  unsure (1)..(353): unsure at all n locations
  Clone ID: MRT4577_76117C.1
gacctttagcgcggcagaacaaatgggggggaaaagcctgcctacggacccttcttctatcccttccgtgccctatccaacaactccacccaatgctacccacacacctcgcttttatcttaaattcagcccctcacaacgataaaaacttcaacctcaattccatctctatctntccacctggacctctgagctaatggtgtctgatagggtggattctgtctactttaacgggaagcttggcccggcagtgccatgctacgtccccgtctcccgcgatgccgactgtctggcttgtttgatcagaattgctgacttgatcaatgccaacactaaggtgctcaaagctgatt

SEQ ID NO: 158485 - DNA, 144 bp, Zea mays
  Clone ID: MRT4577_76118C.1
cttaggttcgtcgtgcgatagctatggtattctattttatagggcctgtcctttctttttttgttcttacaaaacattcctaatgggggcaggaccgagactcactcgatagagcacatacaactaagccgtcttagttccggc

SEQ ID NO: 158486 - DNA, 364 bp, Zea mays
  Clone ID: MRT4577_76119C.1
gcctcattcatctccattccaaacactcttatattttcactctgccttcgcggcgaggcgatatcgatggagtgagggcgatcacgaagagcaccgcgcgcaagtccacgtggcaggtaaggtcccgaggaagcagctggcaaccaatgcggtgcgcaagtcgtcccctgctgaccggtggcgtgaagaagccgcaccggttccgcccgggcaccgaggcgctgcacgagatcctcaagtaccagaagagcacggagcttctcattcgcaagctgcccttccaacgcctggtccgcgagatcgcgcaggacttcaagaccgacctccgttttcagtccttcgtcgtcgcctgtgctgaaggagg

SEQ ID NO: 158487 - DNA, 169 bp, Zea mays
  Clone ID: MRT4577_7611C.1
gcccatccgcattccaaagcagagaagtgtgtggcttacctgcgtacacttcagtttgattgagtgtaggtgttgctcgcgcattagaccgtctcaacaagagttttatcagagtttggtggcattaaatatgttgatatggtatggaataaacgataagagatgatga

SEQ ID NO: 158488 - DNA, 561 bp, Zea mays
  Clone ID: MRT4577_76120C.1
tttttttttttttttttcccgataatatccatcccatctattcaccgaattaattagtaggagtagcgagccagagtactattaccaaattgattagaaatccgtggaagcagcaacaacaattggctcaggcccttcaccaaatacttgtcgagcagaggttgacgggatcgcggatgaaaagcgacaacgatctccgggttcaagccattcgtcgagcaccggcggcggtcgatggcgagcacatgaacagcgatgacttcctggttcgagctgccgggccaagctcagcagggagcagggactagacgatggcgtgctgatgaaggtgatagtggtcgccgaagttgaagagtgacggacccgatgagaccgcggttacaggcaaattcgacgacattttaaaatatggcgagcccaacaagccccacaacgagctgagagcagcgctcgacgacctggtggaataggattttgtcgcgaccagagggaataaggatggtgcagcgtaggagaggcgaactatcagcgacgatggtgtgtcaaggctacacagatcga

SEQ ID NO: 158489 - DNA, 668 bp, Zea mays
  Clone ID: MRT4577_76121C.1
aatgccatgcgcgcgctactgcatctgtggctcatacattgtgcagagccagagcaccccgtgttccccctactgccgcaagggcggctcgcggattgcttactgcggcgcggtgacaaggcacctgtatgcgacgagcgagagcgagtagcaccgcgcagcctgcagaatggcgctatggcgtcccagcaggcgctgcgagctcatcagcatgaggagcaggcgttcccggctgaacatcaagagtcccagccggctaaggaggacgcggatggaccacccgcgtccgagggcatcagtccaggatctacaaggccggcaacaagcttaaggacaaggaggcgctcgagaccggcggacactaccacatcgggcgcgccgtgtgcctgtactttacgaacgagggcgggacggcggccttcaccttcaagagggggcaggaggagaaggactgcggctgagacgctgcgtgcgctgcgcgacatacactccgacacggtcgcgcgcgagccgatggccctggccggcgacctcggctacgaggccaactgccgacaggaggaggagcggatggcgtcggcctacggtggccgcatcgacgtgaaggagaacaccgcgctggagcacaacgaccggaagagcatcgaggacaagatggaggctgacct

SEQ ID NO: 158490 - DNA, 285 bp, Zea mays
  Clone ID: MRT4577_76122C.1
ccttcttttttttttgggtgggttttattacagtggcgcgccgtctgttatataaatagacccattacttggccacaccttatcgtatcggtaacagacttaaactgtgattgagcacagatgggaaccgccgtgtgctacctggcgttatacatactttattaattatgacgttgattgttacgccctttttttatcagaacaactcggtgatctatcctgcgcagcgaaccgcctattgcctttttggcggcactggacggcttgtaatctataccctaaatg

SEQ ID NO: 158491 - DNA, 545 bp, Zea mays
  Clone ID: MRT4577_76123C.1
gggaaaggagaaagacagcgctctttgtcactcgctcgtctgcaacaagctaagtgtacagtggggttgcggggggattgcaagagagagagagacagtgtgtgtgtgatcgacccatggagctcttcccctcccagccggacctctccctccagatcggcctccccgccagcgccacgccgcacgaccaccaccacggcgccgccctcagcgccaggttcctcgcggcagccgcaagcggcggtggcaacgggatccctggcaacccggcggtggccatggcgccgtcgctgcagctgcccatgccgatgccgctgccaatgccgatgccgatgccccccaacgccgccgccgccgcgggggccgccggcggcctttactaccaccccgacgccgccgccatgctgcggcccatacgcggtgtgccgctgtaccagcacccgcacacgcacgcggtgccgccgacgttcccgccgcacgcggcggaggcggcgggcccgtgcttctgcgagccttgccacgtcaccgcgggcgcctggcgccgc

SEQ ID NO: 158492 - DNA, 1028 bp, Zea mays
  Clone ID: MRT4577_76124C.1
ggatcatcatggaatgaaggcaacaaaaacggtgaatcaggtgggggaaggtctggggaaccatggaacagaagggattttgatggcggcagaggaagaggtcgctttgggcgaggtgaccgcaatcaaggcaacaacttggggtcaggagatggtggcagctggggctctggcaggggaaatggtggtggccacgcgtccgcggacgcgtggggtggttacaggaactggaacgataacaacgaaagaaggcccttcggtcaaggtggtggctggtctcagtcttccgactggaatgccaacaaaggaagtggcgaaggaaatcaagctttctcgaagagcaagcccagctgggacgcgcagaacgcctctggtggagatgaccaggcaggaaagaagagtgacacagacaactcctggagccagaaccgatcatctccatctatcctgggtcagccaagcggtgatgctaataacaagtctagcgcttgggacggcgctcccaacggaggagctggcaggggaggttcaggttcttggggaaagagcgacgaggatggctggaactcgtcgtcgggaggatcagccagagagaagccttcgtggggtggtggggcagaagctcctcccaggaaggaggacgacggcgcatggggcaaaggcggcgaggggagccggagcctaggaggaggaggagagggtggtagcagcagttcctgggataaaccggcagatggtgcatggagcggcaacaacaagggtggcagtggcagtggtgggtggtaactggtaagcttgcgacttattggcgctgactgcatgtaaatattgtgcccgcgctgtgtgaactgttctggtgcgtgtctagttcgtatcagttacttggccatgcgtactctaaactaaaataaaacatggcttgtgactgtgactagttaaatgtagcctgttgctgacagtaattaggtgccttaactttcagaaaaaaaaaaaaaaaaaaaagggcgccgctcgcgatctagaactag

SEQ ID NO: 158493 - DNA, 439 bp, Zea mays
  Clone ID: MRT4577_76125C.1
gaaaggataaacgaactggatggttatataataactattgcagagcctgctatctagtgcgcatacaacattgcatgagatggcttgacatagtacagtgaacaatgacggaagacagatagcgtagcatactaagcgtcagtaatcaagttgatccggtcttaagtgcgtaatctaataccggatcagtcctgctcgttatattggctaccgactgccaggacctaatttctgtgggcactacaggtcgcaattagtgcgccaaacgctacggcacgtcacaattgcgcatgctactggggatcatcaaatgcacgaggcacagttttgggcaggtcgcggaagttcacaatttaaaacatttaacggtaacttgtcctctacagactttcgaggttccacacgtaattccagaaaccgtaaaccccggctagtgtca

SEQ ID NO: 158494 - DNA, 1627 bp, Zea mays
  Clone ID: MRT4577_76126C.1
cattgggtacctcgaggccggccgggcaaagactgatgggtcttcaaaagtacgtcttttcctcaagaagttggcgaagaaggcatctacgaaggctgccttagagagcaaaacaagttcaggaatgtcagtgcaaggtgaaaaaaagatacttgataaattgcgcagctatcagggtgcgccatttattgaagcattaataggtccacaagaggacaagcttggtggcaattcatcgcaagatactgtaaaagccactgccccgcctgttgcattgaatcaaattggacagctttcaacttcacctgatgtgaatgcggatgaccgagttgcgggtgaaggcacactttgttggaacctcctgtcatcacggttgtttttcgatgctaaaatgagtgatgagataaacaaggccatcaaagcacgcattcagaggactttgtcaaatatgaggacccccacctacgtgggtgaaattacacttacggactttagccttggagaacttccaccttatgtgcatgcgatgagagtccttccgctggatcttaatgaattatgggcctttgaagttgactttgagtattcgggtgggatactgctgcacattgaaacaaggcttgaggttcaggaaccagagttgcaaaaggacatcatgaaaagtaattttgggcagatgctaatggagatgttgattctgatcttcttgagagtattgaacagtatggtaaccaatttaaaggctcgcacaattcagcttcttcaattggggagaatgatgaagcagatgcttcaagtcagtcaaagagcattggatggacttcagcatatatatcaagatggaaaactatcctgcactcaatagccgaccatgtctcacaggttcctctttctctggcaataaggatttcatctgttcgaggtatcttacggatacaaatgaagccccctccttctgatcaaatttggtatggatttacgtcaatgcctgatctagaatgggatttggaatcttctgttggggataggaaaatcaccaacagtcatatcgctgcacttattggtaacagattcaaggcttcgcttcgagatagcttagtgcttccgaattgtgaaagcatctccatgccgtggatgttggctgaaaaggatgattgggtacctcgcaaggatgctccttttatttggctaaatcatgagcccactgagatgagaatccatgccacagctacagcatcaactcagtccgaggaaggtggcttgaaggatggtgggagtgaggaatcatcgagagtagtggcatccattgacgaggcaaacaagagcccaaggcagaggcatcattgcacggtcagtcttcatctgctccaggcagcgaatctgcccacagcgatgcaaatgatgagctgaggaaaccgctgttgatcacagagaaactccaggaagaagcttcagaaggtatagccatgtctcccatgtccacatctcggagggcggtgataccagcaggggagcagccgcaggtgttagcatcacccattggagaggacgcgaagcgaaaaagcgggaggcgagctcggatgatggatctcgggaagaggatgggggacaagcttgaggagaagag

SEQ ID NO: 158495 - DNA, 718 bp, Zea mays
  Clone ID: MRT4577_76127C.1
aattcggcacgaggggtggctggtctcagtcctccgactggaatggcaacaaaggaagtggaagtggcgaaggaaatcaagctttctcgaaaagcaagcccagctgggaatcgcaaaacacctctggtggagatgaccaggcaggaaagaagagtgacacagacaactcctggagccagaaccgatcatctccatctatcctgggtcagccaagcggtgatgctaataacaagtctagcgcttgggacggcgctcccagcggaggagctggcaggggaggttcaggttcttggggaaagagcgacgaggatggctggaactcctcccaggaaggttcaggttcttggggtggtggggcagaagctcctcccaggaaggagggcgacggcgcatggggcaaaggtggcgaggggagccggagcctaggaggaggagggggtggtagcagcagttcctcggataaaccggcagatggtccatggagcggcaacaacaagggtggcagtggcagtggtgggtggtaactggtaagcttgcgccttattggcgctgactgcatgtaaatattgtgcccgcgctgtgtgaactgttctggtgcgtgtctagttcgtatcagttacttggccatgcgtactctaaactaaaataaaacatggcttgtgactgtgactagttatatgtagcctgttgctgacagtaattaggcgccttaactttc

SEQ ID NO: 158496 - DNA, 1601 bp, Zea mays
  Clone ID: MRT4577_76128C.1
cattcggcacaaagcgcagcagcccgccagagagacaagcagccaaatcaggcctttatttacgatccggccggccggaatctagaccacctctctctctctctcctcgtacgtagtcgttgagtctttgaggtcgaatggcgcccgtctacgctgccgcggaccacggcaccaacggcggctccggcctgaccctgaacccggtggcggcgcgccgggcgctcagcctcgtcggcgcgcccacgccgtcgtcgtccacgccgccggcgtacgggagcatcgtcaccgtgctcagcatcgacggcggtggcgtgcgcgggatcatcccgggcaccatcctcgccttcctcgaggagaagctgcaggagtacgacgagcggccggacgcgcggctcgccgactacttcgacgtgatcgccgggaccagcaccggcgggctggtcaccgccatgctcacgggcaagaacaaggacggccgcccgctcttcgccgccaaggacatcaacggcttctacctcgaccactgccccaggatcttcccgcccggcggcggcggcggcggtcctctgggcctgctcaagaagctgtcggggcccaagtacgacggcaagtacctccacgccctcgtccgggacctcctcggcgagaccagggtcagccaggcgctgcagaacatcgtcatccccaccttcgacatcaagctcttgcagcccaccgtcttctccaaatacgatgccatcaccgatgtttccaaggacgccctgctgtcggacgtgtgcatcagcacgtccgccgcgccgacctacctcccagggcaccagttccagaccacggacaaggacggcaaggcccgtgccttcaacctcatcgacggaggcgtcgcagcgaacaacccgacgctgctggcgatgacggacgtgagcaagcagatcctgctgggcaacccggacttcttcccgatcaagccggcggactacggcaggttcatggtgctgtcgctgggcacaggctccgccaaggccgaggagaagttcgacgccgtgcagtccggcaagtggggcctcctggggtggctcagcagcaaggacaccacgccgatcatcgacagcttcagccaggccagcgccgacctcgtcgacatccacgcctccgtgctcttccaggcgctgcactcggagaggcagtacctccggatccaggacgacgagctcacgcgacagacgtcgtccgtcgacgtgtccaccgcggagaacctcaaccgcctcgtcgacgtcggcagggggctgctgaagaagccggcgtgcaaggtgaacatcgagacgggcaagaacgagcccgacggcaagagaggcaccaacgaggatgaactcgtccgcttcgccaagatgctcgtacgggagcgccgggcaaggatccagaaaaaagaagccagcaacacactctagacagagctagctagcactagcagagacaccaatgcaacacaaagtgtctactacatcatagcctaattaagcctcatgtgttctacaatcagtcatgcatgttatgtgtatccacttcaatagttctttcaaagtgtctaccccctttcgtgctgc

SEQ ID NO: 158497 - DNA, 462 bp, Zea mays
  Clone ID: MRT4577_76129C.1
cggacgcgtgggtcttttctcatctatttccgcttcactctgattactcttaccttttcactctaaagacaaaagtggatttcacactttgaaatcctgtgcttaaagtgacctgtaggaataggagacctactcataggaacaaaaacaaaactatttttgtaggtatatataggtacttgaatgattgttcttatgacacttgtctgatttgattctttgattgagtgtgatgggttgtggagtaatgtccacaatcacatctgcatatacatatagaaaaaaaacggttataaaaatatctaaatgaactaggttatccctcatcaaagaatctagcctagcaaaatccatcttatcttgaaaaggtctatcctacattcatagatccatcttatcctaaaaaaaatagattctcatcttatcttgaaaagaattatcttatcctaatagatctatctg

SEQ ID NO: 158498 - DNA, 225 bp, Zea mays
  Clone ID: MRT4577_7612C.1
tttttttggtgttttttatttttttatttttttttgggaaggaacagggtcacatttaaaatcttatgaaacgacaagctgcagctggggataaacaggttatcaccgaaaaacagaacggcccgcataattacaatatccccatagctaaggatcacaaagattccttcttcgaagacataccctttcccgagtaaattagaatcgaaagcctaagaggtgggg

SEQ ID NO: 158499 - DNA, 692 bp, Zea mays
  unsure (1)..(692): unsure at all n locations
  Clone ID: MRT4577_76130C.1
agtacgtcaagggcgacgacggggcgcaccgtcatcaaggtcacgcccgagttcctcgtcggggccatcacggcgncggacaccaaggaagccggcgaggcgtgcgccggcggggcgctgtgcagcacgcccgagctgcggaagcactacgagcagctggtgggcgccgccaggggccgcgcgtggtcgccgcgcctcgacaccatcaaggagcgcaagggcaggagggccctcgccctcgccgcggtcgtcagccccggcaggctgtcgccggtggccgtcaccaggctcctcggcctggacgccgccaaagcagaaaccaccacagatagcgatcgatctctgatccagcgctagctcaactgcatgcgcatgcaaaagggacctgatctcggatggaaatgcatggatcggaggaagcaatcgattcttggatgtctctatctggatcgatagacgataatccagtccagtcgagtgcgcgcgcgtagaaccgggttagtttctgtaattactcctctctttcgaatcatgatgagtcgtcgttctaattttttttagatttctactatatacgtaaaaagatcttatctagaaaagaaaagttagaacgtgttaccatcagcgaacgaagagagtattatgtgtaaatcttgtatttgtttgtacagtaagagaaaattgaactttgt

SEQ ID NO: 158500 - DNA, 219 bp, Zea mays
  Clone ID: MRT4577_76131C.1
aagactccttgtcaaacgcttttggatattaaaaaaacaaaatcaaacactaagggaaggtatatttatcaatgttccatgaattacataaaacttcatttaataaaaatagacaatcattcacaacttttattaactaatttatatcagaagttctttttctaatatctctagatataaaatcatcatggttaaaatattttgttttcaatttaaaac

SEQ ID NO: 158501 - DNA, 567 bp, Zea mays
  Clone ID: MRT4577_76132C.1
gccgtcttaatagcccagcgtgtaagtgcgattgtgccatcccgtgactcttccgtggctagggtttcgtggtgattggtgagagcagctgagagaggcagcaggccacggcgatcgcggcgccatgccccacgcggacacgcccacgcccacgcagacgcggcagctagcgctagcgagcgacgcaggtagggggcagtggaggaggcgtcatgtgcgctacgcggcaagcaagcgagcggcgcggcggccgacggctacgcgtgggtaggggcgctgggcgcaggaggcgccatgccgcgtgcgcgctgggcgtaggctgcaggctgcagtggccagaccgctaggggctgcttgcttgattcctagggtggcagagggcgatgtgccgtggaattggatcctctctgtctctgttgaagtgctgacttggtgttggtgactggtgagtctctcttttcccttccctgagttgagtgagttcatactctgtggtgcttaattgagttagcaacccaaacaattgatgattgatcgttgagttgaagataaaaaaaaaacaaccac

SEQ ID NO: 158502 - DNA, 223 bp, Zea mays
  Clone ID: MRT4577_76133C.1
caaatcaacttaatccatattatacgagtgtactgaatagacatgtaaatgagacaattcctgaactaatgggccaaaaactggtacctgtatcctgtccaagaattgtacaccaccccaatcaagtaatttcttcccaactcatgatagtcacaacctccaacaacccagggcctaatgaatcgcggcagcacccaaagcccaggaccgcctcagcgccaat

SEQ ID NO: 158503 - DNA, 321 bp, Zea mays
  unsure (1)..(321): unsure at all n locations
  Clone ID: MRT4577_76134C.1
agaggagacggttttttgaacagggcgactttaaaattgcagtttgattaatggagaacggggagggtacacagagagaaagttgacggtggaaggaataaggaaaaaaaaagactggtctacattgatttttttgtacagaactttccacaccaagggaaggatttttttttgacaaacattctaacataacatatttcaaccaaccaacaaaattcaatgttaatgtgagattttgtatggcccccaatttagccccaccccccgaaaaggagaaagaattagnanggccttttttttttttgtttttggattatnaaa

SEQ ID NO: 158504 - DNA, 222 bp, Zea mays
  Clone ID: MRT4577_76135C.1
ttttgacaaaacagctcttttttatgagaagcagacaacaaaggccgtgctcattcagaccattcgtgtgtatgtttcttgaagggatatatcacatatccatcacaaactggaaatagtagcgctatttttttactaggggtcatattgcatccaaacgtggaaaattaattacagacgcgatggccaatctctacccattgccaaattcactggatgaac

SEQ ID NO: 158505 - DNA, 491 bp, Zea mays
  unsure (1)..(491): unsure at all n locations
  Clone ID: MRT4577_76136C.1
cgngcggacacgngcgcaggtcggggacggggaccgcaagacatccactaccaggcaaggcgagaaggagagcagggcacctaagccccagcggctcgagacccccgcgaccctccagaggaagcgggccggaanggccgacaggacgaagaggagcgctcacaagacgggggagggggatgagtacttttttttcttgcccagaggctgagcgagctgaggctccggcggacggatagcgcccgccagaggaggggtaagctttatgcccgccgccgggggtgggctgccacctctgcctatgaatgatctgcgcgtcctcattggagggtggcctagtccgggacgggttatacgttcagtatgctggcctggatgagcgcgctgtgccgaccatctcttacttcggtggtgacggtgtgcgggagctgttcctggccctgcccttggattcctgggacggtttgcacccctgcgccttcgcctgggac

SEQ ID NO: 158506 - DNA, 353 bp, Zea mays
  Clone ID: MRT4577_76137C.1
tccacgttccggagctcatgcccgtctcaatgcttgtacgcgtgctcaggtcgttggatgtgttactactagtgcaccggtgccgtaggtcagacgtagcgctctttgctggaccccaagatcgttccgttcggacttgtctcctactaagtatcttgagagtgcatccccaaggatacgacccagggaatgaaaggccctccaggtcaccgtcaaattcaccgttcacaacgcgtcaagacaaggatatctcgtggtcccctccgtcgtgctactcgtcatgaaggtcttccaggatgcacagagggacacgtgtgaacgtcaagaacatcacgcacagtgtggaacataat

SEQ ID NO: 158507 - DNA, 2664 bp, Zea mays
  Clone ID: MRT4577_76138C.1
atgtcgggagaacatgccaagagggagatggtcaccggcgaaaagcccgaaggctcgggaagtaagaacgatggacgaactccatcaagggaggctgacgacaagcacaaggaggaatccgcttcctccatcaagtcacataggaagggtgacaagaagaaaaagaaaatgaagaaggtggtctactacgatatcgactcttcatcaccttccacatccggcgtcaagtctactacttcgaagcgccaagagcgtaagaagtattgtaagatgcctctacgctatccttgcagtccaaaacacgctcctttactttccgtacccctagacaaaccaccatattttgatggtgaagattattgtatgtggagtgataaaatgaggcaccatctaacctcactccacgaaagcatatgggatattgttgagtttggagcgcaggcaccacagatgtcccacgaggaggtaattggcaagtttgtgaggtttgaacttatgatcaaagattccaaacacattgtcaacttggagcaaggcgccacctccacacccgagatgcaacccgttgcattcaaagcaacagaagagaagaaggaagagtctacaccaagtagactcccaatcgacgcctccaagctcgacaacaaggagatggctcttatcatgaagagcttttgctccaccgactcctcctcggacgaggacgccgccaacatcgccgacaacaagggtatcctcttccccaacatcggccacaaatacctcatggctaaggacgacaaaaagaaggaccaaaagaaaaagataaatgaattaatagaaaccattaacgagaaggatgatatcttagaaagccaagaggacttgctcgttaaagaaaataaaaaatttgttaagttgaaaaatgcttatgctctagaggtttatgcatccggcggatcaagttggataatcgatagcgggtgcacaaaccacatgacaggtagaaaaggatgttctcctcatatgagaaaaatgaagatccccaaagagcgattacattcggggatggaaatcaaggaaaaatctcaaacccaagagaccttgaagagattcttaagacgggctcaaaatgagtttggattgagaataaaaaagattagaagcgacaatggaacggagttcaagaattcacaaactgaaggatttcttgaggaggagggcatcaagcatgagttctcttctccctacacacctcaacaaaggagaggtagagattctaaatttgctcctaaagtagtagaatgctttttacttggttatgactcaagagcatatagagttttcaacaagtccactggattagttgaagtttcttgtgatattgtgtttgatgagactaatggctcccaagtggagcaagttgatcttgatgaactagatgatgaagaggctccgtgcgtcacactaaggaacatgtccattggggatgtgtgtccaaaagaatctgaagagcctccacaagcacaagatcaaccaccatcttccatacaagcatcttcaccaactcaagatgaagaaatggctgaagaagacgaggatcaagatcaagacgatgagccacctcacgagcaggacattgatcaaggtggagatgaagacgagcaagacaaggaagatgatcaagagatttgggatcaaagaccgccacaccaagagtccaccaagcaattcaaagagatcacctcgtcaactccatacttggtggcattcacaaggggtaccaagtgggtattccgtaacaaacaagatgagcatggtgtggtgactaggaacaaagctcgacttattgccaaaggatattcacaagtcgaagatttggatttcgatgaaacctatgcaccaatagctaggcttgagtcaattcatatattacttgcctatgctacttaccatgactttaagttatatcaaatggacatgaagagtgccttcctcaatggccctataaaggaagaggtgtatgttgagcaacctcccagctttgaagatagtgagtatccttctcatgtttataagctctcaaaggcgctttatgggcacaaacaagccccaaaagcatggtatgaatgcctgagagactttcttatcactaatggcttcaaagctggtaaagctgaccctactctcttcactaaagtaattgctaaagacttgtttatatgcctaatctatgttgatgatattatatttgggtctactaacaagtcatcttgtgaagagtttagtaggataatgattcaaaaattcgagatgtctatgatgggggagttgaagtattttcttggattgcaaatcaagcaactccaagagggcaccttcatctgccaaactaagtacattcaagacgtacttaagaagtttggaatgaagaatgtcaaacccatcaagacacccatgggaacaaatgggcatctcgaccttgacatgggaggtaaaaccgtagatcaaaaggtataccggtcgatgataggatctttactctattcatgtgcttcacgaccagatattatgctttctgtatgcatgtgttcaaggttccaggcaaatcttaaggaagttcaccttagggccatgaaaagaatcatgagatatttagtttacactcttaagtttaggctatga

SEQ ID NO: 158508 - DNA, 377 bp, Zea mays
  unsure (1)..(377): unsure at all n locations
  Clone ID: MRT4577_76139C.1
atgcacttactatttccctttttgattttcgatttgaagatnatcctatgataagttcaccattctgtctgttaaggtcaacctcacatccaccatataatggaggttcgccttggtttgtccaatgaacctatctgtcctagcttcaattgaggctttaatgtaattctaatacatattcacctctcaatccagtacttcattcaatagaccatattatgattgtgaaatatgaaaactggttaccctcatctacccaattttatcctttaatcaacgctttatttaatatttttcaaatctgaacctttcttgtttccttgccactacgattccatggtaacgaccaaatttatatattgtttaaaaattataaa

SEQ ID NO: 158509 - DNA, 334 bp, Zea mays
  Clone ID: MRT4577_7613C.1
ggctccttcaaataagtaagctttcttatagatttcccaggtttgaacctataacataacttaccatgacaggccacatttcaaaacttaagctgcaattataaaaaattaggaaaaaagttttatctaccaaggcatatagaaaggtcccaggaaaacataatcatggtaggaatgatgaagcaccccccccctttccccctttgattttatcagggactttgttcttgctgatgggtttattcaagttgctgtgcatcaatgccataaacttagcattcaccttcgtattttgaaggaaattgaattgttagtgaaacatcatgattcattt

SEQ ID NO: 158510 - DNA, 272 bp, Zea mays
  Clone ID: MRT4577_76140C.1
ctgctcaagtcactccctccgccatctaaagcgaatccagctctgtagaagcctacaactcaaaaggatttccttcattctacagacagcaaacccagccattcttaaattaccgatgatgagtctaggagtacactctctcttcatagcagaaatcagaaggctgtacgtgcaatctattgtattgactaggagcacgcatttaataatacacctggaaatgtcttgcacgatgtaatgcgaaaacaagctaggcaagctcctgaggaaat

SEQ ID NO: 158511 - DNA, 1959 bp, Zea mays
  Clone ID: MRT4577_76141C.1
atgtctctacgctatcctcgcattccaaaatgcgctcctctactttccgtacccctaggcaaaccaccatattttgatggtgaagattattgtatgtggagtgataaaatgaggcaccatttaatctcactccgtgaaagcatatgggatattgttgagtttggagcgcagacatcgcaagtgggcgacgaagactacaactccgatgaagccacccaaataaggcattttaattcccaagcaacctctatactcctcgcttccttgtgtcgagaggagtataacaaggtgcaatggttgaaaaatgccaaagaaatttgggacgtcctcaaaacggcgcatgaaggggacgaggtgaccaaaatcaccaagcgtgaaacgattgagggagagctcggtcgattcgtcctcaacaaaggagaggagccacaagcaatgtacaaccggctcaaaacaatggtcaaccaagtgcacaacctcaggagcactaattgggatgaccatgagatggtcaagatgtctcctgaggaggtaattggcaggtttgtgagctttgaacttatgatcaaagactccaaacacattgtcaacttggagcaaggcgtcacctccacacccgaggtgcaacccattgcattcaaagcaatagaagaaaagaaggaagagtctacaccaagtagactcccaatcgacgcctctaagctcgacaatgaggagatggttcttatcatcaagagctttcggcaaatcctgaaacaaagaaaggggaaggattacaaaccccgctccaagaggaaagggaagaagaagatggagaataaaggatactacaagaagaagggtggcgaggcacacatggggcgggaatgggactccgacgagagctccactgactcctcctccgacgaggacgccgtcaacaagggccttctctttcccaacgtcgaccacaaatgcctcatggctaaggacagcaaaaagaagaagatacattctagggatacccccaaatatactacatccgatgatgagggtagctctagtgatgataatgaaaaatttaaatttgctcgtagcatgctttataatgggagacaccctgacattaaggatggcattggtttccaacaagagagccaaagcaacatcaagcataatgccccaagaacagactctctaattttgttaagggtttatgcatccggcgggtcaagttggataatcgatagcgggtgcacaaaccgcatgacaggggaaaggatgttctactcatatgagaaaaatgatgatccccaaagagcaatcacatttgaggatggaaatcaaggtttggtcaaagcaactcaagatgaggaaatggctcaagaagaagaggatgaagaccaagacgatgagccacctcaagatgaggacattgatcaatggggagatgaagatgatcaagacaaggaagataatcaagagattcaggatcaaagaccaccacacccaaaagtccaccaagaatttcagagagatcaccccatcaactccatacttggtgacatccacaagggggtaaccactagatctcgagttgctcatttctgtgaacattactcttttgtgtcttctattgaaccatacatgatagaggatgcacttaaagatctggactgggtggtggcaatgcaagaggagctcaacaacttcacaaggaatgagttgtatcaaatggacgtgaagagtgccttcctcaatggcgctatcaaggaagaggtacatgttgagcaaccacccagctttgaagacaaaaagtcatcttgtgaagagtttaataggattatgatacaaaaattcgagatgtctatgatgggggagttgaagtatttccttggatttcaaatcaagcaactccaagagggaccttcatctaccatactaagtacattcaagacatactcaagaagtttggaataa

SEQ ID NO: 158512 - DNA, 996 bp, Zea mays
  Clone ID: MRT4577_76142C.1
atgtcaggagaacacaccaagagggagatggtcaccagcgaaaagcccgaaggctcgggaaagaagaacgatgaacggactccgtcaagggaggccgacaacaagcacaaggaggaatccgcttcctccatcaagtcacataggaagggtgacaagaagaaaaagaaaatgaagaaggtggtctactatgagactgactcttcatcaccttccacatccgacgccgagtctatcacttcgaagcgccaagagcgcaagaagtatagtaagatgcctctacgctatcctcgcattcctaaacgtgctcctttacttttcgtacccctaggcaaaccaccatattttgatggtgaggattattgtatgtggagtgataaaatgaggcactatctaacctcactccatgaaagcatatgggatattgttgactttggagctcaccacagtcgagaggagtataataaggtgcatgggttgaaaaatgccaaagaaatttgggatgtcctcaaaacggcgcatgaaggggacgaagtgaccaagatcaccaagtgcgaattgatcgagggagaactcagtcgattcgtcctcaacaaaggagaggagccacaagcgatgtacaaccggctcaaaacaatggacaatcaagtgcgcaaccttgggagcaccaagtgggatgaccatgaaatggtcaaggttattcttagatctcttgtttttcgtaatcccactcaattgcaactaatccgtggagatcctagatataaacagatgtctcccgatgaagtaattggcaagtttgtgagctttgaactaatgatcaaagactccaaacacattgtcaatttggagcaaggcgccacctccacacccgaggtgcaacccgttgcattcaaagcaacggaagagaaaaaggaagagtctacaccaagtagactctcaatcgacacctccaagctcgacaacgaggatatggctcttatcattaagagcttttga

SEQ ID NO: 158513 - DNA, 370 bp, Zea mays
  Clone ID: MRT4577_76143C.1
attcggctcgagcgaccacccccatctactttctcttgacccaagggggaccctatggctcaggagaggaagggggagcctcaaggcgccggatcctatgttctccagacgggcctcatgaggctaccaccatcacgccatatatcattgcaattgatacctcacatcattcaaaaagatggactggacatatttttgcatacacgaactgagaaccatgttaccatagacagtgccatcccacaacgaagcaacactcctgagacgcttggcacgggctaacccagtcacagctgtacaaacacaaacggcgggcagtccttctgattcagctgctacatatctgggggggctgtctaccttttcgcgt

SEQ ID NO: 158514 - DNA, 549 bp, Zea mays
  Clone ID: MRT4577_76144C.1
atgaagaaggtggtccactacgagactgactcttcatcaccttccacatccgacgccgagtctacaacttcgaagcgccacgagcataagaagtatatgcacgagggggacgaggtgaccaagatcaccaagcgcgagatgatcgagggagaactcggtcgattcgtcctcaacaaaggagaggagccacaagcgatgtacaaccgactcaagacaatggtcaatcaagtgcgcaacctcgggagcacaaaatgggatgaccatgaaatggtcgaggttattcttagatctcttgtttttcgtaatcccactcaagtgcaactaaaccgtggagatccaagatataaacagatgtctcgcgaggaggtaattggcaagtttgtgagctttgaacttatgatcaaagactccaaacatattgtcaacttaaagcaaggcaccacctctacactcgaggtgcaacccgttgcaatcaaagcaacggaagagaagaaggacgagtctacaccaaatagactcccaattgacgccactacaccaaaaacataa

SEQ ID NO: 158515 - DNA, 481 bp, Zea mays
  Clone ID: MRT4577_76145C.1
cccacgccacacaacagaacgaaacaatgggtttggaaaactctaggaaacacaaccaccgcccataaaaaaaaataaaaatgggggcgcattgatacacaaaaaaaaaaacccccgggaacaagcaaaaattaaattaagtgaaatggaaccaacgggaaaagacaaagaaggacaaggagggggtcttataaactgtaaaaaaatggaacgggccggaacggtccagaaaagggaggggaaaaaaggatggtacttagaggggccggggcgggtgggcccctaagaacgctttgaaaacacgcagaaaaacgttatgcgaggggaacccttacccacactaaccctgtccacaccaaaccaaaaaaaagggggagagggaaaaaaatttgaatgcccccgcattcacaagaatatcccaagtaagggcccctgagatttaataacagctgaccccacatatctgaagagtccagggggg

SEQ ID NO: 158516 - DNA, 3159 bp, Zea mays
  Clone ID: MRT4577_76146C.1
atggcgctcatcatcaagagcttcctccaaatcttcaagcaaaggagggggaaggattacaagccccgctccaagagggtgtgctaccggtgtggtaatcccggccatttcatagctaaatgttcaatttctagtgaaagtaacagggacaaagacaagaaggggaagaaggagaagaagaaatactacaagaagaagggcggcgatgcgcacatgtgccgtgaatgggactctgacgagagctccaccgactcctctgacgaggacgccgccaacatcaccgtcaacaaaggcctcctcttccccaacgtcggccacaagtgtctcatggccaaggacggaaagaagaaggtacactctagagccaaccccaaatatactacatctagtgatgaggatagctctagcgataatgagaatgatttactttctctatttgccaaccttagcattgaacaaaagaaaaaattaaatgaattaattgagaccattaacgagaaggatgatctcttggaatgccaagaggacttgctcgttaaagaaaataaaaaatttgttaagttgaaaaatgcttatgctcaggaagtagaaaaatgtgaaaacttatctaaggagcttagcatttgtcatgattcaatttcaagtattagaactgagaatgctagtttagtttctaagattgaaaatttgaatatttgcaatggttcgatttctagtcttagaattgagaatgataaattaaatgctaagattgagaaattgaatgtttgcaaaacatctacatctattgttaaaaataatgctatttgtactaaatgtagagatattaatgttgaagctattgatgatcaccttgttatgattaaacaacaaaatgatcacatagctacattaaatgctaaaattgccgagcatgagttagaaaatgaaaattttaaatttgctagaagcatgctctataatgggagacaccctgacattaaggatggcattggattccaacaagagagtcaatccaatgtcaagcttaatgcccctaagaaattgtttaattttgttaagggcaaggctcccatagttcaggatagtgagggctacattttatatcccacaaactatcctgagcttaaaattaggaaaattcatgctaggaaacctcatactatttctcactgtgcttttatgtatagaaatgaggcttctagctctaggcatactactcatgttaaaatgcctaagaagaaaatccctaatgcatcaaatgagcataacatttcatttagaacttttgatgtttcttatgttttaactaacaaatcaggcaaagtagttgccaaatatgttgggggcaaacacaagagcctaaagacttgtgtttgggtacccaaggtttatgcatccggtggttcaagttggataatcgatagcgggtgcacaaaccacatgataggggagaaaaggatgttctcctcatatgagcaaaatgaagatccccaaagagctattacattcagggatagaaatcaaggtttggtcaaaggtgttactgtctttagaagaagtgatgattcagtagcatttaagggagtgatagatggtcagctatacttagttgattttaatgataaccaaactgaactagacacttgcttaatttctaagactaacatgggttggctctggcatcagcgacttgcccacgttgggatgaagaatctccataaacttctaaagggagaacacattttagtactaaccaatgtttattttgagaaagacaggatttgtagcgaaaaatctcaaacccaagagaccctaaagagattcttaagatgggctcaaaatgagttcgaattaaggatcaaaaagataagaagtgataatgggacagagttcaagaactctcaaattgaaggatttcttgaggaggagggcatcaagcatgagttctcttctccctacacacctcaacaaaatggtgtagtggagaggaagaatagaactctactggacatggcaaggaccatgcctgatgaatacaagactccagaccgagtctttgggagtaaatgctttattcttattaaaagaggtagaagttttaaatttgctcctaaggctgtagaaggctttttactagggtatgactcaaacacaagggcatatagagtcttcaacaaatccactgaattagttgaggtttcttgtgacattgtgtttgatgagactaatggctcccaagtggagcaagttgatcttgatgaattagatgatgaagaggctccgtgcgtcgcactaaggaacttgtccattgggatgtgtgtcctaaggaatccgaagagcctccacaaacacaagatcaaccatcatcttccatgcaagcatctccaccaactcaagacgaggatcaggctcaaggtattgaagatgaagatcaagaggatgagccacctcaagaggaggacatggatcaagggggagatgaagataaggaagatgatcaagaaattagggatcaaagaccgcctcacccaagagtccaccaagcaattcaaagagatcaccccgtcaactccattcttggtgacattcataaggggtaccttcctcaatggccatatcaaggaagaggtctatgttgagcaacctcccgactttgaagatagtgagtaccctaatcatgtttataagctctcaaaggcgctttatgggctcaagcaagccccaagagcatggtatgaatgcctaagagacttccttatcactaatggcttcaaagtcggaaaagccgatcctactctcttcactaaaactattgcaaaagacttgtttatacgccaaatctatgttgatgatattatatttgggtctactaacaagtcatcttgtgatgagtttagtaggataatgattcagaaattcgagatgtctatgatgggggagttgaagtatttcctaggatttcaaatcaagcaattccaagatggcaccttcatcagccaaactaagtacattcaagacatacttaagaagtttgggatgaagaatggcaaacccatcaatacacctatgagaactaatgggcatctcgacctcaacacgggaggtaaatccgtagatcaaaaggtatacctgagagcacctagagggggtgaatag

SEQ ID NO: 158517 - DNA, 972 bp, Zea mays
  Clone ID: MRT4577_76147C.1
atgtctggagatcacgccaagagggagatagtcaccggcgataaggccgaaggctcgagaaggactccatcaagggagtccgacgacaaatacaaggaggaatctacttcctccatcaagttacataggaagggtgataagaagaaaaagaaaatgaagaaggtgctctactacgagaccgactcttcatcaccttccacatctagcgccgagtctacaacttcgaagcgccacgagtgcaaaccaccatattttgatggtgaagattattgtatgtggagcgataaaatgaggcatcatctaacctcactccacgaaagcatatgggatattgttgagtttggagcgcaggcaccacaggtgggcgacgaggactatgactcggacaagaccgcccaaattagacattttaattcccaagcaacctctatactcctcgccttcttgtgtcgagaagagtataataaggtgcaagggttgaaaaatgccaaagaactttgggacgtcctcaaaacggcgcacgaaggggacgaggtgaccaagatcaccaagcgcgagatgatcgagggagagctcggtcgattcgtcctcaacaaaggagaagagccgcaagcgatgtacaaccggctcaaaacgatggtcaatcaagtgcacaacctcaggagcaccaagtgggatgaccatgaaatggtcaagacaccaaacatatcgtcaacttggagcaaggcgccacctccacacccgagtgacatggacgatgataagaaggggaagaagaagatggagaagaagagatattacaagaagggtggcgaggcgcacatgggatgggaatgggactccgacgagagctccaccgactcctccgacgacgaggacgccgccaacatcgccatcaacaagggactcctcttgactaacgtcggtcacaagtgtctaatggctaaggacagcaagaagaagatgaggtag

SEQ ID NO: 158518 - DNA, 546 bp, Zea mays
  Clone ID: MRT4577_76148C.1
atgtctggagatcacgccaagagggagattgtcaccggcgataaggccataggctcgggaaggactctatcaagagagtccggcgacaaagacaaggatgaatcctcttcctccatcaagtcacataggaagggtgacaagaagaaaaataaaatgaagaaagtggtctactatgagaccgactcttcatcaccttccacatctgacgccgagtctacaacttcgaagggcctcgagcgtaagaagtatagcaaaccaccatactttgatggtgaagattattgtatgtggagtgataaaatgaggcaccatctaacctcactccacgaaagcatttgggatattgttgagtttggagcgcaggcaccacaggtgggctacgaggactacgactcagacgaggccgcccaaattaggcatttcaactcccaagcaacttctatactcctcacctccttatgtcgagaggagtataataaggtgcaagggttgaaaaatgccaaagaaatttgggacgtcctcaaaacggcgcacgaaggggactag

SEQ ID NO: 158519 - DNA, 968 bp, Zea mays
  Clone ID: MRT4577_76149C.1
gccggccgggttcggagtttcccaagcaggcgactcctctggtctcccacctctgcagctgccccccaacagcccagctgcagcttccattcctggctaaccaccaccaacccaaagcagctgctgcggcactttggtcacgtgcccactgcacacctgacaccaacatggccgccatgtcacgccaccaccacgacccgcttcttgtcttgtcttctcttctctcttccctgccaagacaaagatcaaacgaacccacgcgttcccttccctctcgtgtcgtgcagaagcagaaacccacccgtcgttccgccatggctggagaaggaggaggacggcttccgctcgacctgtccctggccaccgcggggccgtcggctggcgagcggcggccgagggcgcggccgaaccggcgcacagtgtcctcgctctatgctgagctgggcgcgatgctccccaacctccccatcgaccggccggcgagcaaggaggagatcgtggacgccgcggcggagcgcgtgaaggtcctggaggacacggtggccgtgctggagacgtaccactcggtgcgcagccccctccacggggccggcgccggcgccggcgccgctgctgcccggcggcccgaggtgtccgtggccgtcggcgcggtgtgcttctgcgcgcggctgccggcgcggagccccggctcgctgacgcgcgtgctggaggcgttccaccgccgcggggtggaggtcctcgtggccacggtggggcctcacggccacggcggcgccgccgtggtcacggtcaccgctgccgccgcgccgcccgaggtcctgcagatgatcagggccgacatcaccggcatctgctgatccatgggtaatcaatggcttctgctgctcgcggcgattgcaccttttgctacctctcatccgacggccatggcctcccacttttttttttggtacgaaatcagctagata

SEQ ID NO: 158520 - DNA, 224 bp, Zea mays
  Clone ID: MRT4577_7614C.1
gtttaaaaaaaaaaaaaaaaataaaaaaaaaaaaaaaaaacaaaataaaaaaaaaaaaataaaaaaaacaaaaaaaagaaaaaaaaagggggggcctccacagagagattttccaacgggatttttattttcggggagtggttttggcggagatctcatttcctataacttgggtgattatagtcgtggtgctatatgatgctaaagattttcttgatgccgat

SEQ ID NO: 158521 - DNA, 458 bp, Zea mays
  Clone ID: MRT4577_76150C.1
ttttctttgctttatgtaaatctggtccatatgttagaactgtttgtttgagcgagagggagagagacccacccaacatcgatgatgatcggtcatcatcaaccgcgccatcagagatttgtgctaaaaccaatgatgagcttactaataacacgcgggatctcagagatgggagtgaaagcacattcttggccgtcaggagcaatcatatatgcattactcacgcctacatgatgcggtgcctctgtgtttataaatgccatcgcatccctctgcaggtgcagagcagttccattccattgccccctagcttaccacacacttgagtgacgagcactacccaccgccgactcgtcatggcctgcggctgcagccttaagtacatggtcgttgtcttccttgttccgattctttccatctctttttacctttcctccgttcgggccggttgtgacacc

SEQ ID NO: 158522 - DNA, 429 bp, Zea mays
  unsure (1)..(429): unsure at all n locations
  Clone ID: MRT4577_76151C.1
gtgagtgtagtgagtgagtgaccggtgggacgagtagagtgagatggtgagtgagcagtagacacaccctagggtagactcttagcgcttagatgnagntagnangagtangtaggatagggattagggtcgaaaggtgatctggaagatagcggtttaatgtaaagtcggttacatgatggggtaaatgactattatagagctcattctggatcaaccattactgtattactgcgactgatacgtcatgggcgtggctcagtcttctcatcctcctgacgcagcttgtctttggctcttcgagctaggcggctagatagtcatctgtgaaggtgctgagattctacggcgtttattatgaggcttgcgcccaagacgttgatagcgtagacaatagttggtggatcagctacttcgagtgtgcagaga

SEQ ID NO: 158523 - DNA, 165 bp, Zea mays
  Clone ID: MRT4577_76152C.1
ccgacgcgtgcgctgaggcgtaggtgtaatctcctaacctctttgtcttcccgaaatcatgcctgcctggtcggcctgggttttcctctacctcatcaaatacgttcattataccagagtgcgcatcttttactaggtacactatttcacacgctcctctcactc

SEQ ID NO: 158524 - DNA, 191 bp, Zea mays
  Clone ID: MRT4577_76153C.1
tttttatgacaccggcaaaacaagagcagcggggggcgttttatgaaggcagacgcaggaatgagcaaagaatacaaaacctaccggtgaacagatcataacaataatgttagactgctaccaggaagacgataagaatctgaaacaccgaactagataacctgatcagagcaacaacgggcctactaaac

SEQ ID NO: 158525 - DNA, 334 bp, Zea mays
  Clone ID: MRT4577_76154C.1
tccggctcatcaccatctcccattgccggttcctccctactgccttctccctacgccagccgactctacgctcttccttcttcctcccgcggccgtcggactctaatgcccaaccatgggaggaggatgcgcgaattctacgaccactgtccacagccgcacaggcgcgagctcccggacctaccccatgacccgcatctgctcatctgcacatggacctcggccgtatgccctaaccgcccctgccatgatgttcaccactgcgcactctccgagtcgcataaacacctcgagaccctaacggtcacttggtcagcattgacctcgtcacttg

SEQ ID NO: 158526 - DNA, 524 bp, Zea mays
  Clone ID: MRT4577_76155C.1
caggaacggccttgatcatgtggaatcagcgagcaaatactatacaagctacagctctctgtaaatggttagggctatacatgaagtaaaagggggggggggggggggtgttaagtatccctgtaatgtttcgtaagacctctgattattgggttctcactccttgctgctgggcactgcctctggaagtttgaatgctggatacttgtcggtgcctttccttgagtactctcgccacctccttgctgccgccgctgctcgctttgctctctccttcgcctccgcttctgatagcaggaacgttgacaaggcgttcttctcgtatcttgttggcgctccccagatgtcactccatgagccaccctttctggaatcatcttggctcatccgccttcttaccttctccaggactttggcttgtcttttcttccagcgtgaacttgccatccgaaacacatcaattgagcctcccacccagcaagcattaatccaacatttactctctctactctgcgcatttcatc

SEQ ID NO: 158527 - DNA, 972 bp, Zea mays
  Clone ID: MRT4577_76156C.1
atggagtacccatacaatgcaatcattgttcgagggacactcaatgccttcgaagctatactccatccagcatacctatgcatgaagataccttcggaacaagggcccattactgtccatggaagtcaagaagctgctagaaaagctgaagggaactggacagattcaaaagcaatccataacatagacgaagctgaagcttccaatgatctatatggtgtcaacagagatgttattgagcattcactcaatgtagattcatcctttaggccaagaaaacaaaggcttcggaagatgtctgaagacaaagctgaaggtgctcggaatgaagtgaagagacttctcagtgctggtgttatcagagaggtgaaatacccagaatggctagccaacactgttatggtgaagaaggctaatggtaaatggagaatgtgcattgatttcacagatctcaacaaggcatgtccaaaggacgagttcccgttaccaagaatagactctctagtagatgcaacagcttctttagagctcatgagtctattggattgctattcaggctatcatcaaatttggatgaagaaggaagacgagccgaagactagtttcataactcctagtggcacctattgttatcttcggatgcctgaggggctcaaaaatgcaggaggaagcttcagcagaatgacagccaaggtccttcactcccaaataggcaggaatgtgctcacttatgttgatgatatcatagtgaaaagcacgaagcaagaaaatcatattgctgatttgcaagaaacatttgccaattttaggcaagctggcctgaaattaaatccagaaaagtgtgtctttggagtgaagaagggcaagttttttgtctgtttagtttcaacaaagggaatcgaagccaacccgagcaagatcaaagctatccttcagatggagccgccaaactcgaagaaaggggctcaatga

SEQ ID NO: 158528 - DNA, 353 bp, Zea mays
  Clone ID: MRT4577_76157C.1
tctatagcaaccggtccacactttgacgctcaggcgcttatctctagcaatggctgtctacacgcatggagacctcctacacgggcatggccggcaccctcatcaaggtgtgctccttgggggagggccgaatgaccatgcccaagaccgcggccaatcccaagcggcggagttcagtagccactgttaccgccccaaccgcgataagaacctgaggcccttgtcactacagtcatccatctaccttaccgaaagagttccccggcgactacgggtgcgacaccgacattctgtgcttcgaccccaagaccttagtcaagaaccacgagctggatgcgatccactccccatga

SEQ ID NO: 158529 - DNA, 706 bp, Zea mays
  Clone ID: MRT4577_76158C.1
cctcgaggccggccgggagactctccgacaccatcgacacttgagtatcgctacgtaatggtggagtaaaaaaatgagccgcaatgggaggagctgcatgggcttctcctctacgggatgcggcggcaaagctcgctgaacgcgccgtctgcgaccgtctcttctcgagtaccgaagggactatgcaaccaacgcatgcgtattcgccggccagacctccatcgcgtcagtcctcagcgacttgcccaagctattgattgtacctgcgtgcaatgatcagaggattgaacagagtatcggatggattgaatcctgtctgaatactaactcgcaacacctgaacatgtgtagatgaacccgatcatctcttacaagaatattaaggtgcaggtgagcgaatccacctggatcatgatgatggctgtcgggtgcgtcttacgctagctgctcggccgctatggtacgtctcgaacgggctagacaagagagctacaggacctgtcgcagatcgttcaacgatgggtcgctggactaatgcgactgcccgaccctcatcaggctcaagaacatccttgttatctgcaacagccagggcgtggacgtgcatcgccagcacagaggtaccctatacgtgaaggaacactcgctctgctcgacttaccagtgcatctcagccggaagtgcgaaccgcttgagcttatatatc

SEQ ID NO: 158530 - DNA, 1779 bp, Zea mays
  Clone ID: MRT4577_76159C.1
aattcggcacgagggcatggtggaaccctagagcttcacccctttttagcaccagcattccgccgcacgacctcgagtccggccgggactcacacaggtgcggcggcgcacactgctgcacactgcactccctccgtcccgcgtccccgttcggcgctctcggcacgaccgccggtagcccgggacgcacgtcgcacggccccatccctccctagcggccggtgacggcaccggcggccctttgctcggctgtgcccaagctgcgagggcgagatctacccccgcgtccgtgcatcttcgtcaggcccttctccggacgagcactcacaggatgtgttctgaagttcatgttgagggagatgcaagtgtcggacagaagggttgcaaggatataaggcgttacaaatgtgaattttgcacagttgtcaggtcaaagaaatgcctaattcaagctcacatggttgcacatcataaggatgaactggataaatcagaaatatacaactcagatggggaaaagattgttcatgagcaggaacataggtgccaagagtgtggctgttgtttccagaaaccagctcatctgaagcagcacatgcaaagtcactcacatgagagactctttatttgcccacttgaagactgccccttcagctataaaagaaaagatcacttgaaccgacacatgcttaagcatgagggcaaattgtttagttgcaccctggatggttgtgatatgaggttcagtatgaaggcagatatgcaacggcatgttaaggaaatccatgatagtaagaacccccatcaatttgtttgtaaggaggacggctgtaacaaggttttcaggtattcatcaaagctgaagaaacatgaggaatctcatgttaaattggactatgtggaggtagtgtgctgtgagccaggttgcatgaagatgttcagaaatgttgaatatctgagggctcataaccaatcttgccatcagtatgttcagtgtgagatatgtggagaaaagcacctgaagaagaacatcaagcggcatctgcaatcacatgacaaggtgccctctgatggaaggatgaaatgcacttttgatggttgtgaacacttcttttccaacaaatcaaatctgaccaagcatgtcaaggcatgccatgaccagctgaaacctttcaagtgcggaatcgttgggtgtggcaaggcgttcacctacaagcatgtcagggataaccatgagacatctggtgctcatgtatacatggaaggagactttgaagagttggatgagcagttgcgtgcccggccaagaggtggtcggaagaggaaagcattgacggtggaaacactgacacgcaagagggtgaccatctccggcgaggcttcatccttggatgatggagtggagtatcttcgctggttgctatctggtggggatgattcaattgattgtcagtagccggcgtctttttgctatcaccgctgctttgtacatgggttagattatgtaatgtaagttgtttggtagactacgatggtgttcatgacgcgtttgatatattgtcagcagtatggtagtgcagggctctcatagtaaagcttgccatttttgttgtatctttaacccacgtgggtccagatgatgtgtttattcctatgtatttacttatctacatgtatccacatgtgcgactttggcgtttgtttgagattataatttaaaaaaaaaaaaaaaaaaaaaaaaaaaaaaaaaaaaaaaaaaaaaaaaaaaaaaactcgtga

SEQ ID NO: 158531 - DNA, 274 bp, Zea mays
  Clone ID: MRT4577_7615C.1
cggctcgagagctcctggcctgcgcggcttccggatccttggtctgcgctccagcgtgggcccggctgtgcaggcacgaggtgtccatcagagcgtggccaccgatggcccaagcagcacccagcctgccctgccaaaggccagagccgtggctcgcaaacccagcagccggggcgagtatgtggtggccacgctggatgacctcgtcaactgggctcgcaggagttctctttggcccatgaccttcggcctggcctgctgcgccgtggagatg

SEQ ID NO: 158532 - DNA, 287 bp, Zea mays
  Clone ID: MRT4577_76160C.1
aagggctactaccttaaagggaagatcggtcacgtgcctgtgaggttcctgctggactctggggctcaggtgtctgtggttcacccagccttatgggaggaggtcactgacgctgacctggatacccttcgtccctttgacaatgtggtcaaagtggccaacggggcagagatgaagatcttgggtgtgtgggatacagatgtggccttgggcagtttgaagttggaggcccactttctggtggccaatgcaagtgcagacgaggacattattggtaccgacgtgct

SEQ ID NO: 158533 - DNA, 754 bp, Zea mays
  unsure (1)..(754): unsure at all n locations
  Clone ID: MRT4577_76161C.1
gccggcctggtctcgggggcggcgggccccggacgtcagagctacacgcacactagaagagttgtgcggcctgcggcgggcgcgacggctgttggatcccgtgccgccgcctccctcgcctcgctcgttcagtacgccagcgaccccgtcactgtagctgcgtgcctgcgcggccctgcgcccgcttgcttcgtcctcgcttcgctccaaatgatagagccggatcaggctgcgcgaccgcgagcttgacccgggcgcacgtcggctcgcactgtcgcacccagccatgtcggcgcctggattcgatgacccccagcttccgccgctgcggctgcgcgcctcgtgcggcggcagcggcggcttgatcgccagcccacgctcctgctcctcctctgataccttcgtcagcatgcgttccacgccctcagcctcaggtatgccgaatctgtgcggcgggctacggtcgccacctcgcgcgccgtcggaggcgtcctcgtcggagatggagttcgggacggcccgcgagtacgacaccactgatccgttcttcagtgactactggctgtacgacaaccacctgttccacagcaagccagagagcgacggcagcgaaggggaggaccaagttcgttgttggtcctgacgtcacttgcanncgaagtgagtgcggaancttggcgatgggcgacgctgcggtcgcggccacgtacgtacgaccgcaagcggaactctgatggggcacagatgcgaatgc

SEQ ID NO: 158534 - DNA, 557 bp, Zea mays
  unsure (1)..(557): unsure at all n locations
  Clone ID: MRT4577_76162C.1
agataagtaaatacatagggaataaacacatcatctggnacccacgtgggttaaagatacaacaaaaatggcaagctttactatgagagccctgcactaccatactgctgacaatatatcaaacgcgtcatgaacaccatcgtagtctaccaaacaacttacattacataatctaacccatgtacaaagcagcggtgatagcaaaaagacgccggctactgacaatcaattgaatcatccccaccagatagcaaccagcgaagatactccactccatcatccaaggatgaagcctcgccggagatggtcaccctcttgcgtgtcagtgtttccaccgtcaatgctttcctcttccgaccacctcttggccgggcacgcaactgctcatccaactcttcaaagtctccgaaaatcaggagctgatagtttgacctaataggccaaaaaacacaaactcggaattaacatagatcaggtagcacaactcacttccatgtatacatgagcaccagatgtctcatggttatccctgacatgcttgtaggtgaacgccttgc

SEQ ID NO: 158535 - DNA, 802 bp, Zea mays
  unsure (1)..(802): unsure at all n locations
  Clone ID: MRT4577_76163C.1
tcgagggccggccggggactcaccacaggtgcnggcggcgcacactgctgcacactgcactccctctgtcccgcgtccccgttcggcgctctcggcacgaccgccggtagcccgggacgcacgtcgcacggacccatccctccctagcggccggtgacggcaccggcggccctttgctcggctgtgcccaagctgcgagggcgagatctacccccgcgtccgtgcatcttcgtcagccccttctccggacgagcactcacaggatgtgttctgaagttcatgttgagggagatgcaagtgttggacagaagggttgcaaggatataaggcgttacaaatgtgaattttgcacagttgtcaggtcaaagaaatgcctaattcaagctcacatggttgcacatcataaggatgaactggataaatcagaaatatacaactcagatggggaaaagattgttcatgagcaggaacataggtgcagnagtgtggctgttgtttccagaaaccagctcatctgaagcagcacatgcaaagtcactcacatgagggcatagatagttaacagcgtgaagcattggatcccatttaaagaactccaaaatgcgacgnaggtattttttattcttgcctgactagtaacaaggttgggatgacctcctgtgaagcttcaacaagattgcctcagtcacgctcactgagtagagactctttatttgcccacttgaagactgccccttcagctataaaagaaaagatcacttgaaccgaccatgcttaagcatgagggcaaattgtttagtgc

SEQ ID NO: 158536 - DNA, 405 bp, Zea mays
  unsure (1)..(405): unsure at all n locations
  Clone ID: MRT4577_76164C.1
ggcgggccgctcttagaatagtgggttcccccggngcttttttgtaattcggcacgagggctcgcagcgcgcagcttagttacagcttcaggagagaagaaagagaccgcagatctcgcacgataggctagcatcatgggcgtccagaggcgcgcctacgtgctaacgcgtcctgctgcgccgccgaccgttcctcgcgcgcctccgctggacggagcaagccaaggccggggaaagaggagaagaagggggaggtttatgattgtcacggttgcggccgggacccgggtcacggtggcggtggtgagtgcggcatactcctactgccggtggggctggtgcaaccgcgcggaccatggcggcctgccggggctgctcgcaccctgctcagatgccagcagccca

SEQ ID NO: 158537 - DNA, 1024 bp, Zea mays
  Clone ID: MRT4577_76165C.1
cttgccatcagtatgttcagtgtgagatatgtggagaaaagcacctgaagaagaacatcaagcggcatctgcaatcacatgacaaggtgccctctgatggaaggatgaaatgcacttttgatggttgtgaacacttcttttccaacaaatcaaatctgaccaagcatgtcaaggcatgccatgaccagctgaaacctttcaagtgcggaatcgttgggtgtggcaaggcgttcacctacaagcatgtcagggataaccatgagacatctggtgctcatgtatacatggaagtgagttgtgctacctgatctatgttaattccgagtttgtgttttttggcctattaggtcaaactatcagctcctgattttcgtacgtatctctaatttaaacgtatgttcacatctgctttgtgatcaaaccgtgtgaacctgtggataacaaaaatctgcttcatgcagggagactttgaagagttggatgagcagttgcgtgcccggccaagaggtggtcggaagaggaaagcattgacggtggaaacactgacacgcaagagggtgaccatctccggcgaggcttcatccttggatgatggagtggagtatcttcgctggttgctatctggtggggatgattcaattgattgtcagtagccggcgtctttttgctatcaccgctgctttgtacatgggttagattatgtaatgtaagttgtttggtagactacgatggtgttcatgacgcgtttgatatattgtcagcagtatggtagtgcagggctctcatagtaaagcttgccatttttgttgtatctttaacccacgtgggtccagatgatgtgtttattcctatgtatttacttatctacatgtatccacatgtgcgactttggcgtttgtttgagattataatctgttaaaatatgttggattatataatttgggcagattataattccaaacaaacactgactaatgctctatttgttttaaaaaaaaaaaaaaaaaacaaaaaaaaaaaaaaa

SEQ ID NO: 158538 - DNA, 232 bp, Zea mays
  Clone ID: MRT4577_76166C.1
gcaggcgatttgtgagccaaaaaataaaataaaaaaatcataaaaacaaaataaaaaaaaaaaaaaaaaaaaacaaatcaaagtgacacttaaaaaccaaacaaaaaaaggggggcccccctaacggttccaactttccgtcccctaccgtactatgaccatccctttcaatacgtccccctaatttcctttcactggccggctttttccaacggcctgcctggaaaacccc

SEQ ID NO: 158539 - DNA, 230 bp, Zea mays
  Clone ID: MRT4577_76167C.1
ggcgaggcactcccgcggatggcagggctgatgtgatcacgcacttgcaggccgttaattataggcttgggcatgcatacccctacacgataagtgttgtgtggttaagcacgttctattaaaatgtgagggggagaaagatgactaccgtggagccgtgtgaattgctattgggcctgatcaataaaatcttgcaacacttgctcttgccaaaactaaaggaagaatat

SEQ ID NO: 158540 - DNA, 494 bp, Zea mays
  Clone ID: MRT4577_76168C.1
cgagaaacggatgtagtttttcgggagccatgaccatccatgagtggcccagtttctaggtaattcagtttatcccacggggcatatatgttttatgggcccttacgggggggaccacatccatataaccctgggaataagggggctagtccatataggggcctccccaggggaataatctatcagttcagttgcccccccagttgaccaactggtagttgacggggagggggccggcctggaacccctggccgttggggtcaatgggcttgaaccccgggtcgtagtccaggtccaggcccccgttgctgcactggtccacgaccctcaccgggatggacccccccgtcgccgtggtggccaccagaaaacactgcccgaacccggcctggccgggggggccggcgggcccccaaaaggccgtccagccgtacttaatgccccacgacagggggttggtggcgtcccacgttgcgcagtacccccccccgggg

SEQ ID NO: 158541 - DNA, 494 bp, Zea mays
  Clone ID: MRT4577_76169C.1
gtttggggtttttttttttttttttttttttttttttttgtttttttttttttttttttttttttttagtttggttgttttttttttttcttaatatttcggtttcttgggaaaccgttacagcgacatacccttgaatggcaccaaccggggggggggaccgtttaaccagcccaatcttccgaggggtttacaaacgcccacgcattggatgagccctaaacatgacaaaccccaaaagctctttatttttttaacgcctcttagggggttttaatggatgaactttttatggggcaaggcttactggaaatttagggcgacctggcgggttcaggggaaactcccttggttttggcttggaatttggagggtggccattttttgggaaaaaaaggctggctattctttaggggggattttggattttggctgggtggggcttttaaggaacaactaaaaaaaacttggtttttggcactggggaaacctta

SEQ ID NO: 158542 - DNA, 1251 bp, Zea mays
  Clone ID: MRT4577_7616C.1
tggggcctccggccgggaggtttacgggtcaccagtctcgtcgtgtccgttcgcgatcgggcaaacctgcaaccctttcctcttcgtccccccgctatctcgttgccccaagccggagtacggagtacggcagtcgcacccccgtcgtcccgttccttgctcgccccaacttcgccgccgcatccccctcggctgctcgctcctcgtctgcccctagtgatgtctggtggtaacgcgtggtcgccgctcccttcgcacggatttgaatccgactccggcggcatggggagccgcgcaggcgagcctgtggcgaggaccaacagcggcggcggcagcagcagcaaggattcgggcagcttcgagtgcaacatctgtctggacctggcgcaggatcccgtggtcaccctctgcggccacctcttctgctggccatgcctctacgagtggctccacgtgcacgcgcactcccaggagtgtcccgtctgcaaggccgtcgtcgaggaggggaagctcgtccctctctacggccgtggtggcaactccacctcaccccgtgcaaggtcggtggccggtgtggaaatcccgagcaggccgaccgggcagcggccctccactgccccgcagccagaccacagtaatcattacccgccccagaacccctggttcatgggcgctggcgccccccctgtggctggtggtcggtgggggaattacactttctcggcggccattggagggttgttcccgttgctgagcttccaggtgcatggattcccgcaggtgtctgcctatgggcctgctgcagggtttccctatggatacggccattctttccatgggtggcatggacatggctatggcttcccgcgccaggcaccacaaggccagcaggttgatgcgtacttaaaggtgcttctactggtagttggtgtgcttgtaattgccagcctgatcgcattttaaattatgtaaggctggcgatattgctgatccgttggtgtgtaccatagttctagcatcattgcatcttagatagctcccaaagtttgatgtcagcgtggagataagtagacaagttgtgataattggtggcagctggtattcattgtgtaaagttgctatcgaaaattataggtgcatttgttgtgttcttgcgttgaactttctccatgttcatgtttcttccaagaaatttgccagcaatgttctcttcttcccaaaaaaaaaaaaaaaaaaaaaaaaacccaccac

SEQ ID NO: 158543 - DNA, 241 bp, Zea mays
  Clone ID: MRT4577_76170C.1
caaaagtccaacccacccactacactttaattgctgtgttgactgcctataaaaactcaggtcttgttgaggagggaatgggcctgcttaagtgcatgaaagagcagtatggtctggagccatttatagagcatgtttcatgtgttgttgatatgctctgtcgtactggacgcttgagtgatgcatatcaccttatccagagttcccactctgaacatgcaaaaaaccctatattgtgggg

SEQ ID NO: 158544 - DNA, 268 bp, Zea mays
  Clone ID: MRT4577_76171C.1
agacaacactcaccgatagcacgtatcaccgacgactttatagagcacaagatgcatgctagtcaatcgcacgccggggagacgtacctatctttcacacgtcctccgcccaagggcaggacagaccatacgagctacaccgatacgccagccagggccttaccgtcttgccacgggatacctgccgtgtgagcacctacacccaggagctccttcgccaagggcccacgccgctagaccagacttgcaagcagcatgccttggcacc

SEQ ID NO: 158545 - DNA, 139 bp, Zea mays
  Clone ID: MRT4577_76172C.1
ctgtgatgaaacttactgtggacctgccgcagagtctgaaaaggagaccaaggccctggctgatttcatccgcaacaaactctcttccatcaaggcagatctgcggatccactcgtactgccaaatgatgatctaccct

SEQ ID NO: 158546 - DNA, 673 bp, Zea mays
  Clone ID: MRT4577_76173C.1
ccggccggaatactgagtaccacccttctttcttcttctacttgatctgtcattgcctgagagacacctcatctcaattcgtccgcgcgaactccactttactccggtcagaagaagggtgtgaccactcaacgatgataccacggcaactcggtcatcgcgaacaacgctgactgcccatgcgcaactgttcgaaaaaatcaccgactacacccctgagcgcgtccatcttctacaaccccttcggcctcagcgaaatcagcatcgaagccgctaagcacgatcacctcctctactcctttgacgacacccctcgccttacgagtatcgtgacccacctccaccacagtcgagcacagagacgctcgccgatgagatgacatggagcatatctgtctgcacagctttcaccagcagctccgtatgcctcgaaatcaacgtctcctttgctgacgtgagtggcgcctgaaaccaaatataggcgagagaaatgtgctgcgatgccgttagacagcttcagacctctctgtacgatttcaggaataaaagacaggatgactgatgtatgcaagcccgtcacacacagtatcttgtgtcatcaagcagattgtgaggctgccacactgtgctcacaaatgtgaatataattgcgcccgaactgtccattactgat

SEQ ID NO: 158547 - DNA, 2603 bp, Zea mays
  Clone ID: MRT4577_76174C.1
gggcgcctagtgtgtgtttgtgcgtcttgtgccttctgaaggcacgcaccattctgccctcctgctctctcccctcctccttcccactcctgtctctccccgtcctcctctgcttgagcctttctggtccacctaaattgtttccagtcagtttcattcattcgcaaggtcggtgtctggagagaagaagagaaaatggcggcgctagagaggagaggaggccaccacactgccgctttcatcagagcagcgaaggcctccagtcctcctcctccagcgaggcagaggcagagccagaggtgctccaagagcggcagcggtttggacgacgacgacgacgacagagatgccagggccgcgccgcgttctccgcagaaggcgtccagccagaccaagctgcaagagcagaaacgcgaggccgagacggaagttcagcggcgcaggaggaggagcgaggcacacaactccctgaggaaagagattcagcagctggagacgcgcctcagggatcagcaggtggtgcgcggcgcactggagaaagcgctggggcctgagcctgagcctgagcccgacgacgacggcgctggtccacgtccactcactctccagaacgagagcccagcgctaaagctcataagggaggttgcgacactggagctggagatcaagcacttggagcactacctcctggcactctaccggaaagcattcgagcagcagcaagcacccaccaccgcgctgccgccttcagacgatcggcgggacgcggcgcgcaagctgtcggtgagctcacggcccgacgacgagacgcccagggcgagggcccccgtgatcaggggaggcggcggcaacgggaggaggaacggcggcacggcggacgactgctcgccgtcgacgacgtgcccccggaggacggccgtagactccgacccggccgggctccggagccagtcggcgctgtcgttccgaggcgcgtggtcgtcgtcgtcgtcgacgtcgtccaggatatcgcccacggaggacagcctcgcgcgggcgctgcggtcctgccactcccagcccttctccttcctggagcaaggcgagacgacggcgccgtcaggaggagtggtgagcctggcggactacctcggcacgagcgtggcggaccacatcccggagacccccagcaacctgtcggaggagatggtgcggtgcatggccggggtgtactgcaggctggccgacccgccgctgctggcgcgccaccgcccgtcggcgtcgtcggcgtcggcgtcgctgtcctcggcggcgagcgcggtctccccaacacagtgcctcggcggcggcgacaacaacacgtggagcccgaccagcagcagcagctaccactgcggcaggagagacgccgcccggctcgtcaacccgttccgcgtcgagggggtcaaggagttcagcgggccctacagcgccatggtcgaggtgccggcgatctcccgcgaccgccccaggctcagggaggccgaggacctgctccagacgtacaagctgattctctaccggctggagacggtggacctgaggcggatgacgggcgaggagaagctcgcgttctggatcaacgtccacaacgcgctggtcatgcatgcgtacctcaagtatggagtcccgcataaccagctgaagacgacgacatcactgcttgtcaaggcggagtgcaagatcgcggggcgcgccatcaacgcggcggccatccaggggctggttctcgggtgcacggcgcactgctcctccgggcattggctgcgggctttgctgcgttacccgaggacgacgacgaaggcgagccggcgggcgagcagagccgggggcgaggagtggcgagccttcgccgtccgccagccggagccccttctgcgctttgcgctctgctccgggagccactccgatcccgcggtacgggtgtacttcccgaagcggctggcgcagcagctggaggcggcgcgggaggagtacgtccgggccacggcgggggtgcggaaggacgaccgccgggtgctgctgcccaggctgctggacgcctacgcccgggacgccggcctcaccgcggaccgcctcctcgacgccgtgcagcggtgcctcccggagacgctgcggacggcggtgcagcgctgccgccgccgcggagacgggcccggcgccgggaaggcagtcatcgagtgggtgccccaccggcggagcttccggtacctgttggccagggacctcgccttcccgcacctcagcctcagctagctataagctgcacgtacgtcgtgaagatgattcctcgtacggtgactagttgaaagattggtagttgtggtggggtgtggatgacttgatagattttggttctagattaatgataatgatgatgattgcacatggtccattaggcacgggcattcttcatcttaatttgcgtgtgtgtgtgctgtaaacagatgacacatcgagcttagcttgtagatatagcaacaaatgaaagagataaactaagtttgtattattgcatcgtacaccacaaacgtaatttcacgagatgatcaaaaaaaaaaaaaaaaataaaaaaaaactcgtgc

SEQ ID NO: 158548 - DNA, 436 bp, Zea mays
  Clone ID: MRT4577_76175C.1
gagcacttcaagagggtggagaaggagcttaagcacaaggagcgccttggcaaggtgggcgccgtgtaggacggcgcctatgctgtgtacgaggggcaccgtgcgaagacggacccggcgaacgctcagatgcacaagatcgaggccggcgttacatcagccgcggcactgggcgcctacggctacgcgtaccacgagcaccgagggcagaacgagggccactacgtgagcaagcatcacgagcacatggtgccgcacggtcacgagcacgggcacggttactcatactactgatactgagacgactgatcattcgatcgatcgagatatgcatgcagaactcggtatatatacagtcgctatcgccggacacttgcgtgcatgtgagttaatcagagcatacgtcgagacctatgagctgctcgatcactacttc

SEQ ID NO: 158549 - DNA, 137 bp, Zea mays
  unsure (1)..(137): unsure at all n locations
  Clone ID: MRT4577_76176C.1
cgctgcggtagtagtcgcatcgctcaatgcaattcagtcacatagtcgnatgaagtcgcacagatcgcgctatagcgatgatcagtgagcgcagtgagatacatgctgatgatgtgctcgtagcagaccgactatca

SEQ ID NO: 158550 - DNA, 281 bp, Zea mays
  Clone ID: MRT4577_76177C.1
cagctcgatcattcctatacatagctatcattacggagaccagtatgatggctgtgtgagttccctgtatcaatgtgaggatgtggacaagctgcgggtactcccctgtggtcatggctaccacagccgctgcgtggactcctggctcactcagactcggaagacctgccccattggcaatcagcctgttcatcggggtcctggggactaatatcaagagggagaaactcaagggcgagtggagggtgatcaagtggacccgagggaccatccttcctcag

SEQ ID NO: 158551 - DNA, 310 bp, Zea mays
  Clone ID: MRT4577_76178C.1
atcgagagcggccgccctattattctttatgagaccggaagcgccacgcgagggcacaaaaaccgagcgcaccccacccccgcgatagtaaagcacatagcccgcatcgttacgcacatctcgtggcacgattagacggcagggagaagtcgagaacaaagcacgggaacagcagatccatgccctgtgccccgaccctgagagcctgaagtggcacaacgcgctgacaccgaacccgatggtgtataaaaagaagccgaaacgtcgcgccctgactctggaaaccagcagagaactgacgggcaaggga

SEQ ID NO: 158552 - DNA, 318 bp, Zea mays
  Clone ID: MRT4577_76179C.1
cgggcagcgcaggtggtggttctacttgcatggcggagtacgccaactgccaggtttgcaagatgcacgccatcggctggggctagggcggcgccatctgtgcattgagggctcgaagatgctgacccttggacgtgctggaggacctgatccgggacacgctctagagcaaggtgggcatcaacatcgacagcaagactgcctgcaccaaccggaccggattctgcgaggacaaccgagatgatccatgggacaacgcacaaacgatttttgacagggctgaaacggatcgccaacacctgcgagctttttggggac

SEQ ID NO: 158553 - DNA, 279 bp, Zea mays
  Clone ID: MRT4577_7617C.1
acctcactataattccccccccacagggaaacaaaccgagggtttacttatttgggatttaacccggaaaaaacccgagcatccttaccattttatcacagcaatggaagaaatttacaaatggctgactgcctacggctgccctaaatcgcaattttctgaacaaaatggtacaaaccttatgcagcccaccaatagcaagcttatggtgggcactttaagaaacctagaaactaccgaaagaattcccggaaaaaaaaatggcccctttttggctct

SEQ ID NO: 158554 - DNA, 265 bp, Zea mays
  unsure (1)..(265): unsure at all n locations
  Clone ID: MRT4577_76180C.1
ctgttnnnnnaccagaacaagtcagttttnaaatggtgcaagttcttccaaaccccccngncannnnccaccctnatcctgctcacccaacttcccatacatggccgtaaaaaagtcacttttcacagtccagcttacaaacaacaatggaacgcccacgcaataaatactatttacccttctatgaacacataggttagccagccaaactttaaaacgtccgaggaggcacccgctaatctcccaagcaccaaagtatctacac

SEQ ID NO: 158555 - DNA, 355 bp, Zea mays
  Clone ID: MRT4577_76181C.1
acctggggcggtttgggggtgtttttacggcttcctctcgcgggtccaaggggggcgggggggcccaccggggcgcggggacgccctaaaaaacaacggggggggagggggccaatttgagccttcccggcccccacctgggggggggtgcaagggcggctcccggcggggctcgggggggccaccgtcccccgtggagggaggacccgggacgagaaagaaacctttggcgcctggctgtcgcaggcgggcgcgggagttcctggtccggaaccgtgcccgcgggaagtggcccggccgggcggggggacggccccgcacttttatggaacgcggtcaacgggcagacccaggc

SEQ ID NO: 158556 - DNA, 346 bp, Zea mays
  Clone ID: MRT4577_76182C.1
ctgagggaggagaagatacggctatattactattacaaaccgtgaatattacaaaccgtgaacaagttagaaatcaaaaaattacaacaaagaatcaaaaaccactagtcaatacctatttgcccttcgggctctgcacttttttcagcggcctcggctacttttctagcatcttgaatgcctttttcgcttttttgaataatttattgggccatttcccggtcaccattgtcccagatgtcggtgaaaaattttccaccgacgaggcttgcttcaaccgaggggtcttttatatcttcggaggataaggtggcttcggattgtgccaaaaatttcacatgctcac

SEQ ID NO: 158557 - DNA, 122 bp, Zea mays
  Clone ID: MRT4577_76183C.1
catattacaaaggctgggttgttgaacagcacacatctatgtatcagtgtagctcaaaaccttgccttgtcattgtgtatagttgacacacggataacatatcgtcggaccagcacaaccca

SEQ ID NO: 158558 - DNA, 521 bp, Zea mays
  Clone ID: MRT4577_76184C.1
gatacaaaagtatactgtgggcatgaatataccttgagtaatgcaaagtttgccttgagtgtagaaccgggaaataaagcattgcaggaatatgctgcaaatgcagctgagctgcgtaataagaatatacccacggtgccaacaacaattggaagggagaaggaatgcaatcctttcttgcggacctccaatccagaaattaagagaacactgtccgttccagatcatttcgatgaagatcgggtgcttggagttgtccgtcgagcaaaagataacttctgactaacaaaaggaaatgctcgtgacgtatgacctaagtcccaataaacataggaggaaatgaaggtatatatgtttgagctagattttgaaatgcttcggcaaaattatgtcgagtgtatgtagcttgggcagtgcagtgcttgtctatagcaaccaatgattcttttgaccactacaaataagcgtgttctgctatcatctcctctctgtaaaaaaaaacgccacgtacccgtttcctc

SEQ ID NO: 158559 - DNA, 1150 bp, Zea mays
  Clone ID: MRT4577_76185C.1
ctcgaggccggccgggacactagtcgccgtgccgtcccctccccttctctctctcctcgctccccacgccacgcatcgcctcgtcggaacggaaggcggcagcgctgcgagcaagggagggagggagcggggatgaggatgctgtcgaaggcgtgctcgattgtggcctcctccctcccgcgctgctcctcctccgccgccgcccccacgatgagggggcagccgtccttgctgccaagcgtgcggaagcaatggcccgggaagccactgctgtatggaatcggcaccctgttggtcatgccactgaggacactgtatggagtgggtcgtgtttttggcgcaggacggtttctctgcaacatgaccaacgtctcttcgtcgctgcaaattgagcttgtaccatgccttcgagataactatgcgtatatcctgcatgatgttgatactggaacagttggagtagtggatccttctgaggctatgcctattataaatgcattggaaaagagaaaccagaacttgacttatatactgaacacccatcatcactatgatcatactggtggaaacttggcattgaagtgggcatatgggtgggaggtaattggttctgagaaggataaggacagaatacctggcattgacatcacgcttaaggagggtgacacatggatgttcgctggccatcaagttcttgtactggaaactcctggacatacaacaggtgtttgatggaaaatttcttatgactcatcttatattcgttcttgccttcaaagttaactcctgcactgcacatgaaggcttttcgttaacttttcatgtatttttattaggtcatgtgtgctattatttcgctggttctggagctatatttacaggtgacaccttgttcaatctatcatgcggaaagctttttgaagggactccacagcaggtttttcacttgcttgcaaatatcttcatttacatgtatgttgtgtgaaggtgctactggtcttctgtgacaagctactcctttgtagtgcttttatttcactaaagaagtctcttaattgtgaacaacaaacatttttgttggagtttctgatttttttatcaaactaaaatattttctcagttgcagctattagaacctataagcatgagt

SEQ ID NO: 158560 - DNA, 1571 bp, Zea mays
  unsure (1)..(1571): unsure at all n locations
  Clone ID: MRT4577_76186C.1
cattggggcccattgggtccctcgaggccggctcgggccactagtcgccgtgccgtcccctccccttctctctctcctcgctccccacgccacgcatcgcctcgtcggaacggaaggcggcagcgctgcgagcaagggagggagggagcggggatgaggatgctgtcgaaggcgtgctcgattgtggcctcctccctcccgcgctgctcctcctccgccgccgcccccacggtcgcccttctctctcacctatgagggggcagccgtccttgctgccaagcgtgcggaagcaatggcccgggaagccactgctgtatggaatcggcaccctgttggtcatgccactgaggacactgtatggagtgggtcgtgtttttggcgcaggacggtttctctgcaacatgaccaacgtctcttcgtcgctgcaaattgagcttgtaccatgccttcgagataactatgcatatatcctgcatgatgttgatactggaacagttggagtagtggatccttctgaggctatgcctattataaatgcattggaaaagagaaaccagaacttgacttatatactgaacacccatcatcactatgatcatactggtggaaacttggaattgaaggcaaaatatggtgcaaaggtaattggttctgagaaggataaggacagaatacctggcattgacatcacgcttagggggggtgacacattggatgttcgctggccatcaagttcttgtactggaaattcctgggcatacaacaggtcatgtgtgctattatttcgctggttctggagctatatttacaggtgacaccttgttcaatctatcatgcgggaagctttttgaagggactccacagcagatgtatgcctcactccagaaaattacagctctacccgatgatacaaaagtatactgtgggcatgaatataccttgagtaatgcaaagtttgccttgagtggtagaaccgggaaataaagcattgcaggaatatgctgcaaatgcagctgagctgcgtaataagaatatacccacggtgccaacaacaattggaagggagaaggaatgcaatcctttcttgcggacctccaatccagaaattaagagaacactgtccgttccagatcatttcgatgaagatcgggtgcttggagttgtccgtcgagcaaaagataacttctgactaacaaaaggaaatgctcgtgacgtatgacccatatcttgttaaagttcagacagagaacctaagtcacaataaacataggaggaaatgaaggtatatatgtttgagctagattttgaaatgcttcggcaaaattatgtcgagtgtatgtagcttgggcagtgcagtgcttgtctatagcaaccaatgattcttttgaccactacaaataagcgtgttctgctatcatctactctctgtaaaaaaaacgccacgtagccgtttcatagtcgatcttcagttcttattcaatacttcaacttggcggtttgcactgtggcagtggatattacttgaatgcattgcactccgatctgtagggttcnntntngaggaaatataa

SEQ ID NO: 158561 - DNA, 273 bp, Zea mays
  Clone ID: MRT4577_76187C.1
cgtccgacgccaacgcgcacagcgccgcctcctccatgtcgtctacctcctcgactcacaccttcttcgatttaccacctcctgccgctgcagcgccaccccagttcgcgtcgacaccatgacgggactgcatctcagatccacatcgtgcaagccgggtatccaggtcggaaacgcctgctgcgaactctagtgcctctagcatggcattcaggctgagtgtcagccgcccggtgataggaccattgcgggtggtgatgatgcgttcatcac

SEQ ID NO: 158562 - DNA, 322 bp, Zea mays
  Clone ID: MRT4577_76188C.1
gctacatagacagaacaaccgagtaacagcattggcagccaaaatatttcgcgggcagattattgtgggtctttatgctacttgtgctacctgaacgatttgataacgctgcttatatgctaatatggttgtaaggtcttattcgataccttttatcagcggtgtgtttaatgcgcgaagacgcgcgtggttaaaaccacaagttagaacatgcaatgagcgcatgagtactaccaagatgacagttgctcctacaacacttggcacatctaacactacaaacccttgtagcgcattagcctcaacaaaacataatggcaca

SEQ ID NO: 158563 - DNA, 226 bp, Zea mays
  Clone ID: MRT4577_76189C.1
acacattcctcggacccggtcatagtctcggacctgtcacatcatccttttcacaacctcaccgacgcagttatacatcacaaacccacactaattacataattaatacttatttcaaacatcaaattattaaaattattactaacatctatttgtctaagattttactttaaaattaactatcatacttttattctagtactatactctcattcaaacttattat

SEQ ID NO: 158564 - DNA, 861 bp, Zea mays
  Clone ID: MRT4577_7618C.1
ttgggtggtacccgcggccggccgggcgttccggttaccagtctcgtcgtgtccgttcgcgatcgggcaaacctgcaaccctttcctcttcgtccccccgctctctcgttgccccaagccggagtacggagtacggcagtcgcacccccgtcgtcccgttccttgctcgccccaacttcgccgccgcgtccccctcggctcctagtgatgtctggtggtaacgcgtggtcgccgctcccttcgcacggatttgaatccgactccggcggcatggggagccgcgcaggcgagcctgtggcgaggaccaacagcagcggcggtggcggtagcagcaaggactcgggcagcttcgagtgcaacatctgtctggacctggcgcaggatcccgtggtcaccctctgcggccacctcttctgctggccatgcctctacgagtggctccacgtgcacgcgcactcccaggagtgccccgtctgcaaggccgtcgtcgaggaggggaagctcgtccctctctacggccgtggtggcaactccacctcaccccgtgcaaggtcggtggccggtgtggaaatcccgagcaggccgaccgggcagcggccctccactgccccgcagccagaccacagtaatcattacccgccccagaacctctggttcatgggcgctggcgccccccctgtggctggtggtcggtgggggaattacactttctcggcggccattggaggggtgttcccgttgctgagcttccaggtgcatggattcccgcaagtgtctgcctatggtgctgctgcagggtttccctatggatacgtacagtcattccatgggtggcatggacatggctatggcttcccgcgc

SEQ ID NO: 158565 - DNA, 174 bp, Zea mays
  Clone ID: MRT4577_76190C.1
gccgccgctcccgatctacaacctttggaaatcctttccttatctggtcatcttcgctcgggtataataatatggatgccgatgcactacttaacaaggacaatcacatataaaatgatcagaaggcatatcatgttaacttgcttaattaccattccaacatggttgaaacct

SEQ ID NO: 158566 - DNA, 250 bp, Zea mays
  Clone ID: MRT4577_76191C.1
aaaaaaggatgggcggggccccgggggttttgtttttatatttattacccattacacagggtggggggccggggcttgcattcacaaatatggtccccacccaacgaaacgacgggcggggccctacgtccgtaattggaaaggggggaagccctgcgggaaacatcaacatgaaaattgggggaagcaaaaggaaccattgcttgcgggaaaaaaaaaaggtgaaataaagggaaaaaaagcgggggtc

SEQ ID NO: 158567 - DNA, 218 bp, Zea mays
  unsure (1)..(218): unsure at all n locations
  Clone ID: MRT4577_76192C.1
tacctctgcttactgccgcatttatacgaatgcactgtccaatgatncgtaagcaatgtctttcgggtccgttataggaaaggcatagcctatagaattctaagttctcatatatcatatctattaggttgaggtacttcactggctacatacatgccttattgtaaaataagacctgccattaggatactctctgatcaactacgaattacttttat

SEQ ID NO: 158568 - DNA, 725 bp, Zea mays
  Clone ID: MRT4577_76193C.1
caggttccggtccggaattcccgggtcgacccacgcgtccggcgcgaggtttaagatggcggttcccgggtggttgaccgaggggcagaggtgaaggccccttcgcagagagtcctccgggaccgcccgctagctgctctcgccgtcccgggagcctcgcagtcgttttttttttttttaatgaagaagtaaatcatataaattgtcaccatgggacgaagatcaacatcctccaccaagagtgggaagtttatgaaccccacagaccaagcccgaaaggaagcccgaaaaagagaactgaaaaagaacaaaaaacagcgcatgatggtccgggctgcagttttgaagatgaaagaccccaaacaaattatccgggacatggagaaattggatgaaatggagtttaacccagtgcagcagccacagttgaatgagaaagtactgaaagacaagcgaaaaaagctgcgggaaacctttgaacgcattctacgcctttatgaaaaagaaaacccagatatttacaaagaactgagaaagctggaagtggaatatgaacagaagagagctcagctgagccagtactttgatgctgttaagaatgctcagcatgtggaagtagagagcatccctttgccagacatgccgcatgctccttccaacatcttgatccaagacattcctcttcctggtgcacagcccccctccatcctgaagaaaacctcagc

SEQ ID NO: 158569 - DNA, 408 bp, Zea mays
  Clone ID: MRT4577_76194C.1
ggggccgaaaccggccattctttgggcggaaattccctccacgaggaggggccatatgggaagaggacaaatataggggcagatcccaggggcccaattcccacccccagaatctcaaaaaagatgcaaaaaaaaaaaccggggtgatagatcccgcaaaaaaatgaaaaccctaaaaaaaataccgcgaccggaaaaataatgccacaaaagggggggccctggtttcaaaatggttttaacatttccacaactcccccattggaaaaccacccccctcaaggacatccttgaactggttaataatttgcgtccccttgataggggctcgggccttgttcaaggggtttttgctgcgcaactgcttgcccaaagcatttttaacaccagccattttcaacacaaccc

SEQ ID NO: 158570 - DNA, 1521 bp, Zea mays
  Clone ID: MRT4577_76195C.1
gtcgcttctttaattcaagtttagacatgccgtctttgtttcccaatttaagcttttgctttaaaactcaagacttttcaaggaagtgacacctgctagcttgttgcaagctgtaaagattgaaaaaaaaaaaaaaaaaaaaaaaaaaaaaaaaaaaaaaaaaaggggcgggccgctcgcgatctagaaactaggccggggaccaccgcgggcgcggggccgaccccgcccgcccggcgcgccgccgcctgggcaaggccggcgccccgccgctgcgcctcctgcaggagttccggctcaccgccgtcgacgccttcgagcccgcccagcccctcgacttcggcgtcgcttccgagcagacgtcctccttggataaggggataggcgcgaggaagagcggcctatccgcatccgcataaatcccagtcaaattgaacgagagcgccactcccctctgctaatcccagtcaaatcgaagcaagcatggccatggcggccgtgggcgtgggcggcgcagtggcgttcctcctcccgcagcgccgccagggcgccgtcccctggagcggcgggcggcggcgggcgcccgtggcggtgcgcgcgtcgtacgaggccggggtgggcgtgatggcgaccaaggtggggatgatgacctacttcgatccggagacggggaagccggtgccggtgaccgtggtcgggttccgggagggcggcaacgtggtgacgcaggtgaagacggccgccacggacgggtacgacgccgtccaggtcgggtaccacggcgtgcgcgaggacaagctcacccgcccggagctgggccacctgggcaaggccggcgccccgccgctgcgccacctgcaggagttccggctcaccgccgtcgacgccttcgagcccggccagcccctcgacttcgccgacctcttcaaggagggcgacctcatcgacgtctccggcaactccatcggcaaggggttccaaggtggcatcaagaggcacaacttcaagcgcgggctgatgacgcacggttccaagagccaccggcagctgggttccatcggagccgggacgacgccgggccgcgtgtacaaggggaagaagatgcccgggaggatgggaggaaccaagaccaagatcaggaagctcaagatcgtcaagatcgacaacaacctccgggtgctcatgatcaagggggccgtgccagggaagcccgggaacctcctccgcataacgccggccaagatcgtcggcaagaacatccccaagaactagacttcttttttttcaggggggtgaatgttgagtgtttgtgtttgttaccctgctacaaactggatgtaatcctttgccaatttccagtttttgaacacatgcaacttcagattagtaaaactataacctgtacaatttggatgcttgggtgagagagtaataggcaggtaatgcaagatgcacttctggttcctgaaaaaaaaaaaaaaaaaaaaaaaaaaaaagaaaaagaagaaaaaagggccctaa

SEQ ID NO: 158571 - DNA, 287 bp, Zea mays
  Clone ID: MRT4577_76196C.1
caccaccagaactcgaaggcttcagtctccgcccaacttgcggttaaagtgattgatttctcgtgttcctcttgaacctcctaaaaaactttcaaaatgaagcacctcgcagcttacctcctgctcaccctcggcggcaacgctccccctctgctgaggatgtcaaggctgtcctcagctccgtcggcattgaggccgaggatgagcgtcttgagaagctcatctctgagctctctggcaaggacgtcaacgagctgatcgccgctggctctgagaagctcgcttcc

SEQ ID NO: 158572 - DNA, 248 bp, Zea mays
  Clone ID: MRT4577_76197C.1
gcgactccgcgctctgcttcggctgcaagttccagttcaagcctatccgggtgtcggagcccgtgctttccctgccggtgcgcagggggagcgtgactgtgctcagtggatacgctgctgatgaaatcacccactgcatccggcctcaggacatcaaggagcgcagagcggtcatcatcctcaggaagacgagattagatgcaccccgattggaaaccaagttcctgagcagcttcgtgctgccaccc

SEQ ID NO: 158573 - DNA, 1382 bp, Zea mays
  Clone ID: MRT4577_76198C.1
gagccgtggacgactccgtcaaagcgctcgtcggctctcaccgaccccaacgcgcttatcaacaccgtctccgcggacgcccattgctaccccgttttgaaatgaagagtccaggcttactctccgctgggttcgtcagagaagaacctagcacacgacccgctcgtcgaaaaggtcccttactactacagttgaacccaagctcctaaactaaaactacatgctgctgttcctaggtctgactccaagcgtttaaaccacaggtagccaagaaactggacaagaccccggggcaggtgctcctcaggtgggcgctgcagagggggacaagcgtcattcctaagtcgaccagggacggaaggatcaaagagaacatccaggtgttcgggtgggagatccctgaggaggacttcagggccctgtgcggcatcaaagatgaggtgagtgagggatgccattgtccttggggtttaggctttagcgataactttagcatgacttggttatcagtatgtcctatgcatgtaggttatgaagctaagagtaaaaatgaaaactagtatgggaagttttcttatctgatacgtaagacttattggcatcaattgagcttgttaagttgttacgccacttatgacaggctacagcctattgccctagtggaataatgccattttttcacactcaaaaaaggggggtttgaatgcaatagagttaatagttagttaactaaaaattgatagtgtatctagctaactactatgttggatatttcggctaatttgagcaactaattatcaattaactattagttctagcattcaaacgtggtctaagataagaattatagtttccagatttgaggcacagagtcgtttgatccgtctactgctgtactgcatcactcgtttgtgtgtgtgtgtgtgttgcctgatctgcagaagcgcgtgctgaccggagaggagctcttcgtcaacaagacccacgggccgtacaagagcgcaaccgaggtgtgggaccacgaggactgagctgagctgccgtgccgccggatgcctcccactcccacctgatgaaccagaataaaggataccgacgcacctgtcagtcacctccttccccgtgccttgtgagagcggcagcctctcgcacagggaagatgctctgtgagagcagcagcctcgcacgagaaagatgtagaagagtgtgtgcgcaacacactcctgtactgtacgatagactgaataataaagaagaaaacgatccacatctcatgcaaactgcaatctgcagagtgcaacgcagcgccgaaccatgtttttgtaggatcgaaatgtgctgtctcgcgcaccaaagcactatgtttggactttggaccactg

SEQ ID NO: 158574 - DNA, 192 bp, Zea mays
  Clone ID: MRT4577_76199C.1
ctagcgtgggtgtgatagacatatcgctgcgacagcatgggtgtcctctcctcatctgtcgtagagtcatcattggcgtccgtaggcgaaaacaagatgaagagcacgctcaggagctccgccttataggagatataggagtaagaagcggtggtcatgagagtcgcagactctcctctatataatcgagga

SEQ ID NO: 158575 - DNA, 933 bp, Zea mays
  unsure (1)..(933): unsure at all n locations
  Clone ID: MRT4577_7619C.1
ggaccctcgggctggccgggaccccacgcgacgcgtgggggttcaccagtctcgtcgtgtccgttcgcgatcgggcaaacctgcaaccctttcctcttcgtccccccgctctctcgttgccccaagccggagtacggagtacggcagtcgcacccccgtcgtggcgtccgtccggagacggcagtcgcatcgcatcccctccgcctcgttccttgctcggcagcaaggactcgggcagcttcgagtgcaacatctgcctggacctggcgcaggaccccgtggtcaccctatgcggccacctcttctgctggccctgcctctacgagtggctccacgttcacgcgcactctcaggagtgccccgtctgcaaggccgtcgtcgaggaggggaaactcgtccccctctacggccgtggtggcagctccgccgtaccccgtgcaaggtcggtggccggtgtggaaatcccgagcaggccgaccgggcagcggccctccactgccccgcagccggaccacaataaccattacccgcaccagaacccctggttcaatggtgctggcgccccccctgtggctaatggtaggtgggggagttacactttctcggccgccatcggagggctgttcccgttgctgagcttccaggtgcacggattcccgcaggcgactgcctatgggcctgctgcagggtttccttatgggtacggccattctttccatggggtggcatggccatggcttcccgcgccaggcaccacaaggccagcaggtcgatgcgtacttgaaggcgctgctgctggcagttggtgtgcttgtaattgccagcctaatcgcattttaaataatgatgngctggcgatgtcgctgatccccttgntgggggtgtaccgtagntctagcatcatggcatcttagatggctccccaagtttgat

SEQ ID NO: 158576 - DNA, 439 bp, Zea mays
  Clone ID: MRT4577_761C.1
gatatactcctcgaagaaaaaccctagttctgcttctttgtatgtctagtagctctagccattctagactcctgatccacaagtaggtcaatgatcttgttaataaccccctggatggatactccccacgtgcttggagaccacagaacatactcgagtggcacgaaaccctcataggaccgcctgacaccctatatgatggagcctacctcaatgtaataatgaacttcccccctaactatcccaacagtccgtcgttactaaaatttacttctgagatgtcgcatccgaatgcttatcctgatggaggagcttgcatttctattcttcatccacctggcgaacatcccaatggttatagatcttgcaacccaacgatgtataccatcgcacacggtgtgaaagtataacaactgagcatcatttcgactgctctcta

SEQ ID NO: 158577 - DNA, 2093 bp, Zea mays
  Clone ID: MRT4577_76200C.1
gctgtacgcctgcggtatccggtgcgcggagtctccattcgggtcgggcgactttattttcaagaagacaggagaagggagttgtagtgagttttaagaatggcgagtgcacaggcagtggggcaaggagaacgaggccacttcgttctgaagagcggacacaccattccggccgttggtctaggcacttggagggccggctcagataccgctcactctgttcggaccgccatcgccgaggctggatataggcacgtggacacagctgcccaatacggagtagagaaagaggtcggtagaggacttaaagctgcgatggagggcgggatcaacaggaaagatttgtttgtgacgtcgaagctatggtgcaccgagctggctcctgatagggttcggccagcactcgagaaaacactcaaggacttgcagctggattacctggatctctaccttatccactggcccttcaggctgaaagacggggcgcacatgcccccggaagccggggaggtgctggagttcgatatggaaggggtgtggagggagatggaaggcctcgtgaaagacgggctcgtcaaggatataggtgtctgcaattacacggtcgccaagctcaaccgcctgatgcggtcagcgaatgttccaccggcagtgtgccagatggaaatgcaccctgggtggaagaacgacaggatctttgaggcatgcaagaagcatgggatccatgttactgcttactctccgctgggttcgtcagagaagaacctagcgcacgacccgctcgtcgaaaaggtagccaacaaactggacaagaccccggggcaggtgctcctcaggtgggcgctccagagggggacaagcgtcattcctaaatcgaccaaggacggaaggatcaaagagaacatccaggtgttcgggtgggagatccctgaggaggacttcagggccctgtgcggcatcaaagatgaggtgagtgaggggagggatgacatggctcttggggtttaaggctttagcgatagcttagcatatgactcggttatcagtatgtcctatgtaggttatgaagcttaagatgaaaatgagaactagtatgggaagttttcttatctgatacgtaagacttgttagcatgatagcatcaattgagcttgttaagttgttacgccacttatgcctaaatgaaaacaggctacagcctagtgccctaatagctaggtagctaaaaattgctagtgaaagtagttagctaacaaatatctagctaactattagctaatttttaaaaatagctaaactactagttagaccgtgttgaatgtttcagcaaattttagcactattagctctcaatgttagctctagtgtattcacacggcctaataattatagtttccagatttgaggcacagagtcgtttgatccgtctagtgcagcactcgtttttgtgtgtgtgtgtgtgtaaaagtgcaccgttttgcctgatctgcagaagcgcgtgctgaccggagaggagctgttcgtgaacaagacccacgggccgtacaagagcgcgaccgaggtgtgggaccacgaggactgagcggagctgccgtgccgccggatccctccactccacctgatgaaaccagaataaaggataccgacgcacctgtcagtcacctccctcccgtgccttgcgagagcggcagcctctcgcacagggaagatgctctgtgtctgagagcatgcagcctcgcacgagaaagatgcagaaggagtgtgtgtggcgcgcaatacactcctgtactgtacgatagactgaataataataaagaagaaaacgcagcagtttgccgttgcgttttcctttgtgcttgccgcatgcttgtgatacggctacacttataagcgacctgcgtaggattccttattagagcttgactctctccaacaaaccagatgatgagaatgtgagatcatacatcctcacacaagatagctatttcacctgtgtgtgtggcgcgcaatacactcctgtactgtacgatagactgaataataataaagaagaaaacgcagcagtttgccgttgcgttttcctttgtgcttgc

SEQ ID NO: 158578 - DNA, 649 bp, Zea mays
  Clone ID: MRT4577_76201C.1
ccggccggggactctgtatagcacgacaacagttcagctatcttctacctcttatttctttggaatcaaacactctcacgcatcacaattgtatctttgaactcagcacagccatcaaaccgccaccatgttcaagaaagaaatccagcctgcgcccaagcagaagctcaagtcttctgtccagcgaacccttcgcaaggatctactcgacacataccctctcctcaacaactacatcgacgagatcatgcccaaaaaggccactctttcaagcatgaagcttaccgaccgcaacaccctctacgttctcgactcgacacccatcttcttccagcaggaccttacaggaatcctcattccccacctccgactcgtccatcgcttcccccaagcctttcctagcattcgcatagaccgtggtgctatccgcttcgtcctctctggcgccaccctcatggctcctggacttacctccgctggtggcagattgcctgccgacggcgcgcccgagggtgtaccagaggacaagatggaccagaagatggacgacgatttccgatggagcagagagttggtcaagggcgagcctgtcgttgtcatagccgagggcaaggatgaggcgtgtgctgtgggaacactttctgcggga

SEQ ID NO: 158579 - DNA, 358 bp, Zea mays
  Clone ID: MRT4577_76202C.1
acagcatatttcattgataatgtccacaaggaccaaagcatgcatgcaaatacgtacactactggtacaatctctgagcccatgctccctgcttcacaaatactggtacatctcctgcagtacatatacgaatacgtgggtctacggtacacgcatacaagtttgtatatgccctcgctcacttgccggggacgaaggggggagccgaaggcccaggcgggggtgttgacaggggcagcgagggggtcggcgaggttcacaacggaaccctagccggagacgagggcactgcaagaagaaggagaacaaggaaaacatgacaaggcggcagcactggatctccttgaacttgagccac

SEQ ID NO: 158580 - DNA, 458 bp, Zea mays
  Clone ID: MRT4577_76203C.1
aatcgaaggaatcatgcgagctctgtattattatcgagacaaatgtgtgtaataatgtaacgaatggaggctggctttgatgatgtgatctggactgcattgctgctactaaacaaacaatcctatgtactcaatacccccccggtcaggctcaggcagtcacctggcttcgccggcggtgctgctgaccctgatgtcgtggccgcccctgcgcagcgtgctggtgagcgaggacgagctgatcgagccggacaacaaccagtccaacagcaggagccccagcatggcgtggaagaaccacacgctgtcctgaaggctcatcagcagctgctggttggtgctgacgaggctcatggacggacgagccggcggaaccaacggtggttacggctggacgaccaagacatgaacaacatgacgtaaacaggttcgaagaggctgctccgagctgcagcacg

SEQ ID NO: 158581 - DNA, 470 bp, Zea mays
  unsure (1)..(470): unsure at all n locations
  Clone ID: MRT4577_76204C.1
taggggccttttttttttttttttttcataatctctgagcccatgctcccttcttcacaaatactggtacatctcctgcagtacatatccgactacgtatgtctccggcacacccatccaagtatgtctatcgccctccctcccttgccggcgacgcacttggtaccccagcccccgccgttgttgttgctgggcccgcgcggtggccgcccccggtccctcccgcgacccttgcccgtcaccctgccccgccccaccaactgcaccccgtaccccatgcccccgcccgcccnctccccctctcccttgcccctagccccctgcacccgcctcccgccccctcggcgcaccccgaccgcgtcccaccgcccccccccgccctacccccgcccccaccaccccccccccaaccgcgctccccccccccactcctccccccccctcctacccctcccccctccccgcccccc

SEQ ID NO: 158582 - DNA, 300 bp, Zea mays
  Clone ID: MRT4577_76205C.1
gcgggcttgattttttttttcatttattcacccaacgcagcaggaggcatacattcaattcatcttgcgaaatggactccttcacggacaaacaatgtccccccaagggcatgaatacgccagtggaacagacacgaactgatcaggaagaggcaggcatatcatagatgctcactgaatcatggagaactcacaccccagatcatagaggttcacccaggttttcgggtaaaggactgaggagttaatgcgtttgcgctgggggtacgcatccctgcagggctatggcctgtcgtccat

SEQ ID NO: 158583 - DNA, 826 bp, Zea mays
  unsure (1)..(826): unsure at all n locations
  Clone ID: MRT4577_76206C.1
cgatgtagtcggctagncttcgctcgccgcgttacttgacgccttctggggtcgacgggagaagagtagcgctcgacgccgcccagatccaccccccccccccccccccggactgagtccagtccaacctcgcaggcaaagatggcggacgtcacccgcaacggcttcgggggccggaacccgccggggctgctgcagaacgcggccaagaacaagcatgcgttcgtgcagctgttcctcatgacgggcgtcctcttggtgagcctgcggaccttgggccagaagcacctcctccacgacctcgccgccgacaacgccgacctccgccgccagcgcgacggcctctcccaccgcatgcgggacctccaggacgcgctccgcacggaggcgggcgccgactcgtccggcgctctcgcgtcccacctccgccgcatcttcaccgcccaccctgcgcctgccgccgccgccgaggaccagtagcgtgctctctcgaggaatcttcttctccgcggtttggttctacggtcctgtggtcgcatgtctagcggtgaggtagtgacctcttccgttgtcgctgcctcacggtccatggcagcgcacgctacgtgtttgtggaaatgtcgcactgcagagagttgactgaaagtgtttctgcgtcgtctcgagacgcatttgttgagacttcaaacttcgtgtcgcagactttaaatttcgtgtttcggacttaaaactttaaacatcgtgtttcagactttaaacttaatgtttcaaattgatcaatgctccttttacttcttaaaaaaaaaaaaaaaaaaaaaaagcggcc

SEQ ID NO: 158584 - DNA, 755 bp, Zea mays
  unsure (1)..(755): unsure at all n locations
  Clone ID: MRT4577_76207C.1
gtttcanttcccagaaagctagaagatcgacacgaacagaaatcagattcaatttctgtgaaagaacaagaccaacttgaggaggctcagggattgttaaaaagtgctgtcaagaccggccaatcaaaagaagctaggttagctcgggtttgtgctgggctttcatctcgcctccaagagtataagtctgaaaatgcacagctggaggaacttcttgttcaagagagagagaaatctacctcgcatgaagctcacataaagcaactacaacaagaactatcaatgtccagagtagaaggttcaagagccgaatcgaatatggttgatgctttgactgcaaaaaatgcagagattgaatctcttgtcaaatcattggactcttggaagaaaagagcagcagcttcagaagaaaagcttgcttctttagaggaagatatggatggtctcaagaggaaccgggaacttactgaaaccagggttatacaggctttacgggaggaacttgctaccgcagagcgtagggctgaagaagagcgcatttctcataatgccacaaagatggcagctgttgagagagaagtagaactagaacatcgagctgttgaggcatcaaatgctctagctagaatccagagagctgctgatcaaagctcatcaagagtgctggaattggagcacaaggtggctgtgcttgaggttgaatatgcttcattgcaacaagaactgcaggagatggaagctcgtaaccgccgcac

SEQ ID NO: 158585 - DNA, 276 bp, Zea mays
  Clone ID: MRT4577_76208C.1
ggatcaaagcaccaggcgttcgtcttgtgtttacctgctgtagtgctgaggatctgtaccacaggattccaagagaaacacacacaccgctggatactgaatagattgtagtaagaacaactctaggccacatagcattcactaatacgaattatgttgtatagcattcactaatacgaattatattgtattgcaaatgtagcagaacccataaaaagggttcatgagtagaattgatatgaaatttcaagattttactggaatagtacaatgttc

SEQ ID NO: 158586 - DNA, 2655 bp, Zea mays
  Clone ID: MRT4577_76209C.1
gaatgtgcaacctttcgccccgcaccggcacccaccattgcgagctgcgagtctgcgacagcttacttcgaagcacactgccgtggccggagatctcacaccacccattttatcaagctcgctcgccgtcacactgcgccaccagcggcgatcccgccatggcctcctggctcaaggtcgccgaagacttgctcgaagtcgtcgaccggagggccaagatcgtggcaacagaactgtcggatgagcagtctacctctcagccttcaggaccaaacaaccaagaagtgcaagcaaagaagggaaagccgagggagaagggtccattgaagctcactaatgccgatggtggcaacaagatatctgctcagaaggaaaagaggagtaggcaacggccgcgagagcggatgaagatcgagaagatcaggccttcgccacctgcaggttcatcaagtgttgataccagtgctagtgaaccagaagtcactccgatcgatgttaaggaagtgggtaatgagggtacattggagaaaggagagaaaggtactgatggccttaagactgatgggtctgggattgttaataccatggttgaagttcaactgatggagaaaaactctgacaatgccactctggatggtgttacacataccaattccgagattcctgttgaaagctatttttcagttatggattcaaaaagtgagtcgagcagcagtaaccagacttccggctttggttcagtgattaatttctagtagagagactctactgtggctgttatgcatgacacaaatgcgtctgaattgccaaatacagaggttactggcaaactgcaggaatcaaagaaagcgagtgtttcagattcatcagaaagcatagaagatcgacgcaaacaaaaatctgatacaatttctgtgaaagaacaagaccaacttgaggaggctcagggattgttaaaaagtgctgtcaagactggccagtcaaaagaagctaggttagctcgggtttgtgctggactttcatcccgcctccaagagtataagtctgaaaatgcacagctggaggaacttcttgttcaagagagagagaaatctacattgcatgaagctcatataaagcaactacagcaagagttatcaatgtccagagtagaaggttcaagagctgaattgaatatggttgatgctttgactgcaaaaaatgcagagattgaatctcttgttaaatcattggactcttggaagaaaagagcagcaacttcagaagaaaagcttgcttctttagaggaagatatagatggtctcaagaggaaccgtgaacttactgaaaccagggttatacaggctttacgggaggaacttgctaccacagagcgtagggctgaagaagagcgcattcctcataatgcctcctgatctgcagcgtgttcgtgcattttagcttgatgcactcgggcaaccgcctcatcgagcgcttttcctagaaaggaacatcagccagggcggatctggccagcgcgaacctgccatagcccatagtctctgtgcccttcttgttgattcaggcattccccactgattcttggtccacatgccttcaaagtttcatttcatcctcctgtttctttttttttccgtcttccccatcttttgtaaagtagtagtgttcgttgtttggccatgcgctgtataatccattcttttacattgactgatgagtcagattgagtatcagagttgcagaaaatgagagttgaaatggctggaatgagaagagatgcagagcattattctagacaggagcatgttgaacttgagaagagataccgtgagctaactgacttactgtaccacaagcaaacacaattggaatccatggccagcgaaaaggctgcgttagagttccaactggagaaatcattgaaacaatttcatgaagtgcaggtcgaagcagaaaggagtaaagctactcgcagatcagcatcgtcgtgggaagaagatactgatatcaaggcattagagcctcttcctctacatcatcggcacatggcaacagcaaatcatcagttacaaaaggctgcgaagcttttagatacaggcgctgttcgtgcaacaagatttttgtggcgacaccccgttgcacgagtcagcgtgctattctatctggtgttcgtgcatttgttcttgatgcacttgttaaaccgccttcaggacttcgcgtccagagaaggaacatcagccatgggggatctggccagcgcgaacctgccatagcccatagtctctgtgcccttcttgtatcttgttcattcaggcattccccactgattcttggtccacatgccttcaaagtttcatttcatcctcctgtttctttttttttccgtcttccccatcttttgtaaagtagtagtgttcgttgtttggccatgcgctgtataatccattcttttacattgactgatgagtcagattgagtatgtaccaagtaccttgacatgatataccaagccaattgagccagttcttgtcacaaagatggcagctgttgagagagaagtagaattagaacatcgagctgttgaggcatcaaatgctctagctagaatccagagagctgctgatcaaagctcatcaagagagcttggaattggag

SEQ ID NO: 158587 - DNA, 1839 bp, Zea mays
  Clone ID: MRT4577_7620C.1
gtcgtgtccgttcgcgatcgggcaaatctgcaaccctttcctcttcgtccccccgctcggtcggtgccccaagccggagtacggagtacggcaatcgcacccccgtcgtcccgttccttgctcgccgtgttggggtccggacgcgtggggaagtcccaatttccccttcgcctttgtcttcccgctcccgtcccgaaatccgcccgccgattaagcttgcttgccctagcagatcgaagcactagccctagccctagccgaggagcgcgcccatggccgccgcggtcgtgggctgaggggccgcggctctttgcatggggtgaggaagcggcgtcccgaggcgcgggaatggaccctagcctgaaggaggaggtgatgaaggcggtggaggaggcgaggtccgcgtcggtgccgcggtgccgggtggtgcgcatcatcgtgcacgacgaggacgccaccgactcgtcctccagcgaggacgaggacgaggacgaggcgggggagcgcgcctcgccgcatccgggctcgccgtcggcgtcggcgtcggcggggagcgtgaagcgcagccgcgtgctgctccagtccgccgggtgcggcgcggaggaggacgaggaggaggaggaggagggggaggggccgggcgggttagcggctcggggtcgggggtggcggccaatcccttccccggcagacggcagtcgcatcgcatcccctccgcctcgttccttgctcggctcgccccaacttcgctgccggccgccgccgcattcccctcggctactcgctcctcgtcgctccccggtgatgtctggcggtaacgcgtggtcgccactgccttcgcacggatttggatccgagtctagcggcatggcgaatcgcgccggcgagcctgtggcgaggaccaacagcgatggcggcggcggcggcagcaaggactcgggcagcttcgagtgcaacatctgcctggacctggcgcaggaccccgtcgtcaccctatgcggccacctcttctgctggccctgcctctacgagtggctccacgttcacgcgcactctcaggagtgccccgtctgcaaggccgtcgtcgaggaggggaaactcgtccccctctacggccgtggtggcagctccgccgtaccccgtgcaaggtcggtggccggtgtggaaatcccgagcaggccgaccgggcagcggccctccactgccccgcagccggaccacaataaccattacccgcaccagaacccctggttcaatggtgctggcgccccccctgtggctaatggtaggtgggggagttacactttctcggccgccatcggagggctgttcccgttgctgagcttccaggtgcacggattcccgcaggcgactgcctatgggcctgctgcagggtttccttatgggtacggccattctttccatgggtggcatggccatggcttcccgcgccaggcaccacaaggccagcaggtcgatgcgtacttgaaggtgctgctgctggcagttggtgtgcttgtaattgccagcctaatcgcattttagattatgtatggctggcgatgtcgctgatccttgttggtgtgtaccgtagttctagcatcattgcatcttagatggctcccaaagtttgatgtcaatgtgtagagtattgtggatgcttcggctagtaatagtacttgtgataattggtggcagctgttattcattgtgtaaagttgctatcgaaaattataggtgcatctgttgtgttcatgccttgaactttggtcatgttcatatttcttcaatgaagtttccctggaatgttctgttaaaaaaaaaaaaaaaaaagcggcc

SEQ ID NO: 158588 - DNA, 331 bp, Zea mays
  Clone ID: MRT4577_76210C.1
gcgggaggatttgcactttgtttccccgggggcataaaaaactccggtcacttataactaaccatactagcaaattcttacaggccgcttgctggcaatgcaataaatatgaccggtgcaaaactttaggttccttttcaaccaacatgcctctatttttcaacagggaccacctggcgggggggccaaaaatcatgctgaaggcaacaggtccacataggaaatctatgcttgtaaaaacatttttggtgacggggtccgggaggggtctaaataggttccggaaagggaccaccccgttgacagctccacgggaaaagaaaccgaactt

SEQ ID NO: 158589 - DNA, 254 bp, Zea mays
  Clone ID: MRT4577_76211C.1
aaactattgagtatatgataaactaatgctaggaagacctgaccatttgtgtgcttccaatcgttttcttagtagcacttggattatgaaaatatgtcttagcatgttgttgggttctaactttagcttccttagatgtcaggaatgtattgtttctgtgatgaaatttgtgaatacattcactttagtacatttttttatataaatatagtttcctttgttgctctgaagtttaatgctttcaattgaatgaa

SEQ ID NO: 158590 - DNA, 432 bp, Zea mays
  Clone ID: MRT4577_76212C.1
tatgacggaaagtgcacgcgctccgtaagctcggatcctgtatagcgggcgccatccacgcgttcgtggacgcttgggcggacacacggacagcactgaggggtcataccaatgattatgaatctggctagtgaggactgtgcatccactctgtcttctgactacatatattcaccgtatgctacccttacatcacactaaatatccctagctagcatcatacagaaggtgatctttgttactctactgatgaatggacagccactcgcatggggaacacatttttttcccctaaacatatcagaaaaccactgctatgctgaaacagacgtctatttgtcgctatagatacacaaaaggatgacattacttccacttatcaacagatgcttaaagcacgaaatggactaacaggataactggctgcatgta

SEQ ID NO: 158591 - DNA, 668 bp, Zea mays
  Clone ID: MRT4577_76213C.1
cttccaggtcgctcgctgttatattcagagatcgcttggggacttggatcgtttgacctatccacagggcatttcgataacctctcccatggctcactacaaagatgatatcaagtatgaagagggcttcaccctgaattcacgaggcagcaggctcttcacctgcaaatggacgcccaagaaacaacagcgcaaggctctgatcttcatctgccatggttatggaggagagtgcagcatatcgatggcagacaccgccgcgcgactggtgcacgccggctacgccgtccacgggatagaccaagagggccacggcaagtcctccggctccaagggctacatatcgagcttcggcgacatcgtcaaggactgctccgactacttcaagagcgtctgcgagaagccggagaacaagacgaagaagaggttcctctacggcttctccatgggaggcaccgtggcgcttcaggtccacaggaaggactccatgtactgggacggcgccgtcttgctcgctcccatggtcaagcttggtgatggcatgcggcctcatccggtggtggtgagcgctctcaagatgatctgcgccgtcgtgcctagctggagggtcatccctgctccagatcagctcgacaaagtctgcaaagatccccagttcaagaaagaga

SEQ ID NO: 158592 - DNA, 807 bp, Zea mays
  unsure (1)..(807): unsure at all n locations
  Clone ID: MRT4577_76214C.1
aggccggccgggctcagcctgtctttcttgtgtgcactgcacccaccctgcctcagcttcgtttcgccaggaacgcgtaggcgcagcagcccaggaagcaacacccagccgcctaatcccgcaacaactcgccctcttctaccccagcggctcatctgcatccgcctaccggtgtcctacaggtttgctggagtgcagtgcacgggcggtggagcagcaaatctgcaactgattcaggatggatcaggaggcgaaggactctaggccctcaaggtctcccagcgagccaaacctcttcctgcaatggggtagccgtaagaggctgcgatgtgtcaagacgcgtgatgatggctcaccatcgccgtcgccgtctcaaggtcttagacgtgccataccccgttctactcggcccctccttggagcagacattgcgacatttcgttcaccgcggcgccctagcacccttaaccgcaggaaatccgatttgctggtgaatgagtacaagcacacgatggcgctatcgccagagaaggacaagtattacacaacgaggggttcaccatttccctttgaaggaaatgggtttgactttggtaccataacagaggataagggaaccacatcgttgccgagattcttcattgcattgtcaaacaaggagaaggaggaggacttcatggcgatgaagggctccaagctgccacagaggccaaagaagaggcccaagctgatgcagaagtgcttgcttatggtgagcccagnagcttggttatcagatctatctcatgagagatatgaagttagaga

SEQ ID NO: 158593 - DNA, 263 bp, Zea mays
  Clone ID: MRT4577_76215C.1
caattctgaattcgagggacgacgtacgcgtacgttcacgcgtgcggtcatatcagcctctgactattcaaccacctggaccgagatcgggcgggtgttaacaatccctgggataccaaggatgatggcttttgccggtccttatcctaagatgaatatggacccacttgtgaaggcattggccgaatgccatccgcggagggaacttgctacccttaaattgctattgggtaaccgcaaggctttttccagttggaacaaat

SEQ ID NO: 158594 - DNA, 124 bp, Zea mays
  unsure (1)..(124): unsure at all n locations
  Clone ID: MRT4577_76216C.1
agnatcgtcgaggattcctacttcaatagtgcttgtacgtaacccggcgctcgttcccgaccccggtcggccgctgccgtctctccttagtcgcagctatgacgaccgcgtccacctcgcaggt

SEQ ID NO: 158595 - DNA, 387 bp, Zea mays
  Clone ID: MRT4577_76217C.1
ctatgcttttgtataccgaggatttttttatatttttttttgttttttacgacattaatccgaccgtggattttaccgggtattgccgaacgccttgatcttacctattggttttccaaaaaaccggttcagagagatttttgtggttgttggggaggaacctttaactggggaattatttgtggtgcttgggaagctccctttaactgtaaaaagatacaattttctggaaaacccagtgtctatttaaagcggaacagaatatggcggaatccaggagaatttttggcctcttgcaaactttccttactcaaaaaaattccttattatagatttatcttacataacaccagagggttcactgttactcgttaacctaaggaaaaa

SEQ ID NO: 158596 - DNA, 443 bp, Zea mays
  Clone ID: MRT4577_76218C.1
gtattattgtttgtggtgatgtgtggaacatgatgtgccatatggcttttggcgccggcgattttgccacgttttaagcaccatgttgttgatcaaccatgaacaaggggggtgcacaaatcccttttctcatcatgaaaagaacgccctcacaatgctacacactcttttggcgatcactggaaaaatttgctgcatcagtcttgccttttaattatggtaatagtaatacatcctttggaaccaccctttgtgcgagcgagagaaacagagtgagggagagagagaaacaaaacaactgagggaggggttggggttaaagggggcgacgacaaggagggaaatatatagccgttgaaaataaaaaacagaaactgaccctgagcgaggttcccaaagggggcctttaagactaccttgttgtaagcttgccctaatcagtg

SEQ ID NO: 158597 - DNA, 1732 bp, Zea mays
  Clone ID: MRT4577_76219C.1
cattgggaccctcgaggccggccgggactaataagcgagagccccatcacttcgagtcttggatccttgaagattctgcgccatctcatcatcatctctctcgctgggtcctattcttggcaggctttttcacttcctgggtccgtccagatgcgcaagaccagcagttcctgaagtttcaggacccgccggctaaaagactgaagatcacagacgctcggagtcggacgccgcggctgagcacggaatcttaagagatggaaccggcgaaggggaagccgaggagggcgtcatccagcctgcttctgcgaatcacggacatctgcaaggtgcattccgtcgctgtggcggagaacgtcggcgagaagcccaacggcggcagcacaaccggcgggggcagcagcgaagacggcgcgcacctgaaagtatatccacaccaagtctctgaccacgagagctgttccggaacttccaccgcccgctacgaggaagcggttgtcgagaggcttcttggcgcggtctctggtctgaagctggcctatgtgaaggttcagcaggcacatgttccgtatgatcctgaaagggttgcggtcgccggtgagcgttttgcgtcggagcttgaagagacggctgggcttaaagatctctacttcggtgccgataagtggagcaatccaatgcaccagtctcgtgtcagctcacggatccatgagcgtcaaaggctcgccctggagctgcaggccgacatatgcaagaaagactctgagcttgttctgctgcgagcagagctcgaagaactggaaaggagaaatctggagctgaaggaggaggctgaccagagagcgtcgcagatgaataaagaaataagtttcggcattggcaaagtgggatcggttgatacgttcatcgagttgtttgagaactcgtcgaagtgtatacatgatttcacaaagctcgtcgtcagctggatgaaggtttcagctggatgggacctcgactgctcaaagtttccagccgatagatcccttgtgtttgagaaaagggctcacaggaagtattgcgttgaggcctactttgctcgggcgatgctggcggcgaccaaagaggagtatttctccatggattccttctaccgtgttatgagttcaaaggacccattcgacgctcttgtggagtcaccaaattccgcctttgggagattctgccgggagaagtatctggttgctgtgccaagtactatggaggtatccttcctgggaactctggaccacagagcatttgtcgaggcgggcggccatccaaggacgcagttttaccgtgggtttgcgaggatggctagatctgtctgggcattgctcacggttgctcgcctcttgaaaccaagggccgagatgttcttcgtcaagagcggcgttcggttccaaaggaagcacatggaaagcgtaccagctaggctgaccgcggaggaagcaaagatcggtgttgggtttacagtgatgccgggctttaagatcggatgcactatcgtcaggtgcagggtgtacctgtctatgctcaacgcaagaggcatctagacacattattatataaataactacataattaggtaagcaaaacgcaatagctttgtaagtgctccacagttctataaataagcctgcagttggaagctcctcttgtattatgacaaggaacacgagctaataatagatgacctccagagcagtgttct

SEQ ID NO: 158598 - DNA, 442 bp, Zea mays
  Clone ID: MRT4577_7621C.1
aaaacaaaaggggcgatttagatctaccaccgacaaaacaggggcagggctggcacccccaaaaaacggtaacctggtcagcatccaggggggagagcaaagcggggtcatgaatctgggctaacaaccggggaaggcgggggggaaaatgccccaaccaaaggaaaagggtaatggttgggggaaaatggaaaaacattctcatctcgcaaaaatggaagggatctggaaccgccaggaaaattcgtcgaaaaaaaaacattttggacaggtaagcccaaatctgacacaacaagagcgagaataggaaaacttgaatcgggtgggtgcaggcaaaactaaatggccaccccactgggaggcacccccttttgggggggctatgcaacaggggggggggggcttcacgggaagaatggaaaactgggggtgctggcaaacc

SEQ ID NO: 158599 - DNA, 1393 bp, Zea mays
  Clone ID: MRT4577_76220C.1
ttgggtacctcgaggccggccgggttggatctctcgagattctgcgccatctcatcatctctctcgctgggtcctattcttggcaggcttttgcgcttcctgggtccgtccagatgcgcaataccagcagttcctgaagtttcaggacccgccggctaaaaggtatattactcagagtctgcaaggcagattggcctgttcttctattctgggattgtttttgtactattttgtttccttctcctggacgccaaccagtcggctagagtagacgcaatcttaaatccacattccgtgttcatggcgttgattcgatcgaaatagacatcttcaaaagccgcgatcttcctttcttggaagttggaacctatgctcgtttgacttgctgtctcacgcacgcagactgaagatcacagacgctcggagtcggacgccgcggctgactacggaatcttaagagatggagccggcgaaggggaagccgaggagggcgtcatccagcctgcttctgcgaatcacggacatctgcaaggtgcattccgtcgctgtggcggagaacgtcggcgagaagcccaacgccggcagcacaaccggcgggggcagcagcgaagacggcgcgcacctgaaagtatatccacaccaagtctctgaccacgagagctgttccggaacttccaccgcccgctacgaggaagcggttgtcgagaggcttcttggcgcggtctctggtctgaagctggcctatgtgaaggttcagcaggcacatgtgccgtatgatcctgaaagggttgcggtcgccgctggatgggacctcgactgctcaaagtttccagccgatagatcccttgtgtttgagaaaagggctcacaggaagtattgcgttgaggcctactttgctcgggcgatgctggcggcgaccaaagaggagtatttctccatggattccttctaccgtgttatgagttcaaaggacccattcgacgctcttgtggagtcaccaaattccgcctttgggagattctgccgggagaagtatctggttgctgtgccaagtactatggaggtatccttcctgggaactctggaccacagagcatttgtcgaggcgggcggccatccaaggacgcagttttaccagacatttgcgaggatggctagatctgtctgggcattgctcacggttgctcgcctcttgaaaccaagggccgagatgttcttcgtcaagagcggcgttcggttccaaaggaagcacatggaaagcgtaccagctaggctgaccgcggaggaagcaaagatcggtgttgggtttacagtgatgccgggctttaagatcggatgcactatcgtcaggtgcagggtgtacctgtctatgctcaacgcaagaggcatctag

SEQ ID NO: 158600 - DNA, 431 bp, Zea mays
  Clone ID: MRT4577_76221C.1
gacatgagacacccatccacgcaaacacaggagcaagaagtttgtctcccccatggcacctatgagcggtaccacgaaggttaggtccttcatggctgtcctaggcttagttcttctcatcgtttgtgcgagctcccagtcctgccaaggttggaaccactcgctggtggcggctccaaaactgaaagtgtggtgctatgtcctctttcgcagggaagagtgttcagataagtcctgccacttggtttgccaagacaaggataagttttaccgtcatggcgcctactgcgtggataagacttgggagtgctgctgcccaacttaaccggcggctggtgtacactgtagcaacgcatgtgtgttctcctcggtgtgtttttatgagtcatgacgaaaaaataatggaatgaaactgcgctctgtttacaatt

SEQ ID NO: 158601 - DNA, 683 bp, Zea mays
  Clone ID: MRT4577_76222C.1
gtcggccgtcgtccctgcaggagcctcttccatggcgcctagtcttctccccatggcgagctcgtccagccactcgcctccactacatgtgctgtttcccccctcctccccttttctcaagtttggtcctcggcacccaagcttttgtgtccctgcagcacgtcgtgcctgtgcagccccggcagtggcgtcgtccatcccgttcggagcgctctgggtgttcgatggaatggttgtatggagctttgtgttgtgtgcagccccatctgcgacaccgtcgaaccccggtgagaacccattgtttttcttgtatttattcctcgctagtacatgtactcagcgtcgattaagtagaggctaaccatgtgtgtgtttgtgtatgcttgcgaggagagaaacccctaggttctgacggtaaagaaccgaagcccgtgggacgcttattaagtgttcggtagaaggaccgaacccaaaaccttcgtcgtgttcgcgaacgtcgcttcgagtttagtcatggtaaatcgatctgttatttccgttaatcgaataaatggttgatttgtatggagtcgatatttgtgctaaatgaaatgtgcgtggtgtcaagaaagcggttctccgttgcgacatgatttttagatttggattgcaaattatgtgaaatgaatggattcacgattttg

SEQ ID NO: 158602 - DNA, 353 bp, Zea mays
  Clone ID: MRT4577_76223C.1
atattttttttttttttttttttttttttgtggtttttttttattttttcctcgtattcccccttatctttctttttttctgcaccagccaaacgcaaaaaatacaactttttatgggggcagcaaggttgacctttgttccttgaacagagaacccccgggggccagaattttaaaaaaagggattctgactgcccaaaaacgggggggggtccccccctcaaaataaaaaccggcccccgggtttaaacaaaaccagggggaggtatgcccccactaatcggccccacgcctcaacccgaaggtccaaaggaaggggaaaactctccccggggggaaacgccacccccccc

SEQ ID NO: 158603 - DNA, 334 bp, Zea mays
  Clone ID: MRT4577_76224C.1
aagcaacaggcgggacctcttcatccacaccatgcgtatgttaggctactagggtacgtgagatgactcccacatggagtaccatgtgacgaatgtcatcctggtgaacgcgacggcggagggctcctcgcgcactgcgcacaagtcggacctgcaccggatcgccgtcatcaaggacgtgatccagcccatgttcgcctggtaggacgtgttgcaacccatcgacatccatgcacttcatctggtggctcgagacgttcgtcacctgcaccctgctcaactcgtggtatctcttcaacctgccaggactaccacagagcttttgggcaccgct

SEQ ID NO: 158604 - DNA, 1332 bp, Zea mays
  Clone ID: MRT4577_76225C.1
caacacacttgagaacacactgcatccatagagtttcccatggccggctaccaaagttcgtttacaagattttggatgatggacgaggaagacgacgacatgcatcacttagtagacaacgatgaagttgagcttgcgacatacaaccaccttgtgcaatgcgagagttctcagcgtcggcgacggtcggatgcgccacctaagcaaatacgtccaagaaacctgggtgatgctgatggtcatcaaagaatttggcttgattatttcgctgatcagcctgtgtttaatgacaggcaattccgagaaaggtttcgcatgcggaggcatgtggtgttacgcattgtagacgctgttcaagctcggaaccccaactacttcactaggaaacatgattgttgtgggaagttgggactttccgctcttcaaaagtgtgtcgcggctcttcgcatcctggcatatggcttgcctgctaatgccattgacgagtatgttcgtataggtgagtccactgctagagaagcattacgacatttctgtcgagctatcatagacgtctatggtccgtattacctaagggccccaaacgccgccgatgtagcaaggctcttagcggagggtgagcaacgcggattcccggggatgctaggtagcatcgactgtatgcactgggagtggcggaactgtccaagtgcatggaagggcatgttcaccggacgtgggaagcatccatctatgattcttgaagcggttgcatcgcatgacctatggatatggcatgcttactttgggatgccaggcagtaacaatgatataaatgtgcttcaaagatctcctgttttctcttcgtatctaagggggcaatcagctcctgtgaatttccaggtgaacggtcgtacatacgacatgggttattatctagctgatggtatataccccacgtggcctgcctttgtcaagagcattcgtcatcccatggagacaaagacccaacacttcagcacactacaggaaagtgcgtgtaaagacattgagcgtgcttttggagtgttgagggctcgttttgctgttgtacgagggcctgcttatggttggtacccaaaacagattagtgagataatgatggcttgtatcatcctgcacaacatgatagtggaggatgaaggtgaccatgcagagaacactgcattctcggatattggttacatcgctccggtgaatcaaaacaatccagatagagagtcatttgttgatgcacaccatagagactcatttgttgatgcacacccacctgctgcaattttcattctggtgttccagtccaaggcctcttaa

SEQ ID NO: 158605 - DNA, 491 bp, Zea mays
  Clone ID: MRT4577_76226C.1
aggtgaatttgtgaagacacatggccttcaggcaggggatacactcattatctacaaaaactccgtacctggcaaatttattatccgtggggagaagtccattcagcagacaaacctgtagacacaaattgatgtgattgacaccatcagatatggtgctcgaggatacaccatacgttcagaattgagttgttatcgacttctgtaatgtttcaccatcacattgggataagtcgaaaaggagaatcacgagtctgagaccccgcgtgaatggagggaaggaggaaaggaagacattggaagtgcgcctaagttcagaacaagtggttcatgtcctacgcccccccccccccccccaaccggttgtatttggatggctgagtcctgctgcacattgcattctgaagaacattcgtagtctttttgttttgtaaatattttggatctataagataaaggaagcggtttggaacttacgcaaattctgatac

SEQ ID NO: 158606 - DNA, 271 bp, Zea mays
  Clone ID: MRT4577_76227C.1
gggcgctcggggcaacgtcgagctagctctgatcaaccatgtatgcgtcgggcaatctctttgtccctgctctgagcaatcaccaagttacttacattcatgcacgtgactagcactgaacccgtgcctgtgcctgaacgacactcgtgggagtgagcacgtcttttgagattgcttactgagatgtacatcgacaagtggtgccctcatactcggcctgtgtcacctaaaaatggactctctctggattgcaacatattgcgcggcggtt

SEQ ID NO: 158607 - DNA, 594 bp, Zea mays
  unsure (1)..(594): unsure at all n locations
  Clone ID: MRT4577_76228C.1
cggccttagcgtaaaaaaaaaacaaagaacaaaactaaaaaaaataaaaaaaaaaaaaaaaaaaaaaaaaaataaaaaaaaaaatttttttttaaaaaaaaaaaataaaaaatttttttaaaaaaaaaaaaaaaaaaaaaaaaaaaattttttttcctgggccgcgcccccccttggggctatttttgcaattttcccccccccggggggggggtgggccttccttttagggggcccatttccccttttggggggccgttttacattccattggccggttttttacaacgttggacctggaaaaaccttgggtttcccccttttaagccccttgccgccaggccccttttcccctgtttggnttttgccnaaaggccccgaaccgggcccctttcccaactttttgcccccctaattggcctttggcccccccctgcccccggcctttaggcccgggggggtggggggtttcccccctgggccccgtncctttgccgccccccgacccccgggccttnggttttttccctttttttctctcccttttgcggcgttccccggctttccttnncggggggcccccttggggccccc

SEQ ID NO: 158608 - DNA, 375 bp, Zea mays
  unsure (1)..(375): unsure at all n locations
  Clone ID: MRT4577_76229C.1
ccccaccccgaagcgccgtttcgcccgccnccgncgacggaggaggggcnccnganccccgccgcngaacaggccagaggagagcaaagaggaaggggaggccacgagggcgccagnagaganaagcagccgcancgcggcgggcgagaaccncgaaccncccaacccgnaaggaaggcgncgacggccngggccgcccnaagcagcacccnccncgccgccgccancgggggcgccgcanaccncgccgcagccaacaccttttttttttgacccccaccccccgacgggggaagangaannggcgcccgggagggcgccccacacaaaaaaaaaaaaggccaacgagacgggcaaccccacccggcgaggcgc

SEQ ID NO: 158609 - DNA, 269 bp, Zea mays
  Clone ID: MRT4577_7622C.1
ctcaagggtgggttaccgtagcaacacgcaggcaattccgcaactgactgcacaccaacttcacattaactttggccaccatacaccagggtccaaatgacaagccacaacaccaatgcacctatacctggtacacttgaacctggacatctccaaactgaatcttcttcggacacgtgtacaccgcaatgtgcgtttgctacatccttaacaccagacatttctatcaacagggggcggcccccaccaagtactaataagaactccaa

SEQ ID NO: 158610 - DNA, 2238 bp, Zea mays
  Clone ID: MRT4577_76230C.1
atgtcgggagatcacgccaagaaagagatggggaccggcgagaagtccattacaagccacgggaaggctccatcgggagagtcctacaacaaagggaaggggaaggaaaaggaatcctcttcacacaagtcgcgtcggagcggtgacaagaagaagaagatgaggaaggtggtctactacgagaccgactcctcgtctccatccacctctggctttgacacgccgtccgtaacttctaagcgccatgagcgaaagaagtttaattatgctaggtggagtgatatgatgcgatatcacctaacctcactccacaaaagtatatgggatgttgttgagtttggtgtacaggtaccatccgtaggggatgaagactatgatgaggacgaagtagcccaaattgtgcacttcaactctcaagccaccactatactcctcgcctctctaagtcgagaggagtataataaggtgcaagggttaaagagcgcaaaggagatttgggacatgctaaagaccgagcacgaaggagacgaggtgaccaagatcaccaagcgggagacgatcgagggggagctcaatccggatgaccacgaagtggttaaggagccacaagacatgtacaactggctcaaaaccttggtgaaccaagtgtgtaacctcgggagcaaaaaatgggatgaccacgaagtggttaaggttattcttagatcacttgttttccttatccctactcaagttcaattaatttgtggtaatcctagatatacactaatgactcccgaggaagtgataggaaactttgtgagatttgagttgatgatcaaaggctcaaagaaaatcaacgagctagatggcccctccatgttcgaagcacaaccggtcgcattcaaagcgacagaagaaaagaaggaggaatctacatcaagtagaacacccatcgacgcctccaagctcgacaacaaggaaatggcgctcatcatcaagagcttccgccaaatcctcaagcaaaggaaggggaaagattacaaaccccgttccaagaaggtgtgctacaaatgtggtaagcccggtcatttcattgcaaaatgtccgctatctagtgccagtgacagggataacgacaagaagggcaagaggtaccacaagaagaggggcggcgatgcccatgtgtgtcgcgaatgggactccgacgagagctctagcgactcctcctccaacgaggacgccgccaacatcgtcgtcaccaaaggactcctcttccccaacgtcggccacaagtgcctcatggcaaaggacggcaaaaggaagaaggtaaaatcaaaatcctccactaaatatgaaacctctagtgatgaggataatgctagtgatgaggaggataatttacacatcctttttgccaaccttaacatgcaacaaaaggaaaaattgaatgaattaattagtgctattcatgagaaggatgaactcttggacacccaagaggacttcctaattaaggaaaataagaagcatgttaaggttaaaaatgcttatgctctagaaatagaaaaatgtgaaaaactatctagtgagctaagcaattgccatgacactattgccaaccttagaaatgaaaatgctaaattaattgctaaggttgattctaatatttgtgatgtttcaattcccaatcttagagatgaaaatgttgatttgcttgctaagattgaagaattgaatatctctcttgctagccttagaaatgaaaatgaaaaattgattgctaaggctaaagattttgatgtttgcaatgttactatttctaaccttagaagtgaaaatgatatattacatgctaaggttgtagaattaaaatcttgcaaaccttctacatctaccgttgagcatacttccatttgtactagatgtagagacattaacattgatgctattcatgatcatatggctttaattaaacaacaaaatgatcatatagccaaattagatgccaaaattaccgagcatgacttagaaaatgaaaaatttaaatttgctagaagcatgctctatagtgggagacgccctggcatcaaggatggcattggcttccaaaagggagacaatgtcaaaattaatgcccctcctaaaagattgtctaactttgttaagggcaaggctcccatgcctcaggataacgagggttacattttgtaccctgccggttatccccgagaacaaaataaggagaattcattctag

SEQ ID NO: 158611 - DNA, 289 bp, Zea mays
  unsure (1)..(289): unsure at all n locations
  Clone ID: MRT4577_76231C.1
aggtccgcaccccccccccccccccccccactcccacgcgcgcttgggcgtctctcctcctcctcccccgggtcgcgtgcgcgctctgcttcccttgccgccgtgcgctgnngggggtcgctgtcgngcgcgcgctgtttgctgctcgcctgggggggggtgngcttggnncncttcntcnnctccntggntcccccntnggggctggggggngtccgggcctggnccggcntnncccnggtcgtgctcccgtgggccnggggngcctccgngcgggtgngcctgggcg

SEQ ID NO: 158612 - DNA, 2718 bp, Zea mays
  Clone ID: MRT4577_76232C.1
atgtcgggagatcacgccaagaaagagatggggaccggtgagaagcccattacaagccacggggaggctccatcgggagagtcctacaacaaagggaaggggaaggaaaaggaatccccttcacacaagtcacgtcggagcggtgacaagaagaagaagatgaggaaggtggtctactacgagaccgactcctcgtcgccatccaccaccggctccgacacgccgtccgtaacttctaagcgccatgagcgcaagaagtttagtaagatccccctacgctaccctcgcattcctaaacatacgccattactttccgtccctttgggaaaaccaccaacgtttgatggtgaagattatgctaggtggagtgatatgatgcgatatcacctaacctcactccacaaaagtatatgggatgttgttgagtttggtgtacatgtaccatccgtaggggatgaagactatgatgaggatgaagtagcccaaattgtgcacttcaactcccaagccaccactatactcctcacctctctaagtcgagaggagtataataaggtgcaagggttgaagagcgcaaaggagatttgggacgtgctaaagaccgcacacgaaggagacgaggtgaccaagatcaccaagcgggagacgatcgagggggagctcggtcgcttccggcttcgccaaggcgaagagccacaagaaatgtacaaccggctcaagaccttggtgaaccaagtgcgcaacctcgggaataagaaatgggatgaccatgagatggttaaggttattcttagatcacttgttttccttaaccctacacaagttcaattaattcgtggtaatcctagatatacactaatgtctcccgaggaagtaataggaaactttgtgagctttgaattgatgatcaaaggttcaaagaaaatcaacgagttagatggccccttcacggctgaagcacaaccggttgcattcaaggcaacagaggagaagaaggaggagtctacatcaagtagacaaccaatcgacgcctcaaagctcgacaatgagaagatgacgctcatcatcaagagctttcgccaaatcctcaagcaaaggagggggaaggactacaaatcccgctccaagaaagtttgctacaagtgtggtaagcccggtcattttattgcaaaatgtcctatatctagtgacagtgacaggggcgacgacaagaaggggagaagaaaggagaagaagaggtattacaagaagaagggcggcgatgcccatgtttgccaggaatgggactccgacgagagctccaccgactcctcctccgatgaggacgccgcaaacatcgccgtcaccaagggtcttctcttccccaacgtcggccacaagtgcctcatggcaaaggacgacaaaaggaagaaggtaaaatcaagatcctccactaaatatgaaacctctagtgatgaggataatgctagtgatgaggaggataacttgtgcaccctttttgccaaccttaacatgcaacaaaaagaaaaattaaatgaattaattagtgctattcatgagaaggatgatctcttggatacccaagaggacttccttattaaagaaaacaagaagcatgttaaggttaagaatacttatgctctagaagtagaaaaatgcgaaaaattatctaatgagctaagcacttgccatgatactattgccaaccttagaaatgaaaatgataaacttattgctaaggttgattctaatatttgtgatgattctatttccaatcttagagatgataaagctaatttgcttgctaagattgaaaagttgaatgattcacttgctagccttagaaatgagaatgaaaaattgattgctaaggctaaagattttgatgtttgcaatgttactatttctaaccttagaagtgaaaatgatatattacatgctaaggttgtagaattaaaattttgcaaaccctctacatctaccgttgagcatacttccatttgtactagatgtagagacattaacattgatgctattcatgatcatatggctttaattaaacaacaaaatgatcatatcgctaaattagatgctaaaattgccgagcatgacttagaaaatgaaaagtttaaatttgctagaagtatgctctatagtgggagacgccctggcatcaaggatggcattgacttccaaaagggagacaatgtcaaacttaatgcccctcctaaaagattgtctaattttgtaaagggcaaggctcccatgcctcaggataacgaggggtacattttgtaccctgccggttatcccgagagcaaaattaggagaattcactctaggaagtctcactctggccctaatcatgcttttgtgtataagggtgagacatctagctctaggcaatcaacccgtgcaaaattgcctaaaaggaaaactcctactgcatcaaatggtcataacatttcatttaaaacttttgatgcttcttatgttttaactaacaaatccggcaaggtttatgcatccgggggctcaagttggatcatcgatagcgggtgcacaaaccatatgacaggggagaagaagatgttctcctcctataagaaaaaccaagatccccaacgagctatcacattcggggatggaaatcaaggtttggtcaaaggattgggtaaaatagctatatctcctcactacacgacggttgatctttag

SEQ ID NO: 158613 - DNA, 3444 bp, Zea mays
  Clone ID: MRT4577_76233C.1
tcacaaaaaatgtgcaacacgagatctagtggtcacgaacataccaaagtcgctcagtatattctggtgtgggtgatctcttacggttgccagaaagaaattgcaaattctcttcctcagttctaccattgtcttgactagaggattcatatttcgtcgaggattatgatttacctctctttttgccgtcctttgctgtgagtcacttgtagccgccgttggcgaagaggcgtcccttggtgacggcgatgttggcggcgtcctcgttggaggaggagtcgcttgagctctcgtcggagacccattagcgacaaacgtgggcatcgccgcccttcttcttgcaatgcctctacttttcctttcttctccccttcttgtcgtcacctcggtcactttcactagataaaggacatttagcaataaaatgaccggagcttaccacacttgtagcgaacattctaagagcgtgacttgtagtctttcccccacctttgtttaaggatttgacggaaacacttggggaggagcgccatctactcatggtcgagcttggatccgtagaacggttttcgtacttggtgtagactcctcattcttctcctgcgtctccttcaatgctacatgttggtctttgttttttgagttcgcgaatggctctctgttttttttcttgtttttaatagttcatgaacccagagcactatgtgtgatccattcgcatccattcattgcgtcattgaaaagagagtattccctttttggctagccctcaaaccatccttttaatgcgtataacgtatcaattcatctatatactgtggttcattggtatccttccccgaatgtgatagctctttggggatcttggtttttctcataggaggagaacatcttcttctcccctgtcatgtggtttgtgcacccactatcgatgatccaacttgagcccccggatgcataaaccttgccggatttgttagttaaaacataagatgcatcaaaagttttaaatgaaatgttatgatcatttgatgcactaggagttttcttcttaggcaattttgcatgggttgattgcctagaactagatgtctcacccttatacataaaagcatgattggggccagagtgagacttcctagaatgaattctcctaattttgctctcgggataaccggcagggtataaaatgtaaccctcgttatcctgtgacatgggagccttgccctttacaaaattagacaatcttttaggaggggcattaagtttgatattgtctcccttttggaagccaatgccatccttgatgccagggcgtctcccactatagagcatgcttctagcaaatttaaacttttcattttctaagtcatgctcattgatcttagcattaagttgagcgatgtgatctttttgctctttaatcaaagctaggtgatcatggacagcatcaacattaatgtctctatagccaggacacatggaagtatgcaggacaatagccaagattatctaattatgtggccgatgctgctgacccctatgaatcagctgttaattcattaccttcagctgtcaaggaagtcttgcttcgaattctacgtctaagaattggtactcgatatgatattgatatccattgtgttaaaagccttgatgagcttcctgagtcatctgctcttgctgtccttaatcagtttttgatatcaggtggagacaaacacaacaaaggagattattttgcatcgttggttgctaagcaccaggctgagacctttggcttaacacatgcattacacggtaccacttatttgtcaagaaatccggaaatgcatagcaagcgatacccacatgaagattatgattttgtgacacccaggagcagtaggtacgattcgtcagcccatcatccttcaacatactacgaagacgatccaccagtgtctgagtcaagggttagaagatatgctgaagaaaggtccaccattgtaagaagcccagaaccacgtccgcgatatgacgaaacagacataagaataaacccagaaccaagattaccatatgaatcaagacacaacgccgaaaagcatctcgatcgaagatacatacaagagcatagttcaaatattgaaagaccagctgaagaagctctcctttctagggaaaggagatttctgcctgctgcagggtacatgccgaacccaggcggctcggatttccgctccaggtcgcccgccgaatattcagcacaacgccaacaaatgaggtttgatccattcacaggtgaaccttacaagtttgatcccttcacaggggagcccatcaggccagatccgaaccagcgccgctcaggaagcctgtactgatcagattagttggagcgatatgccagataagaccctgaaacaaagctagatctggataactcttcttcttgtctgccaagtgtctctgtgattttgcttgtgggctacagatcatgtaccccgagcaccatgtgtgatccagtcggactaatcatttcggcattgaaaagtcggactaactttttttgtgcccataacgctacgtattgtttggtagattaattaaaaattcatccggtgaaaagcaaaaaaaaaaaaaaaaaggcccatagaagacaagtgatctaagaataaccttaaccatttcgtggtcatcccattttttgctcccgaggttgcgcacttggttcaccaaggttttgagccggttgtacatgtcttgtggctcctccccttggcgaagtcggaagcgaccgagctccccctcgatcgtctcccgcttggtgatcttggtcacctcgtctccttcgtgcgcggtctttagcacgtcccaaatctcctttgcgctcttcaacccttgcaccttattatacttctctcgacttagagaggcgaggagtatagtggtggcttgggagttgaagtgcacacattgggccacttcgtcctcatcataatcttcatcccctacggatggtacctgtacaccaaactcaacaacatcccatatacttttgtggagtgaggttaggtgatatcgcatcatatcactccacctagcataatcttcaccatcaaacgttggtggtttgcctaatgggatggaaagtaaaggcgtatgtttaggaatacgaggatagcgtagggggatcttactaaacttcttgcgctcatggcgcttagaagtgacggacggcgtgtcggagccggaggtggatggcgacgaggagtcggtctcgtagtagaccaccttcctcatcttcttcttcttgtcaccgctccgatgcgacttgtgtgaaggggattccttttccttccccttccctttgttgtaggactctcccgatggagccttcccgtggcttgtaatgggcttctcgccggtccccatctctttcttggcgtgatctcccgacat

SEQ ID NO: 158614 - DNA, 499 bp, Zea mays
  Clone ID: MRT4577_76234C.1
ttttgtttttttttttttttttttttttttttttttttttttttttttttttttttttttttttttttttttttttttttttttttttttttcggaacatgggttttttcaaaactccttgggggggccccccccgttcatcattggggggggggggcctggccgggtgcccatttaaacccccaggaccccccttggggaaaacgggaccccaaaggggggccccccccatccatgtttggccagggggggggatgcctttaaatcctgcctcccccgcccgggttacaggttttactttcgacccctgcctaacgggtcgctttaacagttccaacccttttttgacaaaccaagctcagctccccccctttttattccttgttcacaaaaaaaaaggggggtccccagcaaattgttcagtaataaagggaaccttgccaccaatcaccttttggggcaaagccctccggcttggcccccttggtttttggcgggg

SEQ ID NO: 158615 - DNA, 203 bp, Zea mays
  unsure (1)..(203): unsure at all n locations
  Clone ID: MRT4577_76235C.1
tatantttttttttgtaccaattcaagctgtttgggtgccaatcgattctctatactgtgaacggacagggggacacacctcttataagtcggaaagtttggcaatgacaaaaaaactgtgcaatgtctttcaactaatgtgaactttttccaaaacactctcgaggaggaatattttgatcgaacctaataaggacatccct

SEQ ID NO: 158616 - DNA, 442 bp, Zea mays
  Clone ID: MRT4577_76236C.1
gggggccggcctttttttttttttttgagggggaatttctcatttttttgcaacaaacattatacgggcgcatggggaatgattattacaggggccctccaaatctaaagagacccccacgcacgcacacgaactcgactcaacttcatgctggaacaaaagctaccgacaagacctggccaccggcacaaacttattctcctccctcgctcgccctcctattcgcctttgcccactctacatcgatccatcgccgatgctccatcacgcaatccagcgaaggcctttttttatctctgctcatcacgcgttgctccttaaggagccgagagcctttatggcgcccgcccggaagatttactgttcgtagaaagcccccgaatgcaactccccaagaacagggcccacccagaaaatccagagttcatccccattcttttcc

SEQ ID NO: 158617 - DNA, 404 bp, Zea mays
  Clone ID: MRT4577_76237C.1
aaaaaaagaggggataaaaaattttttttttttgaaaaaacccccaagttacattataaacactaggggggtctacatgggcccaaaaaaaaaggaaacgggtttttgccaaacatttgaccatataagggccttttagctaaaaacccaatttgggggagtaggggggagtcccaacccccgaaaggacagccaatttttttgaacggggctccttttgagaaaacctttttggtttttccattaaaaaagttccataccccgggggctggagtttgtttacataacggccatgcacagggactggagttccataaacatgaagctcacaaacaattgaacacccccctacaagttcaggggatgtaaaattacggccacatttacccaagcgcaacaggccg

SEQ ID NO: 158618 - DNA, 635 bp, Zea mays
  Clone ID: MRT4577_76238C.1
cggggccgcggctctgtttagtagggggagggaccgctggtgagagggaaagaaacccagggggttaagtgcaaagccagagactcagaggaatagtgccttaggggtagatctgtgaggtttgatttgttttaaacccaggggtctcggtacaaacggtttttccagaaaaacttaattaaaacctaatttaaattcaaacaggaactttaaaaacccataacttctgtttggtttatccaaatttggtcaaactaattttgccagactctaaatcatgtaacctatgtagaaaaaatataaaaccccttggtgctgtggaaaacttaaaagatctgatttaatgttaactttggccaaaagttaaataatagtaagaaaaatagttagggcatttgactagggttagaaaaatttggagaagtttttttgtttacctactgacctgtttaaaaaatgttaaacccctctgtctactccatttaaattagttttaccccttattccataatgtgcttaagtttaagaaaaataggaaaagtggcacaaatgttgaatcagagagcacacctatttttgttaagatacttagttaatgtagttcactaaaaaaatatgtcatgccctgttttagt

SEQ ID NO: 158619 - DNA, 428 bp, Zea mays
  Clone ID: MRT4577_76239C.1
gtgaagcaaagatacaattcaacattgtctgccgtctgcgtagtagtagccagtaggaaagaagaaaaacgacccgagtccagatatccatgctagtagaattttgccacaaacgtccacgatgacttgtgcacaatcccagacacaggagacccacgttgcgcaactacgatccatgtatggccagaggggaaaaaaaaccccggtaaaatcagcataagcatacatacatatccaatcaaacacatctggagatgactgtcacaatgcagcaactcgagctttgcatttctcctagcaggcacatcgaagcgttcggtcttccaagtcgccagcaacattcagtaactggagtcaacgaggacgaagtatcagcggatacgtacagcaccagccactgctccaacacacggaaagcaatggccctt

SEQ ID NO: 158620 - DNA, 684 bp, Zea mays
  Clone ID: MRT4577_7623C.1
gctaaggttgctactgttgagccattcggtgctattgtacagttttaagtggcgtgaaagcactttgtccgcttcctcacatgtcagagttggaacatgttgttaaaccaccaaagaaatttaaggttggagctgagcttcttttccgtgtgttgggctgcaaatccaagagagttacagtgacatacaagaagtctctggtgaaatcaaaacttgatgtgctttcatcatatgctgatgcaaaaattggtttagtgactcatggatggattactcatattgaaaagcacggttgctttgtaaaattctacaatggagttcaaggttttgttagcagatctgaccttggattagaggctggaactgaagcagaaaatgtttatcatgttggccaagtggtcaaatgtagaattatcaatgtgatccctgcttcaaggaaactaaatgttagttttgtcatatcccataataggattgctccgatagacactccaaagttgggcagtattgtctctggtgatgtggaacggcttactcctgcagctgttgatgttagtgtaaatggcttctccaaggggacaatactgaatgaacatttggcagaccatcatggtcaagctgctcagttgaagaatgtgttgaaacctgggcacgagttcaaccaactcttagttctcgatactg

SEQ ID NO: 158621 - DNA, 1288 bp, Zea mays
  Clone ID: MRT4577_76240C.1
cctcgaggccggccgggacaggccttcaagaaaaaatctgccgcaatagaacgggcaccagaacagaaccgcagaacgcaaccgccttcagccttctcctctcccacggacgagcgccacacggcaccccactgcgaggcaatcgccaacccgcactgcaccactcgcgcctcgcgatcaccgctccgaactggaaatcaaatggcgccgtcgccgctgtgttccgcttccccacggccgcttcgagccccaggccagcctccccgagacgtccgctcgccgcggacggtcgtcgtggccgcgggcacccgtgtgagcggagcggaggcccgcgcgtcgctggtgctggccttggcctcgcatgcgctctccgcctcgcagcgccgcttcgccgagctcgccgatgaggccgccaagtacgccttcccgtctggccgcttcgagccccgcaccctcgaggaggccctcatgtccgtgcctgatctcgagacagttccgtttcgcgtactgaagcgcgaggcagagtacgagatcagagaagtggagtcatacttcgttgctgaaacgacgatgcccggaagatctgggttcgatttcaacgggtcatctcagtcgttcaacgtgctggcatcatatttattcggtaagaatactgcctctgagcaaatggaaatgacaacacctgtttttactcggaagggtgagtcaaacggccaatcaatggacatgacgaccccagtgataacaaaaaagtcagctggtacaaataaatggaaaatgtcatttgtgatgccagcgaagtatggttccaatttgcctcgcccaaaagatccttctgtgattatcaaggaggtgcccagcaaaatagttgccgttgcagccttttcaggtttggttactgatgatgatataaaccagagggagtctaaattgcgcgaatctctccgtaaagataccacatttagagtgaaagatgattcggtggtggaagtcgcacagtacaatccaccgttcacacttccattcacaaggagaaatgaaatagcattggaggttgagaggaacgatatagccttatgatgtcctagattaacaaataaattattggcatttgagagtgtatgcaaatgcccatcgtccctaatgcatatatgtataatttctatctggcatgttctgtatatatgtagacatgttaattatcgcatgcatatattattgtattggaaattaaataataaaaaaaaaaaaagttgtgcgcctaagcccgcgcagggtcgggctggag

SEQ ID NO: 158622 - DNA, 275 bp, Zea mays
  Clone ID: MRT4577_76241C.1
cccacgcgtccgagcgatttgggattgtcacaagttcagctggaactggaaccacagaggatacagaggcaaagaagaggaaaagagcagagcgctttgggattgcctgatgaaaagttcctgatactttctgttctccagtgttttccggtgctctccttcttcttggtcacatatatgcctaaatgcacagtcatgtgcctacgtcctgcctcgcaatgagggagcatgtaccccaggtacatccatggcactgcggcagcagtctgacttat

SEQ ID NO: 158623 - DNA, 2025 bp, Zea mays
  unsure (1)..(2025): unsure at all n locations
  Clone ID: MRT4577_76242C.1
tgttatgcgaaggttaatgaagttttcagattgctataatttttttttgacagcactgacgatcccagattttgcatctggtgatggtggtagagagaaggcctcctcggttcaacccgtggggcaatatggcatgcttctgcctgctggagttctaaaataataaaaaaaaactagcgtgggcgatctggagatgactgtccaaaagggcgatccatgtatggccagagggaaaaaaaaccccggtaaaatcagcataagcatacatacatatccaatcaaacacatctggagatgactgtccaaaagggcgccatttctcgagccacaacgtcacaatgcagcaactcgagctttgcatttctcctagcaggcacatcgaagcgttcggtcttccaagtcgtcagcaacattcagtcctgaaccggcgaggtaactggaagtttcagtcggcaggaggaaacttacactggagtcaacgaggacgaagtatcagcggatacgtacagcaccacccactgctccaacacacggaaagcaatggcccctgcttaaacttgctatgaaaagcaaaggcgagcggctttgctccttctccaggtccccggatgaacccaactagtgatagtgagacgagtggagatctccgcacgtcatatatcgcgatcaggccacggtacatttcgtttccatctctgaacgacagtgccagacgttcccctgaagcgtcccatgctaatttctctatgcctcggctaacaatcagggaggaaatttctggaagttcaactggtaggaggtgtgcatctaaagatggtggcttcgacgagaagtgaattgaaccaagtgtcgtcgagttggaaaaggataacaatgcaactcgaccttctgggtcccaatttgctccagacacatatccattagacgaagaccagggttctgaagtccatgtgtttgtctcccagaagtgaaaagtaccatcaaatttagcaactagaaggtaatctccactgggtgaccaccgcactaatgatatattgcttaatccacgccgtataggagttcccaacccttgagacacatcccaaattgtgaaagatgaactattacatgaggcagatgccaagtatcttccatcaggtttccaacaaagtgcactaacgagctcagcagaagagccacgaagaacatccacaagtatccactgaccaccagaacctctagggaaggcactaaaggaagaagaagtgaccccagatttcatgaatgggacattgccaggatatgatgccgaccagaggcatatccctcctttgcaggcaactgcaatcatcttcccactatttggtctccactcaacagccttaacatccgtttgatgatcatttgttaaaatgcatggttctttagcatctgagtcctcaaagtcttggacagtaacctggttcttcccagacacgaatgctaagcaatgcttgtatggattccaacttactttctgcgtgtcaaattcttctagcagatttgggtctagtggagggaagaccatccgcctgaagaagtcggatatggtggctgccaaaccagcggtgggcacagtgtcagcaggctcgacttggtccgcggcaggagcagcaggctcgcggctggcgagaagaagagcctccggctggaacggaatcggggcgaacaccatcccgaggacatccccatatgcgtccttggcgcggtcgtcggagagggcatccgccgcaacgaggtcgcggttgatctcgcagatggtgacggcgcccggcggagggaagctcggcatcgcagctagctagcttgatagggttaggagatagattcgtggttcccggacccagcccgaaatggggcgcttgagctcgaccagtacacgaggcagccaggggaagcggcggcggaagcaaccgagcggcgaacggggagagaacggaggcgcgcgcgcgacgggcagaccaggggcggatgtgttttttttttttttttttttttttnccc

SEQ ID NO: 158624 - DNA, 308 bp, Zea mays
  unsure (1)..(308): unsure at all n locations
  Clone ID: MRT4577_76243C.1
caaaaaaaaggccccgccaaaaggaaaggggnccgaggnaaaaaggaaacccgggaaggcaccccccaccaggaaggggggggcccaaaaaaagaaggggggaagggaaaaacccggcccaggggggggcccccaaccnaaccaggccagaaccggcaagggaaaagccaatggcaggaggccgcaccagggggggaggttctttgggaaggccccccgccaaaaaatgggtccccgggggccggggccgagggaccccaccccgggcgncgggcccccccaaaaggcccctccacccttggtggggg

SEQ ID NO: 158625 - DNA, 310 bp, Zea mays
  unsure (1)..(310): unsure at all n locations
  Clone ID: MRT4577_76244C.1
cccacgcgtccgtccacgcgttcttgctgaactaaaaccgtgttgggaggggtaaattggcggggggggggattgaaaaaattaagataataaaggataacaaaaagatattttttgttgcacactctgttgnnngataggctgctaaatatgtgtttagatgagtgtaattgaaaagtaatcgaacattaaagaatacttgagaaactgtggatgactacaatataggtacgatacatgaacataaggcagtgaactttatatacagtacgtcatcggatcttggttatagaggaaataagcatgtcta

SEQ ID NO: 158626 - DNA, 725 bp, Zea mays
  Clone ID: MRT4577_76245C.1
cctccggccgggccgatcattcgtcgtcctgctacatccatcgctgcccctctccacttgcccatcatggtcttcctgtctggctttgcgttgtgcgcggccgtaaccagcgccactgcgcttcagatcccactgctgtcgtcgagcaaccaggcgctgctcggccatccccaggggactaagccgctagtcaactcgacggagcttcaggagctcatcagtggcgatagattgatgacgcgcgcgaagaagctgtatgaaattgccaaacttggtgaagccgagtacaaccatccgactagagtcattggtagcgctggccatctcggcaccctatcatacatctacgagactctgctcgagcttggagactattacaccatctccaaccagtccttccctgccgtgtctggcaacgtcttcgagtcgcgcttggtcattggcgatggcgtgcccaaatcagcagcacccatgggcctgaccccagcaacaaaggacaaggagcccgtacacggtgatctcgtcctcgtagataaccaaggctgcgaggcatctgatttccccgactctgtggcgggcaacattgcctttatcaagcgcggcgtatgcccatttggcacaaagtccgagcacgctggtcgcaaggcgctgtggcggctatcgtatacactatgaaaaggatcctgtttcgggcactttgggaacaccatcgcccaatcacattg

SEQ ID NO: 158627 - DNA, 1445 bp, Zea mays
  unsure (1)..(1445): unsure at all n locations
  Clone ID: MRT4577_76246C.1
tatgtgacgtgaacccctttcgctcgctccgagtgcggaggaaggggagctcgacgcacccaagtcgcccgcccacggaacgcgccgccgccgccgccgccatcacatcacagaggcctcgccgtcgtctcggatattccccgccgtaggaccagtttccctccagctgccggagaccatgtcgggcggcctggacatgtccctggacgacctcatcaagcagtccaagtcccgacccaaggacagcccggcgtccttgtcggggcctgcccgccgcgcgccacaccccgaccgcgccgcgccctacccaccggccgctcccaaggtacaccgcgtgcgccctgcgtcctccttgccccgggttccctccaccagaaaaccctaacgccgccgccgccggcctgtgcccgctcgtccctcccaggcccgtgccgccgccgactcgccctacggngtctactccaagcacatcgccgcgatagcgccgccgccgccggccaaagcaaggtcgctcgagacgggaacgaagctgcacatctccaaccttgactccggcgtcacggtcgaagatgtccaggaactcttctcagaagttggggagctcaagcgttattcaatgaactatgacaaggaggggagatccaaggggactgcggaagttgtttttgcaaggaaagtggatgctttggatgctatcaagagatacaatggtgttctacttgatgggaagccaatgaatttagagctcattggaaacaatgtcgaaccacctcccttgccaccattaatacacaatcgtcctttgcagaactataacgatatccacagcagtgtgcttcaatcccaaagaaatggtcagcgaagagcacctcaagtcaacggtcggggtggacgcagtagtcaaaccagcggtggccgcggacaggggagaggccgagggcaggaccggaaccgcacgcccatttctgcttcagatcttgacgccgaactcgacaagtaccatgcagcggcagcgaaggaggaatgaggctctggcgttctcttctactaatctatttacacaggtggaaaggcgttctcttctgggggcgttcagaagcatgaagtttactatcttagccctagtgttctacgctagaattcttttcgaccaggattctgttttgtgtgtaggatgaacttgtggttctactttgcaggatcttatttgctgctttgtgggcacgaatattgagaacaactggaaaccgactttgttattgtgtccgccctggtcctgggtctgttctgttgtattttaagtagttttgggttgcctaccgaagacatcaggcaaacatattccggagcccaagagtctctgtgttctgtcttgatgttttacaattgtgcctttagtctttctgcggtcctctacttgctttatttttaaattgcaaaaaaaa

SEQ ID NO: 158628 - DNA, 483 bp, Zea mays
  Clone ID: MRT4577_76247C.1
aagcggacaaaaaaaaccaacggacaaaaaccaaaaaaaccaacaggaacaggggggggggggggcaccctcatttctgggaacaaaccgcaaaacccaccacaacccccttgggccaagggcccccagttgccggcccggcccccctcggacggggcgaccgcgccggccagggccccccccgccccccgggcccccccgcccaggggggggcagcgggggcgggacagccccgggagggggggcggggaccccccccccccggccagcggggtgcccccccgcccgccgggggccgggcagaaggcggcctcgcccttcgacagggtattggacgggagggtggacgcaatcctcccgcccttgatcggggtgcgcatgctggacgagcagttgtagggggggggcggggcccccacgggggggaggggcccccaacccccaaacttgtccttctcggggggcggagccatcttaaccatt

SEQ ID NO: 158629 - DNA, 326 bp, Zea mays
  Clone ID: MRT4577_76248C.1
cggacgcgtgggccctggggacgacagtgtctcacatttacaaaaccagtctacactggcactattctaaagatctcgacggcgttcccaacgccaccttatctttagggcggccctcgagagtttgctgggcgggcgggtcacaagcagtgaaagactatgagaagaatcaggggtttgaagactacatgaaggagcatctcgcggagttggagagatggtacctctcgcgctctgcggtggattgccatcaacggggccgtaaacaaaaaagaaatgcttgccatcttcaatagggatttcacacttattggcattgcccgttt

SEQ ID NO: 158630 - DNA, 1378 bp, Zea mays
  Clone ID: MRT4577_76249C.1
ccggccgggattcttttggcaccaaaaccctattaaatcatgtgacgtgaacccctttcgctcgctgcgagtgcggaggaaggggagctcgacgcacccgcaagtcgcccgcccacggaacgcgccgccgccgccatcacatcacagaggcctcgccgtcgtctcggatattccccgccgtaggaccagtttccctccagctgccggagaccatgtcgggcggcctggacatgtccctggacgacctcatcaagcagtccaagtcccgacccaaggacaacccggcgtccttgtcggggcctgcccgccgcgcgccacacccccgcccgcgccgcgccctacccaccggccgctcccaaggcccgtgccgccgccgactcgccctacggggtctactccaagcacatcgccgcgatagcgccgcccccgctggccaaagcaaggtcgcttgagacgggaacgaagctgcacatctccaaccttgactccggcgtcaccatcgaggatgtccaggaactcttctcagaagttggggagctcaagcgttattctatgaattatgacaaggatgggagatctaaggggactgtggaagttgtctttgcaaggaaagtggatgctttggatgctatcaagagatacaatggtgttctacttgatgggaagccaatgaatctagagctcattggaaacaatgtcgaaccacctcccatgccaccagtaatacacagtcgtcctttgcagaactataatgatatccatagcaggcataacattctggttacttcgcagtatgcctcaatcccaaagaggtggtcagcgaagagtaccccaaggcaacggtcggggtggacgcagtagtcaaagcagtggtggccggggacaggggaaaggccgaggccaggaccggaatcgcaccaccatttctgctgcagatcttgacgccgaacttgacaagtaccatgcagcggcagtgaaggaggaatgaggctctggcgttctgtttactaaacagctggtaaggcgccgggacagtgtggccttctgctttagaagcatgaagtttgctatcttagtcctagtgttttatgctagaaattttttttggcccatgtacaaccgcgtctctgcgtcaagattcctggtgttttatgtgtagcatgaagttgtggtcctactttgcaggaactatcaatcatatttacagctctgcgggcacgattgagaacaattggaaactaaggggtgtttggtttgaagagtcaatccattctagatgagttggtgaaatgaacttaaaaaaaaaattaaaacttacaaaaaaaatggataccagttattagttcactcgtgaaaaaaaaaaaaaaaaaagcggccc

SEQ ID NO: 158631 - DNA, 672 bp, Zea mays
  Clone ID: MRT4577_7624C.1
ggccgcgggttttcttttttttttttttgttttttttttttttttttttttttttttttttttttttttttttttttttttttttttttttttttttttggggggcaaaagcaaaagcccccccattttgggtagggaacttaaccccacccaaaaaggagaaaaaaatagcaaaacacagggaaaaattaaccaaagccccaaatttacagaaaaagtgtaatttttcacccaagcctcaaaaaatttctggccccccccccggaaggaaacacaaaaaattcccccccccaccgaagggcatggctaaacaaacgccccgcccttggggacaaggacaagcggaatcccccgggggggcgccatccccgggcccccgtccaaagggagggccccttttcccacccccggggggaacccccattccaaaggggccaaaaggctgacaaggcccagccccaaaaccggcagggcaaaattgaagcccgggaaaatcccccggccccccccaaacggaaaaaacgggtagcccccacccttaaagcccaccgggggacggccccccacaaacccgtttggggggaacccccccggggcggcccacaaaaaaaggcccccccccatggcccacaccttgaccaaaaaaacccccttggccgggatcccggaacc

SEQ ID NO: 158632 - DNA, 186 bp, Zea mays
  Clone ID: MRT4577_76250C.1
acaagactctagattgagtcgtattacagcatgatgtgggatacccagacagccgtgatgaactagtgcatcagcggttgcagtcggcatatctaccatactggtctgcatgatgggatgctgaagtctaggatgtggaccactacgtgtctatgtagatgcacgcactgatgtatgtgggacact

SEQ ID NO: 158633 - DNA, 554 bp, Zea mays
  Clone ID: MRT4577_76251C.1
tcgaggccggccgggccgggactattgaccgtcattgtgcataccataacactatcaccattttcaccaactccctcctatacccggcatgtcgaaccaagactgccgatcgcggacgaagatgaacgcgctcacactacgctagaagctccaccgggcgaacacatcgccctaggaccccgatctgaacgtgccgctcgaccacgcccacaacatcagagacgaaactggtatgcgcgcctacagctgcagcagtttgtctcgctctctctcagaaggagaccgaggtcatctccgcgcaatcactcgctaacggctacaggctgcctctccaccacaatccggttgaagtcttcttgtccacaagcttgactgaactacttggatgttgatgatgatgaacaatgattgcatagtcgaaaaaggagatagaacgtgtgccacttctgcgagaatgtggatgtctgtcttgaacacatgttgtactatactctgtctgaaaagaggaactgatgtgggtatactgataaactaacaactgtcgatgaccgtta

SEQ ID NO: 158634 - DNA, 103 bp, Zea mays
  Clone ID: MRT4577_76252C.1
tgcacctgttccaaataattcctacgatggattcgaggcttgtgctgaatttgtgctaccctgttataagatctatggtaaggatgactgcacagctcaaaag

SEQ ID NO: 158635 - DNA, 522 bp, Zea mays
  Clone ID: MRT4577_76253C.1
aattcggcacgaggcgtttcttcatctcccaatcttcatcttcctcgcagcgtcccttgctcgcgttcggcacataggcgacggcggcggcgctcaggatcgggctctcggcgacggcgctcagggtcgggctcttagcgacggcgtcagcggcttcccctcccgcctcccgagcatgaatcactgacttgtgaaccattacctttatgggaaaagaaaaactccataagcagccctctggccgtctgattgaatctctcaaaatggagaggatgaggaacatcctgactcatagatatccatatccgcatgaacactcaagacattttatcattgctgtgtttgcttgttggcttttcttcatttcctcggataatttgcaaaaccttataatgaagttggacaagaattttaaatggtggtccatgtatgcttgtttgattggcttcttctatttcttctcatcgccttttatcaggaagaccatcaaaccaaactattcgaacttcaatcgatgggata

SEQ ID NO: 158636 - DNA, 517 bp, Zea mays
  Clone ID: MRT4577_76254C.1
aactcgtgttgatctgagcgctccacacacaaccagatatcccccgaatccacccgtgggtacctccgcttctagatgcatatctttgtgagaaccctgactggcaatactatcaccctcaaggtgaagccaccatgaaacattgacaacgtaaaagccgacatccactactaggaggacatccccccaaaccagcagcgtgtcatctttgctggcaaacagcttgaggacgagcgcacgcttgctgactatcgaacatccacaacgagagtaccctccaccttgtgctccgcctcagactacgcatgcagagctttgacgtaacaaccctgaccgttaagactatcaccctacgagtaggagacctctgacaccattgtagaaagcactggtcacagatacatgacaaagaggacatcgcctccagaccaataccgactcatctttgctgcgaagcatattgacgacacgcgcacgctagtcgactacgacatgcagaatggacagcaccctccac

SEQ ID NO: 158637 - DNA, 5571 bp, Zea mays
  Clone ID: MRT4577_76255C.1
atggcggtggcgctactcttcccatgggtcgagaggggcgcccactctggaggcggccgtcgccgcctccgatctcgggagggagtggcatccctgcgccgcgttctccaacctagggcggtagtgctgtgggccctgggggtcggacgggtgttctccgtgggggggcgggctccactgcacttcctcaggacggtggaggcctccgcgcttgcggccgctgccagaaatgtccaggaagggtgccccttcacgttcgctatctcactgcatcggcagaagatggggtagctgaagatttggcaggcgagctacgccaagacattcgccgatctggatcctctgcccaaccacgactacgacacctgttttcgtcgccgtcaagtcatggtgaatccggatactcaaatcattctggatgagatgtcccgacgatttgcggagcaggatgccaagtgggatcgtcgcaccgccgatcaggaaagtcgctgggaagccgtcttatcgagccacacggctgctcaggacgcgcgcgttcgtactctggagcaagccacgggagcgttggaagaatggaagatgagtatcgaaggtgtggtggacgacctacgcatggaggttggcaaagtagccaaacactgcgagcgcacgctggtggagaagccggctacgctcgcgggcgtcctcgcgccttctccaacgcctgccgtgcgtctatctgctggatctccagccgtctcgccccatgggctccgcctcgactcaagtacacgggagaatggttttgggtccgtcacgacccttctccattccccggcaaagggtatgtgttcatctgctgctcttcaatttgtgccttctgtgcgtgatggctgttttccggaaaatacgggacaactgagtgatatgggtatgtgtggtgctatgcggggtcggttgccgcagctgaattttccagtatttgatggggataatccgaagttgtggatcaggcgtagtcaggattattttgatatgtactcggtggatccacacatgtggattaaggttgctactatgcatctgacgggggcggctgctcgttggttttcttctagagctgacgagtgtcgcggatctacttggccagttttctgtcaggaattgttagagcgctttggcaaggatgagcatgaagtttttattcgtcgtttgtttcgaattaaacaaacatctacagtggcagaatatgttgaaagattttcaaatttggtggataatttggtagcttatggacgtcctctggatcccttgtattttgttcaacgttttgtggatggtttgcatgatgagatccgtgctgctgtgtttgtccagcgccctacttccttggattctgcctgtgtgttggccttgttgcaggaagaggtgtcgtcggcgcccaaacgcgtggatggacgccgattggagttttccatgtcaagcagaattcctgtgccacataatactgagaagctggtgggtccggtggtgactggcaatcggacggatcttcctcgtcctcgagctgttgacgataaattggctgcgcttcgtgcgtatcgacgggctcgcggtctctgtcatcggtgtgctgaaaaatggtcgcgcgaccatcagtgtccttcttcagtacagcttcacgtgcttcaagaagttctagacctccatatcgatgaggaagaggctgcacctgcagatactgttatggagccaactgtgtctgaacaagtttttgtgatgttgtctgtggctgctgtttcaggaggagaatcagttaatactatgaagtttcacggctgtattcaaggtgtggaggtgttgattttggtggattccggaagttcccattctttcttgtcgacgacagtggctgatcaattgtcaggaattacaccaatgacaactcctgttcaagtgcaagtagccgatgggggcagattgtcatgttctcgtcaattattgggcgcgcattggacggtgcagcagtgttcctttgccactgattttcgtcttttggccctatcttcttatggtatgattattgggatggattggctttcgcagcatagcccgatgaagatccattggctcgaaaagtggatggtcattccttatcgatcagcaactgttttattatatggaatatctgctgtgtgtccagccggatccgtagttgaagttactacattgcagtctgttcctccatcactgttggatttgcagctgccagaaccgctgtctacgttgttagctgaatttgccttgttgtttgatcctccaacaggactgccaccttcacgtaattgtaaccatgctattcctctcattagtggagcttctccagtgaaggtacgaccataccgttatccaccagccatcaaggacgaaattgaacgtcaagtttctgttatgctgcaaacatgcattatccaacatagtgacagtccctactcctcgtcagtacttttggtcaaaaagaaggatcaatcatggcgattctgtgttgatttcagacacttgaatgcaattacagtaaagtctaattatccggtacctgtcattgaagagcttttagatgagttggtccaagcgtcctggtttactagtctagatctcacagcagggtatcatcagatactgctacaacctgaagacactcacaagacagcttttcagacacactcgggccactatgagtttcgtgtgatggcttttggattgacaggagctcctgcaacttttcaacgagcaatgaatgccaccttggctcccttgcttcgtcgttgtgtgctcgtattcttcgacgatatattgatttatagcaccacatttgaagagcatgtgcaacacattcgggcagtattggaactgttggcccgggatcaatggcaactgaaactgtccaagtgttcttttgctaagtcacagctgtcctacttgggtcatctcatttcagcatctggggtggcaactgacccggccaagatacaggcggtggcagcctggacatcgcccacatcagtgaaggagcttcgtagtttcttggggttggcagggtactaccgtcgatttgtgaagcattttggcctcatcgctaagcccttaacaacactacttaagaaaggggtcttgtatgtctggaccaatgctcatgaggaagcatttcaggctttgaagcagtctcttgtcaccgctccagtgcttgccttgcccaatttctcattaaccttttgtctcgagacagatgcaagtgccttgggagtgggtgctgtgttaatgcagtctgggcacccaatagcttatttgagcaaggctttgggaactaaatctcaagggttgtccacctatgagaaagaatatctggcaattctggttgctgtagatcattggcgtcattatttgcagttgaaggagtttcacatttacacggatcatcgcagcttggttcaattggatgagcagcgtttgcacactccatggcaacagaaaatgtttactcgcttattgggattgcagtacaaaattatatacaagaaaggggtcgaaaatagtgcagctgatgctttgtctcgacatccggaggttcagctctcctgttcagcattgtctacctgcactccacaatggataacagatattgctgcttcttatcaacaggatgatatggcttcatctataattgccaagttagccattgatgctaaagcagtaccatcttattcatggcacaatggaattcttcgctataaaaaccgaatttgggtgggacagtctctggcactgcaacaaaggttattatcagcttttcatgagtctgcagtgggtggtcattcaggcattccagttacttatgcacgattgaaacaattgttcgcttggaagggtatgaagaaatcagtttatgagtttgtgtgccactgtcgtatatgccaacaggccaaagcagaccgggcacgtttgccaggacttctacaaccacttccggtacctacaactttatgggaaatgatttctatggattttatcgaagccctaccacgttcccagtcatttacatgcattttggttattgtggacaccttcaccaaatatgcaaattttttacccctcaaacatccatttactgccctatctgttgctcggctgtttcatgaccaggtatacaaacaccatgggctgcccaaatccatcatttctgatcgggacaaaatatttgtgagtcaattatggcgggagttgtttcgtttggcagatgttcagttgcgcatgagctcatcttatcatccacagtccgatggccaaacggagcgtgtaaatcaaagtttggaaacattcttgcgttgtttcgttcatgcttgtcctcaccaatggagtcagtggttaccggtggcgcagttttggtttaactcttcacctcattccgctactggacatacaccatttgaactcatgtatggctgtcagccacgccagtttggtattggagacgatgctgtgatcagttcagccgacctctcttcgtggttgcaggagcgacaattaatggccaacttggttcgccagcatttggagcgagctaaactgcgcatgaaacggcaagcggacaaagggcgttctgagcgcgtgtttgatgtgggggatttagtttttctgaaattgcagccatatgtgcaatcttcggtggcttcgcgagctcaccagaaattggctttcaaattctttggtccttaccgtgtggtgcaacgcattggttcagtggcgtataaattattgttgccagacacatccaagattcatccggttttccatgtttctcaacttaaaagggcattgggtgccggtttggtggcttccccaactctaccaacgaccaactattcattcagtgtgccagaaacaatattgcagcgccgaactgtgatgaatggtgtcaatcctggtgctcaaattttggtcaagtggactcacatgcctgaggaacttgccacttgggaggatgttgaggatcttcgtcagcagtttcctcgtgcagctgtttggggacaaccagcatttttaggagggaggaatgttagccacatcagtgaatcagctgaagatggtgaagctggagaagtgccaagcgggctacgccaagacagtaaaaggcccaggaagcagaatatgcgcgtattcgggtccaactggggaccgttctccccaacacgcaggggtagcgtaggaggtgttgtggcggcattatctaggaagcggtctgtggacgtgaggcggatcaacccgaaggtgcctaaggaggaggctgtcaccatctccggtcgactcgtccagatcctctccgaccatgggcccctcaccatcggcaacacctggaacaacaccaaggtacccaatcaaccagtcagtcaagcagagtggcaaaagccggggagcgatgcaggcgtcggagcagcaacaacggaggactctgctggtgtagatgagaaggaaacacacaaagagcatcaaaagcaagttcaacgatcttatgtcaacccatccacctctgaatga

SEQ ID NO: 158638 - DNA, 320 bp, Zea mays
  Clone ID: MRT4577_76256C.1
gccatatcacacatccaaccgttttttggttggttcatttaaaaaaaaaaaagggaaggtccaacacccatcaggttggggaacactcactcagactggggaggcataaaaccaccatgaaaattatagggccttaccaaacaaacaatacccatgccccatttacacccaataaacacatcagtgcgcatgactcaaacaaagacgaaaccaaacccatgtcgccttcaagggcaaaaaaggaaccacacacagacgcactgccttagggatgaagaaccacaactgaaaataaactgggtgttgcagccgaaacacac

SEQ ID NO: 158639 - DNA, 1617 bp, Zea mays
  Clone ID: MRT4577_76257C.1
ggatgaatcaatgctattatgatgcgtggcggtagattagacatctggtgggttggtgctgttttaatgcagtccgggcacccaatagcttatttgagcaaggctttgggaactaaatctcaagggttgttcacctatgagaaagaatatctggcgattatggttgctgtagatcattggcgccattatttgcagttgaaggagtttcacatttacacgggaatgcccaggcggggttcaccttcgtcatgaagttcggcggctcgtcgctcgcgtcagccgagcggatgcgggaggtggccggcctcatccttagcttcctcgacgagatgcctgtcgccgtcctctccgccatggggaagaccaccaataacctcctcctaggaccttccatttctagctctccgagcctgagtcagggtgctcgattctttcgcttactagctaacaaggctagatgcgcgtgtgcctgattcgttgtctgtgtaggccgaagagaaggcggtgagctgcggcggaggaggggcatctgaaatccctgagctcgctgtcatcagggagctacatcttaggacaattgatgagctcggtttagataagtcgattgtttcagggacccttctccccaacacgcaggggtagcgtaggaggtgttgtggcggcattatctaggaagcggtctgtggacatgaggcagatcaacccgaaggtgcctaaggaggaggctgtcaccatctccggtcgactcgtccagatcctctccgaccatgggcccctcaccatcggcaacacctagaacaacacgaaggtacccaatcaaccagtcagtcaggcagagtggcaaaagctggggagcgatgcaggcgtcagagcagcaacaacggaggagtaaggcgcgatcctctgccagtgtagatgagaaggaaacacgcaaagagcatcaaaagcaagttcaacgatcttatgtcaacccatccacctctgaatgaggcatattcagatgtgtgtgtattcagagagctcaatatgttacatcgaccttcccaacccgccggcagagcttaagaagctcaagcacaagaagtgcctcgtccagtccccccaactccttcatggatgtcaagtgccaacgatgcttcagcatgtccaattcgcttgtggcataggaatctcatcctagattcaatagaggggctgcaatgccggcatcgccatagctggaaatcgagcactgacggacaccgggcgccgagatgggccgtcttgtccaccgccgcaagaaccgcatgcgttggagccatccttacacctgctcctacttccgcgccagcaacccaacacgccgacgacacgagctcctccttataaaagtgacatctttattgtatagataacgaatggttatagttatttattcttgtgtccaagtggtattggatttttttagcttggggttaaagaaaagacagtcatgtactttgcatcttttttgtatttatgttttatgctaaattgtggaataacactatattagttgttagcaaagaatttctgagatattaaggttgatgataatatatgttgttatttttcatttaaaaaaaaaaaaaaaaaaaa

SEQ ID NO: 158640 - DNA, 529 bp, Zea mays
  Clone ID: MRT4577_76258C.1
tcgagtttttttttttttttttttttttttttttttttttttttttttttttttttttttttttttttaacaaaagctatcaagggatttatatgttcctggggcaacccccgggcccccaactagttccaatatacaaggcaaaacagttctttacccgtccttttacccaatctggtgaaaagggccttaaacctagttgggaaggggaagccaaaccagagagagaaaccctcccctaaaaaacaaaagggcttattaaaataataccccggggttacccacccggaaaaaaaacaggtttcccaaaaaaatttaagtttccaaactaccccttacatgaaaaaacagcccttgcgggggatcccccccccagcattgggggattcccccccgagctttgcaaaaagtaaaaaaattccaaaaggtagcattatcccaaggcagcacaagagctggcattccccctcgggggggcctttgtttccttacttgggaaaaaaagcctctttgggaattttaggcttcc

SEQ ID NO: 158641 - DNA, 362 bp, Zea mays
  Clone ID: MRT4577_76259C.1
gaagctcggaattcggctcgtgggacaagcaaggaaccttactgtggctgagggcgggctcacccgccgctgtctcgctttggccgcccaggcggacaacccacgcgacgcggaggacccgctgaaccggcaggaggaccccggtggagatgacaaccaccaggagctgaacgcggagtcccactgccagagctcacggcagcggcacgcaaagtaccacaaggacgccgacgagcacgcgcaccgggtgagcagagcgaaggccaacccgcgccgagcgcgccggcaccagctgctggacccgcaggcggagcagggagcaactaaaaccgccgaccacacggcggcagaggcccgccgga

SEQ ID NO: 158642 - DNA, 314 bp, Zea mays
  Clone ID: MRT4577_7625C.1
cgggtttgccgccagaacacaggtgtcgtgaaaactacccctaaaagccaaaatgggaaaggaaaagactcatatcaacattgtcgtcattggacacgtagattcgggcaagtccaccactactggccatctgatctataaatgcggtggcatcgacaaaagaaccattgaaaaatttgagaaggaggctgctgagatgggaaagggctccttcaagtatgcctgggtcttggataaactgaaagctgagcgtgaacgtggtatcaccattgatatctccttgtggagatttgagaccagcaagtactatgtga

SEQ ID NO: 158643 - DNA, 318 bp, Zea mays
  unsure (1)..(318): unsure at all n locations
  Clone ID: MRT4577_76260C.1
aaaanaagagggaacgcaaaagcgccttcatacacctccccaaaattcccgatccgaccttttcgtttttgtttaacataaatatcaggccataggcaattttcacacagcgatgcgtaaatgatacataaaccttatataaaaataacaccattcacaattcataattctataacaaacaattcaactgcattgcatgcaattgaacgaaacattaattgcacccaattatcaaacttcaactcattgtgctaactctcaatcatacgtctacattcctgcttctaaatcacaaaacaactaattttagacctcaaa

SEQ ID NO: 158644 - DNA, 313 bp, Zea mays
  Clone ID: MRT4577_76261C.1
cagcaacgctatcgctctctactcacttccaactcgacgctacgactccagggtcaagtatacctgagcgaggtcaatggaatattccaaagatcccagcatactccataatgatagcctgaactgctaccatcacacctaccaactgctcctcgaaacatgacgccctcagctgtatcggccgatgacttaatcgacatccactatgaagattctgatcttttacatttccagctatactatatcctctacatacacctgggacaagacacaattgcaacggccgtacgcacgatgtttcactagacttctg

SEQ ID NO: 158645 - DNA, 772 bp, Zea mays
  Clone ID: MRT4577_76262C.1
gtgattttcttgttattgatatcatcacctgtgtttatgttccatgcaaaacatgttggtatttttctcagtatctgcacttttagctgaaatttgttgcccggtattttactggtcgttgggtccttgttgactagtgaagttaggtttgaagaacgcttggatcgacgttccttatgaatatttatcaacagtatctcctgtttagggttgtctactaggaaccttgtggttgtcatgcatggaggaaatatcaccttaactcttggtttttagatgaacgaaagcttgaactcgtgttatcgcagagtccatgtccttctctgagtccagtccatctgatatcagtttcgactactctgatttgtaggttttggacacccgaggcggattgttgactgcgctgggctacggtctgtggccttcaatggttctcctctccgaaatcgtccagacattcatccttgcagatttctgctactactatgtgaagagtgttttcggcgggcaactggtgctgcggcttccgtccggggtggtctgaaaaactgcagcgagaaagaaaagcataccgttcgtcccttctgtgttagatcatacaaagcgacagtcattgttgtgctcctagcgcccaaacttttgcactcgtaaagtggattagcagagggccgttaatttttttttcagttgtaaactgtttacgtgaatgctgtaccgataccgtgaaaaccgtctgactttttcatccatgctagagttgaagcaggtagca

SEQ ID NO: 158646 - DNA, 619 bp, Zea mays
  Clone ID: MRT4577_76263C.1
ttcgaaatcatccttcaacatcgcacatctttgtgaacagaatcagctgggccttctgtgtttatttggaagcagtttcagtgttgccccagttgcgcttgatgcaaaataccaagattgtggagccgttcacagctcattatgtgtttgcgctgggtgttgcaaggtttcttagctgtgcacactgggtccttcaggttttggacacccgaggcggattgttgactgcgctgggctacggtctgtggccttcaatggttctcctctccgaaatcgtccagacattcatccttgcagatttctgctactactatgtgaagagtgttttcggcgggcaactggtgctgcggcttccgtccggggtggtctgaaaaactgcagcgagaaagaaaagcatactgttcgtcccttctgtgttagatcatacaaagcgacagtcattgtgctcctagcgcccaaacttttgcactcgtaaagtggattagcagagggccgttaatttttttttcagttgtaaactgtttacgtgaatgctgtaccgataccgtgataccgtctgactttttcatccatgctagagttgaagcaggtagcatccacatcgagttgtcgcattttc

SEQ ID NO: 158647 - DNA, 273 bp, Zea mays
  Clone ID: MRT4577_76264C.1
ggcaacattaaaaggccaatgggggcccaacaatggcagccaaaatattttggctccttatgcttcttgggctttctggaagggctggttccgggaacatttttccacaatggttacaagcttctattggtttccttctttccccggaccttttaacaacgggggttttggtatttggaaacccaattctttaaccctattggatcccaccagcaattgcaggttggattttaactttattaaccttggttcttccaccattattaagccttt

SEQ ID NO: 158648 - DNA, 3241 bp, Zea mays
  Clone ID: MRT4577_76265C.1
actatccatcctcctctcctgcaaaaccaaaggccagacccagaccagaccgctcacgccgcaccgcacgcgctgcacgggcacccaacacaagcccttctccgatcgtgctcgctcgccgccggtactagtctagtagagcagcggggaggagctccgagatgagggcgccgcggaggccgatggcggtggtgctgagctgggtgcggaggcagccgcccaaggtcaaggccttcctcgccgtcgtcgcgggcatgaccgcgctcgtcttcatccgcttcatcgtccacgaccacgacaacctcttcgtcgccgccgaggccgcgcacgcgctcggcatcgccgtgctcatctacaagctcaccaaggagaagacctgcgctggactttcactcaagtctcaggatttaacagcactgttcctggccgttaggttgtactgcagctttgttatggagtatgacatccatacaatactggattcagctacactagtagctactcttttcgtcatttacatgattcggttcagactgaggtcaacttatatgttggacaaggacaattttgcattgtactacgtggttgtaccatgttgcgtgctggcgcttattgctcatccttcaacctcgcataacatagtgaacagaatctgctgggccttctgtgtttatttggaagcagtttcagtgctgccccagttgcgcctgatgcaaaataccaaaattgttgagccgttcacagctcattatgtgtttgcactgggtgttgcaaggtttcttagctgtgcacattgggtccttcaggttcttttttttttgtctcccttcctgttttatttaccattaaaagaactaccatgctagttcatactttctggaacaaagtgtcaattggtcatctgtttttgaggccctaatgttagtagagtattaaaaaatgtcttccccgttagttagactatggaccaaatcattgcaaaggtcttgactcccaagatatcctagtctgaaaagaacaggatggttatactcatttatacaaaacaaattcagtacatcataaggtatagatgagtaatgattaatgaaacagcaaaacattttttttaaatttaggtgtgatttttttgttattgatatcatcggctgtgtttgtgtccattgcaaaatgtgctgggatgtactttactttgttctacctcatcccgtgctgtatggtattttctcagtatctgcgctttcagcaaaaaaaaaaaaacctaccaaatatttgactggtcattgagaccttattgactagtgaagcctgaggaatgcttgtattgacattccttatgaatatttgtgtacagtatctccagtttatggctgtctactaggagacttgtgtcttgtggtgttcatgcatggaagcatggagatggaggaaatatcctccttacccgtgggttttagatgaatggaagtttcaattcgtgcttttgcagaattcaaggtttttctaagttcagtcggtctgatatcagttttgattactctcgtttgctgagccgttcacagctcattatgtgtttgcactgggggttgcaaggtttcttacctgtgcacattgggcccttcagggtcttcgcgccgcgccaccctgcccagtgacgacgagtgcgcgcccatccggacccggacatagctcgcctgcgcctgcgcctccaccgatcgggaaataataagaaaatattctcgtgttcttcgaccggcggtggtggtgcgaagcaaggcggccaaggggaggcgagatgagggggacgaagcggccgctcggcgtggtgacgtcgtgggtgcggcggcagccgcccaaggtgaaggccttcctggccgttgtcaccggcatggccgcgctcgtcttcatccgcttcatcgtccacgaccacgacaacctcttcgtcgctgccgaggctgcgcacgcgctcggcataggcgtcctcatctacaagctcaccaaggagaagacctgcgccggactatccctcaagtctcaggatttaactgcattatttctagctgttagactgtactgcagctttgtcatggagtatgacatccatacaattctggacactgctacacttgtagccacactgtttgttatttatatgatacggttcaaactgaggtcaacttatatggtggacaaggataactttgcgttgtactatgtggtgttaccatgtgctggactggcactacttgttcatccttcaacatctcataacattgtgaaccggatctcctgggcgttctgtgtttatttggaagctgtttcagtgctgccgcagttacgcttgatgcaaaatactaagattgttgaaccgtttacagctcactatgtatttgcattgggtgttgcaaggtttcttagctgcgcccactgggttcttcaggttttggacacccgaggccgtttgttgactgctctgggctatggtttgtggccttcaatggtgcttctctccgaaatcgttcagacattcatccttgcagatttctgctactactatgtgaagagtgtttttggtgggcaactggtgctgcggcttccgtccggggtggtgtgaaaactgcagcgcgatagaagaagcataccgtccatttcttctgtgttaaatcatacaaagcaacagtcatgctcctagtgcccaaactttttcactctttcaaagtggattagcagagccccgttaatctttttttcagttgtaaactgtttacgtgaatactgtaccaacaccgtggaacgtaggccgaccgtctgactttttcatccaggctagagttgaagctggtcgcatttccaaaaaaaagaccagattctcccatttcattgactggtagtctattgtagaaacagacggaacgctatgatagattgttactccatttcaaattaattatatttttgagctgcttgcaaaaggatcctttgaataacagttatgctttagtgcccaacctgggagccttttttttagttgatgatgttgcaagtaaggactatggatttcaaaattggttgaagggtcctctttaaaaaaagtttgtcattgagactttatatttgccccgtttctttatggccaatcttcgagtaatagcttggtgtgactgtcgtggtggttttaaaaacaggtggttagtgatttcattgggttatagtagtataattacaccaccgctttcttatg

SEQ ID NO: 158649 - DNA, 222 bp, Zea mays
  Clone ID: MRT4577_76266C.1
ttctctactgacaaggacaaggctgctgcacatctcaagggtggtgccaagaaggttggtatctctgccccaagcaaagatgcacccatgtttgttgttggtgttaatgaggacaagttcaccttggatgttatcatttgttccattgcttgctgcaccacaatctgccttgctccccttgcttaggttattcatgacaacttcggcattgttgagggtttt

SEQ ID NO: 158650 - DNA, 808 bp, Zea mays
  Clone ID: MRT4577_76267C.1
cttcattctcccgaatctcatcgcgcctcgcactctccccgctccagccatagcggcgagggccggatcggttccggagacagcgcccatgtcttcgaagtcttggatctggtgggtctaggacgcggttatggggctggtggtgagcgccgccatgaggagcggctggacgatggtgttgggaatggagggaccaccgatggcaagctgagtctgcgggcaggcccgaggtgttgacactgccttggtccctcttcacaaaatcaccacggtggcgcatgcgggtggccttcgcctgcagcgtatgtgggcagcgtacgaccaaggccatcaatcctcatgcctacaccgatggaactatgtttgttcaggatttggcaatcgcttatctttgactcaataccttatgacctcgaaaaggtttgaacccgttagggactaaagatgccaaaggttgctgtggagaagttcgtgagtttatctattctgataatgggactgtaaccatggtatatcatgtgaatatttaaaggaactgatagagagatacaatcaatctcaaatgaacttaaggataataagggtcaacatgagatatgttgttctaaaattgaaacaataaagggtaaatggcttccaactatgtggattcattcgtaacttttaagaaatggcagtcggctcactactaacagtttatctacagcttaatgcaatttaggttaaatggcttcctactatgggcataagttgataaccaataggtctctgtctttttttaaattttttggctcgaaattcattggtc

SEQ ID NO: 158651 - DNA, 203 bp, Zea mays
  unsure (1)..(203): unsure at all n locations
  Clone ID: MRT4577_76268C.1
gccggggcanacacacacacttcatcgtggagaatggttgggaacaatactgttgcttcgctgttctactattctttgctcatcatctgcgccgctgcttggcacgcggatgcgtnccatgcggatcgactcgcgacgctccgcctgcctcgcaccgcctccctctttctcctctgctccgcgccggctctcgccccccgccc

SEQ ID NO: 158652 - DNA, 2412 bp, Zea mays
  Clone ID: MRT4577_76269C.1
aattcggcacgaggttttcctccatcgacctcgtccatatcttgtaggccattgaagtcgacgctaaagcaggaatggagagcatgagggcccattcttcattctcccgaatctcatcgcgcctcgcactctccccgctccagccatagcggcgagggccggatcggttccggagacagcgcccatgtcttcgaagtcttggatctggtgggtctaggacgcggttatggggctggtggtgagcgccgccatgaggagcggctggacgatggtgttgggaatggagggaccaccgatggcaagctgagtctgcgggcaggcccgaggtgttgacactgccttggtccctcttcacaaaatcaccacggtggcgcatgcgggtggccttcgcctgcagcgtatgtgggcagcgtacgaccaaggccatcaatcctcatgcctacaccgatggaactatgtttgttcagatttgtaatgcagttgttcaatgcaactcttgtcctcccaatttttttgtgcagtaatgtttggctggccaaaaggatttggcaatcgcttatctttgactcaataccttatgacctcgaaaaggtttgaacccgttagggactaaagatgccgggaagggaggagagcaaagcgagcagcacgggatccaaaatccaccacgatgagcagcggtggcgggcggaaggcggcgggccccggcggcgaggaggcggaggtggaggcgcttatccgggcggcgcaggacgcggtgctcctgaagctcaaggcgaactcccacctcgtctcctcggcctccagccctccttcgctcgacgcggcggaactcgatcccctggacagcgacctcgcccggcgcttcgacgcgctcaagtcccgcgcggcggcgccgaatccgaagccgcgggccggagccggagccgcccttggagggatggatgagctggaggcgcggttcgctgcgctgaagggggcggcggggcccgagaaggacacgagggtgaggctggaggatctgggaggggagtcgtcggaggacgaggcggacgaggtggacaaggtgatgcgctgggccatggatgccgcgcggctcgacgtcgctgcggcaggctccggcggccaggcgacgaagcgcgctgacggcgacgaggaggaggaagagaaggatgagaagagcagcgtgagtagcgaggacgaggacgaggatgagaggttgcaggtggagatggcgaggaagaaggatatggccaaaaccaaaaccaaatccaagaacaagtggttcttcttgtgatatccatatcctactgatcatatgtaaatttcatatctattttcaatccaagtatatgatttatcgtatgctcttccctcggcaaacaaccacttattccaaactgtttgagactcacaaacttgcaagaatgcaatatgcaaacgaagagtattttgtccacaatcctttgcccactttggctcgtggggatcgttttctttttcactcaggcagctagttaacgccaatacaaatatcataaactagatacaatgtcatgctacacttcagtttggagtacgacgatgtgtcacagatacttgaggcaaaacgccaaccatcattcctggcatagtttatcttcacttgccactgcatgcagaggtagaaagcaactgattttacaagtccactcacttgaaattacaaggttcagatttcatagccagaacagaatacaaagaccatgagctaagcttcaatcagcatagtacaatcgcggggtctaatgagagcaaaatcagatcgaggtacgagttgtcctactgaacacggttgctgtggagaagtttgtgagtttatctattctgataatggaactgtaaccattgtatatcatgtgaatatttaaaggaactgatagagagatacaatcaatctcaaatgaacttaaggataataagggtcaacatgagatatgttgttctaaaattgaaacaataaagggtaaatggcttccaactctgtggattcattcgtaactttcaagaaatggcagttgctcactactaacagcttatctacaacctaatgaaattcgttggtagtgtccacttcatatgtcataagttgaagagcataaatattctgaaagctcacggtaaaagcatcaaggatagttacatgctaaatggctatgcactaaagactaaacacaggccgtgcaggtcaaggaatgcctatgagagtaactcctactagaattacttctcttgattttaacactcataagacaaaaatgcaaacagatccaagggaacttgataagattcgtcagagttatttgtattctatgttccaatactttagaatttgtttgcctatttatggtagaatcagcactataaatacat

SEQ ID NO: 158653 - DNA, 560 bp, Zea mays
  Clone ID: MRT4577_7626C.1
ggtaccctcgggttctgccgggagaccactatgcgtcgttgttctttcttactgacactgcaactccaagtatgtaagaggatctatgaggacgtccctgctgactaccataatactacgtatagtctggtggaatgaaggccgcgctgatcacactaggctctcgtatgagatcaaatctgtataattcattgtcccatgcaatgttatggtcacagtgttagctgtagtcaatggtggatgattcccacagagctcattattaatggcagtttagtagaggtgattgacacaagactcatgcagcttgcagcactttgtttgcagtgacagtggctctgtaccatacagagctattatgtcaagaacaagaagagctcagtgatatcacaacaccatacctggaccttatgtcaaggacatcatgttgcatgtaaataaagcttattataggcgaccttactatgtcgaccacctacgattagaggtataccatttaaatgacatttgaataaaattctatgtctcctgccaatataaaaaaaaaaaaatcgggcctt

SEQ ID NO: 158654 - DNA, 140 bp, Zea mays
  Clone ID: MRT4577_76270C.1
gccacgcgtcctcgggaagtcgcgctacgccttcaagaaggctctaattgaagtcgatgcgggtcgattttaatggcccgagcaggttattaaggttactcgtagtacattctagaaccacccgacgaaagcataatact

SEQ ID NO: 158655 - DNA, 218 bp, Zea mays
  Clone ID: MRT4577_76271C.1
ccactaggggtgcgcacacgcgtggcggctcactccgtgccggagagtgctctgaagggcgctacactgcgactgccaagggtcgttggcctgcatagtgctttatagatatacgcaaggcgcgaagcgggattccttatggataacgcttgagctgagggggagggaatgcgctgttggcttctgctgtggactagtggcctgatctgctgggggga

SEQ ID NO: 158656 - DNA, 390 bp, Zea mays
  unsure (1)..(390): unsure at all n locations
  Clone ID: MRT4577_76272C.1
ttcntttttttttttttttttttttttttttttttttttttttttttttttttttttttttttttttttttgggaacaaaaccttttttttttcatttcaaatgggcattcaaaacattggttacactgaccctggcacccatggggatgggggacacattttttcccaaaaatggcccctaaatgacccaacttggtgggttggcagggggttttccccaagacaaagtttttttagggggggacaccccccgcagaaatgtaggggcatggggttggtttttgcaagccccacattccccccaggtggtgggctttttgggccgccaaaaaaccccggacctggacctttttggggttctgtttcaggatggaccgggggacccaacc

SEQ ID NO: 158657 - DNA, 192 bp, Zea mays
  unsure (1)..(192): unsure at all n locations
  Clone ID: MRT4577_76273C.1
cacacgccagcaaagaccccacaaggcccctccagagagcnagnngggggagggaagaggcngcccaacaacggccagacccccagcancggcgacccgaccggcagcagcaagaacgcgcaccgcaagggcagcggggcgcgcgggcgcaagaccgcgcgcggccgggacgncaccagcaacgccggcccc

SEQ ID NO: 158658 - DNA, 242 bp, Zea mays
  unsure (1)..(242): unsure at all n locations
  Clone ID: MRT4577_76274C.1
gtactcggttccggaattcgccggcgtcgacgccacgtcgnntccggggttggggcttnnctcctcccccttccggtttcnngggttcgtggttcgtgaggggttctccgggggtgtcggtttcgtaggggtgagccggatcnngagatggcngtngcgtcggatgggttgagtacctcgctgcntttcgtcggtcggcccttcgcctggggcccacgtgacccgaccactttcccttccac

SEQ ID NO: 158659 - DNA, 2314 bp, Zea mays
  Clone ID: MRT4577_76275C.1
ggtacccggccggattattccttggtcccccacctctcgctctatctccatctcctccctccctcccgcctcctcctcctcctcatgctgctgctgccactgccactataatagcccagctagctagaggccacccatcaaaagctgcccattccctcgtgacagcgcagctgcctgcctgctccgaggcgccacccagctcttcctcgccccagcagccgcttcccgagatccttttcactttcaccaccaggttacatagaccgcatctgcggtgctctgcgctcctcggactcgacttgttggttcatccatccagctgccgccggacgtcgatcagctacctatcttgacaaccaaggtgaagagacgtgtgggcaagtacgagctcggccgaaccataggcgaaggcacattcgccaaggtcaggttcgccaagaacaccgagaccggggagccggtggccgtcaagatcctcgacaaggagaaggtcctcaggcacaagatggccgagcaggtcacttttccagctctgaagtatcgtgccatgtttggtttggtgtattctcacgtcttctacattgtgcatggccccttcctttcagattctgtctgttcctcctctagtgttagtgtctttactatttttttttactacttgcaggcccaatatgggctttggcatacttgttcagagttcagtcagtagatttggtggaactagtcatttcgctgacgatgacacaaactactacatggttcgatgcagattaagagggagatttcgaccatgaagctgattaagcaccctaacgttgttcgcatatatgaggtgatgggaagtaaaacaaaggtctacattgtgctggagtatgttaccggcggcgaacttttcgacacaattgctaaccaaggtcgaatgagggaaggcgaggcgaggagttacttccaacaattaatcaacgcagttgattattgccatagcaggggtgtgtaccaccgggatttaaaaccagaaaatctactgcttgactcatatggaaatctgaatgtctctgactttgggctgagcgcgctgtcccagcaaatcaaggatgatggattgctgcacacaacttgtgggactccaaactatgtggcaccagaggtcctagaagatcagggctatgatggtgcaatggctgatctgtggtcatgtggagttatcctgtttgttctgctagctgggtatttaccttttgaggactctaaccttatgacgctgtataagaaaatctcaaatgcagaatacacatttccaccatggacatctttccctgccaagaggttgttgacaagaatccttgatccaaatccgatgacgagaataacaatccctgaaatactggaggatgagtggttcaaaaagggctacaagcgcccggagtttgacgagaaatatgacacgccattggatgatgtggatgctgtcttcaatgactcagaagagcaccacgtgacagagaagaaagaagaagaacccgtagctctcaatgcatttgaactgatttcaaggtcagcaggcctaaatcttgggaacctatttgactcggagcaggaattcaaaagagaaacgaggttcacgtcaaaatgtccaccgaaagaaatcattcgcaagattgaggaagctgcaaaacctctaggatttggtgtccagaagaaaaactacaagttgaggctagagaaagtaaaagcagggaggaagggaaacctgaatgttgctacggagatactacaggttgcgccctcccttcatatggtacaagtccggaaagcaaaaggcgacactctggagttccaaaagttctacaagaacctttccaagaccttaaaggacgttgtctggaaatctgaagacctgcaaatgcgagctgcttcttagcatccactagatggcgagatgttcgtacgtgtcagattccattcccgtagcatgatgtgtcgtcagccgtttctgttcactgcactctgcatggtccggtgggcgcgtggcttggcattttcagagaccgcgttgctcgttgcagcccgggatgaaggcgatgcagtaggttttgtggatgtggtgagctctgtatatgcctattgatgagtcatgttgcaagctgtaacgacactatgatccgtgaagtgtagaagcagccaagtatgttctttctatgctgccccatttcccggcagtttccatgcattttgaagaaaaaaatagtggctaactcattgatatttgtatttggtcatcattaataaatcgcctctccatctgtgcatgacc

SEQ ID NO: 158660 - DNA, 291 bp, Zea mays
  Clone ID: MRT4577_76276C.1
aatgccacagaccggtgttctgtatactcaagcctggagtatagcatgcttgaacaactagcagcggatgcggcttgatagcgcctaccagctagtgtgaagcatagggacacagtgacacgcttactggatctggttaacagacaccacggggggagcactatcgaaggcgatggcataggcatatggatgaaggtttatggatcttcactgggtcattgaaaaggcaaaccacatcaatggtgccacttcgctgggaacgctcctgtgcacgctatgtggacttgactg

SEQ ID NO: 158661 - DNA, 519 bp, Zea mays
  Clone ID: MRT4577_76277C.1
atgtggagctgtggatttagcttcaaggttgtttgttcgcattaaagaacccactatgttctgtcggaacagtatgctagcgggatatgtcaagacatatggtgtcgatcatgctcttgagctttttgatatcatgcctgaacgtgatgttgtttcgtggaacatgatggtatcagcattgtctcagagtggccgaggcagagaagcccttgatatggttgtagacatgcaaagcaaaggggtgcgtcttgattcaacaacatacactagttcgcttactgcatgtgctagattatcttctttaagatggggtaagcaacttcatgctcaggtgattcggaacctaccgcacattgatccatatgttgcaagtgctcttgttgaactgtatgcaaaatgtggctgtttcaaggaagctaagggggtcttcaactctttacatgaccgtaacaatgtggcttggacagttctcatctcaggattcttgcagtatgggtgtttcactgaatctgttgaatt

SEQ ID NO: 158662 - DNA, 839 bp, Zea mays
  unsure (1)..(839): unsure at all n locations
  Clone ID: MRT4577_76278C.1
ccgnaaacggggagccggtggccgtcaaaatcctcgacaggnagaaggtcctcaggcacaagatggccgagcaggtgatgggaagtaaaacaaatgtctacattgtgctggagtatgttaccggcggtgagcttttcgacacaattgctaaccatggtcgaatgagggaaggcgaggcgaggagttacttccaacaattaatcaacgcagtcgattattgccatagcaggggtgtgtaccaccgggatttaaaaccagaaaatctactgcttgactcatatggaaatctgaaggtctctgactttgggctgagcgcgctgtcccagcaaatcaaggatgatggattgctgcacacaacttgtgggactccaaactatgtggcaccagaggtcctagaagatcagggctatgatggtgcaatggctgatctgtggtcatgtggagttatcctgtttgttctgctagctgggtatttaccttttgaggactctaaccttatgacgctgtataagaaaatctcaaatgcagaatacacatttccaccatggacatcgttccctgccaagaggttgttgacaagaatccttgatccaaatccgatgacgggttgattttgcgtccatattatagctgagcaactctttcattcctagcagattcatctctccattaaatttgctgactagattggtcgaacaaagcagaagaaaattcgtgtgacttcagaataacaatccctgaaatactggaggatgagtgggtcaaaaagggctacaagcgccccgagtttgtcgaggaatatgacacgcccttcggatgatgtggatgctgtcttcaat

SEQ ID NO: 158663 - DNA, 611 bp, Zea mays
  unsure (1)..(611): unsure at all n locations
  Clone ID: MRT4577_76279C.1
ctcaanaaactatttgcagcttggtacgagaggaggcaaatgaggaagatatactccccgcttctagaaggaatcttggctttctaccttggcttcgaatggatccagaccgacaatatcctagcacctatgatcacccacggcatatactccaccgttgtccttggccatgggctctggaaaatccacgaccaccggagaaggctacggcagcggattcagcaggtcagaagtcaagagagcagctcagacacattgtaactgcaagatgtggcggatagatcagcgtggtgtactactggatagctagctatgctgattgcacgtagtactggatgatcgatcgaccgatcaatcagaagaccagaggcgtctgacaagttttgatctagttaattaaccatcaagataggtaaaagattggggaaaaaaatataatgcatgtagtcatgtaaagtgatgtagatataatctgtacatacatatatggataaatatatgcaggctgtaatcaatataggaagtatagtatacaatagcaacttccaggtatgtaataatcctagtatatcacgtgcgtgcaaggaagatagcagcccactttttttccc

SEQ ID NO: 158664 - DNA, 613 bp, Zea mays
  unsure (1)..(613): unsure at all n locations
  Clone ID: MRT4577_7627C.1
aagtcaatcaaatatagacagcatatctatttatgaagagagacaaaaaagaactggccagctagcatggagggcatactgctggatctgcaactcatggagctccacctactgctatgcccgctcgctctacgtgcgacagacgtgcaggatgcactctccttcgccacgacatacctccagcactatgttgtctgccactcttgcgctacacagtttagacatgcaaagacactccctgtttgactcctgatcggtcctgtactattatggaacacctctgctacgtcatatctacgcctggtgcttgactggatgacattacatctaagactaaactcatacatgaatggtgctgccaaaaacacacaacactgtactctcggtgagcttctgtatcgagtgatgcatgttgctctaatatccatgagatgctttacatatatgatgattaattagccgcgtcaaagaaccagaacagaaggcccctattgccctatatacccattctgtggatccaataaaggggaaatatatgcgcgcatgtgtgcaatgcatacaatattattgctcgctctgcatgcgaagcctgctccnattccacacaaactac

SEQ ID NO: 158665 - DNA, 363 bp, Zea mays
  Clone ID: MRT4577_76280C.1
ccaatcttacacactcctgcattctacgaaattcttcttttattgcgacaccaccaaccaacggactggtcgtctttttactacttccatcctcaaaaaaccctgacgctactcaactctatctactcccagcacatacttccatcgacacattgagcaatatcgaactctgccgctcatatacaccatccacacatacgaccattcagcctggcaaatgatacgcgccctgttgcctcccatacacaacaacagtttgtggtcgttacacccacacgctacgcctaactcttcaactccctaacaaccgctacaattgctgtctttcaaccaactttcttcatacaaactcaacattttctc

SEQ ID NO: 158666 - DNA, 266 bp, Zea mays
  Clone ID: MRT4577_76281C.1
attagctttatctactccagagcgcacaacaacccgatcgacaccatgagggcgttgctcgttgccggcgctctcctggctctcgctgagagcgccacctccacgcatacaagcggcggctgcggctgtcagccaccgccgtcggttcatataccgccgccagtgcatatgtcacctgggtgttagctgccaccttcggtgcatctcccaccgccggtccacctgtcgacgccggtacacctggcaccgacggtccatgtgccggc

SEQ ID NO: 158667 - DNA, 145 bp, Zea mays
  unsure (1)..(145): unsure at all n locations
  Clone ID: MRT4577_76282C.1
ctcttaatgcggctaaagaggctgaggcattggctgaagcaagagtcaacagtgaagccaaaattgaactggagaatcttttagtagaaagcaggtgagaaaatgcctnaactnctcgattgtnttaatnagnatattttttttt

SEQ ID NO: 158668 - DNA, 755 bp, Zea mays
  Clone ID: MRT4577_76283C.1
aattcggcacgagggcgccatctccaagctccagcccctcctccctagcgcatggggcagaagcctccatggccgagctcctctggtgcaggcgcccagcctccccaactcggcacccctcaagcacacgggaccacggcgcctctgctctcccatccaggcgccccttcccctaagcggatccatggtgctaggaggatctcctcctctgcaggtgctccaacctggtgtccatggcgccagtgccctgcacagcgtccccctcccccaggctcccagcacgtagagcatttctctgggtccaggctcgagcagccgctcccctcaacaactccttcaacgccggcctcctctgccccaggtccggcagccctccccaaccaagcttctcccatggtgctgctacctccaggatggggctcgacaccccaaagaaattccccctgggcgctggaggcgccaagctcacgctggagcatggcaaggcttgaccgacgccctttccatggctggctttgagcagtgggtcgagcccctcttcttgccatggcacttgacccctgttcttctctgccccacgacgcccagcctttctacaggagcaggcgacctctgcatctccctggcgcaggaaatccccaagtgcaggcgcccaggactcccatggccgctagcctctccatgcaaccaagctcccttacttcccagccatggacgagcctccggtgtgcatcgagctcccccacggtcgagct

SEQ ID NO: 158669 - DNA, 2055 bp, Zea mays
  Clone ID: MRT4577_76284C.1
ggcagtcctcatctcattctcatccaaccgggaggttgggaacgagatcacagctacagttacctgagtagtaggatcctcctcagatcggcttcaaaaatcaaagtgggggggacaacaaggcaggggatgagtgcagctgcaaccaaggtgaagagacgtgtgggcaagtacgagctcggccgaaccataggcgaaggcacattcgccaaggtcaggttcgccaagaacaccgagaccggggagccggtggccgtcaagatcctcgacaaggagaaggtcctcaggcacaagatggccgagcagattaagagggagatttcgaccatgaagctgattaagcaccctaacgttgttcgcatatatgaggtgatgggaagtaaaacaaaggtctacattgtgctggagtatgttaccggcggcgaacttttcgacacaattgctaaccaaggtcgaatgagggaaggcgaggcgaggagttacttccaacaattaatcaacgcagttgattattgccatagcaggggtgtgtaccaccgggatttaaaaaaaatctactgcttgactcatatggaaatctgaatgtctctgactttgggctgagcgcgctgtcccagcaaatcaaggatgatggattgctgcacacaacttgtgggactccaaactatgtggcaccagaggtcctagaagatcagggctatgatggtgcaatggctgatctgtggtcatgtggagttatcctgtttgttctgctagctgggtatttaccttttgaggactctaaccttatgacgctgtataagaaaatctcaaatgcagaatacacatttccaccatggacatctttccctgccaagagggttgattttgcgtccatattatagctgagcaactctttcattcctagcagattcatctcgggcgtactgtaagtaacataggatcaatgacgtaaagaactggcactaatttaacattaggatcagatactaatttaaacggtccaaccaatagatctatatgcttttttaaacggcgctggaatgcataactctaatcttaggttccaaatacagttaaatttgctgactagattggtcgaacaaagcagaagaaaattcgtgtgacttcagaataacaatccctgaaatactggaggatgagtggttcaaaaagggctacaagcgcccggagtttgacgagaaatatgacacgccattggatgatgtggatgctgtcttcaatgactcagaagagcaccacgtgacagagaagaaagaagaagaacccgtagctctcaatgcatttgaactgatttcaaggtcagcaggcctaaatcttgggaacctatttgactcggagcaggaattcaaaagagaaacgaggttcacgtcaaaatgtccaccgaaagaaatcattcgcaagattgaggaagctgcaaaacctctaggatttggtgtccagaagaaaaactacaagttgaggctagagaaagtaaaagcagggaggaagggaaacctgaatgttgctacggagatactacaggttgcgccctcccttcatatggtacaagtccggaaagcaaaaggcgacactctggagttccaaaagttctacaagaacctttccaagaccttaaaggacgttgtctggaaatctgaagacctgcaaatgcgagctgcttcttagcatccactagatggcgagatgttcgtacgtgtcagattccattcccgtagcatgatgtgtcgtcagccgtttctgttcactgcactctgcatggtccggtgggcgcgtggcttggcattttcagagaccgcgttgctcgttgcagcccgggatgaaggcgatgcagtaggttttgtggatgtggtgagctctgtatatgcctattgatgagtcatgttgcaagctgtaacgacactatgatccgtgaagtgtagaagcagccaagtatgttctttctatgctgccccatttcccggcagtttccatgcattttgaagaaaaaaatagtggctaactcattgatatttgtatttggtcatcattaat

SEQ ID NO: 158670 - DNA, 200 bp, Zea mays
  Clone ID: MRT4577_76285C.1
aacccaatgggttgaaaccccgcggagctgagtagtaacaaaggggacgtttccaacttactgctccagtgtatgacggacaatatgagcctaacaagcaatactaacgataccaaacatatccccacagatagattcttaccaacatccatacctttcagaaaactctaccacaaaaaaacctaaaccaaccatccccc

SEQ ID NO: 158671 - DNA, 1606 bp, Zea mays
  Clone ID: MRT4577_76286C.1
ggtcccgggtccccccctcgggttttttttttttttttttttgcacatcaacaacgcatcgcataattttcctatcaaaatataaaaatgtccgagttcttttctacttcagtttcttctctacacgcgttcattcatacaattatattttcacacatatattcacaccatcgactgaatcgtaaataaaacaaaaaccacaaaatttctaaagcgaacaacatggctgaatcccgagtggagttgtgcatgcatgcatgtcagtttggcttcctgtcgagaaacgacgcgcaaagcgcgacgacgacacatgcatgggttttgacgacaacgcagaaacactgcgcagagcgacggcgtgaggcccgacttggcgagcttgacacagcgaagggcgtcgctgctgctgcttcctgtggcattacatcgagcacgccgagggcgtgacgtagaggggatgtcgaggctactgctatggaccggcgctgctgcacagtgcagatcgggtccacgctggttcgacggtggctgaggaaaaggagcggtgtccaacgtgacaggatgaagacccacctaaacagcacgctggccacagcaacagagcggagctcgaaggggttggagctcgatccacacctgcctctcgttcatggctggcaggggttcgctccaggcgctgaacatgggaggagtggaagggggcgttggtctggggaggatggcggccaggtggggctggtcgatggaatccacggcaaggcgggggtggccggacttgagaagggcagccagccagatgggagagggagcgtacgtgcagaaagcaaacaaggagcccaagccaaggggacgagctcacctgctcgagctcggaccctgagacatgccctgcgcgctggattagagatggagatcttgggtttggttccatggcgtcggtcgacattgcaggaaggaaggaggaccagaggtgcttctctgctctgcgcaccgtggcggccatgggccagagaagagcgccccggcgtccatcgctggagcagaggcacataggagtctcatccgtcctagctagagggccccatcctcaccgcgcaggacgaagccagcaatcgctcccacgagcagaaaggttcgtggcgcgctgctgcgggagggcagcggcgccatggatgccgggttggagcgccggccgaggaggagatcctcctagcatcatggatccgctaggggaaggggcgcctgcacctggagccgagcgcacaggcgagaagaaaccggcgaggtggggcagggagaggagagcggctgctccctgctgctgtcaaggcgcgccagggaggaggggttgtgtgtccctggaggccgagcacgaaggagggaggagcccggtgtgctggtgaagactcgcaggggcttgcctgccaccatgccgccatgccgcgcggaggagatgacgctgagggaaggcgccgacttggagagatcatgagcagggggcgcgtccatgtgaggggcgcggtcaccaggcccccatgcccgagcaaaagcagagggaggaagatgaaaaaggtgaaaacagcaggtgcgtgcgtcgcacgcgggc

SEQ ID NO: 158672 - DNA, 2390 bp, Zea mays
  Clone ID: MRT4577_76287C.1
tgctctcttcttctggttctcctcatcggcacgaccgtcgtcgtcatcacataagcttttatctaggcttgcggctacttgcatcggagcaagtcagtcacatctcacagctcagtgagatccagagccaaagggcggggcgtctcccactcccaatcccaagtccagccgccgccgtctcttgctcgctccaaaagccgttttccagagatctttttcagggccagacgccagccgccgtctctcgcttgcctgcatttccgatcctgaggcagtcctcatctcattctcatccaaccgggaggttgggaacgagatcacagctacagttacctgagtagtaggatcctcctcagatcggcttcaaaaatcaaagtgggggggacaacaaggcaggggatgagtgcagctgcaaccaaggtgaagagacgtgtgggcaagtacgagctcggccgaaccataggcgaaggcacattcgccaaggtcaggttcgccaagaacaccgagaccggggagccggtggccgtcaagatcctcgacaaggagaaggtcctcaggcacaagatggccgagcagattaagagggagatttcgaccatgaagctgattaagcaccctaacgttgttcgcatatatgaggtgatgggaagtaaaacaaaggtctacattgtgctggagtatgttaccggcggcgagcttttcgacacaattgctaaccaaggtcgaatgagggaaggcgaggcgaggagttacttccaacaattaatcaacgcagttgattattgccatagcaggggtgtgtaccaccgggatttaaaaccagaaaatctactgcttgactcatatggaaatctgaatgtctctgactttgggctgagcgcgctgtcccagcaaatcaaggatgatggattgctgcacacaacttgtgggactccaaactatgtggcaccagaggtcctagaagatcagggctatgatggtgcaatggctgatctgtggtcatgtggagttatcctgtttgttctgctagctgggtatttaccttttgaggactctaaccttatgacgctgtataagaaaatctcaaatgcagaatacacatttccaccatggacatctttccctgccaagaggttgttgacaagaatccttgatccaaatccgatgacgggttgattttgcgtccatattatagctgagcaactctttcattcctagcagattcatctcgggcgtactgtaagtaacataggatcaatgacgtaaagaactggcactaatttaacattaggatcagatactaatttaaacggtccaaccaatagatctatatgcttttttaaacggcgctggaatgcataactctaatcttaggttccaaatacagttaaatttgctgactagattggtcgaacaaagcagaagaaaattcgtgtgacttcagaataacaatccctgaaatactggaggatgagtggttcaaaaagggctacaagcgcccggagtttgacgagaaatatgacacgccattggatgatgtggatgctgtcttcaatgactcagaagagcaccacgtgacagagaagaaagaagaagaacccgtagctctcaatgcatttgaactgatttcaaggtcagcaggcctaaatcttgggaacctatttgactcggagcaggaattcaaaagagaaacgaggttcacgtcaaaatgtccaccgaaagaaatcattcgcaagattgaggaagctgcaaaacctctaggatttggtgtccagaagaaaaactacaagttgaggctagagaaagtaaaagcagggaggaagggaaacctgaatgttgctacggagatactacaggttgcgccctcccttcatatggtacaagtccggaaagcaaaaggcgacactctggagttccaaaagttctacaagaacctttccaagaccttaaaggacgttgtctggaaatctgaagacctgcaaatgcgagctgcttcttagcatccactagatggcgagatgttcgtacgtgtcagattccattcccgtagcatgatgtgtcgtcagccgtttctgttcactgcactctgcatggtccggtgggcgcgtggcttggcattttcagagaccgcgttgctcgttgcagcccgggatgaaggcgatgcagtaggttttgtggatgtggtgagctctgtaaatctgtatatgcctattgatgagtcatgttgcaagctgtaacgacactatgatccgtgaagtgtagaagcagccaagtatgttctttctatgctgccccatttcccggcagtttccatgcattttgaagaaaaaaatagtggctaactcattgatatttgtatttggtcatcattaataaatcgcctctccatc

SEQ ID NO: 158673 - DNA, 846 bp, Zea mays
  Clone ID: MRT4577_76288C.1
aaacacatatcgatgcatttctcaaaacataatccgcattttgtaacttagttttgcacatcaacaacgcatcgcataattttcctatcaaaatataaaaatgtccgagttcttttctacttcagtttcttctctacacgcgttcattcatacaattatattttcacacatatattcacaccatcgactgaatcgtaaataaaacaaaaaccacaaaatttctaaagcgaacaacatggctgaatcccgagtggagttgtgcatgcatgcatgtcagtttggcttcctgtcgagaaacgacgcgcaaagcgcgacgacgacacatgcatgggttttgacgacaacgcagaaacactgcgcagagcgacggcgtgaggcccgacttggcgagcttgacacagcgaagggcgtcgctgctgctgcttcctgtggcattacatcgagcacgccgagggcgtgacgtagaggggatgtcgaggctactgctatggaccggcgctgctgcacagtgcagatcgggtccacgctggttcgacggtggctgaggaaaaggagcggtgtccaacgtgacaggatgaagacccacctaaaggagtcgctggccacagcaacagaggggagctcgaccgtgggggagctcgatgcacaccggaggctcgtccatggctgggaagtaagggagcttggttgcatggagaggctagcggccatgggagtcctgggcgcctgcacttggggatttcctgcgccagggagatgcagaggtcgcctgctcctgtagaaaggctttggggtgtcgagcccctcctggaggtagcagcacccggacgctgggcggacgctggg

SEQ ID NO: 158674 - DNA, 1892 bp, Zea mays
  unsure (1)..(1892): unsure at all n locations
  Clone ID: MRT4577_76289C.1
accggggagccggtggccgtcagaatcctcgacaggnagaaggtcctcaggcacaagatggccgagcagattaagagggagatttcgaccatgaagctgattaagcaccctaacgttgttcgcatatatgaggtgatgggaaagtaaaacaaaggtctacattgtgctggagtatgttaccggcggcgaacttttcgacacaattgctaaccaaggtcgaatgagggaaggcgaggcgaggagttacttccaacaattaatcaacgcagttgattattgccatagcaggggtgtgtaccaccgggatttaaaaccagaaaatctactgcttgactcatatggaaatctgaatgtctctgactttgggctgagcgcgctgtcccagcaaatcaaggatgatggattgctgcacacaacttgtgggactccaaactatgtggcaccagaggtcctagaagatcagggctatgatggtgcaatggctgatctgtggtcatgtggagttatcctgtttgttctgctagctgggtatttaccttttgaggactctaaccttatgacgctgtataagaaaatctcaaatgcagaatacacatttccaccatggacatctttccctgccaagaggttgttgacaagaatccttgatccaaatccgatgacgggttgattttgcgtccatattatagctgagcaactctttcattcctagcagattcatctctccagttccaaatacagttaaatttgctgactagattggtcgaacaaagcagaagaaaattcgtgtgacttcagaataacaatccctgaaatactggaggatgagtggttcaaaaagggctacaagcgcccggagtttgacgagaaatatgacacgccattggatgatgtggatgctgtcttcaatgactcagaagagcaccacgtgacagagaagaaagaagaagaacccgtagctctcaatgcatttgaactgatttcaaggtcagcaggcctaaatcttgggaacctatttgactcggagcaggaattcaaaagagaaacgaggttcacgtcaaaatgtccaccgaaagaaatcattcgcaagattgaggaagctgcaaaacctctaggatttggtgtccagaagaaaaactacaagttgaggctagagaaagtaaaagcaggaagccacggcagcacaggctgcaggccttgaggtgctaatatctatcagacctggaaacgcgccactccctgctgaaacccatgggtttgggacagtcgaaccaaggtcgaatgtgggaacgcgaggcgaggatgtacttccaacaattaatcaacgcagttgattattgccatagcaggggtgtgtaccaccgggatttaaaaccagatgatctactgcttgactcatatggaaatcttaatgtctctgactttgggctgagcgcgctgtcccagcaaatcaaggatgatggattgctgcacacaacttgtgggactccaaactatgtggcaccagaggtcctagaagatcagggctatgatggtgcaatggctgatctgtggtcatgtggagttatcctgtttgttctgctagctgggtatttaccttttgaggactctaaccttatgacgctgtataagaaaatctcaaatgcagaatacacatttccaccatggacatctttccctgccaagaggttgttgacaagaatccttgatccaaatccgatgacggtatgcaagagcacagaagctgctcgaaataaaatactacccaaaacaatagaataacaatccctgaaatactggaggatgagtggttcaaaaagggctacaagcgcccggagtttgacgagaaatatgacacgccattggatgatgtggatgctgtcttcaatgac

SEQ ID NO: 158675 - DNA, 240 bp, Zea mays
  Clone ID: MRT4577_7628C.1
gagaaaggggaatttttttcccgggagcccaaaaactcagtggccccctttctacaaaattcttcaattttgacgacccccgggccccttaattcttacatgaattgaaatttttcaaaaactgggacaaattacccttaactggcccgggtcttttcacaaaaaaaaactggaaattttatccaccctttcgttcaaaaaaaaaaacttggagcagaaacccacccgtgtgggtttttt

SEQ ID NO: 158676 - DNA, 771 bp, Zea mays
  Clone ID: MRT4577_76290C.1
ccgtccacacacactcgtgtctctcacaactacgactagcagttcttcagcaccaacacacacacggtgtaactagctaccttatacctagctagagctagtctctctcgatatacatctaactagcttaccaacaagcaacaagctagctaggctctctttcagagtcccttatggcttccccacacaaaatcgtgttcgtgcttctcttgctgacagcatcgtcgtcgtccatgctgcaagccaggacgatggcgccaagtgaccgccagcatgcacaaacagatcatcaagcggcagcgcacgccaaggagagggagaccttaccgagcccttcttcccagcaactgaccagagatgatacggcgtcgtcgacgacgccaccacccgcaccgcctgctagcaacactgaggtcgtcgtcgtcgccgccaagggtggggaggcgatggcgcagtcggccgccgacgggtccgtgcccagcccaggcataggccatcacaaaatgctacaataatctgcgccaacaaattaattgtagtgtctatgtatccatatatatagatacaaaataaaagctaggcgtatcttctcactatctatatatattttgcgctcgaattatatgcataacgtgtacacgcccctactggcaccttcttgcccgttacaagagggggggggggcggggggggggaaaaacaaggggggggggggtaaacaaagaccggcgggcgctccccccccaagggggggggggggggggaggaggg

SEQ ID NO: 158677 - DNA, 1554 bp, Zea mays
  Clone ID: MRT4577_76291C.1
gtcttctctcccacacggcagcagccagagcgccatctccaagctcgagcccctcctccctagcgcatggggcagaagcctccatggccaagctcctctggtgcaggcgcccagcctccccaactcggcacccctcaagcacacgggaccgcggcgcctctgctctcccatccaggcgccccttcccctaagcggatccatggtgctaggaggatctcctcctcggcaggtgctccaacctggcgtccatggcgccagtgccctgcacaacgtccccctcccccaggctcctagcacgcagagcatttctctgggtccgggctcgagcagccgctcccctcaacaactccctcaacgccggcctcctctgccccaggtccggcagccctccccaaccaagcttctcccatggtgctgctacctccaggatggggctcgacacccaaaggttggaatccgaccctctctctgttcccctcaatttcaagctcccctggcatttctttttgccctgcagaaattccccctgggcgctggaggcgccaagctcacgctggagcatggcaaggcttgaccgacgccctttccatggctggctttgagcagtgggtcgagcccctcttcttgccatggcacttgacccctgttcttctctgccccacgacgcccagcctttctacaggagcagccgacatccgcccctccctgacgccccccttccccacctccaggcttcagcgcctggagcgaacccctgccgcgcctgggatccaggcagccatggagggcagccgaaccccttctccatggcttgagccagcgccctctccctgctggttccttggtcgccccttccctggtgggtactcagtcaccctcccctatctctattctagcagctagcacacgaaatcctcctcggtgcctagtgcccatgccgacaccacgccttctcccatggctgagcgtgggcgctcttttccccatgccatggatgcacctccacctgctcctgttgcatggacgcaagccccagcccgtccgcgacagcgtcgaccccgcggcagccttgtacttgtgttgcttcccgagctgagaccttgcacgcaacagcaagtcctggatcccctctgcatcgcgtgcttcgctgggtctgcgcagcgctgcgcgtcgtcgtcgaaaccctcgcctctcagtgtcgcgcctcacgtaccccgcgtccaacgagacgcctaaaccatggacgcatgcgcaactccacttgggtttcagccaggttgttcgctttagaaaaattggggtttttgttttatttacgattcagtcgatggcgtaaatatgtgtgtgaaaatataattgtatgaataagcgcgtgtagagaagaaactgaggtagaaaagaactcgggcatttttattttgataggaaaatgtgcgacgcgttgtttgatgcgaaaactaagttacaaaataccgattatgttttgggaaatgcatcgatatgtgtttatgcgaaaagagtgattgttttatacaatgtgatgggattcgcggg

SEQ ID NO: 158678 - DNA, 245 bp, Zea mays
  Clone ID: MRT4577_76292C.1
ctttattgggggagcctttaacaaacatctggggggactgcactctcaacctccacctagcggccataagaccaagaggccactcggaaatggaagcacaatgcctcaacactccaactgagggatgaagaccaggctttaaaggggaggaacacattctatgcgaaccattttggggtagaactcctgttgggcacacaggagagaatgtgctaagcgaccttcacccttgtgccgacactgta

SEQ ID NO: 158679 - DNA, 134 bp, Zea mays
  Clone ID: MRT4577_76293C.1
ccacgcgtacgcccacgcgttcgcagcagtttggcggaggctgatggcgccaagcgcaggcgtcgtgccgccattcctggcccggccatcgagcagcagacacctgcgtggcgctttgagagccctttagccca

SEQ ID NO: 158680 - DNA, 1300 bp, Zea mays
  Clone ID: MRT4577_76294C.1
cgcatcaaacaacgcatcgcacatctttcttatcaaaatataaaaacgtccgagttcttttctacttcagtttcttctctacacacatccattcatacaattatattctcacgcacatattcacatgcaggcacatcatcgaccgaatacataaataaaataaatcacgaatcattcaaggcgaacaacctggccgactctcgtcgcgcatgcatgccattagtttgggctctttgccgacgagcgatgcgcgaggcgtgacgtcgacaagggctgcgattaaacgaccgcgggtttcgacgacgacgcgcagacgctgcgtagagcgacgacgtgaggcccgttctggcgagcgcgacgcagcggagggcgtcactgttgctgcttgctgcgggattacgtggagcacgccgagggcatgacgccgcagagctccacgtggctacccaactggcgtcgcggctgttgacggagggagctcgctgctgctgctcaccatggcattacatcaagcacgccgaggtcgtgacgtagaggggatgtcgaggctactgctatggaccggcgctgctgcacagtgcagatcgggtccacgctggttcgacggtggctgaggaaaaggagcggtgtccgacgtgacaggatgaagacccacctaaaggagtcgctggccacagcaacagaggggagctcgaccgtgggggagctcgatgcacaccggaggctcgtccatggctgggaagtaagggagcttggttgcatggagaggctagcggccatgggagtcctgggcgcctgcacttggggatttcctgcgccagggagatgcagaggtcgcctgctcctgtagaaaggctttgggtgtcgagccccatcctggaggtagcagcaccatgggagaagcttggttggggagggctgccggacctggggcagaggaggccggcgttgaaggagttgttgaggggagcggctgctcgagcctggacccagagaaatgctctacgtgctgggagcctgggggagggggacgttgtgcagggcactggcgccatggacaccaggttggagcacctgcagaggaggagatcctcctagcaccatggatccgcttaggggaaggggcgcctggatgggagagcagaggcgccgtggtcccgtgtgcttgaggggtgccgagttggggaggctgggcgcctgcaccagaggagctcggccatggaggcttctgccccatgcgctagggaggaggggctggagcttggagatggcgccctggatgctgccgtgttgagagaag

SEQ ID NO: 158681 - DNA, 548 bp, Zea mays
  Clone ID: MRT4577_76295C.1
gttgtattctattatattgggacacatctagaaggactcagtatcaaaatggctgctcgatttatggatataggctgctccgatgccaaaacatgtgaattattgagttgttggtgctaccaggaaacaagtcaaccttccaagctatttcctctatgtgccttacagatttgtattaatacataatgctagcttctacttattctgcatcaaaagggttgcagcatggagggtgatggaaatttcaaatgcagtgacaaccatttcatagaagccgaggatgacagttgtataaatgaaaaaaaaaggtcgtctataaaaaaaggtgctcagaatgtagatgcaacaatttcttgtcacgattggtagcgcagccaacaagaaagctagctatatatctccatgtcattagaaagcggaccttcaatgcccctaaacttttgtaaattgtcagtgacaaagcaatgtataaaataccgataaccttgtgtaatggctctgcatggtacatataaccataggcaacatgaccgtgttcgtttcctttc

SEQ ID NO: 158682 - DNA, 813 bp, Zea mays
  unsure (1)..(813): unsure at all n locations
  Clone ID: MRT4577_76296C.1
gccggccgggngggggaagacgagctagatcagcggcctggagctgctggagatcgagagagagagacgtcaggtcaccccaccacccacctcatggcggagaggctggaggcgggcgctggcgacgacgatgagtacacgcaggacggcacggtggacctccacgggaacccggtgctccggtccaagcggggagggtggaaagcatgcggcttcgttgtagtgtacgaggtgttcgagcggatggcgtactacggcatctcgtcgaacctggtgctgtacctgacgacgaagctgcaccagggcgtggtgccgtcggcgaacaacgtcaccaactgggtcggcaccgtctggatgacgcccatcatcggcgcctacatcgccgacacgcacctcggccgctaccggaccttcatggtcgcctccgtcatctacctcaccggcatgatcctggtgacgctgtcggtgtcgctgccggcgctgcggccgcccaagtgcggcgccgggacggcagaccccagctgcctgcagcaggcgacgagcgcgcagctggccgtcttcttcctgggcctttacatcctggccgtgggcacgggcggcaccaagcccaacatctccaccatcggcgcggaccagttcgacgacacccacccgcgggagcgcggccacaagctctccttcttcaactggtggatgttcagcatcttcttcggcacgctcttcgccaacaccgtgctcgtctacatccaggnacaacgtcggctggggccgtgggctacgcgctgcccacgcttcggcctcgccgtctccatc

SEQ ID NO: 158683 - DNA, 392 bp, Zea mays
  Clone ID: MRT4577_76297C.1
aaactaccacacccatgggcaccatttgcctacagcgccgccgttgccgctctggtcagtgccctcaccgataagacggacatggccaccttctcgagaaccgcagatgtgcctctcaacaatcacaacgaaaccaccgatcttctcttcttccaccacatacgtggatgaacacgccgcaacaggttcacccgccctagcagaccgcaacggctccgatagcgggcccgagaataaaccgcacagaacccaccccgaccaagatcttgatcaatcgctaatcaatgaaagtgtgaagccgtgcaacaataccatggtcgcgagagacgcgcttctcggtagtgatcgccgacgagaccatcattgcgcaaaattaggaggcgtctgctccg

SEQ ID NO: 158684 - DNA, 412 bp, Zea mays
  Clone ID: MRT4577_76298C.1
cctaattacctctccaccacgcttcctcccacgcctcctaaaaaaactcataaacaactctatccaaaaccaacaaacaataaaaacaaaaagaaactttttaataaatataatatactccaacaatcataaaacctactacttctcacacatttatttcatcacattttacaaaacatcatttctcaacaactactacaacttattctatcataaccttcctaactactctcattaacaacacaatcttccattcatctaactaactccattcaactactcctcttatttttttcaactacaactaccattcattcaactaccttcttcctacctacatcaattaatttctttcaaccaaccaacattcattcaactatctttcttatttatatcaactacaactactacc

SEQ ID NO: 158685 - DNA, 252 bp, Zea mays
  Clone ID: MRT4577_76299C.1
atcagaggcaactattcttgtctcgggtctcgtaagaatctcgcacagacaagccagaatccattttgagcgatcaaggctgatggcgaggcacatcagtactggcagcgaacactccctgacgacatcgcacctgattgcaaagtgctgggacaggacgaaagtccgggacctggcagtctatgactcgcaggcctggcgattgaggatggcattgacacatcaatatggtctccaaaccagacactgggc

SEQ ID NO: 158686 - DNA, 493 bp, Zea mays
  Clone ID: MRT4577_7629C.1
aataaggtccgcacaagacaattgttaacaatgttcaattgcagagtttgcgacaggtattatcagtcttgcaccaaaagagagcttgatgaacatcttacatgaccccgtggctcccacaaggaggcaggctatagcaacattagcccgtggctctcccctttcatgaacttctaaaaatatgagctcaactgctgcaagtaccacaatctctttaaggattgcaagtctctgagtggggaaaagtttacttctgtgcccgcatgggtacaatagcagttgatttgttgagttgagacttgagacctatagactacagtaacaaaaacgacctgcaagcctcagcccacttcaacaaacttttcaaggttgattggctgagtagcacgaacaatattagtgatggcaatatatacactggtatgtacagcttcagtggacgactcggaaagatcacaactcaaaaccaccattcagttgaacagataaagac

SEQ ID NO: 158687 - DNA, 226 bp, Zea mays
  Clone ID: MRT4577_762C.1
tcgatctgacaaaagattttccctcgaatcctccaccttacactccaacgctcaattgaggggacatagctacactttagtcaaccacaccatcacttttttccctcgcccgcttccttcatataccaattccttccttgcatatttactcaatacttgacaattacaacctcaattaccccaccccatttattcccttcactaattatataactatgaatttacc

SEQ ID NO: 158688 - DNA, 404 bp, Zea mays
  Clone ID: MRT4577_76300C.1
cagacattgcagcacactttgtgtcaggggcagttcctgagtcagttctaatgtcagatgattttgtgctcgcatcgtgtgctttcataaactgctctggagtgctcaagtgttttccagtagcacccactacattgctagcagagacagtaggacctccactgggtgcatgtagagcagagtcaacatgagattttgtgctgatctctctaataggggtccttctgtcaatacgtctgctacttaatgagcctgtaccagcatattctgtttcatcttcagagtccttagcttgagctcccattatctctacttcccaaccacttttcgtataatggtcgaccggaaggatttcccaagcctttaagcattctttcagccaccggtgattgacaagctttata

SEQ ID NO: 158689 - DNA, 698 bp, Zea mays
  Clone ID: MRT4577_76301C.1
ggaaaaaaaaaaaaaaaaaagaattctctatttatcttgtcttgccattcctaaccatttcattagctctgctagcttttaactggtatccttcaattgtttttgttggtgatacctacacctattttgctggaatggctttggctgtgataggaattttgggacatttcagcgagacgttgttgctcttctttttacctcaagttcttaatttcctgtgttcggtcccacagctctttcactttgttccttgcccaagacataggttgccgaggtttgatcctggagcgggtctgttgactggtaccaaagatgggaatctggttaacatattccttaggttatttggaaagtgctcagagagggccctttgcataaggctccttattttccaggctctatgttgcgtattctgcttctggctaaggtacatgctcaccggatggtacaagtgataacctgcaatcggctctccatcctgacacccagctcgttgggaaaaaaaatcagctgcatctgatggctgttgttttcctcgacatacttgtagactaaccagagtaggtttttggattcatttcctatgtatacttgtgctaactacagtttccaagtctttgtaaccatatatatgcaatgcctttggcttcaaggaagtcttcggtatacttgtgtaccaagagcctgtttcttgtctg

SEQ ID NO: 158690 - DNA, 1766 bp, Zea mays
  Clone ID: MRT4577_76302C.1
cccggcctgccgagtgcgcaccacgtcaacccgtcgccactcacataaaacgtcttgacctccctgctcgccgccggcgaggagacagtagcccgccgctgcacgcacgcgccgcgaggaggtctggagcggctagctcgtctagagctaagtcagcgaatctcccggaccgtcccttctcagttctcatggccgtccgccgcaggcccgcggctgctgctgccggggacctgcctccgcaggcgccaccggcagatgcagcgccgacgccggcgccagacgaactggtcctccggccgccaaacctccgcgtggccgctgtggcggcggtgctcttcctcgcgcccttctcttatctctcgttcgtgcgctaccgcttgggcgccgatctgcagcgatccatcttaaaatgcggcgccatgagcctcattgggttctgcgtcgcgctcaagctcatccctgtcgcggccagctaccacctccgccgccggatgttcggctacgacatcaacaagaaaggcttgcccacgggccaaatcaaagtgcctgaagcactaggtcttgttgtggggattatctacttggtcattgctattatatttcagcagtttcactatgccccagactccatttggcttgttgaatataatgcagcgttggcatcagtctgttttatgattcttcttggatttgtcgatgatgttcttgatgttccatggagagtgaaactggcattgccaacgtttgcagcactcccattgctaatggcatatgctggtggcacttccatcatcattccaaagcccttaactccttatgttggactaacggttttggagctaggtttattttacaagctattcatgctcttgttagcagtcttttgtacaaactcgataaatatacatgctggtctaaatggacttgaagttgggcagactattgttatatctgctgcggttttgatacataatgtaatgcgcatagcatcttctacagatatcgaaactcagcaagctcatgaattctctatttatcttgtcttgccattcctaaccatttcattagctttgctagcttttaactggtatccctcgattgtttttgttggtgatacctacacctattttgctggaatggctttggctgtgataggaattttgggacatttcagcgagacattattgctcttctttttacctcaagttcttaatttcctatgttcagtcccacagctctttcactttgttccttgcccaagacataggttgccgaggtttgatcctgaaacgggtctgttgactggtaccaaagatggtaatctggtgaacatattccttaggttatttgggaagtgctcggagaaggccctttgcataaggctccttatttttcaggctctatgttgcgtattctgcttctggctaagatacatgctcaccggatggtacaaatgatcacctgcgaaaggctctccatcttgtcgcccagctcttgggaaaacccggttgcgtctgatggctattgtttcctcgacgtactttatcaggaacatgggatctgcagaggagcaattggaaggctgaaagagcagaaggttgagcgggaggagtaatctgattaattgaattttgtttgtgattaggcctattgggcctggggtttgggccgtctggccttgtaaggagggtgtacttaaaccctgaatcttctggtaattggcaggaagaaaatagaagaaaaaccaccaaaaaaaaaaaaaaaaa

SEQ ID NO: 158691 - DNA, 484 bp, Zea mays
  Clone ID: MRT4577_76303C.1
ggcagccaaaatcgctggacgtctggactctggacccgcccagttctttttccgacactattaaaaaatttgaactctccaaaaccgggtttttatgccactctcaaaacaggatttttggtctacaacaggcaaaactttatgcacactgggacaaaaacatcgttcgcctagaacttttgaattctttggttcaagcaaaaaatcgaccccccaagttaaaaccttttgacgaaaacgtctccctgggggaccggggctgaacttgaattttgggccgcctcccagctggcgaggccactctggttactgggaccaaaagcgttgcaacctttttttgggcagctccaaaactggcccctgaaggcccagaaagataaacttgacttcgaatttggccatggggcaacgtcacttaaacagaatgtctgggaaaaaaatgccgactggcggagaaaccttcagccaaaaagggaaacctgaa

SEQ ID NO: 158692 - DNA, 353 bp, Zea mays
  Clone ID: MRT4577_76304C.1
gcgagtacgtcgtgataactcgaccctatggacttctgacatctggtaggaccctgatgaatagatgagggaggaacccaagcgctactctagtgaggggcaagtaagccggctattatgtgcctagagactagtctctagagcttgatgctgatgaatgacactatgcattgagatctggaacctggtgtattgggtgcaaagcttgctatgactggcggcagtaaaatatgtaggcttcccgaatgagatgctgtctatcaacgcgctggggttctagctcgattgacacgctgggcgctggagaccgtactgtaacagttgctaagcactatatactgcagtcaattgca

SEQ ID NO: 158693 - DNA, 245 bp, Zea mays
  Clone ID: MRT4577_76305C.1
ccggcccttccgtccacgcgtgcttccgctcttgtcctcattattgctatcgccgagcgggtcttcttgggtgaccacgcctccgcgcatcatcgcgtctccagcatcatcaccccgcccatgttccatagcattctcatccaccgccacaactgcggtttccattgctccttctacacctaccacgcattcatacaagacatcagcaacttcccaaacttctttaccaccgtctactagcacac

SEQ ID NO: 158694 - DNA, 345 bp, Zea mays
  Clone ID: MRT4577_76306C.1
tttttgtaacttttttaggaccagaaaaagaagtattattttcttagaagagaaaaagtggtactgtccaccattttcttcttcttggacactgctggcactttgtacgggacaagccgttggagaacttaaacatacccttgacttcatttgaagaaaacgtcttattgtctacaggctgaccacacttcattgcgcattttgtttccttcatggacgaactaatgctacatcttaattgaactagctgtgggtggacacaacatccaaacagggtgtcgtgcgtattacagtgcaccagacagaaacctattggcgagactctagattggtgtcgccatggac

SEQ ID NO: 158695 - DNA, 548 bp, Zea mays
  Clone ID: MRT4577_76307C.1
aaagtagttcattttttcccctggaagtttattgtaccagtaagcaatcattcaagattcacaacaacattctgacaacattacccttgacttgatcaaattatggcgatggaccaattgcttggttcctatggattttaacgtccatggtgtatagaaactgtcgacgtggttgttgccgttggtctgtaggtacgggtcggctgatcccgtcttgacttgcacttgcacgcccgtctcgatcagatggcattgatcattcggccgttttgtacgtagcaccagaaaggaatgtgctctggaaatttgcaatcttttaaccgctctcgttcggcgtgggcgagttgccttttgtccgtgcaagttctgcgacgttggccgctgggcgttgccttctgaactagaagaggacaccagggcatggcctcgtagtctcataacattacaccggcgtcgagaaatctgtgcctaaatcaaacctacagcattagacacaaggtaggaataggatctgcacattgccaccctcttgaatttcaaaacaagcc

SEQ ID NO: 158696 - DNA, 1464 bp, Zea mays
  Clone ID: MRT4577_76308C.1
ctcgaggccggccggggctttgctaataataataatcaggactcaggagagcgagcaaagaagaagaaggcaacacgtacgacaggcacagtagccatctttcccatcctctctggctagctctttcctaagcttaggctagctagaggtagctctccatcctttgggaattaatagtaagtgtttgggacttgggagagggagaggcgtcatgtacctgaacccaagaatcgtaggctctggggagaggacactggttctctcccatggctatggaggcagccaggctatctgggacaaggtgctgccgcacctctcacggacgaacaaggtactactcttcgactgggacttctcgagtaccgccgccgccgccggagaggaggaggaggacgcggagcacagctgctacacgttctcgaggttcgccgaagagctggtggcgctcatggacaagatgaagctgagcggcgccgtgtacgtggggcactccatggccggcatggtcggctgcattgcgtccatcacgcgccccgacctcttcacccacctcgtcctcgtcggcgcatccccgaggtacatgaactcggaggactacgagggcgggttcgacgagctcgacatcaaggcgatgctgtcgaggatctcgtcggacttccgcggctgggccggagggcttcgtgccgctcgccatcggcggcagcgcagacgaccaaccttcatgtataccaccgacgccgtgggacttttcccgcagctcgtcacgcgcgacgaaatgctcaggatacttgaccgcattctcgtcggctccgctgcttcccaagaggaggagactaccgcggcggcggcggctgccgccaagaccgagacgacgagtagcgaggtcgtatcctctggtggtgttgccgatgcgctggagtccaagggccgtatcgacgtggcgacatagtgctcctgctgctctggtgcaacatccctctcgaagtctcgatctatcagccttggctggctcttgtgctggtctcagttgatttgcttcggtccacactccacacgtttaacttacattattgcgcttttggattttctaatgcgtagaaacaggtggtgttgccgatgcgctggagtccaagggccgtatcgacgtggcgacatagtgctcctgctgctctggtgcaacatccctctcgaagtctcgatctatcagccttggctggctcttgtgctggtctcagttgatttgcttcggtccacactccacacgtttaacttacattattgcgcttttggattttctaatgcgtagaaacattaccatggttcgttcggaatttttagccatcacgtcacccaaactgcgtgtattattggtttgatcatggattgaattaaatgaaacactgagtgttaaagcattgtaaatgaaagaaaaaaaaaaaaagggcggccgccaccgcggtggag

SEQ ID NO: 158697 - DNA, 527 bp, Zea mays
  Clone ID: MRT4577_76309C.1
aaggtgggtgacccattgactgatgagttcactactgaacacagtgtatctcgcctccaaggcgctgtaggtgatgaaccctatgtcagaaaaccgcgaaacactcgttccggggaccgtcgtgtacggatgacgtaggggatggcctccatcgtggacccctcatacgcggaggtggtcgcgcacagggaaggagctgtaccggctcaatgactacatacagggaggctactagggcggcgtgtgaaccgacaaccccctccgatcctgccagttagggaagtgcgactttgaaatccaataactcgtaacaatgatgatgacctaataggccgtgttttcttgtacaatgatgataagtacggcaatgtttacctttctcttttttcctactgcgtggcttatgagtatattgccaaaggcatgcgtgagccatgcgccggccggcgctgtgctggggcgcagagaccatctgatggtggtaacaccgcaaataagagcgggccggtgtgtgtttgctttgaagg

SEQ ID NO: 158698 - DNA, 1910 bp, Zea mays
  Clone ID: MRT4577_7630C.1
actaaaccaagctcttgcaaggagaaaaaaaaaggaggggcaaggaacgcgctggctgagagacatggttctgacgcacgttcacgaccttgacgaggcatccgccgcatcggccgtcgtcttcgcctcgagatacgtgcaggacccgcttccaaggtatgagctgggagagaagtccgtctccaaggacgcggcgtaccagatcatccacgacgagctgctgctggacagcagcccgcggctgaacctggcgtcgttcgtgaccacgtggatggagcccgagtgcgacaagctcatcctcgagggcatcaacaagaactacgccgacatggacgagtacccggtcaccaccgagctccagaaccggtgcgtgaacatcatcgcgcggctgttccacgcgccggtgggcgccagcgagaaggccgtcggggtcggcacggttgggtcgtcggaggcgatcatgctggcggggctggccttcaagcggcggtggcagaaccggcggagggcggcggggcagccctgcgacaggcccaacatcgtgacgggcgccaacgtgcaggtgtgctgggagaagttcgcacgctacttcgaggtggagctcaaggaggtgaggctgcgggaagggtgctacgtcatggaccccgacgaggccgtgcggatggtggacgacaacaccatctgcgtcgccgccatcctcggctccaccctcaccggcgagttcgaggacgtcaggcgcctcaacgacctcctcgcggccaacaacaggcgaacggggtgggacaccccgatccacgtggacgcggcgagcggcggcttcatcgcgcccttcctgtacccggacctggagtgggacttccggctgccgctggtcaagagcatcaacgtcagcggccacaagtacggcctcgtctacgccggcgtcggctgggtggtctggaggagcaaggaggacctccccgacgagctcatcttccacatcaactacctcggcgccgaccagcccaccttcacgctcaacttctccaaagggtctagccaaatcatcgcacaatattaccagtttcttcgattaggtttcgaggggtaccgcaacgtgatggagaactgcatggagagcgctcggacgctgcgtgaggggctggagcgcacgggccgcttcaccatcatctccaaggagcagggcgtgccgctggtggccttcacgttcaaggccaaggacgaaaccccgctggccttcaagctgtcggcggagctgcggcggttcggctggatcgtgccggcgtacacgatgccggccaatctggagcacatggccgtgctccgggtcgtggtccgggaggacttcggccgcccgctggccgagaggttcctgtcccacgtccggatggcgctggaggagctcgaccacgcggccaagggcgggcccgtgcccaggatgcggctcaccatcgagctcggccctcccgccaggggctccggcgaggaggcctccgccagggtcgtcaaccgggaggccgtcgtgccggtgcatcgcagcgtgtcgctcgccggcgggaagaccaagggcgtctgctagactggccggtccatggcccgaaactctctgtagtggtatggcgaggcactgaataaacatgtgtcgacaaaaggcaacctctcgagcaccccgtcatcgcgatgcaatcatgcaaataaagctaaaatttatgtaaggttgagtcgattggaaatttaaaagtaaccaacgataaatttgtttatgcgttgatcgaaaaaaaaaactatcaaatcgtaatgaaaaacaacgacataaatgatacatatatgtttttatgttttatcttctctggtaaagtttcaagtcaataaatgattaatttttaatcgataagaaaaaaaaaaaaaaa

SEQ ID NO: 158699 - DNA, 600 bp, Zea mays
  unsure (1)..(600): unsure at all n locations
  Clone ID: MRT4577_76310C.1
attgggtccctcgaggccggccgnggcccgggagtgtacttgagagacggagcgttccgccagcgtccacttggaggtgtcgctgttcccttcactatactccccccccctgcggatcaacccctgcatgtccgcttggcgccccggtcctccgatgccatcctatctgatcctcatggattcctcctcgtacaggctcacgcagctccccgagtgcgattacttcttcgacgtactccttatcggagactatggcgccggctagacctgcctcttcctccgtttctacggctactccttggatgaactctccactacattatgcgttgattccacaggtgaatatgctgattattggagcgnaataaatctggtttgccttgtgcatacacgggtggacaagatatggttaggaccttgaccaggtcttactacttagctgcacagaggatcattatgctgtatgatgtgatacgacaaaagacggtctccaagctttctgacatatggtgcaaaggcattgagctgtattcaatcttgcagagactgagccaagatgcttgctggaaatcgaggaaacatggaaagtgcgacctgtgt

SEQ ID NO: 158700 - DNA, 680 bp, Zea mays
  unsure (1)..(680): unsure at all n locations
  Clone ID: MRT4577_76311C.1
cgactaccccaagcggctcagagctctagttctagctagctaacnaagggggggaaaagggatccgcttctcgctgctgccatgaaccacgctgctacccatcctgaccgtaggaagcccctattactacgcaaatatgagagtttctcacgccaccacctgccgacttcttctccacagaccaccaaccacaacgagtgaccttcccatttactacgcgatctgcaagagcctgcatccaagatggaagctcgatgccgagcccctcgccaatccacacacaaggactgcagcccctctgacttcaccctcctcgccgccacctcaccgtaccatgttctatatacttgcaatgaagatgtaaaggtcgaaagctactgggatcacttctgccacgagcatccgcaaaggatactggacggcaccgactcactacattggagcgaattcctaccatatggacatgacgcacgtcagattgctcagggaaatgtcgctggacgcatatatcgctcctatactcttgccccagaatactgccgaaaggaaccacacaacgcggtatcagccctgatcggcatcaagccactacgcacacctcaaccgattggtttgttatcaaacggataaattcatatgaaaccatttgccactgcgacggaccacaagcactacaaaga

SEQ ID NO: 158701 - DNA, 223 bp, Zea mays
  Clone ID: MRT4577_76312C.1
cggctcgacccaagcgtcagcccacacgtccgcattcatctcctcgctcccatttcccgggaatcatggcgtccgtcaacgcccgcgccccggtagcggcccttcgcccgttgacggcatcgctgaagttcttggcggacttccttggtcactctaaccgccactggcgcaacacgtctaccatgaagggcattgtcaaggcagatgccaaaggcgaatggct

SEQ ID NO: 158702 - DNA, 1286 bp, Zea mays
  Clone ID: MRT4577_76313C.1
tctcgtgcgaggagggccaaggggaagaggggaagcaccgcaccaggacccttgttcgccgccgccgccgcctctgatctccgcgaggttgtcaggattcaatatgtcgaccagcacatttgctacttcctgcacgctgttgggcaatgttagaacaacgcaggcctcccagacagcggtgaagagcccttcgtctctaagcttcttcagccaagttacgaaggttccaagcctgaagacctccaagaaactggatgtctccgccatggctgtatacaaggtgaagcttgtcgggcctgaaggtgaagagcacgagtttgatgctccagacgacgcctacatccttgacgcagccgagactgccggtgtggagctgccatactcgtgccgtgctggggcttgctccacctgtgccgtcaaaatcgagtcttcattatggtctcattgacattcctgtggacttagtcgctgggcagagggacagagttatctcaccatccatggtaaagaagcactacaagctgatgcggaagtcaggggtggaggtttcatacaatgagtttgagtatgctcatttggatttcacattctcgcatagggaggagcttttgtcctatgttatgtcccgcctacttttagtgactgatccaggtaaaggccgtatcaagcagaccaccgtgcgactcaggaggcagaagaaagttcagtcagagattgaggagagcattgagtgcagagccaaggaggaatctgatgaactagctggacatttggagtgatgtggagcctgcaggttaagagtgtgttgtaagtttgtgaataggatactcgtgtcgtctctcatatgttatacaccatgtggaagatcaggggagaataggtctctgtttctagtatcatgttcatggggatcgcttttttttaacccctgtaagtaacagtagaggtatatgcatcgactccgttgagcattaggtgtcctgctcttttaagtatcgagaacgaggagaatggtcaggaaccggatgtttacctggcaaatatccagtgttcttgcgacttcttttgtagaatgtcacagccattcaaaggatgtgatgtcaggcgtgcaagcgatggacagtatgttttctgcatatgttatggacagtatgtttcaactaacataggttatgcctatgcgtttcaactaaaacgtttttggtttggaaccaattgttattgagcatggataattagcatagaaatgtaattctagtttcagtggaatggaagaaagcttgttc

SEQ ID NO: 158703 - DNA, 995 bp, Zea mays
  Clone ID: MRT4577_76314C.1
cccacgcgttctttcctgcatcgtacactaccccagccacggcatagtgacagaaaccgacgcgacacgagcgcggagggccaaagggaagaggggaagcacctcaccatgacccttttgctcccgccccggctcatgtccttcgagcagcagtacgagcgatttataaactctttccggtcgctggagcacaatacccgcggcgagcctgactacatcgtcaggctggccaaatggaggatcctaaccatgttgctctaacgtaactaaaccaagttacaaaggttgcaagcctgaaaacctccaaaaaactggatgtctccatacactctgactacagggtgaagcttgacgggcctgaaggtgaagagcacgagtttgatgctccagacgacgcctacatccttgacgcagccgagactgccggtgtggagttgccatactaaggtgaagctggggcgtgctccaggtgagccggcagagtcgagtcctctagacgacgcctacatcattgatccagccgagactgccggtgtggagttgccatactcgtgccgtgctggggcttgctccacctgtgccggcaaaatcgagtctggttcggttgaccagtcggatgggtccttccttgatgacgggcagcaggaggaaggttatgtgctgacatgcgtctcctacccaaagtccgactgcgtcatccacacccacaaggaaggcgacctgtactagggctagggattttcaatttggcgagggaccaaaaatgctctcgagtggtgctttgtcaagcaaagctccatctgcgcgccctaccccgttgtgcgaactgtttggcatcaaacttgtgtggttgctgtcttctatgttctgctagtttatgttcggagtccgtgggaatatactagctgattaataaaaagaaaaaactgatgtgatgccataatagtataaaaaaaaaaaaaaaaaaaaaaaaaaactcgagagggggcctgtac

SEQ ID NO: 158704 - DNA, 1378 bp, Zea mays
  Clone ID: MRT4577_76315C.1
cgcggtccgctcgtccgcaatatgcaaggcagatggacggcaagcgactcggcacaagcaaacagggccggggcaaggaggagaagcaccgcgaccaggacccttgttcgccgccgccgcctctgatctccgcgaggttgtcaggattcaatatgtcgaccagcacattcgctacttcctgcacgctggtgggcaatgttagaacaacgcaggcctcccagacacgggtgcgtgggctctcgtctctgagcttctccgccatggctgtatacaaggtgaagcttgtcgggcctgaaggtgaagagcacgagtttgatgctccagacgacgcctacatccttgacgcagccgagactgccggtgtggagttgccatactcgtgccgtgctggggcttgctccacctgtgccggcaaaatcgagtctggttcggttgaccagtcggatgggtccttccttgatgacgggcagcaggaggaaggttatgtgctgacatgcgtctcctacccaaagtccgactgcgtcatccacacccacaaggaaggcgacctgtactagggctagggattttcaatttggcgagggaccaaaaatgctctcgagtggtgctttgtcaagcaaagctccatctgcgcgccctaccccgttgtgcgaactgtttggcatcaaacttgtgtggttgctgtcttctatgttctgctagtttatgttcggagtccgtgggaatatactagctgattaataaaaagaaaaaactgatgtgatgccataatagtataatttcatggctttttgttatgttgggagaagtgatgttgtaagctattgattctgaatgccactgtggcatgctggcatccttctatttccaaacacttgtttttgccaatttggcgagggaccaaaaatgctctcgagtggtgctttgtcaagcaaagctccatctgcgcgccctaccccgttgtgcgaactgtttggcatcaaacttgtgtggttgctgtcttctatgttctgctagtttatgttcggagtccgtgggaatatactagctgattaataaaaagaaaaactgatgtgatgccataatagtataatttcaaagctttttgttatgttgggaggtcaagcaaagctccatttgggcgccctaccccgttgtgcgaactgtttggcatcaaacttgtgtggttgctgtcttctatgttctgcaagtttatgttcggagtccgtgggaatatactagctgattaataaaaagaaaaaactgatgtgacgcccccccagaaaaatttcatggctttttgttatgttgggaaaagtaatgttgtaagctattgattttgaatgcccctgtggcatgctggcatccttctatttcc

SEQ ID NO: 158705 - DNA, 398 bp, Zea mays
  Clone ID: MRT4577_76316C.1
gaatccatatgcattaatcgtgttaaacatgaaattatgcattcaacagcgtaactttggttgtaacacagagaaaaagcaggttctttatatttcgcacaaccaacagtgaccttgattagcatggggcaagcactgaagaactgaaagggggccataacttttactaagcacgccttataacaaggacttattatctaactaactgtacaaccttacaacttgtcatagatcaatgtaacctggaccgtacagttctaatttattatctacgaacagtcagagtgcttaggaacacctgcctccgttattttacttgcttcaaatgcgggcacaagacacatcaccggcggggggacattccaggaggggtgacaccggcaccttttacgtgatac

SEQ ID NO: 158706 - DNA, 962 bp, Zea mays
  Clone ID: MRT4577_76317C.1
ctcctcctcgcctcctctccctatctcccgacgcagggagagtgaacggaaagcgacgcggcgcgagcgaggagggccaaggcgaagaggggaagcaccgcaccaggacccttgttcgccgccgccgcctctgatctccgcgaggttgtcaggattcaatatgtcgaccagcacattcgctacttcctgcacgctgttgggcaatgttagaacaacgcaggcctcccagacagcggtgaagagcccttcgtctctaagcttcttcagccaagcctgaagacctccaagaaactggatgtctccgccatggctgtatacaaggtgaagcttgtcgggcctgaaggtgaagagcacgagtttgatgctccagaggacctctacatccttgacatagctgtatacaaggggaaggagttgccgcctgaaggtgaagagcgcgagttctatgcttgagacgacgcctacatccttgacgcagccgagactgccggtgtggagttgccatactcgtgccgtgctggggcttgctccacctgtgccggcaaaatcgagtctggttcggttgaccagtcggatgggtccttccttgatgacgggcagcaggaggaaggttatgtgctgacatgcgtctcctacccaaagtccgactgcgtcatccacacccacaaggaaggcgacctgtactagggctagggattttcaatttggcgagggaccaaaaatgctctcgagtggtgctttgtcaagcaaagctccatctgcgcgccctaccccgttgtgcgaactgtttggcatccaccccgcgcccccctgttttctatgttctgctagtttatgttcggagtccgtgggaatatactagctgattaataaaaagaaaaaactgatgtgatgccataatagtataatttcatggctttttgttatgttgggagaaaaaaaaaaaacccccacacacccac

SEQ ID NO: 158707 - DNA, 316 bp, Zea mays
  Clone ID: MRT4577_76318C.1
ttacatactacgccacctcgtctctcttggcgcccaccgtgatgatggcctcgtcggccaccgccgtcgctccgttccaggggctaaagtccaccgccagcctccccatcgcccgccgctcctccagaagcctcggcaacgacagaaacggcggaaggatccgctgcatgcaggtgtggccggcctacggtaacaagaaggtcaagacgctgtcgtacctgccgccgctgtcaacagacaacctgctgaagcagcgtggactacctgttgcacaatagatgaataccctgcctgaacatgtaaagggtcgagttcg

SEQ ID NO: 158708 - DNA, 348 bp, Zea mays
  Clone ID: MRT4577_76319C.1
ctctattaatttttacatcaagcctgggagtcaaatcagaatttgtggggctccaaaaacctccaaaagtacaacatgagccacgaatacataatatactcacttccattcacaagaacagtttgtgtatagaaaggaaatagcaaaaccgaatgacactattcaaggactcgagatagactgctcctagctacacctagctagagatcacaatcaggatctaacatacactgtcacacgtccaaaacttgggtaaaccaaatttatcttacccagaaggcccaagccgtacatgaaagagaaagccctacatagagcaacactaccagctgactggagacaattcat

SEQ ID NO: 158709 - DNA, 306 bp, Zea mays
  Clone ID: MRT4577_7631C.1
tacaagtaagacccacaccatggattctactaagcgggccttgcgatgataaggccgtaacgcgacgactgacacctgccacccgacaacgccgcacgcatacaagcctaacttcagaactacttcgacagcgtcccacagagacgcccatgcatgccaacacgcagcgacccctatcaagacaccttcccgcaaccatcagtcctacaagacgaagaccactacttgcctgaactacacaagcttctctaactatagactaagccccaaaatctgagcgctacaacgagagcgcagacacctact

SEQ ID NO: 158710 - DNA, 1516 bp, Zea mays
  Clone ID: MRT4577_76320C.1
cctcgaggccggccgggagggctcggccgccgcctaggccgcccactcccagaggctcttctcctcctcgcctcctctccctagcctccacgacgcaagggagagtgacggaaagcgacgcggcgcgagcgaggagggccaaggggaagaggggaagcaccgcaccaggacccttgttcgccgccgtcgcctctgatctccgcgaggttgtcaggattcaatatgtcgaccagcacattcgctacttcctgcacgctgttgggcaatgttagaacaacgcaggcctcccagacagcggtgaagagcccttcgtctctaagcttcttcagccaagttacgaaggttccaagcctgaagacctccaagaaactggatgtctctgccatggctgtctacaaggtgaagcttgtcgggcctgaaggtgaagagcacgagtttgatgctccagacgacgcctacatccttgacgcagccgagactgccggtgtggagttgccatactcgtgccgtgctggggcttgctccacctgtgctggcaaaatcgagtctggttcggttgaccagtcggatgggtccttccttgatgacgggcagcaggaggaaggttatgtgctgacatgcgtctcctacccaaagtccgactgcgtcatccacacccacaaggaaggcgacctgtactagggctagggctttccaatttggcgagggacaaaaaatgctctcgagtggtgtgttgtcaagcaaagctccatctgcgcgccctaccccgttgtgcgaactgtttggcatcaaacttgtgtggttgctgtcttctatgttctgctagtttatgttcggagtccgtgggaatatactagctaattaataaaaagaaaaactgatgtgatgccataatagtataatttcatggctttttgttatgttttgagaaaaaaaaaaaaaaaaaagcggcttttgaatccccctccggcattggtggcctcccaaaaaaaaaaaaaaaaaaaaaaaaaaaaaaaaaaaaaaaaaaaaaaaaaaaaaaaaaaaaaaaaaaaaaaaaaaaaaaagttttgaattgacatgggtttcctacccaaagtcgggttgggtcttccccccccccaaggaaggcgccctgtattagggctagggtttttcattttgggggggggccaaaaatgctttcgggtggtgttttgtcaagcaaagctcaatttgggggccctaccccgttgtcggaaatgtttgggaccaaacttagggggagggctttctttttgtgcagcgggttaaaattcggggggcgtgggaatgttctagctgattaataaaaagaaaaagccctaccccgcccgtgcgaactgtttggcatcaaacatgggggggtgctatcttttatgttctgctagtttatgttcggagtccgtgggaaaatcctagcttatttattaaaagcaaaaaatgaccttacacccaaaaaaaaaaaaaaaaaaaaaaaaaaaaaaaaaaagggcggccg

SEQ ID NO: 158711 - DNA, 987 bp, Zea mays
  unsure (1)..(987): unsure at all n locations
  Clone ID: MRT4577_76321C.1
actcctaagggcgattgggttcctcgaggccggccgggaaaaacgagggctcggccgccgcctcggccgccctgggccagaggctgggctcctcctcgcctcctctccctagtctccacgacgcaagggagagtgacggaaagcgacgcggcgcgagcgaggagggccaaggcgaagaggggaagcaccgcaccaggacccttgttcgccgccgccgcctctgatctccgcgaggttgtcaggattcaatatgtcgaccagcacattcgctacttcctgcacgctgttgggcaatgttagaacaacgcaggcctcccagacagcggtgaagagcccttcgtctctaagcttcttcagccaagttacgaaggttccaagcctgaagacctccaagaaactggatgtctccgccatggctgtatacaaggtgaagcttgtcgggcctgaaggtgaagagcacgagtttgatgctccagacgacgcctacatccttgacgcagccgagactgccggtgtggagttgccatactcgtgccgtgctggggcttgctccacctgtgccggcaaaatcgagtctggttcggttgaccagtcggatgggtccttccttgatgacgggcagcaggaggaaggttatgtgctgacatgcgtctcctacccaaagtcggcctgggtcatccacacccacggcgagggcgacctatactactcttggggatggtgtgttgtccgagcaaagctcatgccctcgtgcgcccctaccccagcaaatgcgaactgtgcgggcacccaaacttgntgtggttgcttatcttctattgttctgctagtttatgttcnggagtccgtgggaatatactagctaattaataaaaagaaaaactgatgtgatgccataatagtataatgtcatggctttttgttatgtttggagaagtgatgttgtaagctattgattctgaataccactgcggcattgttggcatc

SEQ ID NO: 158712 - DNA, 1206 bp, Zea mays
  Clone ID: MRT4577_76322C.1
cgcggccggaaaaaaaaaaaaaaaactcccagaggctcttctcctcctcgcctcctctccctagtctccacgacgcaagggagagtgacggaaagcgacgcggcgcgagcgaggagggccaaggcgaaggggggaagcaccgcaccaggacccttgttcgccgccgccgcctctgatctccgcgaggttgtcaggattcaatatgtcgaccagcacattcgctacttcctgcacgctgttgggcaatgttagaacaacgcaggcctcccagacagcggtgaagagcccttcgtctctaagcttctgcagccaagttacgaaggttccaagcctgaagacctccaagaaactggatgtctctgccatggctgtctacaaggtgaagcttgtcgggcctgaaggtgaagagcacgagtttgatgctccagacgacgcctacatccttgacgcagccgagactgccggtgtggagttgccatactcgtgccgtgctggggcttgctccacctgtgccggcaaaatcgagtctggttcggttgaccagtcggatgggtccttccttgatgacgggcagcaggaggaaggttatgtgctgacatgcgtctcctacccaaagtccgactgcgtcatccacacccacaaggaaggcgacctgtactagggctagggattttcaatttggcgagggaccaaaaatgctctcgagtggtgctttgtcaagcaaagctccatctgcgcgccctaccccgttgtgcgaactgtttggcatcaaacttgtgtggttgctgtcttctatgttctgctagtttatgttcggagtccgtgggaatatactagctgattaataaaaagaaaaactgatgtgatgccataatagtataatttcatggctttttgttatgttgggagaagtgatgttgtaagctattgattctgaatgccactgtggcatgctggcatccttctctccccaaacacttgtttttgccctagggctagggctttccaatttggcgagggccaaaaaatgctccccgaggggtgggttgccaaacaaagctcccccatttgggccctaccccgttgtgggaactgtttggcaccaaacttgggggggggctatcttctatgttctgctagtttatgttcggagcccgtgggaaaatcctagctaattaataaaaaaaaaaactgatgtgatgccat

SEQ ID NO: 158713 - DNA, 1906 bp, Zea mays
  Clone ID: MRT4577_76323C.1
gctgggtgtcaaatggtgttgttggctcaccatcatttgcagcttatgatcaacgttatgaggttttgcttggaaatcttcgtggcttggtctcaagggagcatatagataaaagtatttcctcctacaaatactggaaatattctgttaatgagcatgggactaaagatatgccagcaattattgaggaaattcacaagatcaaaatatcggaacttggcaaaagtcatcctcaatcagcagaggggacaggagatcaaaatgataagttaaaaagtttggatctcgaggggccgggactccacagggctcttctcctcctcgcctcctctccctagcctccacgacgcaagggagagtgacggaaagcgacgcggcgcgagcgaggagggccaaggggaagaggggaagcaccgcaccaggacccttgttcgccgccgccgcctctgatctccgcgaggttgtcaggattcaatatgtcgaccagcacattcgctacttcctgcacgctgttgggcaatgttagaacaacgcaggcctcccagacagcggtgaagagcccttcgtctctaagcttcttcagccaagttacgaaggttccaagcctgaagacctccaagaaactggatgtctctgccatggctgtctacaaggtgaagcttgtcgggcctgaaggtgaagagcacgagtttgatgctccagacgacgcctacatccttgacgcagccgagactgccggtgtggagttgccatactcgtgccgtgctggggcttgctccacctgtgccggcaaaatcgagtctggttcggttgaccagtcggatgggtcctttcttgatgacgggcagctcaaggatcacacaaaagccccacagagtgtctagactggtcctgctatctcctgcaggttttcatgaggattccaatgtggtattcagtatggtagagaagctcatcttgtttgttggtccagtgcttgcaccacttattcctggactttacataccaactcggttctttaggatgcttctgaacaacgtagaagcgaagtggcgcgagcgaggagggccaaggcgaagaggggaagcaccgcaccaggacccttgttcgccgccgccgcctctgatctccgcgagggtgtcaggattcaatatgtcgaccagcacattcgctacttcctgcacgctgtggggcaatgttagaacaacgcaggcctcccagacagcggtgaagagcccttcgtctctaagcttcttcagccaagcctgaagacctccaagaaactggatgtctccgccatggctgtatacaaggtgaagcttgtcgggcctgaaggtgaagagcacgagtttgatgctccagacgacgcctacatccttgacgcagccgagactgccggtgtggagttgccatactcgtgccgtgctggggcttgctccacctgtgccggcaaaatcgagtctggttcggttgaccagtcggatgggtccttccttgatgacgggcagcaggaggaaggttatgtgctgacatgcgtctcctacccaaaatccgactgcgtcatccacacccacaaggaaggcgacctgtactagggctagggcttttcaatttggcgagggaccaaaaatgctctcgagtggtgtgttgtcaagcaaagctccatctgcgcgccctaccccgttgtgcgaactgtttggcatcaaacttgtgtggttgctgtcttctatgttctgctagtttatgttcggagtccgtgggaatatactagctaattaataaaaagaaaaactgatgtgatgccataatagtataatttcatggttttttgttatgtttggagaagtgatgttgtaagctattgattctgaatgccactgtggcatgctggcatccatctatttcc

SEQ ID NO: 158714 - DNA, 379 bp, Zea mays
  Clone ID: MRT4577_76324C.1
agcttgttctttgtcatggatcggcacgactggggcaggggatataagtagttctgcgacagaggattacctgtgcgcaatacgtgatcgagactcatgagaatgctgtgcctgcaatacaaactggatatgaggagctactgttgaagacggatgaactgtaagcagctcttaaatgccaggctagctccatatgcagctctgcatatagctgcataggatgggatacaagcgtataataaggccgagccctaccggggtgagttacttccacgattaagaaaccttaatagctggaaaagacccaacacaagtgttgataatggtcccccacggggtgtgggactcacatactggagcacgtccagcacttctaggc

SEQ ID NO: 158715 - DNA, 1661 bp, Zea mays
  Clone ID: MRT4577_76325C.1
ccggccgggggattccatcccacccgaccgcgccccattaaaaacgagggctcggccgccccggccggggcccactcccagaggctcttctcctcctcgcctcctctccctagcctccacgacgcaagggagagtgacggaaagcgacgcggcgcgagcgaggagggccaaggggaagaggggaagcaccgcaccaggacccttgttcgccgccgccgcctctgatctccgcgagatgcctgagaatagcttcctggtctcatatgttgctttgtgtttgataagaaaaaatgttgtcaggattcaatatgtcgaccagcacattcgctacttcctgcacgctgttgggcaatgttagaacaacgcaggcctcccagacagcggtgaagagcccttcgtctctaagcttcttcagccaagttacgaaggttccaagcctgaagacctccaagaaactggatgtctccgccatggctgtatacaaggtgaagcttgtcgggcctgaaggtgaagagcacgagtttgatgctccagacgacgcctacatccttgacgcggccgagactgccggtgtggagttgccatactcgtgccgtgctggggcttgctccacctgtgccggcaaaatcgagtctggttcggttgaccagtcggatgggtccttccttgatgacgggcagcaggaggaaggttatgtgctgacatgcgtctcctacccaaaatccgactgcgtcatccacacccacaaggaaggcgacctgtactagggctagggcttttcaatttggcgagggaccaaaaatgctctcgagtggtgtgttgtcaagcaaagctccatctgcgcgccctaccccgttgtgcgaactgtttggcatcaaacttgtgtggttgctgtcttctatgttctgctagtttatgttcggagtccgtgggaatatactagctaattaataaaaagaaaaactgatgtgatgccataatagtataaaaaaaaaaaaaaagaaaaaaaaaaaaaaaaaagcggtttatgttcggaggccgtgggaataccctgccattttagtaaaaaaaaaaaagcttgtctttccccaaggtgaagagcacgagtttgatgctccagacgacgcctacatccttgacgcagccgagactgccggtgtggagttgccatactcgtgccgtgctggggcttgctccacctgtgccggcaaaatcgagtctggttcggttgaccagtcggatgggtccttccttgatgacgggcagcaggaggaaggttatgtgctgacatgcgtctcctacccaaagtccgactgcgtcatccacacccacaaggaaggcgacctgtactagggctagggattttcaatttggcgagggaccaaaaaagctctcgagtggtcgctttgtcaagcaaagctccatctgcgcgccctaccccgttgtgcgaactgtttggcatcaaacttgtgtggttgctgtcttctatgttctgctagtttatgttcggagtccgtgggaatatactagctgattaataaaaagaaaaaaaaaaaaaaaaaaaaaaaaaaaaaaaaaaaaaaaaaaaaaaaaaaaaaaaaaagccgcccccttctaaaaaacccaaccttacttacccttcctatccaacttcattggtg

SEQ ID NO: 158716 - DNA, 651 bp, Zea mays
  Clone ID: MRT4577_76326C.1
atccacgatgttagagatcattctaaactaaatactacgttccgatctcctttcattggagaggtggtggggattgagaagaagattgtagcgaacgtgtcacccgacaactctgatgttcagtatcagtttatgcttgaacaacgtgttcttcggcggctttgtgttcagaagatagtggtgcctacaccgatgaaggacaggctagacaaggatacaaacttcacgatagcggaggatggatctcttcatgtccttccaaaaagcgtctaacggattcacatcaggggaaggaaatgacaatgtagggaaggaactcatttcatgcccgcgaaatgcaggagcaagcccatacacacgtctgagttcctctgtgctcatattctcatttaagggacctcgctcgtttgtagtgtctgtttggaaatattaaatctttccttcactcattagttctagtgttgattttcaccataatatcgcttcaatgtatgcgtgtggaagtttggatttctgaattgtttgttgttacttaagttgtgtttggttccggaatatggtgggacggagctgtttcactctcaatttattgttgtttggattggttctgtgtagaatagagtggctataaaaaaattatgctcaaatgtt

SEQ ID NO: 158717 - DNA, 637 bp, Zea mays
  Clone ID: MRT4577_76327C.1
gccggccggatccgaacacaccatacacatagctgatattgccatctactgacatggaaccgcccgatgcccagacagcccatactgagtggatctagcagatcatgcgagatccacctacctccttgaggaacctgtcccggacgcgaaacttggcagtagtgtccatcgccacgacggccttggggctgatgctggcggcaacctcggatacacgcatcagatgtgcaaatacgctccctgctatactcctgtttgtttccgacgctttagggcacgcctctgctacctcctatgtatgctggatggttgacatgaggctattcacgccacccgcacctcttacgaccggcgcgccgcctacaactgccacaataactcccccgacgttgtgatcgagctctacatggttaacggcatcaatatatgctttacgtgtatggtcattatctactacagcatcagcacctccaccgaatgctccggtgtgatatgaaccctatctgacgaccacataaggcggaaatagactgaggacgatccatatctatcacgaacgaagataggcgctaggggctcggaccgtcatgaacttatgtatccaccgatgatcactaattgaatgtctactacagct

SEQ ID NO: 158718 - DNA, 216 bp, Zea mays
  Clone ID: MRT4577_76328C.1
gccacgcgtgtgcgtacgcgtgcgactaggcgtccggtcagcgtgattgccaacgagggcaatccctacgagcccatgatcaacaacgcatgctgcacgaccaactgcatcgcgccattcgtcaaggtgcatagaccagacgttcagcatcatcaacggcaccatgaccagccagtactcctacaccagcgacgagaggctgatggacgcgagcca

SEQ ID NO: 158719 - DNA, 900 bp, Zea mays
  unsure (1)..(900): unsure at all n locations
  Clone ID: MRT4577_76329C.1
atcccatctcggagctttcccccgcaccccacctcatctcgctccccgcgtcggcgcgctactaatggcagccggatctcgccgcccgccgcgcccacggagatgaagcgccggcgcctgccgcccgtcctcttcctcctcgcgctcgcgctcttgtccctcgccttccgccgccacctctccctccccctcggcgttccccagttcgccgccgggggggggagcggcgacgcgctcctccgcctcctcgcggccaccgacgtcggcggggaccagatcctggcggaggcggacgcgctgctggccaacgcgtcggtgtccaccttccccagcatcggcaaccaccaccgcctcctctacctccgcgtcccctaccgcatcaacgccacctccgcgccgcggcagcggacagtgtcccgtctccgcattcccttccacgacgtccccaacgacgacgccctcctcgccgccttccgcgcatccctccgcggcttcctcctcgcgcgccaccgccaccgccaccgccgaggcggcgacgacgtcgcgggcgccatggccgacctccccgccctcctcctcggccagcgccgcgccggcgcgccccgacctgcgccgtcgtcgggaacagcggcacccttctcggctccggccggggcgcgcagatcgacgcgcacgacctcgtgatccggctcaacaacgcccgcgtcgcggggttcgcggccgacgtcggcgccacgaccggcgtctcgttcgtgaactccaacatcctccaccactgcgccgtccgctccggcatcaccgccccgggctgcgcctgccacccctacgggcgcgcggtcccgctggccatgtacgtctgccagccggcgcacctnctggacgcgctcatctgcaacgcca

SEQ ID NO: 158720 - DNA, 690 bp, Zea mays
  unsure (1)..(690): unsure at all n locations
  Clone ID: MRT4577_7632C.1
gccggccgggctcgggaaanaaaaaaaaaaaaaaaaaaaaaaaaaaaaaaaaaaaaaaaaaaaaaaaaaatataaaaaaaaaaaaaaggggccccctggggccggggcctttttaaaaatggagacccccccggtgtggtatttttttataaaatttttataaaccccgaccccctggggggggcccccgacacaaatttccccatatagagagtttttttacgggcgctcggtggccgttttttaaaaacgccgggggggaaaaaaccgtggtttccccctttttaatccttttgaaacacccccctttttcgggaggtggaataataaaaaagaggcccccacaaatcccttttcaaaagaggggcgcccccagaggggaaagggaaaattgcgggcgataattttttgaaaaaattcgcgaaaattttttgaaaaaccccctttttttttaaaaaaagaggccaaaatcgaaaaactcttttaaaaataaaaaaaataccccgaaagggggtagagtgttgccccattttgaaacaagaccccattataaaaaagggggcccccccccgaaagggggaaaaaaaccgtttatgggggaggagcccctctaggggaaccatccccctaataatttttttggggggggaggcgccaaaaaacaatatatcgccccccaagggggccccc

SEQ ID NO: 158721 - DNA, 141 bp, Zea mays
  Clone ID: MRT4577_76330C.1
tcagcttaatccgcgaccggccgtccttgttgtttctcctaagtgtttacactacgtgcgtttagatgcatgaaaatagcaactattgagaacctaccgaagtttccgcaattagatttttcctcgggtaaatatatccgg

SEQ ID NO: 158722 - DNA, 522 bp, Zea mays
  Clone ID: MRT4577_76331C.1
tctgtatggacccggggtaccccaaggagcaggttcttgactcgcccaccaaggcggaagctgcaaacgagaagggcggctgcggcggcggtgacgatgactttgctgatttcaagtccaaggtcgacgctgagcagcagcgggcagagttgaaccccaagagcccggattctggtacgcgtgatggatgggtgtttgtttttttggtctttttctgaagtgatgttccgattttatcttctataatcagttactgttgtttattgaagatctttggaggtaaagattccgtaaagagcagatgagcagtcagttctttacgtgaaaaggaaacctttcggtttgtttattcatctactgggctcttgatttcaggatttggcaacgaaatcattgcattaatcgcttctggcgatcagttagctttgtagggggcgcggtgatcttgaaccgaaaatgcttactgattttgtggtcttgccatggaaaaggagtttttagttgctaagttttgttttggga

SEQ ID NO: 158723 - DNA, 842 bp, Zea mays
  unsure (1)..(842): unsure at all n locations
  Clone ID: MRT4577_76332C.1
ttcctcctcccctccgtctcatctcctccctgtaggagcattcgtgtcttcaccttttgctcccccacgttgatccttgaccctcgtgctcctttcttgattccttctccgtgggatctcttgccaggagtaacctgccccgtgtccgcgctcgcactcgcactcgcacagacatgcttcttgccgcgtcttgaaaggggagaaagtgaagatgggtgcttgcgcttcagttcacaaggactcggggttccccaaggagcagtttcttgactcgcccaccaaggcggaggctgcaaacgggaagggcggcagcggcggcggcgttgcttcggttggtgacgatgactttgctgatttcaagtccaaggtcgactctgagcagcagcgggcagagttgaaccccaagagcccggattctggtacgcgtgatggatgggtgtttgtttttttggtctttttctgaagtgatgttccgattttatcttctataatcagttactgttgtttattgaagatctttggaggtaaagattccgttaagagcagatgagcagtcagttctttacgtgaaaaggaaaccttttggtttgtctattcatgtactgggctcttgatttcaggatttggcaacgaaatcattgcattaatcgcttctggcgaccagttatctttgtaggagcgcggatgatcttgaacggaaaatgcttactgattttgngntcttgcaatggaaaagggagttttagttgctaagttttgntctttgaaatcgacactttctaaatgaggattctgttctaccaaagtggattactctattgactgtagctggccttttttac

SEQ ID NO: 158724 - DNA, 678 bp, Zea mays
  unsure (1)..(678): unsure at all n locations
  Clone ID: MRT4577_76333C.1
ccctcctcgagttttttttttctttttttttttttttttttttttttttttttttttttttttttttggggggaaaattccaaaaaaaaacccccttcggaagggttttttttttattaacattcccggcccccccgaggggcggccccgggctaaaaatttttttattggttccgggggccaaagggtttaaccaaaaaacgggaaaaaattttttttttttccttttcagggggggggccccgccccacaaaaaatttgggaaaacaaaccccacctttcccccctcaaagcccccatttccaaagggggaagtttcccccccccccccgggggcctgggggcggccctaaggggtttcttttaaacttttggggggccttaccccggggccccaagggcccgggctttgggggaaagccttggaaggaaggggccccaaaaaaggggacccgggtacccccaccccgggccttttcaaggggttcaaaaagtttggggacccccttatttttgccaacccccgtaagtttttcctcccggtggggaaattttttcacccccggcccaccaaggggaacttccgccccccccccccggggaagccccccctggaaaaaccggccccccttgagggccggaaaagaaaaccccccccccccccccccgngggggggg

SEQ ID NO: 158725 - DNA, 392 bp, Zea mays
  Clone ID: MRT4577_76334C.1
gtcgacttgcgtccgagacatctttcacattaaagacagggggggccacaatggcaccaaaatatagagctaccttatgctccacggcctttctctaagtgctggtaccgcaaccattttcccacaatgctcacaagctagtatagctaccttgcttccgccatacctctcactatcagtgtcgggagtgtgtgaaaacccaatttttgaaccatacaagatccaacaggcaatcgcaacaagcatcttacctttatcacccttgatcctgcaacacccgacagccctattacaccaaacacctttggtgcatttgttggcacataacatcgaggcgcaacaactacaacaactattgctaggaaacccagctgctctactctcagcaacag

SEQ ID NO: 158726 - DNA, 351 bp, Zea mays
  unsure (1)..(351): unsure at all n locations
  Clone ID: MRT4577_76335C.1
tgttttttctcctgagtgttttttttgtttggggtgccgggcaaaaggcccgcacaaccccacattggaaacacacattggngggcaatcagccaatccccacatacatatcctacggatcaaggtttataaaccataatgcacctccaacaacaccgtttacaagttgcaacactgacccctggcactatttgcaaaaatccgcaggctactacagcccctctacggggcacattattctaccaataactgggagtccctaaaaattaatgaattaacgaatccccaaggcccacccggatgaactgcatgcattgtcatctgcttgcagctgcctctgcaacggtttgg

SEQ ID NO: 158727 - DNA, 423 bp, Zea mays
  Clone ID: MRT4577_76336C.1
aaaaaaactgcaagagtcaatgcattttacataaaatcatacagaattattagaatacttaaattattatatgttgtaaacacagctgcgtagatttttcatctcgaacttgtcttcaatgggatgagtgaggtaatcacttgtccttcttttcgaccttcttgatgacaccgacggcgacggtttgcttcatatctctgacggcgtatctaccgagagggggatactcttggaagacttcgacgcaaagagccttggtgggaacgagggtaaccaaagcggcatcaccgttcttgatgaacttggggttttcttcttgagacttaccagttcttctgtcgatcttgtcgtggatggtttcgaacttacaagcaatgtgagcagtgtggcaatccaaaacgggggtgtaaccagcttggattt

SEQ ID NO: 158728 - DNA, 297 bp, Zea mays
  Clone ID: MRT4577_76337C.1
ccacaatatggcggataaggagaagaagcattatgtggagcagctgtggacttgtccaagtacatcgacaagacgatccgggtaaagttccagggaggccgcgaaccagtggaatcctgaagggcttcgacccactcctcaaccttgtgctggacggcaccattgagtacatgcgagaccctgacgaccagtacaagctcacggaggacacccggcagctgggcctcgtggtgtgccggggcacgtccgtggtgctaatctgcccgcagacggcatggaggcctcccccaccccttc

SEQ ID NO: 158729 - DNA, 424 bp, Zea mays
  Clone ID: MRT4577_76338C.1
gaaaaaagggggggtggttgggccccggagggacaaaaaccccctggggggccgcggggaaacaagagagaaagggcggggggggggaatcccaaaaagcggaagggggggggggtgggagaacgggtggggggcttcgggggacccccggcggcatcccctttctggcctttttgtttcgtcccaccacccgggttttgggcccccggccccaagggggggcaggcctttagggcacagggggctaaagggggtttggggggcttgagccccgggggggggaatggggcatccccacccgcaccaggggggggtggcgggccagggggctttgggggggcaacagggccacggggcctcgcctgaagtcaagggcccgggcgcgaaaggtaaagggggaagccctccagcagggccaaggggg

SEQ ID NO: 158730 - DNA, 184 bp, Zea mays
  Clone ID: MRT4577_76339C.1
ttcttgatgtgactcgcaagtcgatgtagcttggagcaattcgggcgtacctatcgggcaaccaaccagtgcaccaggcggagcgcacgactagagccgcggccgcgccggcgccggcccggcgccgtggtccttgacctgggcccacagctggggccacgcggccttcctgatctcggtgacg

SEQ ID NO: 158731 - DNA, 258 bp, Zea mays
  Clone ID: MRT4577_7633C.1
tctgcggagcagccgcagtcccaccgactcagctgccggtcgccctccatctcctcgacgctgcactctcgtttctcttttcaataatcaagatgagccgtagtggtaatgtcggtagtcggcaaagttctctaggttatctctttggaagcagtgagcccccccaaccagcagtggtcacaactgccagtgctccaactgttgagcaaccatctgctggcaagacttgttgcgcccagcaggttgctgctggggtta

SEQ ID NO: 158732 - DNA, 572 bp, Zea mays
  Clone ID: MRT4577_76340C.1
cgtcggcgtacgaagctggggaattatacctggagcttcgccattttcattgaatacgggcgtggcatcatcggggggagctcggcctgtacgggccggaattcgtcgttggtgctctcctccatcgcagatccgccttccgtcgtgagccgggtagaacgccgtcatggggtgggtatcttctctggttgccgtcttcgctgtacgtagggccgttcaactagaggttagggcgaggtagggccgtagggtcgaccccgggggggctcctgtcatgtccgccgttgtgaggggttgggcggcgtgcagttcgcattctggctgggggaggaagataagcttctagccgttgatcgtctggcgtagggctgatattagaagggcctcataccgattcgctcattatatcgcggccatagattgggtgttgatcggtcctgatgaactcctgccggtgggcgtcgatctcacatggagcggctctgattagcacacgaacatatctattcgcagtcgttgcctcgttggttgttgaaatgaacctgcagtccggaatattgataagaccattg

SEQ ID NO: 158733 - DNA, 133 bp, Zea mays
  Clone ID: MRT4577_76341C.1
ttaatacgaaggagagtgtgtattttccattgcggggaataaatggccaggtcttacaacaacacgaactctctacaggacatcgctggagagggtatattatactaagataagaaacatgacaaccaaataa

SEQ ID NO: 158734 - DNA, 438 bp, Zea mays
  Clone ID: MRT4577_76342C.1
agttcatatttttgtttttttttaaccttgggctctggtatgtacattatggtatagttaaaaaccttgaaatttattgacaaaacagaggaaggcccctttttcctggtgcaaaggacacagggaataagacgaagccatgccggctctatctactgcaagtgaatgccaacaaggacaaccgctagggatctaggtatattcgccccgtgagagaaatttaattgaaaaggggccccaacttaagtggaagtacaggacacacttctcgagaaacgctccatacctcttggaaaggaactcccctagggaaccccacagaatcgagaaaagcgagcccatcacgatccaccttacaataacgagagtgggtgacctgttgtgcctccccaggaacccttgaggaacggaggcaggtggacaatcacccagaaggcc

SEQ ID NO: 158735 - DNA, 230 bp, Zea mays
  Clone ID: MRT4577_76343C.1
ggccggggtgctttcccccgatcctcttggtctgctacattgatctcgcactcacgattaccacccgaacacaccatagatccttgctgagcaacttgaacacaggcgtgaacctcctctgcaaagataaccttgccgttgtgattgatttcaccgggacgagcgcagtgaagctaaagattgtgcaacgccatcgaaatcgtctcttgcgctgcaatgttctcgcccat

SEQ ID NO: 158736 - DNA, 305 bp, Zea mays
  Clone ID: MRT4577_76344C.1
ccggcctctgtttgaagatatagtattttagttgtagtgtagaagaaaaataagactgtagctgcacgcaagtaaaaaactttggtctagattaaagtttttttaccccaaaagtattgtggtattcgcaaaaccatggtgtaaaatatagaattattgtatgtgcccccgaatgccttttagtctaaaatactaccatattatcttggaactaagaaaataccgtgttcctaaataagctatgatcatcggcaaaagtgtacacatctgagtggagcaaaaaaaaaaaaaaaaaaggggcggcc

SEQ ID NO: 158737 - DNA, 292 bp, Zea mays
  Clone ID: MRT4577_76345C.1
cgcagcgtccggctatgcgaagctcaatcaatctactcatagcaagttcactaatacctgataagatgcttgaagacaagaacactataaccgttccggaccatgtccatgatgactctgaccagcgtatcagatcaggacacctgagatacatgctaccacgcataggacatcgtgtgatccataggcttgagaaggaggctgctgcaatgaacaagccggacttgatgtgcacatgggtgcttgacaagctcaacgcttagactgaaagaggtctcaccattgacatgtg

SEQ ID NO: 158738 - DNA, 572 bp, Zea mays
  Clone ID: MRT4577_76346C.1
aaacccccatcgacaccgtatcagaccatctcactcatgattactgtgacttcaagatcctgcttcatcactattggttttttactacctagaaataactattgttccacctcaaatcaagggatgaggatcctttgtcttaatctacatatttatggtctaacacatcctataggcctgtgacatttgttaaggtgttgaatgcgtcacatagctaatgagagagagtagcaaagacctaagatcgtattggccaccatataaaaatcgctgctaacaagtgaatagcctcacctaccgtgtttttagatgtgtagattcagacttgcatctttcaaagttttcaccagcaagtttctcacattgcatgagatggctggtggactatcaaacatgtatcaatgaaaaaccctagtgtgacatttcacatttaacggtttgatgtgtctgcagactgcttccaacaggttggtccttagatggctttcacatgctgttaaacatgagttcaatatttttctctcgaatacacaggagaactgcaatatcattgcattaagatagagaaaaaa

SEQ ID NO: 158739 - DNA, 433 bp, Zea mays
  Clone ID: MRT4577_76347C.1
agaaaggaactttccacaattttttttgtaacgtgttatcaaaatacaacacgtcccctgttcattaatatcactacaagcttttttactttttttgggggcaggtcctccacgatcgtacgtttccattttgaggaacaaactcaaagacccacagtctagtagggatgcttgttcatttagcagcgatgaccccccccccccccccctttgttgtttgctcccgggaaaactgtccagcacaggggttaaaaccccccaccacaaaacacgttggggggttaataatctatcctggctggggggcaggaggacatttttcgaaaaccgatcaacgcaaacccttagtttgtttgtatagtccccagggggtccttgaatcctttcaccgggcgatctcctggaccctttggagtacctgcctggcgctggg

SEQ ID NO: 158740 - DNA, 171 bp, Zea mays
  Clone ID: MRT4577_76348C.1
ttttatattggagtggccagctcaccagacagtttgaatccctggcactcttctacttgagctgcttgattggagagatgtacattgccacacaggaaaaactggcatttctgtaagcccagttaatttttgctcggccaaaaaaaattaatgcgatgtttggtttctatg

SEQ ID NO: 158741 - DNA, 503 bp, Zea mays
  Clone ID: MRT4577_76349C.1
gaaagaatactaataatatgaggggtgaagaaagaaagaaggatcaacatgttcacgactaccaaataaatgcacaagtgaacgaagatacatgtttagctgagcgctcctccaagttgcattggtgtgttaattccttcatcaattcatgcctgccgctccccctccgatccgcctgcaaaaaaagtgaagaaagctatttgctgcatgcattttgtttctctatctcacatcaccactcgctgctagctgctgccgtcgtcgtcgtcgtcctgcactgcagctgcagcacaccatgcatgcttctctctgctgtgtctgtctgcctctctcaccttcccaccattgatttctctgtgttacgctgatccatatatatgatgagcacctgtgtcccggccccatttcataccactccttctgtcttgcatttattttatttggccctaactcttgagcaaggaaggcaactgatcatgaggaaccttgatcggaggcttggg

SEQ ID NO: 158742 - DNA, 907 bp, Zea mays
  Clone ID: MRT4577_7634C.1
cattgggtacctcgaggccggccgggacggcgttagcaacgacgggaactctgacgagcttgccctggaagttttctgcccggtgtttggcgcatcacagcaaccaattagcaagcagcaggagtccatctcctccgtcaccaagatcggactatggggcggacagggagggtcggcacaggacatcacggcagagcagccaccacggcgtctgcacagcatcaccgtccgcgctggcgttgccgtcgactccatcgagttcacctacaccgacgacgctgggcagaggcgcactgctgggcggtggggtggacttggcggcaatgttcgaacgatcgaccttggcgacgcagaggatgtcagggaagtctcgggaacatacggcgcatttgaaggtgccattacgctgacctcgctcaggctcgtcaccagcagcagaacctggggcccctggggggtcgagaacgggacgcgtttctccatcacggcgcccaacggcagcagcatcgcgggattctatgcgcgggcgggaaccaggctcgtcgacgctatcggtgtttacatacgtccagtggtgccttgcaggcctcggtgaaccagcgagcccagtctgatcgactcagctcgctcgtattacgagctgtaggattatggttcggcttgacttgatgcaggctacctgctacatcatgctcgattagtcctttaattcggtcatcatcttcgtcttgtcttgtgtgtcaattaaagatcttgtgcctatatacggctctcatggttgtgccgtgtctctatatgttagtgcttatgtatatgtggagatcaaataatggccttgcaataatgatcaaagactcgctatgttaatgataatttcataaaaaaaaaaaaaaaaaaaaaaactcga

SEQ ID NO: 158743 - DNA, 2985 bp, Zea mays
  Clone ID: MRT4577_76350C.1
acatgcagctgtttttgtcaatgcacggcttcatgtctcaggaggggctcttgggggtggtcgcatggtagaagattcctcaagcgtcgcagtattggacactgctgctggagtttggtgtgataccaaatctgtagttacaactccaaggacaggaagatatagtgcagatgcagcaggtggtgatgcttctgtagagctcacacggcggtgcaggcacgcagctgccgcggttggtgatttgatatttgtgtatggaggtttacgtggaggtgtgctgttagatgacctcctagttgctgaagatcttgctgctgctgaaacaaccagtgcagctaatcatgcagcagcagcagctgctgcatcctcaaatgtacaaagagaaccgggtagatatgcctacaacgatgaacaatcaggacaaacagttacagtttcaagtcctgatggagctgttgttcttgggactccagttgctcctccagtcaatggggacatgtatactgatattagtcctgagaatgccattatccagggacagagaagattgagcaaaggtgttgattacttggttgaagcatcagctgcagaggctgaggcaatcagtgctactttagctgctgtaaaggctaggcaagttaacggtgagatggagcattcacctgacagggaacaatctccagatgctgcaccaagtgccaagcaaaattcaagccttataaaaccagatcctgctcttatgaacaattcaacaccaccacctggggttcggttgcaccatagagcagttgtggtagcagcagaaactggaggtgccttaggtggcatggttagacagctctcgattgaccagtttgagaatgaaggtagaagggtcatttatggcacccctgagaatgcaactgcggcaaggaaattgctggatcgacaaatgtctattaatagcgtgcccaaaaaggtaattgcttctctgctgaaacctcgtggttggaagccccctgtgcgaaggcagttctttcttgactgcaatgagattgcagatctatgtgataatgctgaaagaatattttcaagtgaacctagtgtcttacagcttaaggctcccattaagatatttggtgatctgcacggtcaatttggtgacctcatgcgcttgtttgatgaatacggtgctccttcaactgctggagacattgcgtaagtatcttgtgttttgtttatttttttgctcgttcctgtttcctggatttgactaatattgttttggattctggaactcaaattattttggattccaagagtccctaaatgcctattctctaaaagaaacaatagaaagatgttaagttgtaagttcttcatttatttgtgataaacactgctgacatttatgtagcaggcactcctgactttgtatgtactttttttgaattgaaaatgcagttacatcgattatcttttcttgggagattatgtcgatcgtggtcagcatagtctggagacaatcagtcttctccttgcactgaaggttgaatatcctcacaatgtacacttaatccgagggaatcatgaagcagcggatatcaatgctctatttgggttccgaatcgagtgcatagaaagaatgggtgagcgggatggaatctggacctggcaccgtgtgaacaggttatttaattggcttcctttggctgcactaatagaaaagaagataatctgtatgcacggtggtattggtcggtccatcaaccatatagagcaaatagaaaatcttcatagaccaattaccatggaagcaggctcagttgttctgatggatcttctatggtctgatccgactgagaacgatagtgtagagggtctcaggccaaatgcacggggccctggtcttgttaccttcgggcccgacagagttatggagttctgcaacaacaatgacctgcagttgattgtgcgagcacacgagtgcgtgatggatggcttcgagcgtttcgctcaaggtcacctgatcactcttttctcagcgacaaattactgcggaacggcaaacaacgcaggagcgatcttagttctcggaagggatctggtcgttgttccaaagctcatccatcctttgccgcctgccattacgtcacctgagacctcaccagagcaccacattgaggacacatggatgcaggagttgaatgccaatagaccgccaacaccaaccaggggccgccctcaagcgcccaataacgaccgaggctctgttgcttggatatagcggcctggccatattatgaaacagtcagatttctcgcctcccaccagtggcttgaggcttatattatccatccatcttgggcacatgcaggcggtctgtgctgaaagcacatgcttagcccaaaacaacatcgaaagggaactgttcagggagcgagactaagcggtgctctgaagacagaaggccagagaagactcaccagtcaccgtcgacagtgctctccaaatccttcccctccaaatgacatgagaagtagaagaacagaaccaagtgttggcaaaccacagggtcttgcctgaggtcacgcctgtacatactcagatgccagcagataggcggggttgtgtactgtgttctttttgtcgagcgtccaaagtggtagcagcagtccattgtgctaggtattcatttgctgtagggtttttgtttcttgtccctcatgttgcagagtatggaagtgataaaaatgggtcgttctgtcaggtcgtgtataatagcgttgtcgcttgtttatgggtagtagcagcgagtcagctgtcagcacgccttacacctccctcgtgttgtaattcccgtcacctgtgctgagagtgtgcacaatatatcgtcgtctgttgtccaaagttttgggtcatggacgggtttggtgatttgagttgatttattagagaagcaatgtgttgttcgattttgagctttaaaaaccaaaaagaaatgca

SEQ ID NO: 158744 - DNA, 188 bp, Zea mays
  unsure (1)..(188): unsure at all n locations
  Clone ID: MRT4577_76351C.1
ctccattattccatcccggcggctgctgcggctcgcggcgtgcgtgtcacactcactgatcagtatcccctcgggccgtactccttcctttgtccgntccgctgcgcatcttacggctcacggcattgccagtaggaacaaggtgtctgcgctgctcctctgcttgttgttcctggccgcggtcgtcg

SEQ ID NO: 158745 - DNA, 2225 bp, Zea mays
  Clone ID: MRT4577_76352C.1
gggcaatggggacatgtatactgatattagtcctgagaatgccattatccagggacagagaaaaatgagcaaaggtgttgattatttggttgaagcatcagctgcagaggctgaggcaatcagtgctactttagctgctgtaaaggctaggcaagttaatggtgagatggagcattcacctgatagggaacagtctccagatgctgcaccaagtaccaagcaaaattcaagcctcataaaaccagatgttgctcttgtcaacaattcaacagcacctcctggtgttcggttgcaccatagagcagttgtggtggctgcagaaactggaggtgccttaggtggcatggttaggcagttgtccattgatcagtttgagaatgaaggtagaagggtcatttatggaacccctgagaatgcaactgcggcaaggaaattattagatcgacaaatgtctattaatagtgtgcccaaaaaggtaattgcttctcttctgaaacctcgtggctggaagccccctgttcgaaggcagttctttcttgactgcaatgagattgcagatctatgtgatagtgctgaaagaatattttcaagtgaacctagtgtcttacagctgaaagctcccattaagatatttggtgatctgcatggtcaatttggtgacctcatgcgcttatttgatgaatatggcgctccttcaacagctggagacattgcttacattgattatcttttcttgggagattatgtcgatcgtggtcagcatagtctggagacaatcagtcttctccttgcactgaaggttgaatatcctcacaatgtacatttaattcgagggaatcatgaagcagcggatatcaatgctctttttgggttccgaatagagtgcatagagagaatgggtgagcgggatggaatctggacctggcaccgtgtgaacaggttatttaattggcttcctttggctgcactaatagaaaagaagataatttgtatgcatggtggtattggtcggtccatcaaccatatagagcaaattgaaaatcttcaaagaccaattaccatggaagcaggctcagttgttctgatggaccttctgtggtctgatccaactgagaatgatagcgtagagggactcaggccgaatgcacggggccctggtcttgttacctttgggcctgatagagttatggagttctgcaacaacaatgacctgcagttgattgtgcgagcacatgagtgtgtgatggatggctttgagcgattcgcccaaggtcacttgatcactcttttctcggcaacgaattactgtggaacggcaaacaacgcaggtgcaattttagttctcggaagggatctggtggttgttccgaaactcatccatcctttgccgcctgctatcacgtcacctgagacctctccggagcatcatattgaggacacatggatgcaggagttgaatgcaaacagaccaccaacaccaaccaggggccgccctcaagcccccaacaatgaccgaggctcccttgcctggatataacaggctggccatattattaaacaattgatttcttgtctcctatcattggcttgaggctaaaattatccatccattctggacacatggaagcactctgctgaaagcacacactggcccaaaacaatgtcgaaagaaaactgttcagggagcgagactaagcggtgctctgaaggcgaaggccagagaagagtcactgtcgacagcgctccccaaatcctttccacaaacaagtagaagagcagaaccaagtgttggtaaaccacaggatcttgcctgggatcgcgcctgtacatactcagacgccagcagatagaggaggggttgtgtatgtgttctttttgtcttagcgtcgaaagggatagcagcgtccattgtactaggtattcatttgctgtagattttgatttgttgcctcatgttgcaaagtatggagtgggaaagttggtttcctcgtgtgacggacggtggtctgtcaggtcttgtataatagcgttgtcggctgtttatgtttgcagcgcgtcagctgttacttagcacaccttacacctccctcatgttgtaattcccatcaccggtgctgatgaatgtgcacaatatattgttgtctgttgtccaaagttttgggtcctggacgggttaggtgatttgatttggtttattggagaagcaatacgttgtttgattttgg

SEQ ID NO: 158746 - DNA, 340 bp, Zea mays
  Clone ID: MRT4577_76353C.1
attcatagtggattttttttgatttttttggggaacagcctctatcaaaactccctaaggcgggcctacccaatgaaaattagggaggccagcgctttacgggtgcacctttcaacccaaaaaaacccattttgccaaaaccagaacacaaaagggggcagcctaaatcccagcctgtgcaggggggatggggcatttcaataccggctccaccgtccggattacaggtcattattttcgatgcatgccctaagggtgggatcaacaggtgccacacttttatgacaaaccaaggtcacttccacccctttttattccctgttgacaaaaaaaaaggaga

SEQ ID NO: 158747 - DNA, 393 bp, Zea mays
  Clone ID: MRT4577_76354C.1
acggacgcgtggggtcgccgagccatgacgatgacaatacccgcctgccccggctggtcctcctccccgggcgtccccgccgcggcggaaaaaacttccgccggagccgaaggcgaaggcaacggcggtttgaaggccgttggcgaagcggccggcggcggtataccaaccccaaccgaggaagccaatcacacccggcctctggagacacgaagacccctttcgacacgcggcggtcactcaacccatagcgaggcagcgcaatccacgcgtgccgctgaggagacgacgacgactctttcgacaggcggcgggggttacggcggtgcaaccggcaaggcttccacaagcggcggcgggctggaccccgacggcgacccagaggttgggctg

SEQ ID NO: 158748 - DNA, 215 bp, Zea mays
  Clone ID: MRT4577_76355C.1
tttaaatgtacgggctgaccaatgtgtagtgtgtgaaatactgagagtttgtaggggaggaatatactaaggatgtacaagatttaactgcatgcttgttggattgaatcaggacggactaaagattgttccgaattttgttgatcgtcatgtttgctattaacacaattagagttagggcggttgtggatattgggcagcttaaggaaagcggg

SEQ ID NO: 158749 - DNA, 371 bp, Zea mays
  Clone ID: MRT4577_76356C.1
tataatctccctatttgttaattactatgtttatttgccgaactaacctattttaagtttcataaactgataacaatatgtattccaacagtacaaatattgtatgatttttcaaacttcaaaaacagatataaaaatgataaataacttagttagactatccaacaacttacccaccctcgtccccatattcaaactccaattgtaaacaatgcaatatatagtgcaaaacaatgttttgagtaaccatatgagtatataagtccaaatgggccaggtgcgctggcccgactcggattgggaccatgctagccttgctcaaattgggaccgtgccggcccggatgagctagagggtcgtgccgtacacgc

SEQ ID NO: 158750 - DNA, 571 bp, Zea mays
  Clone ID: MRT4577_76357C.1
tcgaggccggccgggccgggataaaaaaaaatgacagtttttacgtgatagttaatactaaaggcagggacacctcgtgattagagctagagatcaatgaacagcttctgtactctgcaccaatggcagccaatgcctcggtcaagctgttcctccgcgtgaatctgctgatgttcgccatgcccaaagcctgcggtgacaactgacccacgccgaccccgtccaccccgtcgacgtcgagccctacacaaccctcattaggcaagagtccacgccatgcattcaatatgaacgtgtgcgccaacgagatgcctctgatcatggccagaagtgaacgagcccttcactgaccctagctgaccgctgctgaatggactactactactactactagtcgcgagtgtctataccaccatctggtgagaagtcctcataatcaagatctacctgacctctaacatcactctcatcctctagcagaggactaagaacatgcacgacggattatgatgcctctaagctatgcgcgaggatgcgaatatatatgtgtccgtatgtgtcgcattccact

SEQ ID NO: 158751 - DNA, 304 bp, Zea mays
  Clone ID: MRT4577_76358C.1
cttgagtaccgagttttttccggtgaaagattgatgggcgatgccacagcctgaagacggagaggatgtaaagaaaaaactcgccaactaagggcttggtcgggtattcctattccatatggattggatgaaaatggaaaaaaatgggaaagaattttacttggttgggaatggaaaccattccaatccaacccaatcacattggttgagaagcaaaccaaccaaccctctaaaatggtggaggttgtagtacaaattccaggccttcggttgattttctaagagttagttgggttaattttct

SEQ ID NO: 158752 - DNA, 212 bp, Zea mays
  Clone ID: MRT4577_76359C.1
gtctttttttttttttttttggcaaaaaaaccacggggtatgcgctattgatggacagcgggcacaaatgcggaaaaacgctgatgttgcttctcgcgatcacaacgatactggaccaggcggcgagattttcaaatgaggcccaaaagccttcggcttattaagcttggacaacatcaccaccattatctagagcttgcaagggccgccac

SEQ ID NO: 158753 - DNA, 157 bp, Zea mays
  unsure (1)..(157): unsure at all n locations
  Clone ID: MRT4577_7635C.1
gtacgtaagctaggatcctctatattggccgccctaggtaggcttttttttaataaaaacaaaatnaaacggcgggaacattgacaaatacaaaagggaaacacccgaaaggccctccagtcccgtatccgtgccggcctatcgcaatatacaaact

SEQ ID NO: 158754 - DNA, 276 bp, Zea mays
  unsure (1)..(276): unsure at all n locations
  Clone ID: MRT4577_76360C.1
ggaacaggncacatcccaaggggatgggttgtgcaaagcaaaggaattacatttatccacggggctgatcacggtgggagggaaaggaaccagggaccacaccacctacataccatgcagctagagaggaggatcggccggacttatatatatccccacttttgaggatttttacttaaaaaaataggggaggtcgaccacgataagaaaaaagtgggcccaaaccccccggaaaatccccccaaaaaaaaaatcccccgggaaactgggcccacc

SEQ ID NO: 158755 - DNA, 177 bp, Zea mays
  Clone ID: MRT4577_76361C.1
tctctcataccattttccttaatcatcaccctcttccttcaaaacctcttccagtataatttcaaactaaacttgcacttaattccattcctactatagacacattatcatctcaaactacaatccataaaaacaaacctacaaacctattatactatatataaatccaacaaaaca

SEQ ID NO: 158756 - DNA, 816 bp, Zea mays
  unsure (1)..(816): unsure at all n locations
  Clone ID: MRT4577_76362C.1
actcctatgggcgattgggtatctcgaggccggccgggacaccctgtccccatgagctacaccgacaccaggttaccgagggctgaggcctgagagccaccaatgcgagaggcagatagacaaaggagagaaagccgcgaccatcgttcgtcgtgcacgtcgtcgttggggcctcgaaagctgttctgggagcatccacgggacgcctccagcaaggtcgcgaccttattagagcacgaggctaccctgagctcaggaaccgttcaccgacgcttctcctccaccgtggatcagccatcgacgcgggcagggccctctgtgccataacctcaatgagaccatctccctcttcgattcgctttcatccccgggtcgtgatgtgttgttcgaattagattttgggacacctgggccgcggattggtgcccaccagcggggactccttcgtggaggccgacgtggcgccgtcctcaggtgtaagggttggaaggtacgccatgtccgtcgatccccaaagggacgtccgagattagattaagaagatacccttcgtcatatgatcatctgggcgttgaaagaagaccgcgtggaggagagcaagtcgccccatactagaatctaggccatagattttagatccgactgcaaggatgacataccgtttcacttaaagtcaagtctaatataaatcgtcgattggagatcggacgactcacggtcgtcgatacccttcgactgaatgtatttgcaaaagcaaaaaaatgatttttggatgagagattcctatatcnaaaaaaaaaaaaaaaaagggcggcc

SEQ ID NO: 158757 - DNA, 318 bp, Zea mays
  Clone ID: MRT4577_76363C.1
gagacatgaaaagcgctcgcctgtggccacatgaccttgcagcggacacaggacactgtcaatcttgacggacttataagacgaaggacttcgacagactggaagtgaaatcagagcacacaggaatgactagctgcttacatgccaagagctcggccgacctaacgcataggctgaccacaaccttactgacactcgaaatggttccaagagggccagggaagatctcctgcgtctggggagcctaaaagataatgaggcagccggcacctcgttctagtgcacatgcaaacctgttgggaaggatcatatgcgaca

SEQ ID NO: 158758 - DNA, 463 bp, Zea mays
  Clone ID: MRT4577_76364C.1
agcactgatatccttattcatcaataacaaacatttcaattagctcctccagaccacagacgcaattgttcactgaggaatgcccatctttaggaagcctgaagactggatctgctagaactggcaacatctcaacttcttccgccgctactactgccttggctaacatgatccacgccctgtctagcgagtagaagacatatttagcacgggtggcgtgctatcctccatgctaatccgaccgaggtgacctgtacctgcaccattcatataccacaactaacatctgcctatttacataataaaagctctggacgatcgtaaaatacttgaaatcgtgcctacgtcgcaatctgagctgatgttaactttcatgaaaggactactacaatctcgtagttcattctatttaggaaagatagcaactgaatctacacaatgtactggattcacatacacaact

SEQ ID NO: 158759 - DNA, 305 bp, Zea mays
  Clone ID: MRT4577_76365C.1
gagaatgcatgcagtgagcttggagcccgtatgtctgccatggacagctctagcagaggtgctggcgatatgcttgatcgtctcacgcttacttacaacaggacacgccaagcatccatcaccacagagcttactgagattatatctggtgcatcagcccttgaaggataggccaacgacagtgatgatgccgtgcgcctttgcatattgcaaaaatgatgttctacatctatggtgaatggctggttttcataaatggtgatgatcaatatatgtatcttgcacatgattagcaagttcacgtg

SEQ ID NO: 158760 - DNA, 947 bp, Zea mays
  Clone ID: MRT4577_76366C.1
cggacgcgtgggcggacgcgtgggcggacgcgtgggcggacgcgtgggcggacgcgtgggcggacgcgtgggattgaaatgactgcaactgaactgcagaagaaccctatcaactacacacaggttgccgtgctcgcggatgacatattgaaaaatgtggaatatgatgctctgagggttattttcaacaagttccaatctgtcatatcgtttaagcccacaatggtaacaatactttcccccgaggttgcagaaaaagaatcagaagctggtgggaagatgggtgacctagattcttatgagattgaaggcggcgagacaaaatcagagattttgcagaatctagctgagttccagttttcttgtgtcctgtacaatggtgccctagaatgcatgcagtgagcttggagcccgtatgtctgccatggacagctctagcagaaatgctggcgatatgcttgatcgtctcactctcacttacaacaggacacgccaagcatccatcaccacagagcttactgagattatatctggtgcatcggcccttgaggggtagtgaagagactgcggacttcttccttttgccgtttgtgttcctctcccatgaaggcttttttcttccggaggctcagtttcagcccttctcgtttcacttttccttgataaacgtattctcatgctttattgcaataattaggccaacgacagtgatgatgccgtgcgtatttgcatattgcaaaaagaatgttctacatctatggtgaatggctggttttcataaatggtgatgatcaatatatgtatcttgcacatgattagcaagttcacgtgtctgccaaattgagccatataacgatatagtcattaatgaaaaaaaaaaaccatctgttcaatctgaacttccaacatttttccagctgaagaatctattttgaatctttgatgct

SEQ ID NO: 158761 - DNA, 409 bp, Zea mays
  Clone ID: MRT4577_76367C.1
ctgcacgaggcgaggaaaccctagcgactgaccatggctttgctcccgcgcaccgaacggttggccttgcggtctaccccgcggtcggactgggccatccacgatgccactgctgactcctacaccaccttcacagacgccatacagtggcacgcccccaccggcaatgatgaacacggccgagttcgctggctccaaggatggatacctgatgaaatgatcacgtaaggtctcgattatgactatgaccttatgactcgactacttcgcaggacaaaatatacacgctaactcatgcagttacgactaatacatgatgggagtcatctagcatccatgtgatggccaaacttatggtattattgtgttcgaggcccgaactaacaaagtagctccagccgtccatatg

SEQ ID NO: 158762 - DNA, 318 bp, Zea mays
  Clone ID: MRT4577_76368C.1
gggaaccaggggcgtttttaaaacccccccccggggttggaaccccctttttacccccaggtaatttcccccccccctccattttccccccgggtgggccgttggaaaatttaaaaagggcacccccccttggttttacttggggggggccggttcctttaaatggggcatttttaaaccccggttaagggggcctttgatccaggccgggaccccatttttttttttttaaaaattggcctgtttttgggcccccttggctggggggggattttggggaaaaaaacgaaaacctcttctttggccggggccggggcc

SEQ ID NO: 158763 - DNA, 587 bp, Zea mays
  Clone ID: MRT4577_76369C.1
ctggcacgtctgtcctccgctcgccgcctcaaggcgttgctgcgctgtggactgcagcgtctcgctcctgtgctctcattccctccgggactggccctagccctccctggcatgcgcccggtcagggccgagcagaccacagctgcctgctctggtcgctcgtgccgcggccggctgccctggagtacggtgcgcagcacatcggtatctcctgcggctccctggcttacagctcggtgatcccctcccaagcatggtcttcggccggagagctcggtcatgctcgaccgagcgccttggcgtgcgccatgggcaccgggccggggagctatgggcgctcaaccgtgctcactcactgtgctcgagtacagccgaagctttctgagagtgctaggcgggcgcagctccatggtcgcatccctgcagcgcgtcagccgggagcacagctgcagctcggagaaggcggcgtaggaacttgtacgccgtgcctgtgctgaccgctgctgctaggcttctctgatgcgcgcgaatagccggccatatccctacacgtgtgggctccacgtcgagcgcactgatgatcttgc

SEQ ID NO: 158764 - DNA, 761 bp, Zea mays
  Clone ID: MRT4577_7636C.1
gcaacgcggcaagccgcgcaaggcgcgcggaggcgcttttgccgaggcgcgaggacaagctcagggtggtgcccgcggaggcgcccaaggcggtgccgtcggcaacaagaagccgacacgagatgacggctgtcacaactgtggcaagcttggccactgggccagggaatgttgacagccacgacgcggccagggcaacgttgcataggcggaggcggagtaggaagctctgctcctagcacacgcaagcatcaagataccttcagcgtcaccggccgcagcggcactcctccaccttgatgagtcgaaagcacacgctttccttggcgacggctacaacaacgacatgatcgaaggatggtgttgtttgtcacttgttctcaaatgctgtgaatcaagaataaggcaacacaattgttaagtattaaggaccttcgtctgccgaaacattatctccccaaggacataatgttcattatacgaaggttatgaaggacatgtcttcatcaccttatagataaatcaaaatacaaagagatagaaatggcaagtataacttatcgatccattcatgtttgcattccgtaaagcatgcatgagtattaacagattgtatattacattgataccttcggcttgctcgaaggcgttgacgtgagggcgaatacaattcagcgtgtacagtatggtgctactgttcatttatttataagcgcgggaagaccacgggtaaaattacatttatgtccccttttttgctg

SEQ ID NO: 158765 - DNA, 665 bp, Zea mays
  Clone ID: MRT4577_76370C.1
atatcagatctcttcgatcatcctgcagatctctattgccccgcggcgaaccagtgaaccgccacttcgcccatccaggctccagccccgcaccgcgcgagtgcacaacgtcgccggaaccggagaaagtgagggggagctggagatggacaaggacaataggctccgcgcccgagcgggggagaaggcgtccaagagcaggagccacgggtccacggcgctgttcgtcgcggtagactacgccttcctgctcgccttcgccggcttcctcgcctacctcgtcgggtcgcggatcctcccctccgccgtcagcttcgtctagaccggcccgcgttcgtggatctctctcttttttccttccacttttttttgttgttgttgtttgcttggagccaatggtggcgagagaaccgagatcttgccggccgggtggttctcgtttcgatctgattgccgctcatgcgatgtaatccgaccgcattttgacgagaagagaactagcggtgcttcttggcagttcgcttggtaatgagacaaatctttgcctgttcagttaaaaaaaaaaaaaaaaaaaataaaaaaaaaaatgaaaaaaaaataaaacctcttccacccactgcaaccccaaatctctccttcctcacacacgcgaagctgagagaccg

SEQ ID NO: 158766 - DNA, 576 bp, Zea mays
  unsure (1)..(576): unsure at all n locations
  Clone ID: MRT4577_76371C.1
gnatcaacatccaggtctgctggaggcgccatacagtcccggatcccggcggtttacccctgcggcctccacggctctgcctcttcctccgcttctccttgccccgcgtgcgcgaccgacgccgccgcctccgccctaagagtcttcgtcggacacttcgtcaggaattcttcggggcccttcgccggcgacgagtacatccaccccttcccttcatgctatgctgaaaccaatcactgaaaccctaacttcagctatttgtattcggctcgaatctaattaccagcatgtacatgtattatacctaccaacatcgattttgttttgcaaattttattgggtatacatgtcttttactgagtccgcgccttgactcgatttgagtctgtatttggtcttggtggctaattagccaaccacataccgcagccagaccatggcaggctggcagcaacccctgtgtggattggtcagtaagcacacctatattaactcgtgttgtgccaatcgaaggtgtcatcctgcctagtgtggttccttctctgacaccaactcacaactcggcatgaaacaact

SEQ ID NO: 158767 - DNA, 699 bp, Zea mays
  Clone ID: MRT4577_76372C.1
gacgcctgcaggttccggtccggaattcccgggtcgacccacgcgtccggagactccggcgtcctccgacttttcatggaagagatgtcaggagacagcgtggtgagctcagcggtgccagcggctgccacccgcactacttccttcaagggtgccagccccagctccaagtacgtgaagctgaacgtggggggcgctctctactacaccaccatgcagacgctcaccaagcaggacaccatgctgaaggccatgttcagtggacgcatggaagtgctcacggacagcgaaggctggatcctcattgaccgctgtgggaagcactttgggacaatcctcaactacctgcgagacgggggtgtacccttgcctgagagccgccgggagatcgaggagctgctagccgaggccaagtactacctggtgcagggcctgctggaagagtgccaggccgccctacaaaacaaagatacttacgagcccttctgcaaggtacccgtcatcacatcctccaaggaagaacagaggcttatagcgacgtcaaataagcccgccgtgaagctgctctacaacaggagcaacaacaagtactcctacaccagcaattctgacgataacatgttgaaaaacatcgaactgttcgataagctgtccctgcgcttcaacgggcgggtcctgttcattaaagacgtcatcggg

SEQ ID NO: 158768 - DNA, 122 bp, Zea mays
  Clone ID: MRT4577_76373C.1
accgaatgtagttcagatggaagtatgtaggcggttctaaacagtttttgttatgcgacatatgctaatacttaggaaatgtgacatctatgatctatccaaattttgacgtcagcacacct

SEQ ID NO: 158769 - DNA, 310 bp, Zea mays
  Clone ID: MRT4577_76374C.1
gtacctcgagccggccgggacccatttcaaaaacagagctcggatccccgctgttcccctatagagcgtctggtcgccgagcgaaaagcgcgtcattgactcactgcctcgttccaggctcccgatctccatgggtctcgctctcgaacaggaatgatgagaggaaacgctcaaggcgggggatgatatctactgccgggagggcggcgagggtctacacgcatctcggaataaatgtgggcgatgacaaggagatccatttcacaagaggaacaggacaggaggtcgaaacaggaaatggcggcgatat

SEQ ID NO: 158770 - DNA, 109 bp, Zea mays
  Clone ID: MRT4577_76375C.1
gtcggatatctagctcatagaatgtatgtagagttgtgttttgaactgctgattcttgattcccagtcaatcaaatcagactatctaatccagaagctgaaaccgacat

SEQ ID NO: 158771 - DNA, 350 bp, Zea mays
  Clone ID: MRT4577_76376C.1
ggcaaaaactagccattttcgcccccaagccacaggggggggtttggggaaatgcgggaatcccatgaactaaaaaaaatttttgcctgaccgctggcaggggcaaaaatcgcatcaggggggctgggtttgggcccctcttctcggtttggcctttggcttcctcggggccccccattttttgattgtagccggccggccggccggcctggcttggttgggggcaaattgtccccggccggtttttttttaattgccggccccgggggggttataatcccattcccatacacatgcctgggggggcccagctaaatcaggcgttttaaaagttcaaactccattccggg

SEQ ID NO: 158772 - DNA, 276 bp, Zea mays
  Clone ID: MRT4577_76377C.1
gcaagccgtcggtggtagtggctgtgaaattaaatacaagtgatgaattctgatagactgaattttctcgtcgccagccacgaagcattgatatatctccatgtgagcagctcgctcgctccttctcgatcgggtcgccagaaaaacgctgggaagcccgaaaatgggaccccatggtccatggacgacagcgaagttggtcatgctgcatgtgtggattgtgtgggccggtgctcagttgtcacatcttgtgcaaatacctgatccgtcctgcac

SEQ ID NO: 158773 - DNA, 660 bp, Zea mays
  Clone ID: MRT4577_76378C.1
cctataggggattgggattctcaagggcggccgggaaaaagtccctatcatcaccaaaaccgaggaacgcgcttggcgctatcgccacatccggggaggataacctccgccgttgggggaatcccggaccaccagagtcaggcacacgattttggatccgaggccttcgccggggcgcgcttggggttgctggggacctcatcgggcgcaggcggtggtgttggccctctggattgctcgtcggcgacaagagatcccgcgggggcacgtttctccgccttgcgccatgaaccgcgcgtccgtcaccataatccgagcagtgcggtcacgaggatctgaagaatcaccctggtaactggaatctcaagtgccaggttaaggacaagtaccacatggtgaggcgcatggatgatgttgtgatgtgttcgtgagagatctaggtcgacgtctcccagttgactttttggcgccaaggatggattttagttcgatccatatttatattttattttgtaagacttccgctatgtaataaatactctgatgttattgtgacatttatctctatacactctgttattatatatgttgtcttctttggtgcatgtatgagatgcacctggctttgttccgaaaaaaaaaaaaaaaaaatttgcggcc

SEQ ID NO: 158774 - DNA, 205 bp, Zea mays
  Clone ID: MRT4577_76379C.1
gttaccaggttctcaggcgtactgttacaaatgtctgaccagaggcgggaaatatgtacgcctccgaccattcaaaaatgcctacgttgccatggtctaacactctctgacaacgccttgcgacctactgagaggtccacgagccacgatcatactaaatcgagagactcaaaggttccgacgactacaattggttaccttctac

SEQ ID NO: 158775 - DNA, 1563 bp, Zea mays
  Clone ID: MRT4577_7637C.1
tgggaccctcgaggccggccggaatagtctttgcgtggtgtagttgtgtgtcctctatgtgatttgcgttaggtactgggttcgagccctatttttaaaaaaaaaaaaaaaaaaaaaaaaaaaaaaaaaaaaaaaaaaaaaaaaaaaaaaaaaaaaaaaattggggggcatttgctacaccaccacacccacaccccatcccagcacacaacaagcagcctggtttacggtagctgctagcaaaacaatggagaaccctgctccgagcatcgtagtggccatcgccgcacccgtggcggcggagttcgtgaaactcaccttccgtgccctgtatatgcgccgggctggtcctggcagcagggagatgactgtgccgggaaggccatccgaccagctgggcaggagagtcgtcactgacagccccgtgtacgacggccgtggcgccgacgcccgcctcgtggctcgcatacagggagtcacggtcctggtcggtaacgcagacgccttgttcaccatggtgttcgaaaccgacaggctaaagggctccacgctcgtcatcaacggaatggtcacggatgggtcagacgaatgggcgatctacggcggaaccggggtgttcgccatggccaccggtgtcatgaagagaagaaaccttgccggcggtagcaacgacgggaactctgacgagcttgccctggaagttttctgcccggtgtttggcgcatcacagcaaccaattagcaagcagcaggagtccatctcctccgtcaccaagatcggactatggggcggacagggagggtcggcacaggacatcacggcagagcagccaccacggcgtctgcacagcatcaccgtccgcgctggcgttgccgtcgactccatcgagttcacctacaccgacgacgctgggcagaggcgcactgctgggcggtggggtggacttggcggcaatgttcgaacgatcgaccttggcgacgcagaggatgtcagggaagtctcgggaacatacggcgcatttgaaggtgccattacgctgacctcgctcaggctcgtcaccagcagcagaacctggggcccctggggggtcgagaacgggacgcgtttctccatcacggcgcccaacggcagcagcatcgcgggattctatgcgcgggcgggaaccaggctcgtcgacgctatcggtgtttacatacgtccagtggtgccaggcaggcctcggtgaaccagcgagcccattctgatcgactcagctcgctcgtattacgaactgtaggattatggttcgccttgacttgatgcaggctacctgctacagcatgctcgattcactatcctttaattcggtcatcgtcgtcgtcttgtattgtgtcaaataaagctcttaattgtgcctatacacggctctcatggtcgtgccgtgtttctatatgttagtgtttatgtatatgtggagatcaaataatggccttgcaataatgatcaaagactcgctatgttaatgataatttcattttatatattggttttttttgtttcaaaaaaaaaaaaaaaaaagcggcc

SEQ ID NO: 158776 - DNA, 506 bp, Zea mays
  Clone ID: MRT4577_76380C.1
tggttggaacctttgggctgatttatgtgcttgaaagtaatgctgtcacgaattggcggtcgttctttgttagccactttcgcggcaatcccctcgatattctcagtcctaaatcttgaaggctcaaaggactgacaggttatgtccctatggcctgcacctgcatcggaaactagaactaaatgagtccccatttccccgccttatatgagaccctcgcctctgccgagtctactccaagatattcgtgccactccccaatagacgcgttgttttagttaaatcttttattcgataacgctccttgtttggactggtttggtgaggttgggttccggagttaaaaggaggggtggcgttttgtccttgatttatggaacaagcaaaacaatgccaaaagcagcggcaccctatccgtgtttggaggtctttatccacttcatattctctaagctaccctataaagctggatcagagctaagtctaatagggctcctcccttttgt

SEQ ID NO: 158777 - DNA, 248 bp, Zea mays
  Clone ID: MRT4577_76381C.1
gcggatccagagagggtttacccgatggagcacctcttctgaaactagctgcgaagctgttcgggagacctgtgtcgcactctttgagagactgaagcccatcaaggagaatctgctagctgaggcaggcaccgcggagtgatgttccttcatcgctcacgcacgtatagcgagtgtgaacttatttgaacatgcatactggaccccagaaccatctttcataaggtctttaaactacggaccttgca

SEQ ID NO: 158778 - DNA, 516 bp, Zea mays
  Clone ID: MRT4577_76382C.1
ttctaaagttcgtttactatctatccatgaagcatatatatacacttcattccttcattccaaaatgttaagtatattttgataggtcaaaagttaaataaaataaaatttgacccttattttcttctacagtaagttgcgtttcaatatttctcatagacacttcggtttggatacaaatctatcaatgcaagtagtatgttctactcttgtgtataatatgcgattaaagtttgtgaaattaaaattttgcctatataaaatatgcctacaataattatgggatggaaggagtatgtgagaatggatggagtaccttattaattagtgatctattactattcttcagcaaaggtaatatcatatgtcaaggacagttatgggttgttatactttgcgcttatgtactcctagttagttatccccatagatatatgctacttgcctggttgttgcaatactattttctcactatattagcatccccaactgaaacaaaataagataccattacat

SEQ ID NO: 158779 - DNA, 595 bp, Zea mays
  Clone ID: MRT4577_76383C.1
agaagcactatgataaaatacattaatgtacaaaacaattattgttatgctatacttttgttagttacatacctaaaaatatagtacaatgactgtgtgttgcaattacacataaattcgataaaatgttaatgtacaacaactgtacaaaaaccgaatagcatacattattatagatctcaatttttcacatcctagttttatatcagactctcatcttattattattttgttaggcgagaaacaaacatgttaagaaaacgtggtccaaaacctctataaaagcccatccagccatcttcatcaagcaacagcctagtagttttcatgactgaaggcctatccttactatagttgtccataacctgaaaccacagaaactgtttctgcaaagatacataatcacaccttcagaagaacaattaaatttacctgaagctgagtcttgatggtatctattggaaccttataccatagaaactatataccaagtgagaatgcgaggcagtaggcagtagacttccggtttggggaggctacacactacatgaaacactccattctggaattctctgctgacatctagctgcatcgc

SEQ ID NO: 158780 - DNA, 221 bp, Zea mays
  Clone ID: MRT4577_76384C.1
gttactgctacctgggggctcgcagggcctgggcaacttagctgcaactggcatcggagcatggtcgtttaaagtgtgacaccagtcagctccagaaagtttaaggggtctgtttctcatctccatggacatcttcaacagcttcacctgacaactactgttcctatgaactagccacttgtgttttaagcagaggcaacctctctcttctcctctgtttc

SEQ ID NO: 158781 - DNA, 803 bp, Zea mays
  Clone ID: MRT4577_76385C.1
cgggacacgtcctcccttcccagaccgaattattagattcgacctctgctggacaagagtggccaacatcacaccaacacctctgtgcctgtcacaatggacaccaccttcatcacaatccacgacctctccgacgatgcacacatcctgtactcgtcagactcaattgtcgacatccttggccacacgcccgacgaggttgtcaacaagtccgtgtggcacttcttccaccccgaagagattcctctcgccaaagcacagcacaggcgcggcgtgaggctcgacaaagccgccgtgctatcctactgccgcctaaagaatcgccagggcgaatgggtcggctgcgaatgctgcttctccgtcgtctacgatgtcctggtctgctgcaccagcgtctaccgacagggcatccagagtcagaagcgtgcagtcgaggcccccatggtccggaagctgtttgcctcttccccaaaggatccccgctatcatatgctgtcacacttatctaccaagtttgacctaggcgatgaggatcagacccatgagccccgagctgccctgtttctcaacaggttcactcgaactctgactgtcatgtacgcaaccagcggcatagagcagattataggcatttcgagccaagccatgaagggccgtagcttctactactgcatagctccaaactgcctcgaagatgctgtccgctgcctcgagtctgccaaaggtaacgactcgattgcctacatgcgcttcttcttccgtgacccacgccaggatgacccacctgacgtcacgtcgtcgga

SEQ ID NO: 158782 - DNA, 746 bp, Zea mays
  Clone ID: MRT4577_76386C.1
cattgggaccctcgaggccggccgggttcgcccccgccgcatcacgcagaatttgcttactgcctgctctgctcgccattgctgactccctccctccctccctccctcgccaccgaaaagctagcccgcccggccgttgcttgcaagcctcgctccgcattattgccacctgccgccggcagccagcgcgcgcggcgcaacacgcaagcagaacaacggtgtctgttcggttgttgttgttgttggagagagcgcgcgatccaatccaaggaaccagggaggaggagcgtgcagtgcagtggcagtgcaggagcgatggtgttcttctgcttcctggtggaccagcggcggacggtgcggagcagcaagccggcggcggggatctgctcgcgctgcggcgggtgcgccagcgtggcggacatggagaccgccaccagggtctgctacctgctcaccgtgcaccggagcacctggcgcgccatcatctgcaccttctgcggcgccatgctcaagtcctaccgccactacaggctatagcactggtagcggtacggcactacctaccggtagacgatggagtcggtcggtggatcgcgcgcctttttccgcggcttccgatcccggggtttttttttgttcctgcttgatcatgctggggtttgcaggttattgtaatggtactatggcagcttgccggtgcataaatatggaatgggagtcatgaaaaaaaaaaaaaaaaagcggcc

SEQ ID NO: 158783 - DNA, 624 bp, Zea mays
  Clone ID: MRT4577_76387C.1
atgggtacccaccccgggggcgccgacccctgccgcacaccaccccagcggtcggtcatcggccctcgccttcgcgttcgctttatcggctctggcaccttctcgcccagctcttccgccgccagctccatcgcagtccccattactgcactgcgctctgtcgcctcctctcttccccacctcgctgctccgatccagcaagagcaggaagcaagtacagctccatccgcctcgctgctccgatccagcaagagcaggaagtacagctccatccgcgcgcagggaggtcgtcagatggagttcgtgctcatcatctcgctgccgctgctcatactcatcatcatcgtcgccgtcgtcctctgcatcatctgccgctaggctcgctgaacgtctacagagaagaagaaggaggaggaggttcagccccgtccgtctctgcactctgctagctgtgatcctaccataccatgtgttagtgttgatttgacattgtacgtacagcatgacctgataaaccctcctcctctctctctctcttgcctgcattgccgtacgtgagattaatcggctgtagctctctgtacgttgtttcttttcttgaaaaaaaaaaaaaaaaaagcggcc

SEQ ID NO: 158784 - DNA, 216 bp, Zea mays
  Clone ID: MRT4577_76388C.1
ccgacattcacgtgcagctgtcgggaggaggcaatggcgccggatctaagcgaactcgccgccgccgctgcagcccgtggcgcctacctcgccggcgtcggtgtcgcggtcctcctcgcatgcctgcttactaccagtagcccagtcgtcccgcgtgcaagataactcattggtgagagacataacccatatgccgtatagcagctatgggattga

SEQ ID NO: 158785 - DNA, 671 bp, Zea mays
  Clone ID: MRT4577_76389C.1
gccggccgccctacgtgaccggccgggcccccccccccacacctgccgcagccgcacaccaccccaccggtcggtcatcggccatcgccttcgcgttcgctttatcggctctggcatcttctcgcccagctcttccgccagctccatcgcagtccccattactgcactgcgctctgtcgcctcctctcttccccacctcgctgctccgatccagcaagagctccatccgcgcgcagggaggtcgtcagatggagttcgtgctcatcatctcgctgccgctgctcatactcatcatcatcgtcgccgtcgtcctctgcatcatctgccgctaggctcgctgaacgtccacagagaagaagaagaaggttcagccccgtccgtctctgcagtctgcactctgctagctgtgatcctaccataccatgtgttagtgctgatttgacattgtacgtacagcatgacctgataaaccctcctctctctctctctctctctctctctctctcttgtctgcattgccgtacgtgagattaatccgctgtagctctctatacgttgtttcttttcttcatctctcttttcctaaaagaaaaaaaaaagaaacggccgtttgtgcagagcaacaagcaaaaaaaaaaaaaaaagaaaaaaaaaaaaaaaaaaggccccta

SEQ ID NO: 158786 - DNA, 1413 bp, Zea mays
  Clone ID: MRT4577_7638C.1
ccgggaaaaaaaaaaaaaaaaaaaaaaaaaaattgggggcatttgctacaccaccacacccacaccccatcccagcacacaacaagcagcctggtttacggtagctgctagcaaaacaatggagaaccctgctccgagcatcgtagtggccatcgccgcacccgtggcggcggagttcgtgaagctcaccttccgtgccctgtatatgcgccgggctggtcctggcagcagggagatgactgtgccgggaaggccatccgaccagctgggcaggagagtcgtcactgacagccccgtgtacgacggccgtggcgccgacgcccgcctcgtggctcgcatacagggagtcacggtcctggtcggtaacgcagacgccttgttcaccatggtgttcgaaaccgacaggctaaagggctccacgctcgtcatcaacggaatggtcacggatgggtcagacgaatgggcgatctacggcggaaccggggtgttcgccatggccaccggtgtcatgaagagaagaaaccttgccgccggtagcaacgacgggaactctgacgagcttgccctggaagttttctgcccggtgtttggcgcatcacagcaaccaattagcaagcagcaggactccatctcctccgtcaccaagatcggactatggggcggacagggagggtcggcacaggacatcacggcagagcagccaccgcggcgtctgcacagcatcaccgtccgcgctggcgttgccgtcgactccatcgagttcacctacaccgacgacgctgggcagaggcgcactgctgggcggtggggtggacttggcggcaatgttcgaacgatcgaccttggcgacgccgaggatgttagagaagtctcgggaacatacggcgcatttgaaggtgccattacgctgacctcgctcaggctcgtcaccagcagcagaacctggggcccctgggggatcgagaacgggacgcgtttctccatcacggcgcccaacggcagcagcatcgcgggattctatgcgcgggcgggaaccaggctcgtcgacgctatcggtgtttacatacgtccagtggtgccaggcaggcctcggtgaaccagcgagctagcccagtctgatcgactcagctcgctcgtattacgagctgtaggattatggttcggcttgacttgatgcaggctacctgctacatcatgctcgattagtcctttaattcggtcatcgtcttcgtcttgtcttgtgtcaaataaagatcttgtgcctatatacggctctcatggttgtgccgtgtctctatatgttagtgcttatgtatatgtggagatcaaataatggccttgcaataatgatcaaagactcgctatgttaatgataatttcgtaaaaaaaaaaaaaaaaaaggcccctagggcc

SEQ ID NO: 158787 - DNA, 233 bp, Zea mays
  Clone ID: MRT4577_76390C.1
atttctccataatctccagctactacttcactttcactctctcctgtagtcctgtggcttctttcgtggcggcgccgtcctcctcgtcgggctcttcccgccgacgagcatccacctgtgcaggcactgctgcagcagcagccgctgttttctacagtaacctgtgaggcggaaagcagtttttttcggggagataccagataggggggggggggaagagaaatttttttttt

SEQ ID NO: 158788 - DNA, 617 bp, Zea mays
  unsure (1)..(617): unsure at all n locations
  Clone ID: MRT4577_76391C.1
tatatattcctacgtctgatgccgagtgggagcagcctccccattgcgaccgcgccattacatcggacgccaatatgaaaccaacaccacctctgctcgactccgcgaggcaggagccgaaacatttcaccttacaggcatggatcagccacaagatcccccttcccttgtgacaaatgctcctgcgcagtctggagagtgcatcaccatggttccaagagaactagcanctgggaggatgaggcaaatggtgataggtagggtcgagacagaggctgaacgataagaacgatagcttcattctggtatatcatcaaggcttgacaagatccaggctgatggtgagacaggtattactatctgatatagctctgcgggatgtcaataaaccaatcatactgcactgcctatagatgtcccgagacaccatgacctcatcgagaagacgatcactgcaacttcccataatgactgtgctgggctcatcattgactcaaccatccgtcgctggtatatgctggctactccgagctgacatccacacccgaatgtggtcgcatagctctcactctgtgtgcgaactagatgacactgtgctgcatgaggatttatgctac

SEQ ID NO: 158789 - DNA, 706 bp, Zea mays
  Clone ID: MRT4577_76392C.1
ggtacaccccgaggttcggccgggggcgcccgtccgtcgtgggcctcgtggcgcggtgcccgttcgcggcccccgctcaaaacgccgccgattcgcagagagaggagcggcgccaacgaacggaggcgcgcggagcaaatcggagattcggagcccgggaccgggcgcgctccaccaccacacgtgacctcgctctcggcctcccgggcctcggcttgggcgcttggcaggctccccgctcctgcgggagaacgcaaggtttccacctaggcagagataaataagatctgcggaatcaagaagctctgtccaaggaggaagccagcggcacggcagtgccctcggcggtgatgaagtacgtctccgggccgtacttcgaaccggacttcgacccgctactcgaccgcttcggcaccccaggggtcgtcgtcgacaatgagacacgcgaggactgcacgctcgtcaaggttgacagcgtgaaccgggacggcgtgctgctggagatggtgcagctgctcaccgatctcgacctcgtcatctccaagtcgtacatctcctccgacggcggctggctcatggatgtgttccatgtgacggaccagatcgggcgcaagctgacggacccgtcgctgcccgagttcatccagcgcgcgctcgtgccgacccaccggccgggcaacggcccgtctccgaggttcaccacgtg

SEQ ID NO: 158790 - DNA, 475 bp, Zea mays
  unsure (1)..(475): unsure at all n locations
  Clone ID: MRT4577_76393C.1
atttcncacgaggcttgcgggggggggggctctccaccgcgctcaggggcgacgcagggcagcgctcctcatccagatccaagggggggatgggtctcacgagagttgggctcgccgggctcgcgggcatgggacagaaccttgccctcaacatcgcggagaaagggggcggggaggcgggctacaacatttctatcctccaagggggatgagaccgtgcancgtgccaagggcnaagggagacctccccgtgtgtggggtccacgaccccgcgtgcttcgtgagctccatccagaagccccgtgtgcggatcatgcgcgtcaaggcgtgggcgccnngtggccagaccattgccacgcgcgcggcgcaccttgatcgaggggactgtgtcggcnatggtggaacgagtgggacgagaacacgganaggagggagaaggcgatggaggagcgcgggctcctatatcttgggatgg

SEQ ID NO: 158791 - DNA, 868 bp, Zea mays
  unsure (1)..(868): unsure at all n locations
  Clone ID: MRT4577_76394C.1
gccacgaacggaggcgcgcggagcaaatcggagattcggagcccgggaccgggcgcgctccaccaccacacgtgacctcgctctcggcctcccgggcctcggcttgggcgcttggcaggctccccgctcctgcgggagaacgcaaggcaatcgatctcccgcccgcctccgatccctcctccattctcgctcgtccacggtctgccctatataacccctcgctccgttggtttcgtcgcctccgttcccccaagggagaagggtacgttggtgatatcccgcgtccccagcgaggatgctgtcattgcgctgccacgccgccgcgccggcgacccgcggcgtcgcatgtgaacacggggcgcgttcatcgtgttgtcttctttctttgccccccgtctctgtctctctctctctctgtttgtttctttctgttctgcgcttcaacgccgccctctcggcgacccggcctttcgcatgtgagtacggggcgccttcctcgtttccacctaggcagagataaataagatcggcggaatcaagaagctctgtccaaggaggaagccagcggcacggcagtgccctcggcgcgcggcgaagtacgtctccgggtcgtacttcgacccggacttcgacccgctactcgaccgcttcggcaccccaaggggtcgtcgtcgacaatgagacacgcgaggactgcacgnctcgtcaaggttgacagcgtgaacccgggacggcgtgcctgcttggagatggtgcagctgctcaccgatctcgacctcgtcatctccaagtcgtacatctcctccgacggcgcttggcctcatggatgtgttccatgtgaacgnacagatcgggcgcaagctgacgg

SEQ ID NO: 158792 - DNA, 2561 bp, Zea mays
  Clone ID: MRT4577_76395C.1
ctacaataaccgctaaacaccgggggaaacggggtacaggtgctgttgagcaacttcagtttgtgggccaaaacgtgggtgtaaagaagcatctgcttagcggcatgttgtgaaccaactattctgtcattttgacataccgtgccctccgcccaggatgaccgcgtattgaggggcgggggagagttcgcatgagtggcctcaaatctcatgtattttcagatttttcaagcttaggaactgggaaggaaacagaagcttccatgctattgcagcagctatctgatgcttgtttggtggttgatgcattggaaccatctgtaagggaagaactagtgaagaacttttgcagcaaggaactcacctcatataggcagatctttgaaggagcagaacttgccaagttagacaagaccgaaagaagatatgcctggattaaacgtcgactaagctcaaatgaagacacctggaaaatatttccaccttcctggcatgtcgactatctgctgtgtatccagttctgtaagattacaagggcccagcttgttgatatccttaataatctcaaagaaaaaccagatgttgcaactttgttattggcgttccagagaaccattgaatttgaggaagaattggcagagaaattcagtggtggaactacaaatgctagaaataaagagacaacaagtgatgatgaagatgagggtgggggacacaataaaattgtttcggacttactaaagaaatttgagaagaaattggctgcacccagcgacgaggacaaagataagcagaaagatttgtcagttcctggtgctgggttcaactttcatgggatcatatcttcttgttttgaaccatatatgactgtatacattgaacttgaggagaaatctttagtggatcaattagaaaaacttgtccaggaagaaagatgggaaatcgaggaaggaagtcagacgaacattctatcaagcagcatgcaggttttcttggtgattagaaaaagcttaaagaggtgcagcgcattaacaaagaaccaaacattgttcaacttatttcaggtatttcaaagaatactcaaggcctatgcggctaagttatatgccagattaccaaaaggtggaactggtattgttgcagctgccactggcactgatggacagatcaggacctcagacagggacgagagaatgatatgctacattgtcaacactgctgaatattgtcatcagacatcaggtgagctagctgagaatgttgctaagatgattaaccctcagtttgctgacaaggtggacatgtctgaagttcaggatgaattctcagccgtgatcacaaaagcactaatgactcttgttcacggacttgaaaccaaatttgatgctgaaatggttgcaatgactcgcgttccatgggctacccttgaaagcgttggtgatcaatcagaatatgtgaatggtatcagctctattctgtcaagcagtattcctgtgcttggtaccctgctttcacctacctacttccagtatttcctggacaaacttgcagcatctcttgggcctcggttttatctcaacatatacaagtgcaaacatatatcagaaactggtgcacagcagatgcttttggacacccaagcagtaaagactattctcctagacatcccagctcttggaaaacagagtacaggtgcagctagctactcgaaatttgtcagccgagaaatgggtaaagccgaagctctacttaaggtcattttgtcgccagttgattctgtcgctaacacataccgtgccctccttcccgaaggcacgcctcttgagtttcagcggatacttgacctcaagggcttgaagaaagcagatcaacaagctatcctggaggacttcaacaaacacgcccctgcaccagcccccgccatcaaacaccctgccgttgctccgacggtggcgacaccagttgccacagcatctgtccagattgtgccctcggtggcaactccagctgtttcgattacaccaagcatggcctccttgaagggagcactggcgaaccaagaggacgtcctcgcccgagctgccgcccttgggcgcggagcagccaccacgggcttcaagaggttccttgcattgacagaggccgccaaagatcgcaaggatgggccgttccgcaagctcttcaacgcctaaaatgtcgctcaccgttgtgttcatagtttgtgcccctcgtgcagtgaacatagatataggaaattctataacaaccattttgacagattatcctatcccatcctgcggagaacgattagctcagttgtagcatagagattttgagacagtttgagctattagataagttttccccctggttttgtgcatgcaaacccaagattctataataaaaaaaaaaaataaaaaaaaaaaaaaaaaaaaaaaaaaaaaaaaatcttataaaaaaaattaaaaaaagaatttttattttaattttttttataatatattttttacgaaatattttttcataatttttatttataaaaaattattgctattaaattt

SEQ ID NO: 158793 - DNA, 782 bp, Zea mays
  Clone ID: MRT4577_76396C.1
gctagctactcgaaatttgtcaagccgagaaatgggtaaagccgaagctctacttaaggtcattttgtcgccagttgattctgtcgctaacacataccgtgccctccttcccgaaggcacgcctcttgagtttcagcggatacttgacctcaagggcttgaagaaagcagatcaacaagctatcctggaggacttcaacaaacacgcccctgcaccagtccccgccatcaaacaccctgccgttgctccgacggtggcgacaccagttgccacagcatctgtccagattgtgccctcggtggcaactccagctgtttcgattacaccaagcatggcctccttgaagggagcactggcgaaccaagaggacgtcctcgcccgagctgccgcccttgggcgcggagcagccaccacgggcttcaagaggttccttgcattgacagaggccgccaaagatcgcaaggatgggccgttccgcaagctcttcaacgcctaaaatgtcgctcaccgttgtgttcatagttcgcgcccctcgtgcagtgaacatagatataggaaattctttccacatcgtgtacacccattaccgttaaccgacgtctataacaaccattttgacagattatcctatcccatcctgcggagaacgattagctcagttgtagcatagagattttgagacagtttgagctattagataagttttccccctggttttgtgcatgcaaacccaatattctatactcgtgattgaataaaaaaccgacgcgtgtcgaccggaa

SEQ ID NO: 158794 - DNA, 747 bp, Zea mays
  unsure (1)..(747): unsure at all n locations
  Clone ID: MRT4577_76397C.1
aattcggcacgaggtcaaggcctatgcggctaagttatatgccagattaccaaaaggtggaactggtattgttgcagctgccactggcactgatggacagatcaggacctcagacagggacgagagaatgatatgctacattgtcaacactgctgaatattgtcatcagacatcaggtgagctagctgagaatgttgctaagatgattaaccctcagtttgctgacaaggtggacatgtctgaagttcaggatgaattctcagccgtgatcacaaaagcactaatgactcttgttcacggacttgaaaccaaatttgatgctgaaatggttgcaatgactcgcgttccatgggctacccttgaaagcgttggtgatcaatcagagtaagattttactggtagcctatgttattctgttgcatcctttgctgatattncattctgtgtgctttgggctcaaaaggaatactggtcataccatgtcagtccaaatccttgatgagaaatgttataantatgttagtttgtcacatgtcatattgtagcaatgatgtcatgcattttttttctcgaacacgtgggagaaccacgtatcaatatattaaaaagacaggaaaaaggacccagtacanagggtgccaagaaagcacccanggnaaaaaaggaaaaacannaaacagctacagccaaacctgcctaagagcagcggcccaccaagggccccatacagggcctcatcatggatgg

SEQ ID NO: 158795 - DNA, 865 bp, Zea mays
  Clone ID: MRT4577_76398C.1
agttcgttcgcgttgcccgcgactctctccgtcctcctactgcccacccgactcacacgcttggcacgcgcgtgcttccacccgtccgtcgcctctctctcggctgcctgattgatttggttgccccggttccagcaatggcggtccaggcgcattatcaccaccactaccaccgcgagtcccctttcctcgtcagcggcgcgccggagggcagccggttggcggcggcgatggagctgcatcatcaggcgcagaaggaggctatggcgccgcagcaggctcaggctccgcccctcttcttggacttctcgcatggagattacggcggcgggaggaagcggcagcgcgaggcggagcccatgtcgtcgcagttcttctctctgcagcagcaaccgcaggcgcaggggcccaaggtgatcaacctggcgcaacttcagaagcggacggcgatgggcctccggctcgacttcgacgagggctcggagcacgtgtcgtgcacgtccccggcctcggcctcggcctcatgtctcctctctaaagagctcgccgcgcagcgcgatcagcacaggaacgagatggaccggctgatccaggaacatgcggacaggctccggcgcgcgctggccgacactcggcggcggcactaccgttcgctggtcggcgcggcggaggcggcggctgctcaacgggtaagggagaaggaggcggaggcgtcggaggccgcgcggcgccgcgcggacctggaggaccgggtggcgcggctgagggcggaggcggcggcgtggcaggccaaggacgcggcggacgacgctgggtcctgcttcgtcgacccggacagggtcgtggaggtcgccccgccgcgccc

SEQ ID NO: 158796 - DNA, 852 bp, Zea mays
  Clone ID: MRT4577_76399C.1
gccggcagggctgggagccgaagcccagcccgagcccagagtagggtttcgggcttttcgtcttctctttcgtccttcttgttgcgcgccatccgatcgccgctgccacgtcgtgtcctttctcgtcgccggcaaggcctcctcccacccaatttccttgacgagaggcgctgctcggttccccggacctcacctggggcctgcctggcgtccatttcggcctaaaataggcttaaatagtcagattttgagcacccaatctcgataaagaaagccccaaagaggcaatagccagctgccagccctagtaactctccactctcaagccgtttgcgtcgaccccccgactcacgcctcttcgcccgttctccctctccccgagccaggtacgacgacgtgccgccgccagctgcctctgcgcgaagacgacgcgccgccgtagagttgcccaggcccggctgactcccgatctgcatctctcggactacccgacgccttgcggctgcggacgcctttcgctgtgcgggctgcgtccagtggaacgtcacctctcccagcgcgggacgcgcctccaggctccagcggagctctacaggccggcagttgaccccttgccaactggctcctggactcctgttttgctgggttgaggagaaccatgccggacgtgaagtccgctgctgccacggtcgccaagacagtggctggtgactctccttcccctgctgctactcctcctgcgccggccgtcgccagcagcaatgggacaccgcagaagccgcctcctattccagctgccaccttcgacatgcccaagccaaaccttcgtggtcttaacagcccaagtgcatc

SEQ ID NO: 158797 - DNA, 666 bp, Zea mays
  Clone ID: MRT4577_7639C.1
ttcggggaaaaaacgtgacaagagcgaattcgctaaaactatagagaccaactcgcaggctcgcagccggcctctccgcctccggctctcccctcctcgagcgctttcggcaccgtagttcggtacgatggcagcggcggccccgacgagggcagaggtgctgtcgcttttccggtccttactccgcacggcgaagcagttctcggactacaacatccgcgagtacacacgccgacgcgccgcggacgccttccgcgaaaacagcgccctctccgacgcgccgtccgccgccgccttgtttgcggtggggaagcagcagctagaggttgcgaagcgacaagcggtgatttactcaatctacgcccccaaggccaagagcgtgatggagttgaaggtgcagtgatggacgaggtgctgcgcccttttcttcctcatcgttttcctttccgaattcgtttcttttctgtgacgatgaaactataaactgttgcattatcacgtttgctggatgattgtcatgatatagcttaaaaaaaggaaaaaaaaaaaaaaaaagggccctaagggcccgggcggtccaaaactaatggatccccccgggtggcgggattccatattcaggttatccataccggccaaccccaagggggggccgggaccccattc

SEQ ID NO: 158798 - DNA, 117 bp, Zea mays
  Clone ID: MRT4577_763C.1
ctaatttagcaaaaagcgtttctattttttacgcgcaaataggactatacccctctggcgctcaaggggaacaaagcccaggcagcataagaaaacacaaaacctgccaaagggcgt

SEQ ID NO: 158799 - DNA, 526 bp, Zea mays
  unsure (1)..(526): unsure at all n locations
  Clone ID: MRT4577_76400C.1
gnaggaacgcccgctgcgacacgaccagcagcgtggggatgccggcctccaactctaggatgaccctggcacagggaggttcgctagctttacctcccagcaatcatcatgaaccacgctgcacagagggagtgggatgccccatgcctggactgcacacacctcacacattgatgagcagtatgctgagctcgggaccaagattgataggccatccgatccggagctggacaatgagcccaaatagatgaacaacggtgatgctggtatggcgaaaacgggccccactaagcccatggctggtggagaccttttatgagaatcctactcttggtcgatttggtgtgacaagacatgaggcaaacgggggctgacggagctatcaatagtgtgggacaagaaggacccaactgtagccagagtgacgaaggctgctgccaagaagaaaagagccatctgtctggaggtgtgcttgcttggaggataccaactggaagctgaaaatatatccatttgactacattct

SEQ ID NO: 158800 - DNA, 486 bp, Zea mays
  Clone ID: MRT4577_76401C.1
aaacctcgggcgggttagtttatggcccattcttccaggggtcaaaggccaggtggaatttcggggatatggggaaaaagggggggctagctggggggggccaaccccccctttcctatggaaagccaatttttttcggggaaacaggccgcccatcggaaaaatctatcaaaccggggcgggcccggcccggggggggtttgaaacccacagggaaaaaggggggccccaaccggccgccccccaggggggatcttcacttaaacgggggttacaagcttttgaccgaaacccatttttcctcattggccaaaaggggggccgggccccattctgcataatgggtttcatggtggcaggggaaggaggcccaaacattttccccccccccttggaaaacccaaggggaagcaacctttttaacattttccaaacttaattcaaaagacatatcatcatcgggcccctttgaatcagcaaaggggt

SEQ ID NO: 158801 - DNA, 397 bp, Zea mays
  unsure (1)..(397): unsure at all n locations
  Clone ID: MRT4577_76402C.1
gtcgacactttggctctgcgtcgagcctcgtcanngccgtggtctgtgcgcgccgttgtgtggagttcttgcgccncccacnggcacgtgggcctcagtctcgtgttcgtgcagagagaaagtgctaggacgctttatgctaggaagctcggcagtctccactctcggaccagggggatctggtagcctgtgcgttcgcttcatctaagatgtttgagcaggtgagaggctcggcgctcgcgaaggctcccagggtcgcctactgccgacttccggggaccttggacgtacttgggaacggcatctagtatgtctgttgccgggaataaattaattactcctattatttttttttctctaaaaaaaagacggcctttttaggttggtcgtattcctc

SEQ ID NO: 158802 - DNA, 410 bp, Zea mays
  Clone ID: MRT4577_76403C.1
atgatttattatagttggtttattattgtgcatgacaagataactttgtttaattggaacatggagcttaactcgagaaaacagtgcaaccacaaggactatatggctctggtcttggctgattaattaagaaagctagtgtgagttaatcctttcccgaaaggggcaagcggggtggagaagctgctggtatagggaggttctcgggtcgatctgtctgtgatagctttttggacgagggattcctatatcgtcttcggcccagaaaccgtagcgggttctctcatgctagtggaactttggaaaggcctcgtagtgctaccctacctcgcctcctcggtagaggtgtatggggtccgtacaaccccgtggcagatgggtatcacgacttgtgggtaaagatgtgcaac

SEQ ID NO: 158803 - DNA, 378 bp, Zea mays
  Clone ID: MRT4577_76404C.1
cccaactcacggtcacggcaaacagccgccgcgacgccatcaacggcatcaccccatttccacttggatcccaagttcccaacttcccaagccacctctgcttcagtgcttctcctccgtctcgtcgtcggccatgacacccgccggtggcgccaaccactccccgacgccgcgtagcctggtcttcgccttctacctcaccggccatggcttcggccacgccacccgcgccatcgaggtggtgcggcacctgatagcggccgggcacgaggtgcacgtggcgacggccgtgccggagtttgtcttcaccgccgaggtgcggtctccgcgcctccgtatccgcagggttatcctcgactgcggcgccgtccaggcaga

SEQ ID NO: 158804 - DNA, 541 bp, Zea mays
  Clone ID: MRT4577_76405C.1
ctccacagcgattcgtctcctctgctctttcttatctccgctgtgcctgtgccgggcttttcgggctcttcgtcccctcccacccgcaaccgcacagagaaaggggaggaggctctctacccagcgcagcccgagcacccctcccccccggatcgggacccctgctctgcgcaatccacccatggcgacggattcactgtcatattcaacaaagccagagacgagaagaagggtgggaacggacaagacactgagtcaccttccaaggacaccaggactgagagggtggaatcttatgctgcaaagccaagcacgaagaaatggttttgttgtgtgacagccagccctacgcaatcctgaggaagacaactgcatgcgctttggaaatactgtccctttaattttctatacatactatccataagacaatgtaggggtacccaggcctctccgggctccaggatgggctatctcgtaaaactcttgcgtgcgtgtatgtatggtgtgagagaattcgaaaaaaaaaaaaaaaaaagcggcc

SEQ ID NO: 158805 - DNA, 612 bp, Zea mays
  Clone ID: MRT4577_76406C.1
ccggccgggcttttcaattctccacagcgattcgtctcctctgctcttatctccgctgtgcctgtgcctgacttttcctcctcttcgtccctcccacccgcaaccgcacagagaaaggggaggaggctctctacccagcgcagcccgagcacccctcagccccggatcgggacccctgctctgcgcaatccacccatggcggaggaatcaggccgccccttgccaaagtttggcgattgggatgttaatgatccagcttctgcagacggattcactgtcatattcaacaaagccagagacgagaagaagggtgggaacggccaagacactgagtcaccttccagggacaccaggactgagagggtggaatcttatgctgcaaagccaagcacgaagaaatggttttgttgtgtgacagccagccctacgcaatcctgaggaagacaactgcatgcgttttggaaatactgtccctttaattttctatacatactatccataagacaatgtaggggtacccagggctccaggatgggctatctcgtaaaactcttgcgtgcgtgtatgtatggtgtgagagaattcgcaaaaaaaaaaaaaaaaaaagcggcc

SEQ ID NO: 158806 - DNA, 674 bp, Zea mays
  unsure (1)..(674): unsure at all n locations
  Clone ID: MRT4577_76407C.1
ggcgacctcgggccgggccgggccttttccttttcattctccacagcgattcgtctcctctgctcttatctccgctgtgcctgtgcctgacttttcctcctcttcgtcccctcccacccgcaaccgcacagagaaaggggaggaggctctctctacccagcgcagcccgagcacccctccaccccggatcgggacccctgctctgcgcaatccacccatggcggaggaatcaggccgccccttgccaaagtttggtgattgggatgttaatgatccagcttctgcagacggattcactgtcatattcaacaaagccagagacgagaagaagggtgggaacggacaagacactgagtcaccttccaaggacaccaggactgagagggtggaatcttatgctgcaaagccaagcacgaagaaatggttttgttgtgtgacagccagccctacgcaatcctgaggaagacaactgcatgcgctttggaaatactgtccctttaattttctatacatactatccataagacaatgtaggggtacccaggcctctccgggctccaggatgggctatctcgtaaaactcttgcgtgcgtgtatgtatggtgtgagagaattcgcaaagtggacttttggttgtaaaaaaaaaaaaaaaaaaggggcctaannnngcggcc

SEQ ID NO: 158807 - DNA, 362 bp, Zea mays
  unsure (1)..(362): unsure at all n locations
  Clone ID: MRT4577_76408C.1
gactagcagtctaactagtgatatctgtgataactcgaacaccatggccgatcataggggaaccacctaatcagaatcgaagnaaaactaacgagcagaatgaaaaaaaagtggcactcagactggaggcttttgtctacaatgcttcgtgcgacggctggtgtgtatacatattagtattgtttttttatcagactgtatccatatgttgagatagggtgagcgaaagatatgcataatatgtatcacagctccttgtacactaaacaagccttgttatctgattgatccttgccaactgaccaactcatcagtctttgaagcaccgggtgtatacaccttgttgattgcatcttgcagtt

SEQ ID NO: 158808 - DNA, 415 bp, Zea mays
  Clone ID: MRT4577_76409C.1
gttaagagaacatccaacctacatctatttgtgtcccgagctccacgccccaacaaatgctaccaatcaatcacatatggaaacaaacacatgaatactgattcagataccacacaatcgatgcatacctgttagatggaattgtgattattcacatgatactatgtcgagaaaaaacgtgatgggttataccatataatgactaatacgggaagcgcttattttgctattcaaaagccaaactgaactcgatacataagcgctggatatgagcgctgtatatggtcctcttgatccaaagggcaggctatgcgatcggctgttttatttacccgaggcggatgccagatcacatactgtacatgcacatctagttgtacatgctgatgatggacatgatgcactgcgccttggt

SEQ ID NO: 158809 - DNA, 923 bp, Zea mays
  unsure (1)..(923): unsure at all n locations
  Clone ID: MRT4577_7640C.1
gggtacctcgaggccggccggagccttatgtggtatggttaatttgaagaatccttatgtactgaatctctgcaaaaagctatgttgtggacagaagtgtaacgtgccggatttcttgcatttcttagggctattttgagaaccctattttcttaaaaaaaaaaaaaaaaaaaaaaaaaaaaaaaaaaaaattcaaacgtggtcgaagagaaagatcaaacaatccccaaacgcctccgcctccgcctccctagggttttgctctcggctcgtcggatccagttcgggggatcctccatggcgtcgcgtccgtcgctgaagtcgaagcccaagggcaagggcgggaagaaggccaccgccgacgacgaggacgccaccgcggcggcgaccacggtgcggctcatgaaggagtggaccacgtggacgatgaagaaggcgaaggtggtggcgcactacggcttcatccccctcgtcatcgtcatcggcatgaactccgagcccaagccctccgtgttccagctcctctcccccgtctgatcggatctccccgacagggcccggatgaggtcggtccgtagtagtttgtagctggtacttcatttgcttacatatgtccgagatcgagttgaagaaggtggatcatgctttctgggcgaatttgaaggatttggtttaataattttgtagtggcggatgtcttctatacatcggatcaaaaatgtcttggttatgtgatctgcagtgcttatgattgtatgaactatatccgttttcgtctgcgtgtactgattttgttgcgcgtcttgtgctgattatggttgtggctttgtgatcaaaaaaaaaaaaagggtgtgctgatgttttggnatggggtgtggtcttgttgaatctgacaaaaaaaaaaaaaaaaagcccctagggcc

SEQ ID NO: 158810 - DNA, 758 bp, Zea mays
  Clone ID: MRT4577_76410C.1
acgcctgcaggttccggtccggaattcccgggtcgacccacgcgtccggaggagcgccggcttcccgagcagcgctggccactgcggacttccgaggcactccgggccgtgaaaacctctgcgccgcggccaatctcaggcctccgaggccggccgcagttttccaagctgggctgaaaggagtgtctatcgccgtagcgccggttctcctaatcccgagagacagcccggggatctcgagcttccccggcgacccctagtcccggcctcctgtgcgcgcccgacctagacccctcgggtgtcccaggcgcggacgagccgcggccgggtcctggcgtacaccatgatcgtagcggactccgagtgccattccgagatcaagggctacctgccgttcaccaggggtggtgtggccggccccgagacccgagaggagcatcgggagggccaggctcggcgaggctctcgagggcccagcgctttcattccagtggaagagatccttcgggaaggagctgagagcctggagcagcacctggggctcgaggccctgatgtcctcagggcgggtggacaacctggcggtggtgatgggtctacacccggactaccttagcagcttctggcgcctgcattacctgctgctgcatacggatgggcccctggccagctcctggcgccactacattgccatcatggctgctgcccgtcaccagtgttcttaccttggtgggttcccacatgactgagttcctgcag

SEQ ID NO: 158811 - DNA, 954 bp, Zea mays
  unsure (1)..(954): unsure at all n locations
  Clone ID: MRT4577_76411C.1
gcggcgctcgaggcngncgggaacgtatcgtcgcaagccgagaagaactagcggagaagaagccggcggccgaggagaaggcggagaagacgaccgcaggtatttagcccaagtccgagaagcgcctgcccgcctcgaagttctccggtctggtgggctgtgtgtttatggtgtccccccaggtctctgcacgattgttttttactctccctttttcttcgcttctccttgctgctgctcctctcttccttccctattatccctcttccccccttctccccctttccccccctcttccctctcctctcttcctctttttccctcctcctcccctcccttttctttctttttcgcgttcctgcggtttcctccttctttttctttttcccctcttctctctccttccgctccctcctcctccttcctcctctctctttcctttttttttttcttcccccttctcccttttttctctcttttctccccccttctcttcttcttctcttcttctctcctctctcctttttctccctgttcccttttttcttcttttcctccttttttttcctcctcttcttctttcctctcttctttttcttttctctcttttttccccttttctctttcgttcctccctccttcctcttttcctcttccctttccgcctgtattttctcccgttctcctctttccttcctttctttcactctctcccttccccatttctttttttttcgctcttttcccttttcctctcttctttccctccctttttcccttccctttttttctttctcttttttttttcctttttctccttcttcccctctcctttctccttttccttcttccttttccttccaccctttttctcccctttttcccccctttccccccctttcttctccccccctttctctttctttctctcctttttcctctttttttctcctt

SEQ ID NO: 158812 - DNA, 562 bp, Zea mays
  unsure (1)..(562): unsure at all n locations
  Clone ID: MRT4577_76412C.1
ccgggtcgnacccacgccgtttcttagaaagtccggtgccaccccctgaaaggaaaggtgtcaatcaaggattcaacgatcattgctatagtagagcactggacggtacgttgtccgcacaaacagtacaattttctcagcagtttctaaatggaaggtgcaatggctagggctcttttgaggttataaaaggatcccctaggcgcccataatcagtgtaccaaggctcccaagtgcaccaatactttgcaaaccattctcatctcactctctggtgtatttctctctagtttgtgtgttggcgctgttataagccaagagagagtagagatgtcctgttgcaagtatgagtgggcaagatcttgagcaagcgaaggtgttactgttcgggagtatcgtcgaaaagattgtaaacaactgcgacatcattgtaaccaaccccgacatagtggaaggctttgtctgtcgcattgatagatctgagcaaacggaggacaaagtaagatactccaaggcaaggtgtggcaaagtccaacgtggattaggcaaacatttcaggctc

SEQ ID NO: 158813 - DNA, 892 bp, Zea mays
  Clone ID: MRT4577_76413C.1
gaattaaagaaaaatgaataggatcaaagatacttgtagtggtagtaggtgttctttctgtctcggtcgctgcatgcgactggctaataacaaaggaagatgacagcgctgaagacagctctcaaagaagcccaggtattccgctaaactgatgtgtgctgtcttgcgccgggacgcatacatgagtacgtacgcatgacctctgccacggttgatcgataatgacgcgacatccgatcagaaacatctagactgctgcacggttgttcagctgcctgcctctgatgcatcgcaatggatgcgaaaacgacggtaacggctgcgcggaccgtgcgtgcatgggaaaagggcgggaaggagacgacgacgcggagaggccgcgtttctgcctcttctttcctgcgttgcggttgcggcctgcccagcgcgctgcgcaatcgccgccctcctcccctcgcccaacggcaacgaatctgcctgccttcctgcagcctcaccggctcatcacttcgtcagccatcttcacagcccgcctggcgccccccagcatcagattcccctgctaaaccctcctgttgcggtttctatctggtccagataatcactcccttccctccaattatttttccactgctcgaaggcccggggcgcccaccggagccaatcagttccgttcacctttccaccggaatccaccccaccgccaccggtggatgatttgatggagttgccgttttgcggaccgtggtaactactctctcccaccaccaacaatcaagagtccgctctcctccaacctcctgccaacagcacgcctgcctctctctctctctgtgtgtgtgtgtgtgtgtgtgtgtgtgtgtgtcaccgagggtccgaggcggtcctactc

SEQ ID NO: 158814 - DNA, 415 bp, Zea mays
  Clone ID: MRT4577_76414C.1
ctctccccccctggtttgtttttttttagggtcgtttgctcaccaagggaaaacaaaaaatatttttgggtggatggggccttaactcattactcctatgtcctatctgacaaaacattacacgggctgacgagctttcaggacccaaaaaaaacagttgggcttaactttacaacagaacacccacgggtccatttttccttttttttccccccttttttttttgggggggttaatacagcccacttttgttttctacccaggcaacattttcttttttgatcaagaatgcccccaaaaggagggaaaaatctaagtttgtcagcatctttaaaaattcctaatgacagattctagggggctttaggaaacaatcctaaagctcaccttcatgtttgtggcagtttcctaaacc

SEQ ID NO: 158815 - DNA, 258 bp, Zea mays
  Clone ID: MRT4577_76415C.1
ttttttttttttttttttttgtacgaatatatttttgtctaagaagatggacattgttaacacttttcagacttgagaaccaatattgcctccccagtctacctattaaaactacatttttagttgcatcaccacattttttccatccaagtctgtaacatatcttttacaagacaattcttgcaccacggactctggtccctcatccagccatgttgaccagaaatctcaatcttcagatctcttgctgggtttcca

SEQ ID NO: 158816 - DNA, 257 bp, Zea mays
  Clone ID: MRT4577_76416C.1
agacattagctgctggacacggaacttatttataccataccctatataatatacaaaggggttacatgatcaccccatgtgaccttccggcacatgtaacattcccttcaagtgtgggatcaaatacaccagcaacactgcggaccgaccaagatcggtattaatggatggcagcattgtctctttacaacaggatatcggacgctattacttcacaagaggacatgacctcatggcatcagaagggttaacatctg

SEQ ID NO: 158817 - DNA, 257 bp, Zea mays
  Clone ID: MRT4577_76417C.1
gggaattaatggcgtcgtcgtctagcagcattcaccgccgcctcatcctctcaggcgccgggctgctctccgtgcgtggcgggtgccaacgccagcgccgggacctcctgcgtgccggggtgggccatcccgcacaacccgctcccgagctggcgctggtaccggaccatcccgacctgcggcatcgggccgtcccttccgtggtccgagcttgaataggagatgcctgccgggaagcttggcggacaatccccggc

SEQ ID NO: 158818 - DNA, 291 bp, Zea mays
  Clone ID: MRT4577_76418C.1
tgcgacaacctccacggaggagatggaaccgcaagaggtgatattagctcgcccagctggggtagcggcggaaggagggagagacaacacccgatggcggcgtccgcgaggcccggggagagggcgacaagcatctccgtcgcgtgcagccccctcaaacggtttgtccgcgagaacagaggaacggctagccaaactaggcctcaggatcaaaaagcaaagaccgagcaagcagaggaagccgggcgaacaactcaacttgtctcccccgcacccggaggggcgagggag

SEQ ID NO: 158819 - DNA, 529 bp, Zea mays
  Clone ID: MRT4577_76419C.1
aaaaagctaaagcgaactttattttgggacagtgaaaggaacatcatctcataaatggacgttacaaggaccataaaaacgtgtctgaatccatgcaaagaacaatcagagcggcacttgcagtcgtggtaagcaagctcagccataaactagtacttcctccgtttctttttagttgtcgctggataaacgaaacggagggagtagaacacgttgagcagctacacctgccaacacaatcatgatacccacgtagaaaaggtcgtcttttgtgcacactcagcaactttaccgaacagcttaaagtccccgcttgatctcgatgttgtcttcagcatgttgtttaaagcgaaaagatccacacaccaagtactgttcagatgatatggatgttcttaaagaatgacgtgtccctgatgctacacgtagcctagaaatagaatgtagccattcgccaagacaaaagaccgggaaataaaaagaacagcttgtagaagatgagcaggggatatttgacaacacctgaata

SEQ ID NO: 158820 - DNA, 352 bp, Zea mays
  Clone ID: MRT4577_7641C.1
tcgtaggtcgtcacaagtctctagagtgagtcgtactagcaccccaaccatggcagatgccgccgaagcgtctcctcttcctcacaccgttggcctaggagaacgtctacggtgacgatcctcgcctagtgttatcgcagcctcgacaagggcgatcaccacactgatcggagcctaacaatacgtagtatttcgttgcatttttagaagcgcaattgacatgatatctatgtgttggatgtacaaacacgactatccgacgtaagtggtcccaggatttttagacttctacatttaatagacgaatttacggatgatttaactcgttgctatcttgagataaggactacat

SEQ ID NO: 158821 - DNA, 191 bp, Zea mays
  Clone ID: MRT4577_76420C.1
tctttcacggggggcagctccgccttgaccggggggacatcgggcgccatcgcagcctacgagctgttcatgaacgccatcacggtgctgtaggagatgctggatgccgtccgcctacaggacgacgacggcgaccttagcgagctcggctcccaccttggtgggccttaggagctatgagcatgaaggaa

SEQ ID NO: 158822 - DNA, 664 bp, Zea mays
  unsure (1)..(664): unsure at all n locations
  Clone ID: MRT4577_76421C.1
ttttttttttttttttttttttttttttttcagagaagcaacaaacagccttccattgcatcccttcagctttcaacacaataatacaaacttcccactctcccaagtctgaaccacccccctctccctctcctttcttccccatcgggcaaccatatatgcatccgagagaagaaaaaaaaaacacaaaagagaaggctctcaaggggaactagaacagaatctcccgacggccggggctcaaaccagctcatcctcggcgatatctcgaggattcctcaccagctcgagcatgctcacgacctcacccatgccaggccggttcgacggcacctgagaggggcacacaaggcccagcttgatgaccggcagggcctcgtccatggggaactcgccgggcagccgagggtcgacgcagtcctctggcctgccttcctccagcgcgcctctgaccaggtcacacaggacaaccacgtcgtcttccaagtactccacgggcctcctgcccgtcaaggcctccagcaaaagcaccccgaagccatagacgtcgcatttctcggggatcttcaccgtcttgcacgcaaactctggcgccatgtacccgagcgcgctctggaccttactgctcaggacgtaccggnccagcatcggcagcagcttggcg

SEQ ID NO: 158823 - DNA, 566 bp, Zea mays
  Clone ID: MRT4577_76422C.1
gtgcggcgctcaggcggcggttcgatctttttaattattccaatgtgtcgtgttagaaccaagactgtcaagaaggcttctcgtgttgtcattgaaaagtactaccctcgtctcactctcgacttccaagtcaacaagaagatccttgacgaagtcaccatcattcaatccaagcgtcttcgtaacaagattgctggtttcaccacccacttgatgaagcgtatctctcgtggtcccgtccgcggtatctccttcaagttgcaagaagaagaacgtgaacgtcgtgacaactacgttcccgaattctctgctttggacacttctgctatcgaagttgaccctgagactaaggaactcttgaaggctatcaactttgaaaaccttcctggtgttcaagtcactaaccccattgctgctcaagctgatgtccgtcgtggtcgtcgtgacaaccgtggtcctcgtcctccccgtgctcaagctgaagcctctgcttaagtaatttttctttataaaaaattaaaatcttttaagttgtaaacgaaaaaaaaaaaaaaaaaaggccccta

SEQ ID NO: 158824 - DNA, 294 bp, Zea mays
  Clone ID: MRT4577_76423C.1
atggaggacggccgtgcgctggagggtggactccggtggaggcctggagcagaggcgggcaccacacactggaggggctcgagcagaggcctctgcagcagccacgtgctggagcagagggggtgcaacccgagcagagggtcgccggagcagagggggcacagtcgcgcgttggagaagggctacagagggtgcgcagccacgggctggagaagggacgatggctactgtggtacagcgcctcaacgaacttcaccacccacaggcgataaatcaacatcaagctggagatga

SEQ ID NO: 158825 - DNA, 1059 bp, Zea mays
  Clone ID: MRT4577_76424C.1
atggaggacggccgtgcgctggagggtggactccggtggaggcctggagcagaggcgggcaccacacactggaggggctcgagcagaggcctctgcagcagccacgtgctggagcagagggggtgcaacccgagcagagggtcgccggagcagagggggcacagtcgcgcgttggagaagggctacagagggtgcgcagccacgggctggagaagggacgatggctactgtggtacaggtaggggcgtagggcaacacagcagggatctaggcagccagcgacacaacacgcatgccaccgccttcccgctcgacttcctgctcacccagccatctgcccatcctgcccgcgaggagatccaatgccagcagcattctcaagcaggctgcggctgtgatgacacacatcacctgcaaggcacacaccacaaatttgtggacgcctcatgcatgcagcgcctcaacgaacttcaccacccacaggcgataaatcaacatcaagctggagatgagttagcgctcgtgactgtccctattggattgtgccttccacccactgatggctccgagatatctgcggcttgtttgaactctgtagactctggagatatcagtagcaatggcaagttatcacttggtcttcatcaatctcagtcatctgcacaacagccagctacaccgtcacagacaaaaacacttgacagtattgattgtcgtgcaaatcctgagggttcatctataagggctgcagccattgcagccggtgcacgcattggatcaccatctgatgcagctacaatcataaaagcggctcagtcaaaaggcgccatctacattaggcctggggaaataatcccgaattacctgaaaccactagcaccaaaaccactttcctcgctaccaccgatgaacccagggcagctcagacgatttggtgattctgctgccgcgaaggatgcaatcttcggttcttcggatggcacggacgatgacgacgaggaagacactgatgacgaggaggacgacgagctgactgacaacgatgcagaacatgaataa

SEQ ID NO: 158826 - DNA, 312 bp, Zea mays
  Clone ID: MRT4577_76425C.1
attcggctcgagcgccaccaggggcagagcctttcgtcatctcttctacggcgaagaacccgcagtcgtccaccagatcacttggtaaactgtgttgaggggcgacggcggcttctttgtgaagcctgcgctccgaggcacggcttacaaggctcggtgagatccttgtcactcgaaggtacatcacttggctaccagagcttccaaggatgacattggcgtggctacaccttcgttttcgatctgctagcctcagtccaaagtctttcaactgttacataggtcggtttaatcacatctgcctgcacttcg

SEQ ID NO: 158827 - DNA, 622 bp, Zea mays
  Clone ID: MRT4577_76426C.1
actgcagaaacaccacacgatctgaaaaaaccgacagaaatgtcgtcggagaagcaggagacggcggcggtgcgcgtgctgggcaggtggccgagcccgttcgtgatccgggtgctgatagctcttgggctcaagggcgtggaccacgagctcgtggaggaggcggcgggcaacaagagcgagctgctgctcgcctccaaccctgtgcacaagaagatccccgtgctcctgcaccacggcaggcccgtctccgagtccctcatcatcgtccagtacgtcgacgaggcctgggcctcccaagccccggcgctcatcccgtccgacccctacgcccgcgcggccgagcggttctgggcccagtacgtcgacgacaaggtaaaaagacaaggcaatccagttccgatttttgctttgatcctctcagttctctcagaaacaaaatgatggtatgagattatgcaaggcgttctgaaggcggctagtgctaattccaagtgagcgaactgttgtgggcactagacagcgctcgatggcatagcaagaataagtaacctggctggctgttggtgtaaaccctcttttattatatggcaattgataaatctcgaatgtttggattttg

SEQ ID NO: 158828 - DNA, 993 bp, Zea mays
  Clone ID: MRT4577_76427C.1
tgggaaacaggtttaaaatcttcgattgtggctatttttattatccttttatccaaagctgagggtttctaagcaagttgactatcttcttaaacaagcaacaagcattgacaacttatgcaatatgtacgagggatggacaccttggatatgattcaaagatgtgactttccttcattgtgcatggacaaatagtccagctgcacaaaaaaacgaaggaaccgtagcacgaccaacacatgatatggctgctatggatgctagtgaaacaggagggtttgaattcgatccagcccctcaaatgctggcaaagaagaggctccatggtacgcatgaatgttgaatggctatggattggtccaagtgaattagccaaataacaatcgagcatacacgtgcagcccatggcctggtcatatacaatatcttttctgccgaaccccatatattccgaatatcaacaatgtggaacgctaagctagtgtactgtttttgtaatcgggcttgcacatggtatgcgtcaaatgtgcaattgaacgacccagcatttgcaatttgatggggacacggtacacggcccctctggattaagagttgaagaccttgtagcgacggttgacctggccaaagaggcagagaacattgaagaaaagatgagaaggcaagttactttaggctgacccttgattgttggtctattttggacccctcttcttaagataatgatgtgcagaaaaaaaaaactatcctcttttctccataggaaccttatcaactgatgtagactttatctggttcaaatataatgtacatgctgtacctatggttttggtagttcccttttgtaacatataaaggtagacccactgccagtcttccacctttgtggggtgtagtggagtaaactgaggcaggagaggctattttgaacccatgacttggttgactgagacggcgttcatcgtacatagatgttggaaatacaatttttgg

SEQ ID NO: 158829 - DNA, 460 bp, Zea mays
  Clone ID: MRT4577_76428C.1
cattgggtccctcgaggccggccgggattcattcggccgggtccgcgcgcaagggggagcgagcgagccacgtacgaagtagtacgtgctgccgccaagctagtgccaatggcgagggcggtggcgatgctcgtggccctggccctggcgctgatcgtggcggtggcgagcgcgggcggcgcggcggtgctgctccaacctgcgcgcgcaggagccgtgcttctgccagtacgcgcgcaacccggcgtacagcagctacatcaacagccccaacgcccgccgcacgctcacctcctgcggcatcgccgtcccgagctgctagggcgctagctcgtgcctcgtggtgtgggtgaataaaaagatgcatgtcgatctctgcttactgttatcgtatctgtagtacctcgtgtgatatgaacaatatgtattatttaccaaaaaaaaaaaaaaaaaagcggcc

SEQ ID NO: 158830 - DNA, 355 bp, Zea mays
  Clone ID: MRT4577_76429C.1
agaatgcgtcagagagtgttggtgcaacgcaaaaaggtaacagaccattatcagtgaaggttccatctcgagtagcttctccaagaagacgacttgcatccgatggcattgatactatatctaaaagcatggattttgctgagaaagataagaaacccatgacagtgtcagttccatcacgtggaatgtcaccaagaagaacagcaagatctgacagtgctgatataatgtcaaaaagtatggattttcctttacaagtgttttctacaagaagagtactaggacctgatggtgctaatgccatgtcaagaagcatggatctaactgataaaattagacagaaaatatcttcaac

SEQ ID NO: 158831 - DNA, 310 bp, Zea mays
  Clone ID: MRT4577_7642C.1
ttccgggcaaaccacgcggtcaaagaaccaagaaagcagggtgtgggcgaagagaccccagccagtcgatcgttcaagaacattaccagcttaccaacatcagcagcatcagtctcacccgttcgatgacatggtccgcctcggcgccggcgccgtgttggcgctcctagtggcggtcgctgcggtggccgcgttcctcgcggtgccggcctcgtgcgacgtccggggagctgaacgcgatggggttgctggctgagaagggcggcagcatggcgggcccgcagaagtgctcgggctctgtgggcgagtg

SEQ ID NO: 158832 - DNA, 946 bp, Zea mays
  Clone ID: MRT4577_76430C.1
ctcgaggccggccggggaccgactctcggcaacgaatatctcggctctcgcatcgatgaagaacgtagcaaaatgcgatacctggtgtgaattgcagaatcccgcgaaccatcgagtttttgaacgcaagttgcgcccgaagccttctggcgattggggccctccgggccggccgggattcaatcccggccgggtccgcgcgcaaggggcagcgagcgagccacgtacgaagtagtacgtgctgccgccaagctagtgccaatggcgagggcggtggcgatgctcgtggccctggccctggcgctgatcgtggcggtggcgagcgcgggcggcgcggcggcgcagcagtgcagcgcggcgcagctggcggcgtgcgccccggcgatcatcagcgggtcgccgcccacggcgtcgtgctgctccaacctgcgcgcgcaggagccgtgcttctgccagtacgcgcgcaacccggcgtacagcagctacatcaacagccccaacgcccgccgcacgctcacctcctgcggcatcgccgtcccgagctgctagggcgctagctcgtgcctcgtggtgtgggtgaataaaaagatgcatgtcgatctctgcttactgttatcgtatctgtagtacctcgtgtgatatgaacaatatgtattatttaccaagagcggttgtgtcatgacattcgtgccagacgacagtgatggcgtcgtagcccccagccgctagactgggtgggcatcgagaaccaaacggttaacgatggcggtatatctcaaattattgtcttatttagttaggtctgatttgcgtctatgagtaagtgaaagaccacgtaaacactttgcactatagaattcattagaattctttatcaaaattcaaaatatattttatggtcgcaaaaaaaaaaaacagaaaaaagcggcggccctcgagctccagc

SEQ ID NO: 158833 - DNA, 278 bp, Zea mays
  Clone ID: MRT4577_76431C.1
cagtaattcctgtgtcgacgagctgatcagtcggcggccgcccttcttttactggtggttttttttaaaaatttattggattcaacatcaaggaccgcaaagggttcacccttattcattccatctataccactaggttgagctttaattggccccgacttatactacttatacagggcttctgactctgaggactaatgcaaataggtggacttaatccaaagccaacaggatatatctttgcagtctctgtaaccaaagcccctctggagaaaggt

SEQ ID NO: 158834 - DNA, 270 bp, Zea mays
  Clone ID: MRT4577_76432C.1
gggcgggcggccttttttttttttttttttttttttttttttaaaaattcttcttcttttttcacataaaattcgagtcgggatccttaacaaccagggggggggaaaaaaaaaattacaaacaaacagtttttacgctcaacacggctattggcagagcaccaccaaaattagtaataagaattgtccgccgctaaacacccatacaaaatttggcttggctcccgacacttcacgttaccaccaccatcgtccatttacaaccatcta

SEQ ID NO: 158835 - DNA, 588 bp, Zea mays
  Clone ID: MRT4577_76433C.1
ccggccggggtttactggcaccataccccctacgctgggtcttctctcgaacctcttctggctggatctggcagacaatcagctcactggatctatcccggtctccacagcaacaacgccggggctcgaccaacttacccacacgaagcacttccacttcaacaagaaccagctgtctggaacactcacaggcctcttcaactccaacatgagcctgatccacatactgttcgacagcaatcaactgactggcccgataccagaggagctagggggcatttcatcgctccaagttctccgactagataggaacatccttaagggaacggttcctcctaacatcagcaacttggtcaatctgaacgagctgaatttggctagcaaccagctcactggaccgttgccagatctaagcagcatgaccaaattgaatgtcgtggatttaagcaacaactccttcgccgtttcagcagccccaaactggttcacgactttaacatctctaacctgcgtatcaatatctaatggacatctttctggcgctgtccctaaggggtctcttcaggttgccccacctgcaacaagttg

SEQ ID NO: 158836 - DNA, 1867 bp, Zea mays
  Clone ID: MRT4577_76434C.1
gtgcgtcctctcctcaacctcaacccccaccccgccctacctacaaccctattaaattccgccttccgacccgtagacctgattgatccccgcatcgaatccggcggatcgggagcgggagagaccactcccaaatcgcgtcgcgtcgcgtcgagagcgagagcggaagaggtgcgcgcgggggaaccgagccgactgatggagccgacggcggcgcccgccgcctgcgagatcgcgcgcctgccggatgacctcctgtcggcggcgctcggccggacggggccgctggacgcctgccgcgccgccgcggtctcgccggcctttcgcgccgcggccgacgccgacgccgtctggtccagcttcctgccgcccgacctgcccccgctcgccgatggggagctccccgccgacgcgacggccaccaagaagcagctcttcatgcgcctctccgaccccgccagacccgtcctcctcgccgacggcctcacgagcatgtggctggacagggccaccgtcgccaagtgctacatgctgtccgccaggaagctgaccatcatatggggtgatacgccgcagtactggcactggatccccctcaccgactccaggttctcagaatgcgcagaactccagcacgtttgctggctggaaatccgcggcaagataccctgcgacatgctgtcccggaacaccacttacgccgcctacatggtgttcaagatgtccgacgaatcctatgggctggactatccgctccaggaggctgaagttagcatcggggcaaccaggtccactcgtcaggtctgcctagggtacgtcgacgacgacgaggacggggaagaggtgcctcagaactaccggtcgttcggggcggtgggaaatgtatttagaccaaggatcgggaggcggaaccgtcgccagcctcctggagtgcacgtcctgcaccctcagacaagagccggcggctggatggagatggagatgggtgagttcaggaacgaggaaggtgaagatggcgaggtgtccgtcagcctcatggagaccaggggcggcaactggaagagaggtcttactgtgcagggcattgagatcagggtcaagaagtaaggatgtgaaggttgtggggatcgggctttgcgcatcaaaacaaataaaaggatcttagttagatttgtagtgcgtgttctactgcactgcagcacttgcgtatgtgtgtgtcttgcctatgcccagcaaaaaaaaaaaacaaaaagttcttcttgaggcaaaagaactgcagttttgtacacaatattgttgtgtcccagatcactcggtgctcgatgactggccatgtttgcttttgaaagtgtaaactaggtgtgcttgttacgatcacacaaatcaccaatggagaacaccaattctcgctacgccaaccgctccagttcagcgctcaccgtcagtttagcctaaggttccagcctggctcgttgtatggacgatgccagagtttaccaggttattacaactgatgggccatgggccggataatgtgtacatcacatcactagaatggacgaccaaggaggcagtcgagcggggttgggacagggccacaggggcgtgggcgtccatagccaagacggcgacggaggagaaggcgctccccacagacacggtatgatctaaaaggagttcactcaaaaatgttctgatgctcttcgtaacctttcttttacattgtttcttcgtgtgatctttgtgtgtggtttggtttcgttttatatcttggactcttgcacgttgttgccatctccaatgggtattctagtgtatttcttgacgtgttcgttatcttgagcaccagaaaaaaaaaaaaaaaaaa

SEQ ID NO: 158837 - DNA, 355 bp, Zea mays
  Clone ID: MRT4577_76435C.1
tcttgctcttcgcaacttgctctatctctcactctccacgggacttcatgtacactttcctaactccagtgtccaacgtcatcatatacacagatgtactcataaccttgctgctcatcactccactattcaagtacaccccgaactctatcctgtactctatcatcatctctgccgatataagcctcatccactactagacggcgatcctcatctggaaagtcgacaatatagactttatctcctgcatgttggcctccttttacgttattttcaactctatcgatataggcctcttgaatactccgtcaatcttgtttcccaaaatactttttcaaataacaaaaaccattac

SEQ ID NO: 158838 - DNA, 376 bp, Zea mays
  Clone ID: MRT4577_76436C.1
cagcctagcaattagctcatcgactccagattggagaactcgacaccatgatggtgctagtcgttgcccttgctctcctggcgctcgatgcgagcgccgcctacagtacaagcggcggctgtggctgccagacaccaccgttggatctaccgactccgatctatatagccgactccgttctatctgccgccacagcagcagccgcagccatggcaataccccactcaaccaccgaaggtaagcccgtgccagcaggccaggatcctgcggcgccagcagcagacagcaagcccgttcctgggccaagtgcgtcgagctcctgaggcaccataacagcccgggagagacgccctacggctcgccacattgccaggcg

SEQ ID NO: 158839 - DNA, 2185 bp, Zea mays
  Clone ID: MRT4577_76437C.1
ctctcctctctcatcaggagtatattgggcgggatccgagacggccgtgccgcttgcattgctcgatcgaggagggaaaaaaaacaaaagggaagcaggcaggtcgtcgagaggggaggaattcgcaaaccatgctttcagcctccgatccttcctcgagtgcttgctgtctggcggaacttcaactgaaacagctgacctgactactagtgaagcaaataaccaggagagctctgtccaggacggtttagacaccacttgtgctaaggaaaacaagggaaacgacggtgtcgataatgctgctgagaactcgactcaaatttcagaatcctctgatggtggccaactatcactgcaggacaacaagatgggtgattctgatgctgcagatgcgaatagatcatcagcatcttcgacgatcgtgtctgaaggcaaggaaagcatactcaaacacgactgtgacagcgtccaggctccaaagctgggtgcttcagctgctaacggtccatcgtccaagagcaaaagaagttaccgagtcaacattcttcgctgcgagagcttagcttctctggccccatcgacgctagagagactccttgctagggactacgacatcgtagtgtccatgatccctctcccatcttcctcagtcctgccctgcccatctggtctagtgcattttggtccgccttcctactcttccatgacaccttggatgaaactggcgctgtacacatcagggacctgtggcccggtatctgccgttttcatgaaggggcagcggctgaggttgctgcctgaaccattggccagctgcgagaaggcgctgatatggtcctgggatcagtctgtggtgggcggactaggcggcaagttcgaagggaacttggtgaaaggaagccttcttctgcactacctgaactcgatgacaaagcattctgctgtggtggtgcagccattaagcgaacacgatcttgacgagacagggagcatcgtcaccatagacgtcccgctgccgctgaaaaatgccgatgggtcgattccatccacggtagtcggcaccgacttgccggaggaccaggtctcgactcggacgcgtgggttagaggacctgtccaatagagtcgagctgagcacggttgggtaccttcggctgctaaggcttcacagggcgaatgagtcgtccgaacacggaagctttgagtgggtgcctctgaccatagagttcggcatccctttgtttagcccacagctctgcgagaggatctgcgagagggtcgtcgagtcacagatgcttcagaaagacgacatcgctgagcactacgagacgatgcagaacgtgaggaggaggctgagagagctgtgcaccgagtaccaagcgaccggcccaacggcgaggctgttcaatcagcggggaggctccaagaacacctccccgcgcaaactggtgcagattgtcagcggcagatggagcccgttccatgatccgtctacgcccactcactccagtagcccccccgctgaacacgaaagagccaaaccagcgagacggcagagatgcttcaccgaagttctgagctttgatgggaggatcctcaggtcatatgcgcttactcctgtgtatgaggctgctacaagatcggtctccgaagagcagcctaccacgcccgcagcgaaaccggatcacgaggacgccaacaccaaggacgtggccttgccaggagtcaatctgatattcgatggaactgagttgcacccgtttgacatcgttgcctgcctccaagctcgccagcctctctcgttgatcgccgaggcgtcggccacatctttggcaatgaaatgacgacgagctgtccagtacgtactagtaaatttttcggtaggtgacggagtttagtagtgtatgccattgcattccttcttgctgctgtatgcagaattgcattcttcaagggggagcttctcaaagcaggcatttttctttaaaaaagaagcttgctgcaaggacctgttttgcactagcgttaggttttattgttattattatacctagagaaattttcgcacatttatcccctatcgtgttggggtccaggactcatgtaagcgtcagtcctaggtctaaattttatggccatcaaagggtcttttgttttggttgatgtttaaaagtcactttttagtc

SEQ ID NO: 158840 - DNA, 146 bp, Zea mays
  Clone ID: MRT4577_76438C.1
tttttgtttaagaaaaaaaaaaaatatcctcgcgatcgattgctttacgagccacattcctccccctatatgtatggattggattgtcaaatatgatgagggaaattggacagccggagtggcttacacttacaagaggttttttt

SEQ ID NO: 158841 - DNA, 256 bp, Zea mays
  Clone ID: MRT4577_76439C.1
cctacatgactcagagcgcgcagcttattttttgaggaaagatgccagtcaacaaggagcttcaaaacatcaaggaggttgtggacattaacctatcaagctagatcaatatcttataagttaaccatgtaaacacgaagtgcactgaccgtcttttgcaggatattatcatatctatcaaggcgagagaatcaatttgattactatgctcaaaaaatactatatattaatacccaaaacttattttgccgctcct

SEQ ID NO: 158842 - DNA, 1600 bp, Zea mays
  Clone ID: MRT4577_7643C.1
cgtagctctcgataaacgaagccccacagggttagctccgtatacgacgcacaattcaaataaaaatattgacaaagaaaagaatgagagaaacggctggatcgcggctactgcctactcgaagttcggaggtggtacgagaagacgacatggatgtacatttcggtcccgctgctgctctacgtcggtgaaaggatgcttagagccttgaggtcaaatgcttataccgtgaaaattctcaaggtgtgtcttctacctggaaatgtgttgaccataacgatgtcaaagccctatggatttcgttacagaagtggacagtacatatttcttcaatgtccaataatttctccatttgaatggcatcctttctccatcacttcagcacctggagatgactacctcagtgtccacatccggacaaacggtgactggacacaggagctcaagcgcatatttgtggagaactacttctcgccgcatctcaacagaagagcttcgtttagcgagctaggtgcggcagaaccaagaagcttgccaaaattactcgtagatggtccctatggtgcccctgcgcaggattttagaaactacgacgttctacttctcgtcggcctcggaatcggggcaacaccgttcataagcattctacgggatctgcttaataacattaagatagctgacgagctgatggacttggcaatggagaccagcaggtctgaagacagcgccaacagctttagcgtctcaacggcgagtagcaaccggaagagagcatacagaacaagccgtgcacatttctactgggtcacccgagaagccggatcctttgaatggttcaaaggggtgatgaatgaggttgcagaaatggacaagaagggtgtcatagagctgcacaattacctcactagcgtttacgaggaacgcgacgcacggacaactctgctgtccatggtccaggctctgaaccacgccaagcacggcgtcgatatcgtatcggggaccagggtgaggacgcatttcgccagacccaactggaaggaagtcttcaccaggatcgcctccaagcatccgaattcaacagttggtgtgttctactgcggcgcaccgacgcttgccaaggagctgaaggctctggcgcacgagatgagccacaggacgggcactcgcttccatttccacaaggagtacttctgagtttcgacagatagaatgggcagtcgatgctcgttctaacgtgatctggtcttttctgatctgatctcgatagcgttaggtaccggtaaagaagacagaattttgcacagatgcaagacaaaccaagctgacctctcctcctgatctggaactgtacatagcataaaagaagcaccacagggttagcttagtatacgtagcacaattcaaataaatatattgacaaagaaaagagagacagagaaagggcaggatagaggctgttgttgttaactcgaagatattgatgataggcatggcggtatacgtgtatacagtatagttaggtgctaggtggtagttatatatatatgatatgatatgggtcgatgaatatacgaggagccacatgctgctgccattctcc

SEQ ID NO: 158843 - DNA, 383 bp, Zea mays
  Clone ID: MRT4577_76440C.1
acttaaacacaacaacagtttttgaccttagaaaacgctgcccgccaccatgggatgcacccacgttggccggggggagggccccttcccaaaaaaagaaaggggaacgccccacacgcccgcacacattcgggtgggtcaattcaaccaaaaatcaacaaccaaaaacgatcggcgggccgatctggacatacacgtggccaggttttattttttttaacggttttcctcccctccgaacccttctttttttcttggggggttttacttgaagttgaagggcaagggcttgccccccccctccttgggggactcgagcatggggtccacgagcttgccctgggtgatgcccacaaaaaccttgttggcctccttggcggggg

SEQ ID NO: 158844 - DNA, 641 bp, Zea mays
  Clone ID: MRT4577_76441C.1
tgggaccctcgaggccggccgggattccgtccgccacagaaaacctaatttgttggacgatggccgacgtcgtctcgtccctcgccagcggtggctcctccctagacgacgaggacgacccctgcggatcaagcatgccaccgatggctcgtcctctacgaattgatggcatgggcaccttctcccttctagccaacggcgagggcgcgtcctccctgcgaggcaatggcatggacgcctcttccctgcgagcagatgttgatggcaccatctccatgcgagcagatgttgagggcgcctcctcactgcgaggcagtggcgtggacgcgtcctccctgcaagcagacgtcgagggtgcctccgccctgggctgcgacgaccaggacgcctcctccctacgtggcctatgcatcgatagttcttctatgcagcttgtctcagtcatccctaggtaaatttattcataaattttctacagttaacaacacatacatattgtcaccgttttctacggttaacaacactattgatgctattttgttgaattgtagtgctcaaatgttgttagaattttgcgtaaacattgctctaattttttttgtggtgatgtataacggaaaaaaaaaaaaaaaaaagcggcc

SEQ ID NO: 158845 - DNA, 740 bp, Zea mays
  Clone ID: MRT4577_76442C.1
aaaaagatgtgctctcatattgccatcctcctgttagcactgaaagatatttctggtttagtgttggaattgatgcttctgttgttcatacagatttgaatgtacctgtctatgactggagaatttctttcaattcaattcttagacttgaaaataaacttccctatgaagctgagtatgctatatgggagatttccactaaaagtaatatggttgaaaagcagcatggtattgtcccttcgggtggaagtgtatttatctattcagcagatatacggaaaccaatttatcttacattgtttctccaaaacggttggattctagaaaaggatgctgtattgataatggacttgttgtccttggaacatgtttcttcgttctggatggttcagaagcagagccagaggagactacgagttagtgttgagcatgacctaggtgctagtgatgctgcaccaaagacactgagattgtttgtcccttactggataaaaaaccactcgtcaattccattatgttatcgcatagtagaaggggaatccacagaaagcacagaagcagactcacttagcagaccagactcgctaagtagagtgtctaagtcttcaaaattttcccttaaatattcttcaaagtctcttgtcagaagaggaacaatgtcgcacagaaatatgcaagtactggaagatattgaagattgtagcacagactatgtgatgctatcaccacaagattacttg

SEQ ID NO: 158846 - DNA, 603 bp, Zea mays
  unsure (1)..(603): unsure at all n locations
  Clone ID: MRT4577_76443C.1
aatgaactagctaattattataagctaaaaaatatagcggtatgactgtgtgtggtataagtcatccacgacagttaacatgcgtgtcatggtatggtctgagtatgagatgatgaaaatgcctgatgccgtctcttggtgctgtagacctcccctgccccctctgcagattatggcggcgaccactgcgcctcgttgcgctgtgtgtatgcagaacaatagcatgatactcatgagccctgctgcgctgagtacaacatcacagtctaaaatagaatcatatctataccccacctattctgtgcatcatcagcgaagaacgagaggctgcgggagagggccaaaaaactccgcctcgagaacctcgttctgctccattacctgagcaatacttcccccgttgcagaaataatagccatagctgcgtcatattgctacctcttactgagtcctgattctgcactacataccttaccttgccattccctcaaaggctcgttgtgctcatatgagtggacataactcacatactcctangtatctatctgtgttggctgctccaccatgtaaacctgtctgctgcactgctcatacatgaacagg

SEQ ID NO: 158847 - DNA, 239 bp, Zea mays
  Clone ID: MRT4577_76444C.1
ggccaggccaagcaggaggtggaacataagaagaagaagctggaggcgcaggtgcaggagctgcagtccaagtgcagcgatggggagcgggcacgggcggactcaatgacaaagtccacaagctgcagaatgaagttgagagcgtcacagggatgcttaacgaggccgaggggaaggccattaagctggccaaggacgtggcgtccctcagttcccagttccaggacacccaggagctg

SEQ ID NO: 158848 - DNA, 453 bp, Zea mays
  unsure (1)..(453): unsure at all n locations
  Clone ID: MRT4577_76445C.1
cgccgcggcggggcgaaaccgcccgggangccccaagccaccgacgggccacgccaccccggcgncgccgcccccacacgggcggccccggnaacaccggcgcccaaccgcacgaccaccgcggacgcccgcgcgccnccgccgancgaagcagcccnccacggccgcgagcaggaggggcgggggggggaccagnccgaccgcgccgacgccnncgccggcggcggcgggcccccgcgcgccagggagcaccacggcgngcgcgcncnccagggcaagagaccgcaggacgccggcgngcagcgcggcgcgccggnggagnagcacccgccccaccancnagaggcggggccnnaccaccagggccagcccgggcaggagggcgngcccggcacccancagggacagggccnnccggcgggcgancaggccagcacgaggcccgacacggcc

SEQ ID NO: 158849 - DNA, 2128 bp, Zea mays
  Clone ID: MRT4577_76446C.1
ctccggaatcgtaacctcagaaagccaaatctcattctccggcgctcaggcccacccaagcgtcgactctcccgatccaatcggtacctcctagttcctcgccggcggtagcggcgtcgggcgaacagcggtgacttggcgagggcgcttggccggcgacaatcatccactaggatggaaggtgaggcagagaccgtggttggttcttgttctaaaccatgtgggcctctggaggactactacattccagattacattctgaagccaggtgcccaacaagtacttgttgatcatgcggcaccctgccccgttgtagtgttcatcaactcaagatctggaggccaacttggaagtagtttaatcaaaacatatcgtgagcttctcaatgaagcacaggtttttgatctctcaaaagaggctccagataaggtattgcatcgtttatatgccaaccttgaaaggctgaagatggaaggagacattcttgcagttcaaatttggaggacactgaggctaattgttgcaggcggtgatggtacagctagctggctgcttggggtagtcagtgaccttaagctttcccacccacctccagtggcaactgttcctctgggaaccggaaataacctccccttttcatttggatggggaaagaagaatccttctactgaccaagaggctgtaaaatcattcctcgggctagtaaagcatgcaaaagaaattaagattgataggaaggttaccacacattccgtggaggattttggaattactttagtatgggtaaggcttcaatgttgttctcatctttattgttacacaaatgcggcaagaccattatgtacctatactatccagttgtttatttatattttttatcttgatatgtgatcctgggtagtagttcatgctacaaaggctagtgtttcgccaacccactaaggaaagtagtgcaagtctagtgagattattgttatggcatcattctctttttaattaaatctatatctggtgagttcttaagcagataacaaattaaagaattcaggcactagagtcaaacatgatgatcatgacttgacatgttgcagggatggatgcagaagtgtcttatgcatttcattctgaaaggaagaagaatccagagaagttcaagaatcagctgacaaatcagggtacatacgctaagcttggacttaaacaaggatggttttgtgcttctcttagtcagccatcatcaaggaaccttgctcaaattgcaaaagtaaagatcatgaaaagagctggtagcctctgggaggaacttcacattcatcacagcattcggtccatcgtgtgtctgaatttgcctagtttttctggaggtttgaatccttggggcacacctggcacgaggagagcagaagatagggagttcactgcaccttttgtcgacgatggacttcttgaggttgttggcttccgtgacgcctggcacgggctggtcctgctggcccctaatggacacggcactcgcattgcccaggcccataggatccgctttgaattccacaaaggcgcagcagagcacacgttcatgagggttgacggagagccctggaagcagccccttcccaaggacgatgacacggttgtggtggaaatctctcaccttgggcaggtcaccatgctagcaaatgagccgtgcaggtccaagagcgtcaacgaccagtcgtcactgtcgccggcgcacgacagtcatggtgattacaatgatatcgctgaggaggacgaagacgagtgggaggacggcaggaggaagtttggggcggcagatacatttaagattcctgacgagattgacattgctcatttcagttgagctttgactagtgcatcgtcgtgtgcgttctgatcatacgagtatggtttggtttataaccatctcctttcttttgatttcatatatttgcgatatgattgttgcagccatgtgtaagtgaatcctaggtaaccaagtgctgcgttgctatatatgaccaatgtatgtatagattcagtggaacggtaaaaacacgcgaactctacggttttctccttttgttgttaccagttcaattgaacaatatagcgggtgtttggtttgggt

SEQ ID NO: 158850 - DNA, 254 bp, Zea mays
  Clone ID: MRT4577_76447C.1
gcggccttctttttttttttttttttaagtgtcaaatatctaagagacaagtacctgataatttgcaatcagatatgagagagattcagagaaaaaatatggcatttcataatacataatgcccatttaagcaggtggcatctttaagcagaacctagcctgcaaggaagtaatgacccggacttataactttcatcatagaaatgccatgaaataaactttctttccagtccaggaggccagaacctagcatg

SEQ ID NO: 158851 - DNA, 748 bp, Zea mays
  unsure (1)..(748): unsure at all n locations
  Clone ID: MRT4577_76448C.1
ttgggaccctcgggccggccgggtcaccttttatgntaccggacccgaaaccgaaaagactagacattcagctgaacgcctgaacccaatcctaaggagtagccatttcccccactcttcccgccaccatggccgccgccgctatctctttgccccgctctccctctctccttcaacccacgcgccggcgctcagcgccaccagcctgcacgcagtccgagcgcggcgtctccttcgaccccggctccgccttctaccgcagcgacagcgccgcgggtcgtgacctcgccgtcctcgcagccactctccaccgccgccgtggccgtcccgacccttccgccccattcctctgcctcgatgctatgtgcggctgtggcgtccgcgcgctccgctacctcgcgcaggccggtgccgacttcgtctgggccaacgacgcctccgaggcgcttcgccccatcatccttgccaacctctgtcgctttgagcggggctcgccggaagcggtggcggggtgcaggaggtgggtggtgtcncacaacgacgccacccgtctgctcgcagagcgctacctccggcgcgagtacttcgatgtcatcgacgtcgactcgttcggcggcgacgccgcttacgtgagggcagcgctcttggcgctcaaaattggggggctgctctacctgacgtccacngattggcggtcggcgagaggatatgggtcgagaagctctttgtcttcatatggagcgtatgt

SEQ ID NO: 158852 - DNA, 2310 bp, Zea mays
  Clone ID: MRT4577_76449C.1
cgaggccggccgggaatgtaagtaaccacaaaaaaagtcgcagccgtggaaatcttaaaatggcgaacatgcgagcccctagaaacgatgacaaccaagagagtgcctcctgtcctcctcccatcgattttcctctggaatcgtaacctcagaaagccaaatctcattctccggcgctcaggcccacccaagcgtcgactctcccgatccaatcggtacctcctagttcctcgccggcggtagcggcgtcgggcgaacagcggtgacttggcgagggcgcttggccggcgacaatcatccactaggatggaaggtgaggcagagaccgtggttggttcttgttctaaaccatgtgggcctctggaggactactacattccagattacattctgaagccaggtgcccaacaagtacttgttgatcatgcggcaccctgccccgttgtagtgttcatcaactcaagatctggaggccaacttggaagtagtttaatcaaaacatatcgtgagcttctcaatgaagcacaggtttttgatctctcaaaagaggctccagataaggtattgcatcgtttatatgccaaccttgaaaggctgaagatggaaggagacattcttgcagttcaaatttggaggacactgaggctaattgttgcaggcggtgatggtacagctagctggctgcttggggtagtcagtgaccttaagctttcccacccacctccagtggcaactgttcctctgggaaccggaaataacctccccttttcatttggatggggaaagaagaatccttctactgaccaagaggctgtaaaatcattcctcgggctagtaaagcatgcaaaagaaattaagattgatagttggcacatcattttgagaatgcgagttccagaggaaggtccatgtgatcctattgctccattagatttgcctcattcattgcatgcgttccatcgtgtctcaagtagtgattctctcaatatggaaggttaccacacattccgtggaggattttggaattactttagtatggggatggatgcagaagtgtcttatgcatttcattctgaaaggaagaagaatccagagaagttcaagaatcagctgacaaatcagggtacatacgctaagcttggacttaaacaaggatggttttgtgcttctcttagtcagccatcatcaaggaaccttgctcaaattgcaaaagtaaagatcatgaaaagagctggtagcctctgggaggaacttcacattcatcacagcattcggtccatcgtgtgtctgaatttgcctagtttttctggaggtttgaatccttggggcacacctggcacgaggagagcagaagatagggagttcactgcaccttttgtcgacgatggacttcttgaggttgttggcttccgtgacgcctggcacgggctggtcctgctggcccctaatggacacggcactcgcattgcccaggcccataggatccgctttgaattccacaaaggcgcagcagaccacacgttcatgagggttgacggagagccctggaagcagccccttcccaaggacgatgacacggttgtggtggaaatctctcaccttgggcaggtcaccatgctagcaaatgagccgtgcaggtccaagagcgtcaacgaccagtcgtcactgtcgccggcgcacgacagtcatggtgatgacaaggatatcgctgaggaggacgaagacgagtgggaggacggcaggaggaagtttggggcggcagatacatttaagattcctgacgagattgacattgctcatttcagttgagctttgactagtgcatcgtcgtgtgcgttctgatcatacgagtatggtttggtttataaccatctcctttcttttgatttcatatatttgcgatatgattgttgcagccatgtgtaagtgaatcctaggtaaccaagtgctgcgttgctatatatgatcaatgtatgtatagattcagtggaacggtaaaaacacgcgaactctacggttttctccttttgttgttaccagttcaattgaacaatatagcgggtgtttggtttgggtagatgctgatcgacttcgtccccgacgtggccgggctgtcgctggccgagtcgggcggcttcgtcaaggcccccggcggcgcgcccgccaacgtcgcctgcgccatcgccaagctcggcggctcctccgccttcgtcgccaagttcggcgacgacgagttcgggcacatgctggcgaacatcctgaagttgaacaacgcgaactcgtaggggtgcctgatcgacaagcacgcgc

SEQ ID NO: 158853 - DNA, 791 bp, Zea mays
  Clone ID: MRT4577_7644C.1
aatctagctccatcccggtgcccgccgccgcccaagtccctcgccacccgcacaagaccttgaccaaatcgccgcgcaagctctacctccccacccgcacaagaccttgcgtgaagttctgttgatcatcaagtcaagttcagacagggtgttcttttggtttggttgggagaccagcaacgacgaggatgaacaggcgctttgtcaatctggtgatgcataactgggtcgaaggcgtttattcggtgcgccggatcaatccttacaatcatctcttctacccgtcagcaaaggcagcacttgaagcagcagatgaagcagcaaagtataaggattattttccagtgatgcagtccctgcagctgccggacccaggcatcaagttcacagcaactccctctggtgtcggtcttgatatgttcgcgctcttcaacccccgcggcaccagcgaaggcagaattgtttttagcaattcgatcggtgaggctgtgctgtacgacgccgacaagcagctcttcaacaccatgggttgcctcaacgagcctaagggagcagaccccatgtgcctgcccatcgagcaccctggcaccgaccaagacagcttgtatgtcctggacagttgcccctggaaagctgatagtcgatgcttcgaggtccttgagttcatgcccgagtgcagtgagctgagcaacttgagggccacctggcgttggcgactacttccacgcctccttttgtcccgcaaactgggtacaaaccttcctctgttctctcctaccctaccacagtcg

SEQ ID NO: 158854 - DNA, 728 bp, Zea mays
  Clone ID: MRT4577_76450C.1
ctctcgtgtatcttccaggtttcccatttctcccttttgtgtttaaaggataaactagattgctttgtttcaggaaccttgctcaaattgcaaaagtaaagatcatgaaaagagctggtagcctctgggaggaacttcgcattcatcacagcattcggtccatcgtgtgtctgaatttgcctagtttttctggaggtttgaatccttggggcacacctggcacgaggagagcagaagatagggagttcactgcaccttttgtcgacgatggacttcttgaggttgttggcttccgtgacgcctggcacgggctggtcctgctggcccctaatggacacggcactcgcattgcccaggcccataggatccgctttgaattccacaaaggcgcagcagagcacacgttcatgagggttgacggagagccctggaagcagccccttcccaaggacgatgacacggttgtggtggaaatctctcaccttgggcaggtcaccatgctagcaaatgagccgtgcaggtccaagagcgtcaacgaccagtcgtcactgtcgccggcgcacgacagtcatggtgattacaatgatatcgctgaggaggacgaagacgagtgggaggaccgcagaggaagtttggggcggcagatacattttagattcctgacgagattgacattggctcatttcagttgagctttgactagtgcatccgtcgtgtgcgttctgatc

SEQ ID NO: 158855 - DNA, 118 bp, Zea mays
  Clone ID: MRT4577_76451C.1
aacaagtttactatcacctcccccgtctctcatatccacgctgcctagggtgggcggacggcaaaccccggcgggcgctggccatggacgcggatcgcggcgatgcggaaagcatgga

SEQ ID NO: 158856 - DNA, 1213 bp, Zea mays
  unsure (1)..(1213): unsure at all n locations
  Clone ID: MRT4577_76452C.1
cccacgcgtcctgagatctcttcttacccgcctcttcacctcaactcacattgtcatggcctcgtcttccttctcttcctctccatctcggcggttggtccacctcacacgccatctcgtctcctcttcttccggcgagctttcctcagtcggcgcccccgccgctgccgcctcagatgccgaccccgtgaaaagcccacgctccactgcctccagggttcacgccgcggtgctggtctgcctcttcgaggaccctagcagtgggccacgggtcctgcttacaaagcgcgcttcctccctctcctcccactccggggaggtgtcgttacccggagggaaggtggacgatggagacgcagatccgaaggccacagctctacgggaggcgaaggaggagattggactggatccggcgcttgtttctgttgttacagttcttgagcctttcctatcaaagaatggcctcactgttgttcctgtcattggtatggtcccagataaagccttatacaagcctgtcttgaataaagctgaagtggaggacatctttgacgcacctctggagatgtttctaaaggacgaccaccggaggacaagacagatgaactggatgggcatagatatccccgtccagtttttcgactacgaggcagatggcaagaagttcgtgatttggggcttgactgcgcacatcctgacacgcgcagcggcagtcattttcgggaggaaaccatcattcgtcgagcttcccagacccaaatatgcaggtgcacctgttgctggcactggcaagtcgaatctctgatggagcataagctggatgtaaggggcctctttgggtttggaacttggtgcatgaaccttgtgattgtagaattatatatgtttctcactatgtgatggctggggaaggtaccgaaaattgcttggtatatttatctacagaatataagatacatgctcaactgtattttgagtgtagcacagcagacaatattggcacacttggtggatggtgctttgtaaaaaagaatgtatacaatgaactccagaaagtatactgtcttgaaaaaaaaaaaaaaaaaaaaaaaaaaaaaaaaaaaaaaaaaaaaaaaaaaaaaaaaaaaaaaaaaaaaaaaaaaaaaaaaaaaaaaaannnnnnnnnnnnnnnnnnnnnnnnnnnnnnnnnnnnnnnnnnnnnnnnnnnnnnnnn

SEQ ID NO: 158857 - DNA, 259 bp, Zea mays
  Clone ID: MRT4577_76453C.1
ctcacgcgtccgatcacgcttctgatcctaccgtgtgagctcgacgcctcgggggacacgtccagacttacaccctaagctcaactattacaacacaacatcatcttgccgatcacataacctcaaatactaccttacatgtatcatctcatcgatcagctttcatatgactttgaatacggtcgttgatccaaatgctgaagactatgctgcatacactggaacgaatgatgatatgcatgtgcacatgcatctgctc

SEQ ID NO: 158858 - DNA, 191 bp, Zea mays
  Clone ID: MRT4577_76454C.1
tcgagatacttacgaggattcccctagttacggtgaccgccaggagttaggccggcgcgcggggcaaatcgagcgagggggggggaactagaggttggctcgcgaccgacgttgcgttcgtattatgagcctgagtggagactttggacgtttatttatatacctctctgcgtggtaactatgtacgtaag

SEQ ID NO: 158859 - DNA, 346 bp, Zea mays
  Clone ID: MRT4577_76455C.1
ctccctctcttgggtttaatttttttacccttcccatcccttctttctatctacaacatagccgcaatccccgaaaattcccaaaaacaaagacctccccccgtccgataccaaaacgcttttatcaaaaaaaatctcctggcaagaccaaacaagccgcgagcgcgtaaggaaagcccctgcacgcaaaacgcagagcacatctggtgaaaacaccaacgatatcaacgctataaaccggaacccgcggcgaccacccgactaccatcaaaaaactgcaataccgcccgccaaagaacgcaccaaggggggaattacctgcaggactaggcgattaaaaaaagag

SEQ ID NO: 158860 - DNA, 571 bp, Zea mays
  Clone ID: MRT4577_76456C.1
gaacacatgtaacttaatcatgggggagctgaatagcagccttattacaacagtgctcacgtactcgacttttgtaaggacgcacgtgcctattcgcacgggaccgcgcaagtgcgaaccccacttgacggaacggaacggagaaacgcacacaacctagcgcgacgaccgagcgtcattcagctcacacggaaccgaacgaaagaggagatgctggcaggaatgccctcgcaggcgatagccggaggtggcccccttcgagaccgacgaggcgggggatagcaaagagcttgggaacccctacggcccgaagcggatcatgcagccagggtgcgggcaaagggagacgacgggcatgctgagctttgtgagtcgcacgcccaaccgtttgaacacaccaaggaccttggggaacgacgtccactacggtggcgttcaggcactcgagggacgccaacctcaacgggtgatggtacacccgcgttttctgcaaccagccaactaggttcaggcacaggatggccactggacgaaccagcactggacttggatggggcgccaccttcatgta

SEQ ID NO: 158861 - DNA, 833 bp, Zea mays
  Clone ID: MRT4577_76457C.1
ctcccgaaattcctctccctcgaaccacacccgcgtgaacaccctcgtcgcctctccccatgctctcccatgtcgcctcctttccatccccgtcgtccctgcaccgcagtggctcccgcgcccccctcatcgctgccccgctcctccctcatccgcaagccctggcgcacctcagttccaaccccagttgccttcgtccgctgcttccacatccaccataggatgtctcccctcctcaggttcttcgccgacgaagacgacgacatcgagttcatggtcatgctgcgccagttcgaacgcatcaccgacgtgcgaaagacgctcgatgttatgccccaacagaatgtggtgttctggacgatggtaatccgctttctatggttgtatttcagaaaggaagaacaatatatgagagacagagagagagatcggtatgagttggaaaaggggaggcttagaaaatgaagcgtctatgggatgaagatggctcacgctttaacaacttccaaaatcttcaccatcgttatgctttctgtatacttcagtaagcagctcctaaactgccagtaatatctcattgcaagttaatacattttttctttcctgcattcgtcatagccccaacattcttaaataagcacaaagatcatgttgcatgcaccttcaactatatttaggttctattttattatgtcccatagacattgcattttaacaggaccctctccaatatattccaactctaactctatccaaatatttacaatcaaatttatactatgtcaacccatctcattgcatttgttacaaaagaagcaagtactttcgcattt

SEQ ID NO: 158862 - DNA, 317 bp, Zea mays
  Clone ID: MRT4577_76458C.1
aaccctcctaagggttgcatttttttttaaaacccccgcccgcgatccattttagcaacctaattggggataacattgggctacccctaggactttttttgcggggtagtccatacttcctacgaagttggcctccacaggggttatttccccggcaggaaagggggcggaaaacaagcccctggagcaacaggggccacgatgctaaattttttacaactttggccttatttacagagccgggctgttgatgaaattttgttgggggtcaaatgggaactcattgtcatcctttaccaccttgaatggttccgggg

SEQ ID NO: 158863 - DNA, 311 bp, Zea mays
  unsure (1)..(311): unsure at all n locations
  Clone ID: MRT4577_76459C.1
gtgggaaccattnatgncaaaatgggagtanccatgggcatgnttgnnttgataatgganaacgtgaaanngnangagaaggagaaggagaaggagaaggaggagaaaagtacgtagaaggaagagagtcgatgcttatcgcatagtctccagttcgagggcttctgcttcaacagcgacagcatgcgccgaggtgtgcacgaaggaaagctttcccgatgccaagtgcaaaagggacgtggccgtgngcaagtgcttctgtaaaaagccttgctagatcatcggtttagataattgttgatggttgcttc

SEQ ID NO: 158864 - DNA, 285 bp, Zea mays
  Clone ID: MRT4577_7645C.1
tctttctcctttttttttttttttccccccccccccccctttgggggggggagggggcccattcaattctcttcacatctctctcaacaaaatgatctgttcaaaaaaccaacaaaaaatttatggtttttgaaattaaaggctactttcccctgaagttacctactttgaatctatgtccaccttacctgaaggaaatatttaagctgacattcaccacccaatccttttcgaaatataaaaacccctgaattgcccactaaaagagatggggcttcaaacata

SEQ ID NO: 158865 - DNA, 2166 bp, Zea mays
  Clone ID: MRT4577_76460C.1
ttgtccgtttcctttggcgtcgaaaaaagaccaatattgtcagtataataaatactaagagaatcttttggcgtcgacacattgcaaagaaacatttaaatccttaccctagccactattaacttccctaaactgtcacttattccaacagtctaaaaaagctattaacctcaattcaacagaataaatgaataccagcagtaacaaaaacctagatgatgcgttgcaaaaaagacaacaaggcacatcagtcgacgaccgaaactagaactacatctgaataggtgtctaatctacaattactcaattagtaaccatttttgctgcctgcaaaaataatgatcaaggacaggaaccctcataatttgtatccaggcttctcttgtaatcccgcactgaaccaattgatgagcctctatgccaacttcaaaataatcttagagccaccgaacaacactcccaaaagacgcgcaacagctatggtgcccctcattttgaaggtgcgccagcagctgctgtgcggctaccacgaccaccagcatatccagcatggtcaaccctctggtagccaacatcagctccacgtgatgagccacctctgccaccacttctgcccccgtaatcagacctgtaactaaactcacccctcccgtagccccttcctccaccgtagttaccacgccctctggtaccttcacttctgaaattgttgcccctgcctggtacgaacctgccgcctctgctggagcctcgtgaaccaggtgtcctcttttcctcaatgtaacattgacgaccaccaatcatcacaggggaagcctctatagcactctggacagatgtagaatcctcaaactcaacaaatccgtaacagaacccttggatcttattgcttctgacttgaatgccattttgcttgatggtaccaaacttcttgaactcatcctccagttgagtttcagtggcatttagaggtaaattcctcacatagattgcatgcgcgtcatcttcaggctcttggatattgccgttctcagggttggaactaaaaggcagcacatctttgacaggagcaagagcaggagactgcttctctggtttgggcggtgcagtcctagtaggaggtgcaggagcaggcaatgaaacttctttcatgactttgacaattgaggcgtatgacttctttggtgcctcctcctgcaacacaggggcaactgtagttgccaaaacagctgccacgttgtttggaacttcatttatcacttcaggaacaggttgttcctcatccactacttcctctggcggcggatcgtaaacctcagcctcctcctcctcctcaggttgaggtggtgatcggtccacaacatgatgttcctgctgtggcacggcattacggtcatcaggggtggcaggctccacagcaagagtagatgtgccgttggcagccacagacaggactacagcatccgcctctggctgcgcctctacagcggtaggggcagggatttccccgacgaagcggaacatgtcgttgagcacgaagtagcccttctcctgcggcgccaggaagaaggactgcgagaactcgcggcgcactccgtcacggccggtgaggtggcctgtgacgagcacagtgacgccgccgccaagcgactcctgcgagtccaccgtcctgatctccgcttttgacacgtccatctccattatcttctcgccgattgcctccatagtggtgacggagtccatgccggcggctccggcggcggatgcggggcggccgaggcgactagcctcctgatagaagcggtacaccagatccggtgactggtgcagcacgaggtagtactgctgcacgaacgcgttgcccaccacttgcgcagacggcggtgcctcgggggcctgggcgacaggttgcggcgcggccatgaaggcgatggatcgggggacggaggagacctagggttttggtgcggcgcgcggctcccgtgcgggctgcggcggcgtgtggggcagcgcttgggttctggtggcgaaggagatggaggcggagggagggagaggtgtagtgcgaggcgaaggcggcaccggtacaggggtatggggctgtgcgtaggcccgatctggagcggtgatctgattgatctttccccggcccggccggcctcgagg

SEQ ID NO: 158866 - DNA, 553 bp, Zea mays
  Clone ID: MRT4577_76461C.1
aaaagacttggtttattgattctctgaatatatcgagctgcttatgcaccacagagactaggatctttggcaactgcggatcaactgcggctgcggctcagctgcagagcgggtaatatataataatatataaatgcaccgatgcatgcatacaattgctgcagccttattattgtgttgactagataatatgccttcttcattatgtattcaatgccattgcacaacacacaaacatacaaacaaacaatctagaacaaaagtactttggatcgagtagttaaatccattctcgcgctgtcctttgtcagcaagaagtaccataacctgaaggagacgagcaccgccgcgcaggccaccggcaatctcagcgaggaccacgaaaacaaggccgggcacgtataatgccaggccggggaggatttcggtgaggtcaaccacacctgccattgctgtagcagctgcaatttctacccctgtaactgctgatcacatggatcgacgaccatggatatgattattatctatgtagcttgccgtggtggttgaacaa

SEQ ID NO: 158867 - DNA, 123 bp, Zea mays
  Clone ID: MRT4577_76462C.1
cactccaatgtaatccgaagcaaatgcgatagctctcatgaatagctatgtacccattaagactttaactgactcgtgtggaactagtcgacagctctgccataaacattttctgatcttatt

SEQ ID NO: 158868 - DNA, 454 bp, Zea mays
  Clone ID: MRT4577_76463C.1
attgtgaggggaaggagagccgggcgcaaaaagggggagaggggaccccggggggaaaaaggaagccgaaaagaaggccacacaaaaacggggccgaaagcagaaaagaaaagcctggggggccaaaagagagagctaacaaacataaaaagagaaaagaagagagacaaaaaaaaaaaaaggaaagggggcaaaaaaagggaaaaaaaaaaaaagaaaaggcgcggggaaagggggaaggagaaaagggaaaaagggggggaggcagttgaaaaaaggaaacgggcaacagcggaggggggggaaccggcggggccggagagagggggagaaagcggcccacgcgggggagggccaaaaggcgaaaaccccgaacgaggggggccaacggaggaaaataacaggagccggcttgggtatcgccctatcccacaaacgcgatatggggagcaaa

SEQ ID NO: 158869 - DNA, 745 bp, Zea mays
  unsure (1)..(745): unsure at all n locations
  Clone ID: MRT4577_76464C.1
agaggattggagtcactgagaggcaagtagctggcaaatataaggatgaaatcgaggaatcagtatctatggtggatattttagcagttcagctgtccaaaagagaaaatgagttgcttcagcagaaaaccgaggtcacgagaatagcgacttcactgaaactggcttctgaagatgctaggagaattgttgacgaagaacgaactaatgcccgcacggagattgaaaatgctagagctgctgtactaagagttcaaaaagtacttaaagagaaagagaacagttcacaaagaattgggaagcaggatgtggatgaacttagggaaaaagttcaagaagcacggagagtcaagatgttgcattgccccagcaaggcaatggacataaaaagcgagatccatgttctacgtgatcaatatgccgagatatcttccagttctactcatcttttaaaagagttggagttgcaccaaagttttaaggaaaatggcgtgccctcatggtgagttggagggtctcgaaagcttaggctcaatggctgtgcgtagttgtcaagaatgatgtggctttatcgaatagttcagtacaatggttccgcatacagcctgagggacccaagaaggaaatcatttccggtgccacaaagctagtgtatgctccagaaactcatggncgtagggcggtacctgcaagctgaggttaaccttggtggtcaaacctctgtcgcaaagactgctggcccact

SEQ ID NO: 158870 - DNA, 356 bp, Zea mays
  Clone ID: MRT4577_76465C.1
gggaaaaaagggtttgggggcgcccccctaaaacagttaagaggagtcccgggcccgggaaaaggccctgtttgggaggggtctgttggggctcttttttatttttcagggggggggtttcccccccactttttttttagcccggggcttttcacccatgggggggccggttttgcccccccccttaggtttagccccaagccaaaatcccaagggccaagatgggggggggggcgcctttttttgcccgaagttgaagccactggaaagaaggggtttccttgcccctggctgaacaaaaaaagggttcactggctcggggggtcgggccaaaggggccttgcaatatttttttt

SEQ ID NO: 158871 - DNA, 516 bp, Zea mays
  unsure (1)..(516): unsure at all n locations
  Clone ID: MRT4577_76466C.1
tttttttttttttttgaacgagattctttgaatgtacataatttatcttaagaacgcttgttgttgtgatgtgttctttggcggcaaagagagcagtgtgatttagaagtaccgagataaagatatgtgatcttgaaacaagcagccgactggaatgaaaagaaatgaggaggaggggctagacgacttctttctttgctgcgtcgtcttcttcgtcttcgtcttggtcttggtctttgtcgtctgcatgatcgtgctggatgttagccttgatgaaggcccggatggacgcgctgatttcttgcttgagttcgaccgggatggaattttgtgctatcggtcgtagatcattaattagctttgttagcgtaggcccctcttgggatagcgctcgtgcctcggcttcacagcgtaggttttcttcccattctgatcccgtcagcncttgaccatcaacctcttcgtagccattctcctgacactagcatacgattctttagttgattgatgacgctc

SEQ ID NO: 158872 - DNA, 420 bp, Zea mays
  Clone ID: MRT4577_76467C.1
ggggcgcccgggcccaattttaattttaaaaaagaaaattttaaaaaccccggctcaaaaaaaaaaaaaaaaactttgttgggttggccaaactaaaaaaaaaaggctgggggcccaaccccggggggggaaaaaggccaaaaaaaaaaaccggggcgccgaaaaaaaaaaccctttttgggggggaccaaattttactgggaatcctaatgggggaaattggccccccccagggagttgagtgggtgaaccctttaaaagaaaggggccttccttgggtggaaggaaaatttttggggggggaccccttggggcccctttggggggggttgggttaactggcccccaaaaggaccaccccgggggggaaaagggccctttttgaaaaaagtttccagggaaaaaccccaaattcccttt

SEQ ID NO: 158873 - DNA, 273 bp, Zea mays
  Clone ID: MRT4577_76468C.1
ctgggaattacaacaaaaccacatccccaagagggaatttttgtgggcctcaaacatgagcaatacaggcaatctaggagttcaaaagcccaggcctatttaaggccttacaaactagccattgggggcacactgcggatccatacaagcttatgaagactggcaaagctctgggcgcacaaaatcagtattagcggtcactgggatggcaaccgggggcctcaactgagcccaaacttttaaggaaccgtggacagggtcagacatgaagtt

SEQ ID NO: 158874 - DNA, 278 bp, Zea mays
  Clone ID: MRT4577_76469C.1
ccgtcgataaccaaggggaagacagaatactagacaaaccaccagccgtcgaagcccaaacctgatgttagttcaaagggatatacgcttcaccaagcgggcagactgaagagctgtccgcacagatcacacatctacctcagaagctgaggtgctgaggacattgcgtcctggagcgaccctgtctgctggcatccaaccaaaacagccatactctattatatattatttcattcattggaggagctaggacaagacaaattggatatctttgttgt

SEQ ID NO: 158875 - DNA, 283 bp, Zea mays
  Clone ID: MRT4577_7646C.1
ctcctacccaccggatgcgggcctgtctgacgacgaggagcatcccgatgccagcctgcctcctgacccgccaccccttactgtgccccagacgcacaatgcccgtgaccagtggctgcaggatgccttccacatcagcctctgaagggctggggggcagggggcatgcacccatgcaaaaggctcagaaactccccctccggcaagccctcagacttcggagcctgcgccttcccccctaccgcctcacctcacaggagggccaggcatgtattcctcagag

SEQ ID NO: 158876 - DNA, 603 bp, Zea mays
  unsure (1)..(603): unsure at all n locations
  Clone ID: MRT4577_76470C.1
cgaaggccagaagcnnccgttttccagcccaagccangaacgcggccagggggggcgccgcggcccccgcgccggccgcgaccgngcaggngccgcgcgggcaggnggancngancgacnncancgacgggaccggcgncgagggccncaaccaggacncgncccacagcancgncaacgcgcccaagcagagngggagaggcgacgaggggctttttttttccagcgangcggacgagcagcngcngancaacagccgcggcaagcaggcccggacggcgcannccgngcgannnaaaggnnccgaggaagagggccccaaaacagaaaaacacnncaacaacnnngagcanangggnnncagcaagggcaaggacnanccaccaagngacacccncgagcnancanccgancannnganagagaanaaacnnnngccacnaaagnangncaagnnncaaaaggggcgcagncngacnanannaaaagaggacaaccaaagnggaagngangncnccaaaanncacaagaaagcncnnnnaggaacaacngnggacacgacaaanangaaggaccngaagaagaaagaagagcaccgagacg

SEQ ID NO: 158877 - DNA, 309 bp, Zea mays
  Clone ID: MRT4577_76471C.1
aaacttccatgaactttctatttcgctttgctgtgagaacaaaaaaatatggtgttattggtgcatgcagtgtgctgttgcaaaagaaagaaagttgtgctctgttaatgtcatagagagggagttcgctattctcttatctgtaaagcctgagaatcacaatattacaattgggtttgtttgttttctctgtacacagaaacgtcttgtaagagctgtggaaagggttctgcattatgtgtaaaaaaaaaaaaaaaaaaaaaaaaaaaaaaaaaaaaaaaaaaaaaaaaaaaaaaaaaaaaccaaaaa

SEQ ID NO: 158878 - DNA, 415 bp, Zea mays
  unsure (1)..(415): unsure at all n locations
  Clone ID: MRT4577_76472C.1
tgatatcattgttcctatgattgactatgaaaaagagaatgaatggaaaaggaaggcacggacaacattgactgattggtgtatgagcttagaaacaataatacaatggtctccttattccacagaagcagaacttattcaggagtttggctcaataggggaacaaggaactcgaattatcatatacaatctgtgggaggatgatgaaggagagctggagcttgattttgatgctgacgcaaatgatattcagattagaggtgttaacagagatcagaacaagatcaagaaggcaaatcagtttccaaactccaaacacttctttacttatagacattctctaagggtggcagctaaggtgacaattggttttgttaaggatgcgagacaacatatngatattcaagggtttaat

SEQ ID NO: 158879 - DNA, 1370 bp, Zea mays
  Clone ID: MRT4577_76473C.1
cgtacgcgtgggatgttctctattttttatcatgatcatgaaggtatgaccttcatgaccttcgtcctaaattcattatgtccgaaaggaaataatgatttgaaggacgaagggccttttgatatttaacattttgtgttgccttgttcttgattcatagtatttgagaacaagtccccaacagctcctttggagccattcgatacggggccttatgaataggctgcatacccgggatcagcttaatctcaaaagctgcatcgcgctccggaggaatgcctagaagctctgccggaaacacgtcagcaaagtcacacaccacctggatgtcctgcacccgcaaggcagcctcaccctccaccaccatagagaaaaagatccccgacttccttgaccggcgatcaggaagcaattgcgccaacaaggataatgtgaacttcggggaacttcccaagaataccacctccttacccgacgacgcctgcaataacactgtcttccagaagtaggatataaccgcgcgatactgggataaccaatccatgcccaagataacatcgaatgcccccaaggaaatcaccaccagattggccgaaaaaacctcatcagcaagaatgatggaacacccctgacaaactgaacagctactaatggagccattagcagaactaaccaaaattgggtgacccaacctctgcaccgaaagaccagcccgcgacacaaaatcctccgaaacaaacgaatagctagcgccagagtcaaaaagagcatgggctgcaaatgaatcaactgaaatcgtacctgtcaccacgtctccttgctccctgccatccgtagcgggtagcacataagctccagaaatacccgcagaagaggaagctcccgagtgaaattaacagaagaaccccactgcgccaccggaggaggctggcgcggagctccaaactgagtcaacacaggggtagacggtgcaggagtaggcacgacctgatactgagggaaaccctgcatcggcacgaactgagaagtcccatgcacataaagctgctgtggaggaagaggaactgaaaactgctgctcagcacttgacatcatgttgatagtgccctgagaagaggaggaagtcaccggctcccatctgagcttcccattgggattcctcctacacaccacatccttgtggtcctgactgcagatcgaacacctgccactccactggcactctgcacgagcactggctctggatgagaaaagaaattaagcagatagcccacgtataacctcattggatctgtaatatgtacgcctatcagatttaaggtacaaattaattttattagggatgggaatcgactgacatggcatatctt

SEQ ID NO: 158880 - DNA, 428 bp, Zea mays
  Clone ID: MRT4577_76474C.1
cgtgctgtcgggacgaactaaaaaaattaagtacacggaatgttgatcaaaggcacaaggaacaatttgtaggttgggttgagcgaaagatcagcaaactaaatcaacaatggaagacaaggggcccggcttcttacacactttcacaaggaccagaccatcgggctcgtgttttcaacagatggttcatcaatggatttctttttcgtacagaaaaaatagagcagaacctatgcacacaaaatagtggtgttgttgtgaaaggagatgaaagcttcggtaatattgactggtatggtgtgattaaaaaaattattgcactagattttcctcaaggaaaggaagttgtcctctttcagtgcaactggttccatgttcctaccgccaagaacaaaggaagaggctaccaaagggatcagtatggaatt

SEQ ID NO: 158881 - DNA, 1371 bp, Zea mays
  Clone ID: MRT4577_76475C.1
ggggacccggtgccgccaccgccggcgctcgaggaccccgcgctcttccactatgcaatcttctccgacaacgtgctcgcggcctcgtgcgtcgtgcgctccgccgttgccaactccaacgatccctccaagcacgtcttccatgttgtcaccgaccggatgaacctcggagccatgcaggtgataatacgccgaatggacttaaaaggtgcacactatgaggtcaaagcatttgaggattacaaacgttctcaactcctcgtatgttcctgtgctccggcaactggagtcagcaaacctccagaaattctattttgagaacaagcttgagaatgccaccaaagatgccagcaatatgaagtttaggaatcccaaatatctgtctatgcttaatcacttgcgattctatttgccggagatgtacccaaagctacaccgcattcttttcctggatgatgatgttgtggtacagagggatcttacaggactctggaagattgacatggatgggaaggtgaatggggcagtagaaacatgctttggatcttttcaccgatatgcacagtatatgaacttctcacaccctcttatcaaagcaaagtttaatcctaatgcctgtggatgggcatacggaatgaatttcttcgatcttgattcttggaggagggagaaatgtactgagcagtaccattattggcagaatcagaatgagaacaggacattatggaagctaggaacgctgccccctggcttgatcactttctactcgaccacaaaacctctggagaaatcttggcatgttcttggacttggatacaatcctagcatcagcatggaggagattagaaatgctgctgttgtgcatttcaacggcaacatgaagccctggctggacatcggtatgaaccagttcaggcacctttggacaaagtatgtggactatgatgactcatatattcgtcaatgcaattttgcaccgccatagaaggttttaattatcgacaacgaagaagaatcggtaaacgtggcacatacatatgccgcaagcacgatttctgtagagataaggagtttctagagtacaactgaagggaccaccacaatcttttctagctcattagtgattgcataggatatgtcctcataatgtttgccattagttatgatcaaagtaatgtttgccacatgactgcatgagcattattgtcgttgtgtgtgttagttatgtcagcaatactctgtatatgccgaagtcagatatatttctgttcacgtggatccaagaagtaaagtgtctgatgtatttacaaaaggcaccaaatactaattgtagattgaaactctacaatgtcactgtatatttctcttgtc

SEQ ID NO: 158882 - DNA, 500 bp, Zea mays
  Clone ID: MRT4577_76476C.1
aaaaaaaaaaaattttgggttaaaaaaaaaacggaaaaatggggccccggggtaaaccgggccgggggaaaaacttaggccccgttaaaaaatacaaaacgggccacattttttttctcaacaaaaaaaaacggggtttttttgtataaaaaaaggggaaacgggacaattccctacccttttaaaaaaaaaaggaccgagctgtaaaaggggggcaaggaaattgcacaggcaaaaggcttaaagagggcaggattcaaagttccgcccaccaaagggcgctgttccccgaaaaccccggatcttgagggaccccagggatcctttgcaccctttgggggacccctgccattgggggcctctgccttcggcccccacttaggcccaaccgaataagctttgaaaaggctctggcatgccccccggggactgaattaagcggggagaaaaacatacccatcaccgggctagcgcaggggaaatattcgcgggcccaaaaa

SEQ ID NO: 158883 - DNA, 2671 bp, Zea mays
  unsure (1)..(2671): unsure at all n locations
  Clone ID: MRT4577_76477C.1
gccggccgggtcgcggaaccccccgccaccaccactgtactgcacaccactcctcgtctgctccctcaacaccctctcctctccctcctacaatgcgagaagctccgtcggcgtgcgagctctgaagccatggtagccggcgccgggaacccggggcgtcctgtcgcggttcttgccctcctcctcctcgccgccgccgcgccgcccggtgcctgggccgggtccgcggccgtgaacggggaccgcctccgggcagagcagatccggaagcaggcctcggacgcggccgcatccgctgccgcgctcgccgcggcgtcgcgccggctccacctggaccgcgcgcgacacctccgcctcctctcctcgctccaccgcaacctcaccaacacgctccgcgccctctccggtagccgccgacttcgcctcggacccttcctccgccaacgtatcgtcctcccgccagctcgacctccaggccaaggacctcatccgcgccgcgcgcgccgccatcgccgactccaagccgctcttcgacccgcagctcaagatccagcgcctcaaggacaccatcttcgcgcagaacgagctgctcgcgcgcgccaagaagcgcggcgccttcgcctccctcatcgccgcggagtccatccccaagccgctccactgcctcgctgtccgcctcaccgcggagcggattgcgaggcccgaccagtacgcggacccggtgccgccaccgccggcgctcgaggaccccgcgctcttccactatgcaatcttctccgacaacgtgctcgcggcctcgtgcgtcgtgcgctccgccgttgccaactccaacgatccctccaagcacgtcttccatgttgtcaccgaccggatgaacctcggagccatgcaggtgataatccgccgaatggacttaaaaggtgcacactatgaggtcaaagcatttgaggattacaaatttctcaactcctcgtacgttcctgtgctccggcaactggagtcagcaaacctccagaaattctattttgagaataagcttgagaatgctaccaaagatgctagcaacatgaagtttaggaatcccaaatatctgtctatgcttaatcacttgcgattctatttgccggagatgtacccaaagctacaccgcattcttttcctggatgatgatgttgtggtacagagggatcttacaggactctggaagattgacatggatgggaaggtgaatggggcagtagaaacatgctttggatcttttcaccgatacgcacagtatatgaacttctcgcaccctcttatcaaagcaaagtttaatcctaatgcctgtggatgggcatacggaatgaatttcttcgatcttgattcttggaggagggagaaatgtactgagcagtaccattattggcagaatcagaatgagaacaggacattatggaagctaggaacgctgccccctggcttgatcactttctactcgacaacaaaacctctggagaaatcttggcatgttcttggacttggatacaatcctagcatcagcatggaggagattagaaatgctgctgttgtgcatttcaacggcaacatgaagccctggctggacatcggtatgaaccagttcaggcacctttggacaaagtatgtggactatgatgactcatatattcgtcaatgcaattttgcaccgccatagaaggctttaattatcgacaacgaagaagaatcggtaaacgtggcacatacatacgccgcaagcacgttttctgtagagataaggagtttctagagtacaactgaagggaccaccacaatcttttctagctcataatgtttgccattagttatgatcaaagtaatgtttgccacatgactgcatgagcattattgtcgttgtgtgtgttagttatgtcagcaatactctgtatatgccgaagtcagatatatttctgttcacgtggatccaagaagtaaagtgtctgatgtatttacaaaaagcactaaatactaattgtagattgaaactctacaatgtcactgtatatatctccagaggttttgtggtcgagtagaaagtgatcaagccagggggcagcgttcctagcttccataatgtcctgttctcattctgattctgccaataatggtactgctcagtacatttctccctcctccaagaatcaagatcgaagaaattcattccgtatgcccatccacaggcattaggattaaactttgctttgataagagggtgtgagaagttcatatactgtgcatatcggtgaaaagatccaaagcatgtttctactgccccattcaccttcccatccatgtcaatcttccagagtcctgtaagatccctctgtaccacaacatcatcatccaggaaaagaatgcggtgtagctttgggtacatctccggcaaatagaatcgcaagtgattaagcatagacagatatttgggattcctaaacttcatattgctggcatctttggtggcattctcaagcttgttctcaaaatagaatttctggaggtttgctgactccagttgccggagcacaggaacatacgangagttgagaaatttgtaatcctcaaatgctttgacctcatagtgtgcaccttttaatccattccggcgtattatcacctgcatggctccgaagtt

SEQ ID NO: 158884 - DNA, 335 bp, Zea mays
  Clone ID: MRT4577_76478C.1
ggagaagaagaagatgatggggatgtagagattcataaccaacaaaggcgtgtgggaacatcgaggacgcaggtgtacaacgtgcatggttgcggatacagaggacccatgcatacaatacaaacatgtcttcgaacgccaaaagcacagacgacgacgacatgcaagctaagggcgcggttataaaacgagtgattcggacacactcagtagctaagctaccagtaattgggtttgcagtatgccatagatattattgggtattacagtacctagggagcattggaaagattactagctttgttgaccggacgatgcatgaactaactaacaaa

SEQ ID NO: 158885 - DNA, 131 bp, Zea mays
  Clone ID: MRT4577_76479C.1
tgggtgctgaaaggcacaacgccaagcacaggcggaccatgtctgagcttgctgccgtcattccgcgccggacgacaaaccaactgagacggagatgcactggtgcttctgaggcaagacagtcgatgcta

SEQ ID NO: 158886 - DNA, 132 bp, Zea mays
  Clone ID: MRT4577_7647C.1
ccagcccaagaagcacggcaaacagacaaatcaataattcgatcacaaatatgcttctaaattaagaggattatatgtacaaccgcgccaaagccaaacacgagcttccaaccaatatgagaatcaaccatc

SEQ ID NO: 158887 - DNA, 334 bp, Zea mays
  Clone ID: MRT4577_76480C.1
gcggggaagagtcctatgcaaacagggaggacctgaggctgaaggtgtgccaactacctccatagtgatgctgacaaggaagctatgtctgcactggtacgcctagaaaatgctggatggggtgtacctgtccacataggcttatgttatacctggtgagagccgagctggtggcgactatggtgatcaatactatggatgtcgcgattacttgggtggccgcgactccggtcgtggtggctctgaatcagagactcgaagccgctatgcttgaagtgggcgtgatcctattagaagcatgatatatctactgttcctgaaaatgcactttctg

SEQ ID NO: 158888 - DNA, 373 bp, Zea mays
  Clone ID: MRT4577_76481C.1
tcaatatattacttcgagtcttattgatccttctgtttctacttgatctcaaaggtggcaggttatatcgatctgctggatgtctgcccaagtccatctgagatgaaggtcactattgcacttgctgatacgggcatcaaatatgaatacatagacgaggacttaacgtactatagatctctactcctacaaatgtacccggttcacaagaagattccttctctcattcacactgacaaacccatttgagaatccctcatcactgttcactacatagacgaggttagtgatgacagaaatcccttgttgccctctgacccttaccacatagctcagcctagattcttggctgattatcctgattagatgatat

SEQ ID NO: 158889 - DNA, 329 bp, Zea mays
  Clone ID: MRT4577_76482C.1
tgagactgtatgtcactattatatgaggcaaaagatcagtcggcgcgagaattgttcagaagagaaatggaaaaagatatactacttatcaaatggaaatggtgcagagatgagatggcttgctgccttcgtttgaggtagatatactgtccctgaaggcaaaaatgcattttgctcccaaaaaattatttataatattggtctgtgttttacatcttgttaatgacaataatgatttgtaatcaggtagtcatatataatttcagatggcatcattttttttctctcgctccactgtaaacattagggtttagtaattttctgatatt

SEQ ID NO: 158890 - DNA, 351 bp, Zea mays
  Clone ID: MRT4577_76483C.1
cgccgcctttccgagctttcatggcggcgtccgcgtcctccctcctcgccgcccccgcatcctcatcctgtggatccatctccccccaactccctcgtggagatccggacgctgcctacgtcgattcaaacgaacgttaatcctgctacctccaccgcgcttccccttcaaggcgacatcgcgaacgcttcataaacaacaccgctcccaccatgcagcctccggcgcagaccaccctctccacggcagtcgatggctaactcaacgaccgaatctatccaacatacatcgccgaaagacttctcaacaagccggacctgtatgcaaaggcacgaccatgcaaaaacaaaa

SEQ ID NO: 158891 - DNA, 487 bp, Zea mays
  Clone ID: MRT4577_76484C.1
ccccgtccccttaaaggggggtttgggggttccttaggaaacgatagagcggctaaggaaaaagatctccgggtttctcctccccaatgtcgattttccccccccaatgctcgaaggcggcgggctggccgcgccgacgaatgggaaaaaaggctaacgcgtgggtaaaggtcctaattgggccgttagtagtgtgaaattttattgggccaaaaatgggctgggttaactaatgtaggtttcgtttctgttgtttctttgttgggctttgagcatttcagcttctcttggtttcttattttggttacagaaaaaagaaaggcaatgggatattgacttgtatttatcactgatgtcgactgggtgactctggattatggagtattgctccattggatagttttctgcatttcgagacaggaaagtggttttttgcggaactgttcggtcggtcattctgaatggataatttcgtcatattgtttct

SEQ ID NO: 158892 - DNA, 328 bp, Zea mays
  Clone ID: MRT4577_76485C.1
ggggcacataaccggggaataaagacacgcaaccaagcattctgtaacagggcaatccatgacccatgaaaacaaaaaaagggggcgccccaaaacaacccggggagcccacgatgcccgacaaagggagcaccaggaaaagcaacacccaaagttggcctccggggaccaaccaaaccaagggaacacgcgcccaacaggccataggcacaaaccagaaatctatctggagactaacctggcgggccactgcaaaagtaagccgggccccacgaaatatgctctcacaaagaggggggaagccaatcattccacgaaaggactatgg

SEQ ID NO: 158893 - DNA, 536 bp, Zea mays
  unsure (1)..(536): unsure at all n locations
  Clone ID: MRT4577_76486C.1
ttttcccacgctatttgcttcattcacccacccgccgctcaacacattgcctgtagccgaacccggccaccgtagggagcatgccgaccgcgcctgctacttgctgttcattctggccgcatggccattgccacaggcacttggctgcatggccatctctatctgattttgttcttttttatttcttggttctagccttaacgaacgtccagcatgcctcctctgtgttatatttttttttcagccgcacaagaacagcttcctgtttatcgatctgtctctcttccttctctctctgcgagttcgcctgtctctgtttttcagtcgcctctgtgcactgaaaaaacgaccggaatttcatgagcactggcctcgcagaccctgccgccagctagctcatcccttcgggcggntgagctgctgtcggccgggaactgacggcgngccgagcacgacagctcgagagtgggnaagacgagtcgggctcttgaccgnctttaactttttaaaaactcgatctagtcctcatttactcg

SEQ ID NO: 158894 - DNA, 607 bp, Zea mays
  Clone ID: MRT4577_76487C.1
gctgccctcattaactttactgaagactgtcccaagtcactacttattccatacttggataatttggtgaaacatctgcattccattatggtactgaagcttcaagagctgattcagaaaggcaccaagttagttttggaacaagttgtgacatccattgcatcagttgccgatactgcagaagaaaaatttgtcccctactatgatttatttatgccatcactgaagcacatcgttgagaatgcggttcaaaaagaactgagacttctgagaggaaaaactattgaatgcattagcctcattggtctggctgttgggaaggaaaaattcatgcaggatgcatcagatgtgatgcagcttttgttaaagacccagacagacttcaatgatatggaagatgatgatcctcagatctcttacatgatctcagcatgggccagaatgtgcaaaatccttggaaaagaatttcagcaataccttccagtggttatggggcctttaatgaagacggcttcaattaagcccgaagtagcccttttagatacccaagacatggagaatatgagtgatgatgatggttgggaatttgtgaaccttggagatcagc

SEQ ID NO: 158895 - DNA, 275 bp, Zea mays
  Clone ID: MRT4577_76488C.1
cctatagtaactacatcagcgaatcgtacagactacgagacatctacgagactacgaagcgacagagacacgaagagtaaacatacagaccacaaaaggataccgacacaccaacacaactacattgtatgaactgcaaaggagccagatactgaatacttccagctgaggactgtttacactccagaacacagtacagatacacaacaggtgatagacatctactaaacccagatattactgagtataggatgcatgggttagctacatctaaa

SEQ ID NO: 158896 - DNA, 479 bp, Zea mays
  unsure (1)..(479): unsure at all n locations
  Clone ID: MRT4577_76489C.1
cccnacgcgtccgccactagtttctttgtactgatcgcaagttgaagacttgtgctattatctgtatcgatgttactgcaatactatcaagtatgatgctgttactgcaatactatcaaaaaaaaaaaaaaaaaaaaaaaaaaaaaaaaaaaaaaaaaaaaaaaaaaaaaaaaaaaaaaaaaaaaaaaaaaaaaaaaaaaaaaaaaaaaaaaaaaaaaaaaaaaaaaaaaaaaaaaaaaaaaaaaaaaaaaaaaaaaaaaaaaaaaaaaaaaaaaaaaaaaggggggggccttttaaaaaaacaaaatttttaccacggggcggggaaaagaaaatttttttttttggggcccaaaaaaaaaaaacactggcgcgggttttaaaaaaggggggtggaaaaaaaccgtgggttacccaaaaaaattcctttgaaaaaaaaacccttttttccggggggggaaaaaaaaaaaaggcccccc

SEQ ID NO: 158897 - DNA, 258 bp, Zea mays
  unsure (1)..(258): unsure at all n locations
  Clone ID: MRT4577_7648C.1
cgttttatncttcttgatgtgcgcnacccgtgggggggggggctttnctattctccnttcggtgctccctgctctgcttcctcccctgtcgctggcctccccctcccngcgctctctcgctcgccctctggcctctgtttctcgtttgctccggctccgggacctgntcctttggccccctcctggtcctgttgcgcgccggtgggtgctccttgcctctcactttctttgtgcctctctctgtggcctcctttcttt

SEQ ID NO: 158898 - DNA, 259 bp, Zea mays
  Clone ID: MRT4577_76490C.1
cttcttggggctttgaatatgagatactacagaggagacatgggctagcggagcgcatcacgagaacgaatccacaggagggtaaaaaaaaaccgccgttgctcctttgagaggaggtggagccatcataagagtgacgaggcgatcgcggagaccatttttatagcgaggggggggctgaccccaacccggagcttgacaccgttgcccccagcggtgtcgatcgcagggttgccgccggctgacggcgtgatcttgg

SEQ ID NO: 158899 - DNA, 149 bp, Zea mays
  Clone ID: MRT4577_76491C.1
cgtcgacccgcgtccgcccacgcgtcgaaggacatcggccattctacctcgatacagtcctcgcatcttcccatgcagaactgaagttttggcctgatcatcaccttaactgtccccaggatcttgatgatccagcccaaaattctact

SEQ ID NO: 158900 - DNA, 204 bp, Zea mays
  Clone ID: MRT4577_76492C.1
gctcacttcccgaattcccatcggaacccccctccacattccccagagttcgcccgatcagatcgttttctcctcgacgtgagagtagtatgagggagatcctgcatatccggggagggcagcgctgcaaccagatcgggtcctacttctcggaagtggtgtgcgatgagcacggcatgcacccgacgcagcgctacatgggga

SEQ ID NO: 158901 - DNA, 565 bp, Zea mays
  Clone ID: MRT4577_76493C.1
ctgaagctgctacagaacctgaatctggtaatggttcacaaccaattgaaatagatgatgaagaagattggcaggatgttggtcaaagaggaagctaacttcagaggtttggaaagagttcaagagagtgaaattgttagatgaggttaaggcacattttatgcattgtggtaagaagctttcagcaaagtccaaaagcggaactaagcatcttcatgtacatttgacgggttgcccatatcggaggagcaaacttgcaagcaaggataaggtgttggcacaaacttctctaaggttttcttccaagcaaccgggatctttatctttggagaattattcatttgacccagatgtagctagaagagagcttgctgccatgatagtcttgcatgagtaccctttatctatggttgaccatactggctttcggagatttgtgagtgcacttcaaccattattcaagatggtgacaagaaacacaatcagaaaggacattatggatgcatatctggaagagaaaacgaaggcattggagtacatgtctgcaactaagtcaagagttgct

SEQ ID NO: 158902 - DNA, 1255 bp, Zea mays
  Clone ID: MRT4577_76494C.1
cattgggtacctcgaggccggccgggaccctagctatttcctgtattctcttcctgccggccgctagagagattggcatcgcactgctctctgtgtttggccgctctatgtttggcggagtccctttcgtttctgtcggcttcgtctgtttctgtacgccgccagtgagctttctttggccgccgttctactttccctcttctccctctctgttttttttttaatttcacctgccgcactactactcggccgccagggagaacctgacaaccggtcattggtttctcaatgtcctctctttgctataattatttttttctttcagccgtacaagaacagcttcctgtttatcgatctgtctctctgcactgaaaacacgggccccgcagacctcgccgccaacgagcacatccctttgggcgggcgagctgctgtctgctgggagctgacggtggtccgagcacgacaggtcgggtgtgtgtaagatcagtcggtctcttgaccgtcttcgacttttaaaactcgtatctagtcctcatttacccgaatccctcgttgtgtaatgaatgtatggatctaatgtaatattcgggatcgagttatgagttgatagaacgtagatttttctgtgataattttctgtacctttactaatctgttctgtcatcaaggccgtggatgcaaaagatcccgagccactgtgatctctgttgacatatatttaaaactcattttgggttaggttattaaaccctaacccttttattgactgtttcttgaccgtggatcgtggatctcgagccactgttctcttttgttgacccagattaaaaccgactagggttaggttattaaaccctaactctaaaaaaagttatctgtttttaccatctcggaatccatgggtttggcctagactagagtctgacagtggccaaaaaccttagattagtgttaggttaaaaccctaacccgagagatctaaaaaatctttctattctaaactgtctgttctcgggtgattaactatgaataaaaaaaataagttcaatcacatttatccggagaccttctgtgatctcatacaaacaaaaaacgtggattaggagatctagggttcttaggttggcctctgataccattgttggaatctattctgtctaggatcgattcctaagtccctataataccaatccgtaactgaaagtaaaaccttgatgacttagatctgatctactgatctactgggaggaac

SEQ ID NO: 158903 - DNA, 243 bp, Zea mays
  Clone ID: MRT4577_76495C.1
acacacattagcggagagtaagacggagcctagagcagcaaattggacgtggcagaaatataggcggacgggatgcaaacacggtgtcaagcatacatcaagataaatcatataagcatgctgtatacagaaggacttgaggcaaccaaaaatttctgttcagtgcagaattgagtgaccaagcataaaaggagctctcatagtccaatagcacctttacaacaactggaacacacaattgag

SEQ ID NO: 158904 - DNA, 118 bp, Zea mays
  Clone ID: MRT4577_76496C.1
gcacgcgagcgttgggaccggggaggagatatgggcggtgtggccatagggggctacgaaccacttactagatagtccacactggaaactcacagcagcggcatccgctggaggggtg

SEQ ID NO: 158905 - DNA, 838 bp, Zea mays
  unsure (1)..(838): unsure at all n locations
  Clone ID: MRT4577_76497C.1
actcctatgggcgattgggttcctcgaggccggccgggagtggatcttgccaagacttccccaaacaaaggaggcagaacggagacaaaaccaaccgcaatgggcgacgcaccgcgcctcagcgccagcgcgcgcccggccaccgctcccagtctccgtcgtctcatcatcgtcctcggccccggccccgggattccgccatgcgcaaggcgacgcggcgcttgcggccaacaccaccgtctcctcgcctcgcgccctcggctccatctccatccatcggtcaaccgccggccggctcacgcacgcaggcaggcattttgatatttacatgcatccgtccttgcatgcactgcacacgcacgccggtgaattttcccttcttcctcgacacgtcggaacggaaactgtaaaaaaggcgggcgcgcggacacatgttgcccccggcccgtacgtacgtcggccccacgacggggacggcggtggcgtctggccggcgggcgacggggcccgaccgaccggcgtgtttgctgcttgcattcatggttagcatgcatgcgtgcccgtgcttgttgttgccggcggtggcgtcgtctgcttgttgttgccgaatgcccgggacgccgcatcgcacgcaccaccgggtccgggcgacacatttcgaaatccttgcccgtacgtgctgcatgcatgcattgcctgtaccggncggtcctgcttgcccagntcgncgtgctggttcacgggggagagaaggctccagggcacagctagcacatgtctgatcaggcatacagcatacgctaaacatccttgnntgtcgacaactacatttcatgtc

SEQ ID NO: 158906 - DNA, 203 bp, Zea mays
  Clone ID: MRT4577_76498C.1
ctttggctgatttatgtgcttgaaaaaaaacaaaaaaaaaaacaaaaaaaacccaaccaaaaaaaaaaaaaaaaaaataaaaaagacaggcgcctataaggacatgagtatggttaagtaatactactactctttatacaccttgatgcaaatctaaccaaattgttgatgattatcaatcctctaatcgacaaaatattcat

SEQ ID NO: 158907 - DNA, 170 bp, Zea mays
  Clone ID: MRT4577_76499C.1
cttctttcctacagcgcctgtactgacgatctttctcctgcccatcccctgcgattttcccctgctgaaaattttccatggagaaactgttttcatgagcgagaaatctcagagacacgaatacctgaatcaagatcacacaacacatggaacgcacctcaacacacatg

SEQ ID NO: 158908 - DNA, 906 bp, Zea mays
  Clone ID: MRT4577_7649C.1
gtacccccgggctcggccggggccccggtgtgttccccacctaaccccaccccgaatccaccatggccgccggctctggccccgccccgcccgcggaagcgcagcccccgccgccgatccaccatctgccgccggacgcgctccacaacgtgctgctccgcctgcagctgcgcgacgccgtcgtgtgccgccccgtctcgcgcctcttccacgagaccctctcgccgcagctcctcgcgctgctccccagcctgcgcctcctcctcctccgccacccgcgtcccgacggcggcggctgcctccacgccttcgaccccgcgcgccgcacctggctccgcctccccttcgcccacttcctcccctaccactccttctcccccgtcgcctcatccacgtccctcctctacctctgggtcgagacctcctcctccacctcgcccctggcactccccccgtccacctcctccgcgtcttccgcctcgcccgtgcacccgcccaaatcgctcgccgtctgcaaccccttcgccggcacgtaccgcctcttgccccagctcggatccgcctgggcgcgccacggcaccgtcctcgccggccccgccggcacggtgctcgtcctcaccgagctcgccgcgctatcctacaccccctccggatccgccaagtggatgaagcatcccctctctctgccgtccaagccgcggagccccatactggcctccgacgccgtcttcgcgctctgcgacgtcggcacgccgtggcgcagccagtggaagctcttctcctgcccgcttgccatgctcacggggggctgggcgcccgtggagcgagcggcgtggggagacgtcttcgaggtcctcaagcgtcctcggctcctggctggggccagcggccgccgggtccttatga

SEQ ID NO: 158909 - DNA, 456 bp, Zea mays
  Clone ID: MRT4577_764C.1
ctcacgcgtacgtagcaccgcagagcaggagcgcaccaccgcgacacagccaagctcgactccaccgacacgctgcgctcgagcccgtccgagccgcccgctagatccatggcgcggctgctaccgacggccgcggtagttgccatcgaggacgacgtcctggcggcaggcctgccgggcgcccgggcggagtctgcctcgccggcgggggacgacgcgccgtcgtacaggaaccacaccgatggcggcggcgatgggtggttcttcgacgccaacaccaacgactggtccgggtactactacgactgggccgacggcgagaccttatacctgggtgactacctcattctgaagacgaacgacaactcgtcggaggagcagaccaccagacgccacgacattcagtctctgcgacgccagcgacgatctggaggagactacgtccatctacggagg

SEQ ID NO: 158910 - DNA, 385 bp, Zea mays
  unsure (1)..(385): unsure at all n locations
  Clone ID: MRT4577_76500C.1
agcagtggtaacagcgcagagtacgcgggggtgagcggttgatcaactgtaccaaaaaaaaaaaaaaaaaaaaaaaaaaaaaaaaaaaaaaaaaaaaaaaaaaaaaaaaaaacaaaaaaaaaaaaaaaaaaaaaaaaaaaaaaaaaannnctttgngttgtaacaactgttaaagggcaaattcaaaaaaactggcggccgtaataaaggaatccaagctcggaacaaagcttggcgaaataatggtaaaaattgtttcctgtggaaaattgtaatccgttaaaaattccaaaaaaaaaacaacccggaagaaaaaagtgaaaagcctggggggccaaagaagggagctaactaaaataaatggcgtggggctaattgcccgttt

SEQ ID NO: 158911 - DNA, 541 bp, Zea mays
  Clone ID: MRT4577_76501C.1
ttttttttttttttttttctttttgcgcaaatgataacccccgtttttaatacgtaaagtttatatgcacaaccacaatcgaaaaagacgagggagttcctcatcaaactaagtaagtacatgagagtttgttgccctccgggatgtccatagtccattgcatgccgcggccctgctttcaccggccggcggactgttcggtccgtcgaaaagaactccacagcggcggttcgccgctcaccgcggcagagggcgggtcttggtggggcggcggaagcagccgaatagcgagcccagggcgtccctgagcacccgccccctctccggcacgtaccgcgggtgcacgccaggcgcggcggcgccgccgccaaccttcttcccgccgatacatgtgcccgagcccggcattctcggcagcttcctctgcctgcctgcctgcggctgcgtgtatgtatgcgctagtgcgtgtgtgatcttgttggggtcgttgcttgctgagtgctgagcctgaggcctgagctggttgcgatctgcgagctcg

SEQ ID NO: 158912 - DNA, 784 bp, Zea mays
  unsure (1)..(784): unsure at all n locations
  Clone ID: MRT4577_76502C.1
aactacgacaagacacgaccatctatccagttagtggctagtgcgtaaagaagatggcgactaataagctcgcagcgctcgtcgtcttggtcgcgttcctcgccgggcccgcggcgtgcgagggtatcaacatttgcctcaacttcaacggctggctgaagccatccattctggacccgctgttctgtcctcgcggctccggccctccggtcccttctccctcggggtcagggctcagctacggctattacaacaccaggtgccctaccgcggagaagatcatcaaggatgccgtgaagaaggccgtggatgagaaccccggcatgggcgcggggctcatccgtctcttcttccacgactgcttcgttcggggatgcgatgcttccgtcctcctcaacacgaccaactcccagaacagcgacacggagagggaaggccttcccaacaaggacagcctgcgagggttcgaggtgatcgacgaggccaagacggcgatcgaggccgcctgcaacaatacagtctcatgcgcagacattgtcgccttcgccgcccgcgacgcgtcctacttcctcagcaacggcagcatcaatatccggatgccaggcggnccgctacgacgggncgcgagtccttcgccaacgagaccgaccagctgcccgggcccttctccaacgtcgcgcagctccaggcgagcttcgcggccaaggggcttcacctccgacgagatggtcacgctctccggcgcgcacaccatcggccgcgncccgctgcatgttcttctcag

SEQ ID NO: 158913 - DNA, 275 bp, Zea mays
  Clone ID: MRT4577_76503C.1
cccacgcgtccgcccacgcgtccgcccacgcgtccgcccacgcgtccgcccacgcgtccgcccacgcgtccgcccacgcgtccgggaaccgcaagccttccggtggtgctttagaaacttgtttagtgcctgcatgcatccttaatcatatgcagccactctgtacatatctgacttagctcagttaataggggactgtgcttgccccaaatggaggcagggccgtttgtgtctttctcatgtttccattagcgaagcaacgcaaagttctgggc

SEQ ID NO: 158914 - DNA, 481 bp, Zea mays
  Clone ID: MRT4577_76504C.1
gtccgccctttctgcccgccgccggccacttcaagactactccccgccgcgttacctcctcctcgtcctcctggggttacccagctctgttcccctttcagggaacgccttgagaggcggggcgggtccttggtccggaggcgcggcgacggcgagtgatttttgttcgccagagggagagttttttttttcaccgggtttggtgggaagtaaggaggcggccgcgagtggcgagacgttcacgggttagatctggcggtacggcgtcgcggatctgagcgaggtttcggtggagcgatcaggaggtggtcactatcttcgcctcatttcgagtagtttgggcgcctgtagtttgcctgtttccttttcggtgtctgatcaagaagatgatgtgctcagagggcttctagttgttgctgatatcttgtcttgtgttggatcacccggaagctgaaaatgtgctcctcacttctgctctccc

SEQ ID NO: 158915 - DNA, 766 bp, Zea mays
  Clone ID: MRT4577_76505C.1
atctcatctcactcgcattcactcaactgatactactagctagtccacttccttcggatctcttgccaccaagctctgctcccgccaagatgtcgacggtgacccgcgcctacctcgaccagaggctcgccgccgccaagcgctgctccaaaggtaacggttccggcctcaggccagcacctgctctgctcgtatatcccactcattgcaggtcatgtgtgtgctgaaacttgatcttgattaacattcctatccgaaactgcagaagctaccatggcgggagccaaggccgcggccgtcgccaccgtcgctgccgcagtccccacagtaagtagccagctagccattcagttcttccatggttcatagcatgtctcatgagtgcgttacctgtcatttcagctggcgagcgtgaggatgctgccgtgggccaaggcgcacctgaacccaaccgggcaggcgctcatcatctccaccgtcgccgggatggcctacttcatcgtcgccgacaagaccatcctctccatggccaggaagcactccttcgacgacgcgccggaccacctcaagaacacctccttccactagttagatccactattagtaatgcccaataaaccgtgtaagccaaagtgcatagcgtacagtgatcagcaaggggggtcagggatgctcccggatagtcttgtactgcgagtgcaattgctcatttcgtaatataattttcatcatgcaagtagccatgtacagtatgttttgagctagc

SEQ ID NO: 158916 - DNA, 695 bp, Zea mays
  unsure (1)..(695): unsure at all n locations
  Clone ID: MRT4577_76506C.1
aattcggcacgaggcctcgtcggtggccgcgggggccacggcgtccccggcctcctccgcgtcctcggcatcctccgcctcgctccagcgctccctcacctctgccgccgccagcaagatgaagaaggcgctcgggctccgctcgtccgcctcctccaagggtgtcggcagccccgggagtggcgggaaggcggcgcccccgcgtaggcccgccacgtttggggagctcatgcgggtgcagatgcgcatctccgagcccaccgacgccaggatccgcaggggcctcctccgcatcgctgccagccagcttggcaggcgtgcagaatctatggtgttgcccttggaattcttgcagcaattcaaggcatcagatttctctgatcctcaagagtatgaggcatggcggagtaggaatctgaagcttcttgaggctggtctacttgttcatccactcgttccattgaacaaatcagacagttctgtgcaacggttgcggcaaattatacggngtgcatatgataggccacttgaaactgggaaaaactctgagtcaatgcagggtctacgtacttgtgtcatgtcccttgctgggagatctcatgatggtacttctgatggatgccactgggcagatggcttcccattgaatctccatctgtaccaaacgttggtagaagcttgctttgataatgatg

SEQ ID NO: 158917 - DNA, 283 bp, Zea mays
  Clone ID: MRT4577_76507C.1
atagggtattgatgatgttgattatgcacaccaagtttagaactatagacaaaacactagtacctccatccacaacacaagtataatggattctagtggacaaaggtagtacttatctattatttcgaatagaattttcgaagtccaatgtttctgtttattttttcattgcaactgtggtgctaggtgtcacgtgatatctgaatttggtcgtctctagcagtttggtttaaatatgttagttatttttaatactttttatttctgtatgtaaggtttgttt

SEQ ID NO: 158918 - DNA, 126 bp, Zea mays
  Clone ID: MRT4577_76508C.1
atattaaccccgacacttactttttataaagggggacatcgggaacatgacaagagggtaaaacctgaaggacctggttttatggttttgggataacacatgaccatttaccaacaaatttggaat

SEQ ID NO: 158919 - DNA, 2036 bp, Zea mays
  Clone ID: MRT4577_76509C.1
ccaagatcttggttctgcaaaatgttgtgcaaactgcaaagctgttgcaatttttgttgatttccctttcagacatcaaaacaactgtgcataaacagtctacttctacaccagtgcttccttcaaacctttttccagtatcatcaactgtcatgtgtttgactttaacttgttagaagcgacaagtaaaaaacgtgcatgcctaatcaaagatcacatttacagcataactgtctgttttgaactatagtttggcctatacaaggagtcaaaactcgaatactcccattgtctaaaatgtaggacatttttgttttttatgaactcagtttcctaattttggcaaacttaatgaaaaatgcatcaccatctataacattaaattagttttattaaatccaccatgaaatgtctggacagtgcatttatttcggattgtaaatgataattatgtggtttaaggatgcatgcaaacagactttttttagatttgtcttgtgaaaacaacagcagtattttttttccgaacgcacaagaggtgtctcatttgattaaagtagactagatgtttaggctatggccagcagactacgcatatggtcatgcaaaataccgtctacactgtagattacattgtttatatagtggagtttgaaatagtgaatgatatgagtaacgatgttcgagtcttggagatagctttacaatactattatttttttgtcgaatggccaagagagctgcatgccatttcagtaaacaacgctagtagaattaatatcataaatattttcagacatttaattttttagtgtattttactgacatatttgtagaagtaaccgtcatatttagattgtaatggtggccaacaaggtaaagaaagggagaacggatcaaggattgtttgatgattgttggtatctgtcttctgcagtacactgcatttgatcagctcaagaaaaggataattcagaggcagcgacgcaaaaatgcagcaacggcagaggataattccatagtggctctttctgctttctcagcttttctgcttggtgccgtctcgaaaagtattgctacagtattgacttatccattaatcaggtttgcaaacttttacttgacaacagaagtgtatctgggccttaccacctgcttttgcttgttattttttctagatggattcctttatgtatgtgtgtttctggctcctgtaaggggttttctgtattgggcctttctttagaccctggttccaattttttcttaatataacgaggcacagtttttctgcgcgtttcgagaaaaatactatctaatgatttgtctcttactacaattaactgtcaaacaggtgcaaggtgatgattcaggctgcagaccctgatgaggatgatgacgatgaacctggaaggccaagcaaatcaagaacaccaaaaacaatgctaggtgccttgcatgctatctggagcaaggaaggcattccaggcttcttcaaaggcttgaatgctcagatccttaaaacagttctgagctccgccttgctgctgatgattaaggagaagatctcgaagttcacttgggtctcactgcttgccctgcggcggtatcttttcgtttctcagaagaggatcaagagtgcaactgtataaatacgttagctccaaaacacaaactagcacacatagcgacatggtgcttctggagatgttatgccaaggaataaatctgaggaataatcagcagaaatacttaaccaagagagagagaataaggtgtgtatctggggtcgatagcatcagagggctcttcaataagtttgtccatttcttttttttctctctctctctgaatctcttgtagctagtgacgtagatgttgcgcggatctgaaactggactgtacttttagcgtttgttgcctgtaattaggggtgataatgggctctgaattttacagtataatatttaaggttcggattaaaattgggtcctgtttctattcatttttaattaaattttatttaggactctaag

SEQ ID NO: 158920 - DNA, 392 bp, Zea mays
  unsure (1)..(392): unsure at all n locations
  Clone ID: MRT4577_7650C.1
tctggccgttccttaccaaaatccttcttaaccacaanaaaaaaaaaaaaaaaaaaaaggaannttttaaaccncttttgggcttgaaaaccaagcttacaggggataacctattttattcaaagggggtttgattccaaagaaaagaccccgctcccttcaagcccgctaaaggttacacatgaaactggaaaatggccgctgaatgaggtggaacaaaatgaccgcccatttccccaagcacatttattggattggcccaggggcgggtggaggagcaaaaccctctgggtaaatggggggaagatcatgacccgccactggatccacatgaacccatttcctgcctgagaggttggggggctcaaaggggacattggctttctttaggg

SEQ ID NO: 158921 - DNA, 209 bp, Zea mays
  Clone ID: MRT4577_76510C.1
tgggaaaggtgttcagggcacttcttgtcctctctgtcccataaacctacctccacctacacactccccctagccagccaggcagcttctctgcctgggaggggagactggacccacctctttctccttggctgcagtggggcctttatccagtgccagggaggaacaacatagttaatttttttctaaccttgaccctttgagggaag

SEQ ID NO: 158922 - DNA, 417 bp, Zea mays
  unsure (1)..(417): unsure at all n locations
  Clone ID: MRT4577_76511C.1
ggacctttgggctgattagtgcttgttagtgcttggttatgtgcatggaacgagagccgaagaagcacacagtcggactgtagaagcaggtagtaacctccatccgaagtcgtttactcgcgctaagaggtcgggtcacacgattaagtcgaggaaacgtataaacgagcatgagttcccgttacggtctccgagataacaaatacgcgtccgctcgacgtagatcgcgttacgatatggagcacgccagatggtgagagctacgtcgtcgtttcaatctacctctgtagcgaaacgccggagatagtcagagatctcctccaagttagtacctaagagaaggattcgagccacgagtaatatatcgtgtcgagatagtcngcaagtccctattacacgcacaggtcagtcttagtc

SEQ ID NO: 158923 - DNA, 120 bp, Zea mays
  Clone ID: MRT4577_76512C.1
ggccctctcccttgcaccgtcgacacgattatcggtgagctttgtcgatgtcggaagcgaagctgggaagcaggcgtcgatagtcgagctggtctggggaagggctgctcgcattggacg

SEQ ID NO: 158924 - DNA, 360 bp, Zea mays
  Clone ID: MRT4577_76513C.1
cccacgcgtccgcccacgcgtgcgcccacgcgtccggacgacgtgccctcccggcgtgccccggtcgtcctgccgtccggggatcgatctggccatgggacaacactgagatcctcgtcgtcgtgagccgaacgttaatccggcggacgcgatggcggcgccatatgctgcagacgcagataggatgacaatcacgtacgccgtcgatgacaactgaccgatggtgcggccataccttgaaagctgtcaggacacgttagcagaccttgggtactctgttgtggccgtgtgcatcgacaaggtcgagatcagccagaacactctcaagagggccatcgactcgctggtacagaatgggca

SEQ ID NO: 158925 - DNA, 474 bp, Zea mays
  unsure (1)..(474): unsure at all n locations
  Clone ID: MRT4577_76514C.1
gggggggcactttcacccggggggggggatggactactaagtctaagttaatacctttacttacacattctcatggggggtctcattctcgcactcatttatttctcttatttattcctcacagtctaaaaaccggcttttttttatccatctctttcttctgtagcgggggggggggggcagtatcagtttctgccttgagctgggcatcgggcggctcacttgcatcatcaacatgatgctcaaatatctcaccaagcccacgaggaagaacatttctgatgctcttcttatcttgggtgtgattgggagtgtcatctcagtcattgtggggtggattgtgtttattgctgtgtctaccattattnggggtgatcctgatcatcttntatggaagccattagccttggtctcgtttgaaggcatcattccgaacaatgataacatacgatttgttggtgcacctnaaactgg

SEQ ID NO: 158926 - DNA, 227 bp, Zea mays
  Clone ID: MRT4577_76515C.1
ccctcatattttccatttgtttttattaccccccatttttggcccatgaaaaggtaaagcccgcagggcacccaaaacaagggttacgcccccgggttacctaactacacaggtgaaagaatatttttcttagaatgactgtggtgccaaggcccccgggggaaggactctgggggaggggatacctgaggagaatgcccacatttaaaactatgggtgaataatgg

SEQ ID NO: 158927 - DNA, 373 bp, Zea mays
  Clone ID: MRT4577_76516C.1
tctactcgtccgcttaggtggccggacgggggggggattgtaacctcaactcgggatctaaatcgggactcagcagcgcgccagctccataggaggagatggcgctgacaacaatgggtcttggtggacctgcgggcatggggcaaaacctcgccctcaacattgcagataaaggggaccccatctctgagaccaacaggacagcctggaaggtggacgagaccgtgcagtgtgccaaggcggaaggaaaccctaccgtctaccgcttgcatgaccccgcgttctttgtgaagtgcattcagaagccacgggtggtgatcatgctcatcaagggcggtgcgccaattgaccagaccattgcgacgctcgcagc

SEQ ID NO: 158928 - DNA, 233 bp, Zea mays
  Clone ID: MRT4577_76517C.1
cggacggtgggcgacggcgtcggcgaagccgcgcagatctactgtgagctcgcccgcctcaggttcctataccatctcgaattcggagtcttctctcgtccctatccccctccagcaccgccacagccgaaacctttgcccgacaacgcgacaagcagcttcaatccagttccttggaggtcgcgttagagcgtggttgaatctgacgaagttgaaagaccccctcactcgcg

SEQ ID NO: 158929 - DNA, 441 bp, Zea mays
  unsure (1)..(441): unsure at all n locations
  Clone ID: MRT4577_76518C.1
ctcgccgacgacgtctgcgacgcgctatacacgtcacctcaggccgacaccgtccacaaccgcctctccgcgtcctccgtcctcgtctgcggagacgggcccctcccgcgcgccaagatcgcgcatttcggcgcggccgacctcgccggcgagctcccggtcgagcacaaggacgacgacgaccaccgaggaggaggagggtcaaggggctcctccggctccggggacaaccgccgcaccanaagccggnggaggcggatcgagggcacgcgcggntacatggcgccggagctcgaggcgggcggcccgccgtcgcgccgatccgacgngttcgcgctcagcgtcnngctgctccatctgncgtctgcccaggaaccgnnncncnaccagctgcccaacccanccacggccaaacaccacaagacctacctgacccacacc

SEQ ID NO: 158930 - DNA, 267 bp, Zea mays
  Clone ID: MRT4577_76519C.1
atggcggggaagaggccacaaatccacgggcagagaggggagaacgatggtgagaaggtctcgggcgggccagagaaactccggacagcgattccggccacggggaggggacttaaggccttggctaacttcagcagaggcaggggtgacacgggaaactactccagtgaactagaccgggctaaatcggtcggccactgcgcgagcacggcggaccgccgcggtcgaacaccggcgaaggcgaaattggacgaacacagggcgtaa

SEQ ID NO: 158931 - DNA, 238 bp, Zea mays
  Clone ID: MRT4577_7651C.1
ctagcccattagacctcgttcctgtcgcggaccacgagctccacttcacatctcacccggcggcagcgcggtcagttgaacaatggcggactcgatggccatctcggcggtcaggctctgcacccgcaagttcttcaggagccgcatcctggaccgtaagcagttcgtgcttgaggtgatctagatcggccgcgccatcgtctccaaggcggagttgaaggagaggctaccaaggcgt

SEQ ID NO: 158932 - DNA, 170 bp, Zea mays
  Clone ID: MRT4577_76520C.1
tgatcgcctcggacggcggcaccataacctctggctccgcaagatgctagctgcaatccttacactctgcgtaccctaagtggcagggctggcgtgcctactattgagaacacagagcacgaacaacactgtacgagggggcagccagggtgttgctgaatactgccaaa

SEQ ID NO: 158933 - DNA, 683 bp, Zea mays
  Clone ID: MRT4577_76521C.1
agcgcagttgtcgtctcttgcggtgccgttgctggttctcacaccttttaggtctgttctcgtcttccgttccgactctctcttttccgctccagccactgaagatcctggtgtcgccatgggccgccgccccgcccgttgttaccggtattgtaagaacaagccgtacccaaagtctcgcttctgccgaggtgtccctgatgccaagattcgcatttttgacctggggcggaaaaaggcaaaagtggatgagtttccgctttgtggccacatggtgtcagatgcatatgagcagctgtcctctgaagccctggaggctgcccgaatttgtgccaataagtacatggtaaaaagttgtggcaaagatggcttccatatccgggtgcggctccaccccttccacgtcatccgcatcaacaagatgttgtcctgtgctggggctgacaggctccaaacaggcatgcgaggtgcctttggaaagccccagggcactgtggccagggttcacattggccaagttatcatgtccatccgcaccaagctgcagaacaaggagcatgtgattgagtgctctgcgcagggcctagttcaagtttcctggccgccagaagatccacatctcaaagaagtggggcttcaccaagttcaatgctgatgaatttgaagacatggtggctgaaaag

SEQ ID NO: 158934 - DNA, 1161 bp, Zea mays
  Clone ID: MRT4577_76522C.1
cacgcctccaactccaagcagctagatagactagatagctgttggcgtgcgacgcgtagcgagagcgtgactaaccgctgcctaagcaaccatataagcatttgattcgttcctaggacaggggagggttaaggtagttccttaatttttcttgcttttttttgtgtgtgtcgttgctggcgcggtagctatggaggtgtgctgctgctccacctcgtcgtccgtcctcaccgccgggggccgcggcgccgcggcgcggaggctggccgcgccggcggctcgctggggcgcggcggggtacgggagggcggtggcggcggtgctggcgcacccgctcccgcgcccggcacccaggccggccacgcggcgggcgcgcagggggggcgtcggcgtcgtcagggcggtgttcgagcggttcacggagcgggccgtcaaggcggtcgtgctgtcgcagcgggaggcccgggggctcggggagcccgccgtggcgccgagccacctcctcctcggcctggtcgccgaggaccgatcctcgggcggcttcctctcgtcggggatcaacatcgagcgcgcgcgcgaggagtgccgcggcatcgctgccagtgccagggacgcggactcggccaccgcgacgtctaggcccgggtcgtcggggctcgacacggacgtgcccttcgccgcgcccaccaagcaggtcttcgacgtggccgtcgtgctctccaagaacatgggctccagcttcgtctcgcccgagcacctcgccatcgcactcttctccctcgacgatccaaccaccaacaacctcctaaggagtttgggagcggatcccagtcatctagcatcggttgcagtcgaccgtctccaagcagagcttgcgaaagatggcagagatcctgctgaaccatcatctttcaaagttccaaagaaagcccctgctgcagccggaagatctgccttctcccagtccttgactaaaaagaaagataagggtgcgctggatcaattttgtttggatttgaccacacaagctagtggaggtttcattgatcctattattggccgtgaagaagagattgaaagagtagttcagatagtatgccggcggacgaagaacaaccctattcttttgggtgaggcaggtgttggcaaaactgcaattgc

SEQ ID NO: 158935 - DNA, 460 bp, Zea mays
  Clone ID: MRT4577_76523C.1
aattagccttttacccaccccccgccggacgacgctgcaaaccatggagcacgcgtacgacttactcgcgcgcgcgcacaccactacacttccggaatacgacgacctcccgcggtgccaaccgactcgcgtggaacgaaacgacacggcgccggagcacaggccgacgggcgcggtggcaatcaccaccaactacaacgtgccactcgacacgacaccgaacgggatcacgcgcccgatacaaaagatcctacgaaaactcaacaagcacgaacaggacaccataaagcggacctaactaaagaaacacatacaactaaaacacaaaaataagatggaaccatgacaaaaggatgatcacctaaaatgctctaaaaagaagaggggaagattgagatgaaatgtacactgacagagaaaaggagacagaaaaaaaccgaaagaatgaatacgaaaacaa

SEQ ID NO: 158936 - DNA, 156 bp, Zea mays
  Clone ID: MRT4577_76524C.1
cgtcgccaccgggcaactgtacgtcaagagcgacgtgtacggcttccgcgtggtgcttctggagcttctgaccgggctgcgcgcccaccaactgaacccggccacccaacaacacaacctggtggagtgggcgccggcttatcttttcggccgggc

SEQ ID NO: 158937 - DNA, 416 bp, Zea mays
  Clone ID: MRT4577_76525C.1
tggccacttccacgcaagcaggtcggttaggagggcacgaagaccgaagaccgagcggtgcggtgactcagaacgggaaccggacaggaccccaaaatctcatatccttactgatcgcacgcacgtgcccgtagacacgtcgactcttgccagacgagcaccaactccggcctctgctcctacaacgagatcggatactccacagacatgcaccatggtgctgcggatcttatgctacggataactgatctggaaccccggctaacacattaactacaaaatcctcggcttcataaagggttacattcgcacctttaatcttgcttgcattgaccacagaggcacaccgtaacatgcagcgaggacctgtacgcttgaaaccgacgactaggacatatgctggggaattgcatatt

SEQ ID NO: 158938 - DNA, 142 bp, Zea mays
  unsure (1)..(142): unsure at all n locations
  Clone ID: MRT4577_76526C.1
gccacagagttcgagagcttttgatgtaagacttcagagatactaggctgatntggttctaagtataaaggagcacatcgatcttggaatcatgtatgatccattctactgtgatttatagcatgaacttacacactcctaa

SEQ ID NO: 158939 - DNA, 322 bp, Zea mays
  unsure (1)..(322): unsure at all n locations
  Clone ID: MRT4577_76527C.1
ccaccaccacacgttcacggtagcgagagcttatcgtcgtcngcngcgaagatggtgtcgctnaagcngcagaagcngctcgccgcgagcntcctcaagtgtgggaaangcaaagtctggcttgaccccaatgaagtcaganagatcnccatngctaacncccgccagaacatccggaagtnggttaaggatgggtttatcatcaggaagcctcagaaggttcacncnaggtcccgtgcaagaagggcacatnangccaagcagaanggaaggcntctggatatngcagcgcagggtacagggagctagctcccacaagatc

SEQ ID NO: 158940 - DNA, 741 bp, Zea mays
  unsure (1)..(741): unsure at all n locations
  Clone ID: MRT4577_76528C.1
tcggccggggttgcccatcccagcaatagtaaagtatgaggggtggggtggcaaagaagagagcgccgccccgacaacacctacacgagctccaaatcaccgccaccgccgacgcaaccgccaccaccaactaccgagggaagatccggctaccaggggaccagatccgtcccacacgccagaaccccaacaccacgaggaggacgctcgccggccagccctagatccaccacgtcgcgcgcccgccgccgaaaacagcgcaacccctccaccaccagcagatgccgtcaatccaccacctgctgcacccgcagaaccagaggaggtagccaccgccaccagcccgaagctcgcgatcctcccagccggacaacccaacctgggtgacagcaacgacgccaccaaaggcaacagggacggcgtggtgccgcccgagcgcgccccagccccgcgtatccaccgcccgcccccgtctctgcgctgggaggaggcctgatagtcgcagcatgccacagggaagagtgtgctcgccatcctcctgccaccctccgacgcgcagagtaaaggagccaccacccgnacgcgcccacacagncagtgggccggagcgcctncaccacctacgcccatgcgggcgcgaacgccccgtccacaagcccctgccccgcatggaacttggtgcccgtgacccaacaggcgcctgggttgttgatccgtcgtgcacagccccccacggcgcgg

SEQ ID NO: 158941 - DNA, 861 bp, Zea mays
  unsure (1)..(861): unsure at all n locations
  Clone ID: MRT4577_76529C.1
cattgggaccctcgaggccggccgggctatcctccccaccctgcatactacacctacaccctgcaacaacgctcgccctttgcctctccacacccgacaaccgcaaccatgggcctcggtggtgctgctttgaagtttggctcgaccgccatctatgctctcgagttctgctgcgctgcaatcgtccttggcatttacagctacttcctcgctgtacaggctgaccgcgatgtcaacattccagtctggcaacaggccgtcactggtctctccggtgccgtcgtcctttacaccatctttgctgtcttgttgacttgctgcattggtggaaagacaatgtttgccatgcttgcaattctcttcaacatcctttgctgcggtgccatgattgccatcgccgttctgacccgtgatggtgcatccagctgctctggcaatgtaaagacccctcttggcaacggtcctgcacgctccaagcaaggctttggctccaacggccagggcaaccagatcacctactctgcttctctgggcaccacctgcaggctcaacactgcctgctttgccgtcgccatcatcggtgccttcctctttttgctcagcgccctccttcaggtagccctcatgcgccaccacaagaaggaaaagcgcttcggtcctggcccttcaaacggctacaccaagggctcccggcatgaagttctggcagcgcaagaaggctcacaggacccactggcagcgtgaccctgagggtgctgccgtgcctgctgccactggtggacttgctgctcctaatggtacccacgactaccgccccagncacgataccgcctacactgggctcaactgtcgcatctccca

SEQ ID NO: 158942 - DNA, 292 bp, Zea mays
  unsure (1)..(292): unsure at all n locations
  Clone ID: MRT4577_7652C.1
aggggaagngagagggggggggggggaaannaanaaacagagnaggggngggngggggggggggggggggattcccagccgcgaaatgggggggatntaggataaacgngtgagaggcgaagggagcccagaagcccgtgtgactggtgagggactccngggtgtgggtccgtggggggcgntanctcctcccggcggagaagaggggncagntggtaggcctttttnttgggaggaggagcactcgccacgttgtggggggcaaagcaggggaaagcaggagggggcgagg

SEQ ID NO: 158943 - DNA, 1257 bp, Zea mays
  Clone ID: MRT4577_76530C.1
gcacgagctactgcccactaatacattggtcaagctcgcaggcggccgggccacccgcccgcactagcccactccggagtccggccctcgccctgctcgccgcaatgcatcaccggttcgcgggcctcgtgcccaccgcccgccccgctctgccgccgatccacggcggagtcgtcggccggagctatccgcccgtccaccggtccttggcgcttcgcctggcgccgtttgcctccgcgtctgtccgacgcgcgtgccgccccctcgccgtctccgcccaatccaccagcctccggccggagaagttttttgaagtggagatgaaggtgcgcgactatgaaattgaccagtatggtgttgtcaacaatgcagtctatgctagctactgccaacatggtcgtcacgagctgcttgagagcgtaggcatcagtgcagatgcagtggcgcgcagtggggaatccctggctctctctgagttgaacctcaagtactttgcccctttgaggagtggcgataagtttgttgttaaggtgaggcttgcaggcatcaaaggtgtacggatgatattcgaccacatcattacaaaactgcctaatcatgagctaattctggaggcaaaggcaacggctgtttgcctgaacaaagactactatcctacccgtattcctcgtgaactattgtccaagatgcagctcttcttacccgtggacagcagagggtcaaatgaagacgttaataatcggaataacagctgcaactaattctggaggcaaagacaagggctgtttgttcgaactgaagactaccatctcatctccaaaactgtttatgtcatccaagctgcagcacctcatcgaagaatatagtagaatctagttttggggactggtggctgcataatagtaatccatccgttcttctttatttatcgcagtttagttaaaaatgaactagcggacgacaaatattcgagtacggttgtagtagaatctagtcttggagactggcggctgcttggtcctgcaatgccaacgaaaaccacctatgtatctccatctcaggagcactgtcatagaagagcgcagtccatcttcaatctttgtaactgttcacccgaaacatttgatccgttacggcagtcgtttggtacagaaaaaacttgttgctctggctgaataatatgtgctatgtacatctgcttgttgtattaggaacatgaaaggaaattgtcggaaaaaaaaaaaaaaaaaaaaaaaa

SEQ ID NO: 158944 - DNA, 786 bp, Zea mays
  unsure (1)..(786): unsure at all n locations
  Clone ID: MRT4577_76531C.1
cctgccgggataacaccaccaccacccccacagcccatccccaacccgcgttctggaggcagcccaccatgctgcgggcttctatcctccgggcccgtccatcggcacggccattggcacgccagacgccgctgcaatggcgcagcacccagcgctgctatgccgacatcaaaacaccgggagagacagtcgtccccaacccggccaaagaagtgacgccgtcgtccacgagcccgccaagcgacctgccaaagccgcctcctgcgccctcgtcgacgtcgccatcgcgctcagcacccgtcgagcagcccgcgacgactccaccaacggggcccggcagcgcgagcattgcgcccaacccgcagaagcccaagaaagccaagaagggccggttgcggcgcctgctgttctggctgaccatcctgtctggcctgggctatgccggcggagtgtggtactcgctcgtgtcggacaacttccacgacttcttcaccgagttcgtgccctatggcgaggatgccgtggcctacttcgaggagcgcgagttccgcaagcgattcccgggccgcgccgggcagccgcgcctccacgcacagatctcgggcgaggagaaggtcaccatccccggcaagagtggactgagtgcgcgcgtcgcggaaccaggccagtccgaccttggagcacgtggcccgcacgtcagcgccgtggccgacaacacaaagaagccggccgctgcgggagcgcagcccaaggtggcctncagcaagacacgcaggagcacaagca

SEQ ID NO: 158945 - DNA, 382 bp, Zea mays
  unsure (1)..(382): unsure at all n locations
  Clone ID: MRT4577_76532C.1
caacgcgtaaaggacaaatatcctcgctcgtatgctctgctnctaacccggcgcaggtagcaacgacaccttgtttccggctccagccatgtcggcggcgatcggcgaaggctgcatgatggacctgcagaccacgacgacgacactgcaagaggtcaaaggcctcgccaccacggaccggttgatcgtggacaagccggcattcacgctagcggacctcaagaagggcattccgccgcactgcttgcagcgctcgctaatcaggtcctgctactacctcggccacgacctaatcatccccgagaggatcctgttctcttctctccccgtgatccccgagcttccgtaataagtcctcaaagtcagcgcctggccgctctac

SEQ ID NO: 158946 - DNA, 197 bp, Zea mays
  Clone ID: MRT4577_76533C.1
agcctgtggaatgaattcctcttcccccttgaggccaggactgactctcctggaagaactcaacctatatacagctgtgccaaatgaaggctacctgcctctgagactcccactgctgcttctgtcgttgttcacttgtcagatacaattttattctcaggatgcaaattccaataaagtacaaatctatgttactg

SEQ ID NO: 158947 - DNA, 1870 bp, Zea mays
  Clone ID: MRT4577_76534C.1
aattcggcacgaggctcctccctagctagctagctcgcacgccaccatgcagctcgcggcgttgtgcactgaccccgtggtgctgtgcagcgccttcctctgcctcctcctccacgtggctctccgctcgctgctgcaccctccttctgccgcctcttcctccgggcgccgcgggcagctcccgccggggccaccgggcctgccgatcctcggcgcgctgccactcgtgggcccagccccgcacgccggcctggccgcgctggcgcgcaagtacggtcccatcatgtacctgaagatgggcacggccggcgtggtggtggcgtcgtccccgcgcgcggcgcggacgttcctcaaggcgctggacgcgcggtacgccaaccggccggccgtggcgagcgccgcggacatcacgtacgggcggcagaacatggtgttcgcggactacgggcccaagtggaagctgatgcggaagctcgccagcgtgcacctgctcggggcgcgcgcgctcgcggactgggcgtgcgtgcggcgcggcgaggccggccacgtgctgcgcggcgtggcggaggcggcggcggccggcaggcccgtcgtcgtgccggagctgctcgtgtgcgccctcgccaacatcgtcgggcagatcacagtgagcaagcgggtgttcgacgcgcagggggacgactcgaacagatacaaggacatgatcgtgtcgctgctgaccggcacgggcatgttcaacatcagcgacttcgtgccggcgctggcgcgtctggacctgcagggcgtgcaggcgaagctgcggcgcgtccaccgccagttcgacggcctcatcaccaagctgctggccgagcacgccgcgacggccgcggaccgcgcgcgccagggccgcccggacttcgtcgaccggctccgcgccacgatggacgccggcgccgccgccgacgacgagagcggcgagaccatcaccgaggtcaacatcaagggcctcatcttcgacatgttcacggcgggtacggacacgtcgtcgatcatcgtggagtgggcgatggcggagatgctcaagaacccgagcgtcatggcgcgcgcgcaggaggagctggaccgcgcggtgggccggggccggcgcctggaggagtcggacctgcccggcctcccctacctgcaggcggtgtgcaaggaggccatgcggctgcacccgtccacgccgctcagcctcccgcacttctccttggacgcctgcgacgacgtcgacggctaccgcgtcccggccaacacccgcctgctcgtcaacgtctgggccatcggccgggacccggaggcctgggagaggcccctcgacttccgccccgagcgcttcctgcccgggggcggcgcggagaaggtcgacccgctggggaactgcttcgagctcatcccgttcggcgccggccggaggatctgcgcggggaagctggcgggcatggtgttcgtgcagtacttcctgggcacgctgctgcacgcgttcgactggcgcctgcctgacggcgaggagaagctggacatgagcgagacgttcggcctcgcgctgcccaaggcagtgccgctccgcgccgtcgccacgccacggctcgtgccggaagcctatgcctgagcctgagttagctgtcagagttcttcacgcgtgctgtcccaacaagcatggtttggcttggatggtttactctgttggtgttgctgccttcctgcatgcgtgcgcatacactagtattctgtgttgatcctacacttgttgcctggtatagtacacaacatttgaaccgatgatggttgatctgaactcagaggagttaactagagaattgccacataaaaaaaaaaaaaaggggcggcc

SEQ ID NO: 158948 - DNA, 346 bp, Zea mays
  Clone ID: MRT4577_76535C.1
ccccgcgtccgccccgcgtccgccccggtgcgcgtgtcggcccccacgggcgccgctgctcttcggcggcgcagccccggtcagatgcgcgagagcgtaggcctggcgcggtgggcgtggccttagccgcggtggtgagcacgacccttggcctcacggcttggcgtggttccggccccggcggctggcacgaacccgacggtcgtacgggacccggcggtcgtacggcgcgcgggcgcggtccctggcgtcgcgggcgcggcctcccggcacagcgcggccccacagggttggcgcatcggccaggccctcggccagcgcgggctcgcggcctcccccggcggcg

SEQ ID NO: 158949 - DNA, 375 bp, Zea mays
  Clone ID: MRT4577_76536C.1
ttctaaaggattgatcctatagaatactttcttgcgagccccttttgaataagggggggggttcctacaaatcctgtgaaattcatatggaatggcttgtttcatatgaattttggaggaattttactaagaggttgaacctcatggaaagtttcctttgtgtcactgtctcatcaaattcgtgtgtttttttgtctgctccatccaaacattcagtttcctgtgttttctcaatccataggattcaagatgtcagggcattatattcctagccttttctattcctacatttctagaaccctgcattctgatgaggccctaaaccagtatactatgcatgaaaaagtttccattatcttgtcatggacaaagtga

SEQ ID NO: 158950 - DNA, 1498 bp, Zea mays
  Clone ID: MRT4577_76537C.1
cattgggtacctcgaggccggccgggagggcaaggaaagtgtggtttccaagtcctcacctcacacactctcttcttctctccttcgttctccctcgcaaagtcagggtcactgaaaggagcggaagagcccaagtagttcttcgccaccggtaccgccgcatcgatcatcatggtgttctcctcgctcccgatcttcctagaccctcccaattggggccagatgcagatgcagatgcagccaccgctccagtgtctcctcggcagcggcggtggcagcgaccaccaccacctcatgcctcctccgtccggcctggcgccgctgccgggaggtcctgctgacacagcggcgagcgctccggcgggaggcgtctcgtccacctcggtctcggtgcaagccgcggcgggagcgggggcaggggcgcagcctcgcccggtggtgtcgatggcggagcgcgcccggctcgcgcgcgtgccgctgccggagcccggcacgctccgatgcccgcgctgtgactcgaccaacaccaagttctgctacttcaataactactcgctgtcgcagccgcgccacttctgcaaggcgtgccgccgctactggacccgtggcggcgcgctccgcaacgtgcccgtcggcggcgggtgcaggcgcaacaccaagcgctccagcaagaagtcgtcccgcggcggcggcgcgggcgccacggcggccacctcctcgtcctcgaccacctccacctccaccacggccaccaccaccaccaccacgagcgcggccatggcggcggccgaggccatcgccggcatgcaggcgcagctgccccacctcggcctcccgcccgcagcagccgccgcggcgcttgaggcctcgctggagggctaccaccactacctcccgctccagatgcagccgcagttcctgcagcaggctggcctgcacggctaccatttcgccgacgacggcaccggcgtcctcgcagctgacgggttcccgaggggcgtcgtcgcctcggggctgctcgcgcagctcgcggcggtgaagatggaggagcacggcagcaacggcggaggtgccatcgcggcgcatcatgagcagcagtcctactggcccggcagcaccggcggtggcggtgggtggccggtggagttcttgtcggggttcagctcatcctcgtcggggaatgtgttgtgagttgcatgtggccgcgaccaggtccacctgggcatgcatgatggggggcatgcatgcatggatgctgatgaagctgaactagctcaccatcctcaattagttctagggtttatgtggtgtttggaacttaattggcgtcgtcttcttcaattaggctggtgatgatcttgtgttggggtaaggtttttacatgtttttttttcttatgagttttaagctggttaatgtcgtgcagttggtagttttgcatgtagtgggaagtgcatgtgttgactcatggaggttatatgtgtcaggttacttaact

SEQ ID NO: 158951 - DNA, 478 bp, Zea mays
  Clone ID: MRT4577_76538C.1
cctactctcagcgaactagctagtttctgtccatttcaactcatactatctggcatgtgatactcatgcttcttattgtgcaactaacatacatactatctcattcagtccagtctattctgtctgcctatctccccagtcaatttcttccattcataccatactgacagtcattgaaccttctcctgcttaatttaccagcagcaaccaactactatccattcagctcagcttaagctggtgtgagcccctgcttaccttcttgacacataccactagttgttgctcgttctaccaagcacgctgcgcctaaacgctggcatccctcttaccaactgcatacaattgctgccattcataccaacttgcttttgacaaaacccagcaggcattctaaccaacatacccatcatttggtggttgcccttcttttaagatttcttaatgagttaatagttcaataattaaaggttttttg

SEQ ID NO: 158952 - DNA, 292 bp, Zea mays
  Clone ID: MRT4577_76539C.1
cagtcttcctgcccagggaagaccaccttttccgcaaggtccactatctccccttcctgccctcaactgaggacgtttacgactgcagggtggagcactggggcttggatgagcctcttctcaagcactgggagtttgatgctccaagccctctcccagagactacagagaacgtggtgtgtgccctgggcctgactgtgggtctggtgggcatcattattgggaccatcttcatcatcaagggattgcgcaaaagcaatgcagcagaacgcagggggcctctgtaaggcac

SEQ ID NO: 158953 - DNA, 385 bp, Zea mays
  unsure (1)..(385): unsure at all n locations
  Clone ID: MRT4577_7653C.1
ctcccgccggcccgcctcccctctcccgcgacncgcaccccgnctcccggttgaaccaaatccctcgcctcatcaccccagcgccagccgccctatcgccctgtcgcgcgaagcaatggcgccccccggcaaggcgattggcgctggcgccgcgaacaaggcgacgtccaggagctccaaggctgggctgccgttcccagccggcaggatcgcccgtttcctcaaggccggcaagcacgccgagggcgtgggcgccggagccgctgccacggtgggcgctgaccaggagagcccgggggcggcggccagggggcgcggggggaacggagacggggggagggggcggggggggaggcggggggggggnnggggggggggggcgggg

SEQ ID NO: 158954 - DNA, 188 bp, Zea mays
  Clone ID: MRT4577_76540C.1
tacatagtggaagtacactagccaacatgcttagcgaccaatgggtagcgcaatatttttcgccctccttgaccctccttgactcttatcagcaagcagctgcgtacctcagactttgtattccacactgcatcacacacaatacctcctcttcggtgacagtcgcgcggtgatttctaatacccaac

SEQ ID NO: 158955 - DNA, 186 bp, Zea mays
  unsure (1)..(186): unsure at all n locations
  Clone ID: MRT4577_76541C.1
tagaggataagaannggataggagataaggagccncacgnaggaaaaaaaagataagggaaaacngagaaaaagagggagacncggggtaaagatagctgactggaacgcataagtttgtaagacaccaaattgaaacatcccgagagatggagacaaacaacctgtcacttttattcctattgga

SEQ ID NO: 158956 - DNA, 112 bp, Zea mays
  Clone ID: MRT4577_76542C.1
gcgagagcacttgtggaggtggcacactgcacaactgtcgcatgactgattggctgtaccgcccagaggatgtagttcttgcacagcttcgataacttcaaggctcacttgg

SEQ ID NO: 158957 - DNA, 1352 bp, Zea mays
  Clone ID: MRT4577_76543C.1
cattgggtacctcgaggccggccgggacagtgcagtgctccccgaggtccccaaaagacaagcaggcaagcagcaaagacacgcctccctgcttgcactccccacacgcccagtcgcccacacctccaacagacaaagacaatctagcaagcacacacagcatcaggaggaggagatcgagtaggagcagaagcaaagaatggggagagctccgtgctgcgagaagatggggctcaagagggggccatggacgccggaggaggacaagatcctggtcgcgcacatccagagcttcggccacagcaactggcgcgcgctgcccaagcaagccgggctgctgcggtgcggcaagagctgccggctccggtggatcaactacctgcgcccggacatcaagcgcggcaacttcagcaaggaggaggaggacgccatcatcaccctccacgagcagctcggcaacaggtggtccgccatcgccgccaggctgcccgggcggacggacaacgagatcaagaacgtctggcacacgcacctcaagaagcggctggagcccaccaccaagcagctggagcaggagcagcacggggcgcatgcaggtggtgacgccgccaggaagcgcagcaggcccaagcgcgcgggtgccaggaaagacgacgacggccgccgtcgccccggccaccaccgcgccggcgtcgcctgaacggtcggcggcctcgtcgtcggtgaccgagtcgacggagcaggagcagggaaacacggggacgagctcgcccgggttccccaaggaggagagcttcacctcgtcctcggaggccgccgaggagttccagttcgacgacacgttctggtcggagacgctgtccatgccgctggacagcttcgacgacgtccccacggagccctgcagctccggcgcgttcggcgacgtggccgcctcctcctcctcctcgtccgttggcgccgacgccgacttggactactggctcggagtgttcatgaagtccggcgacgcgcaccaacaactgccgcaggtttagagcgcgcacgcgcgcccgagaattttcagttccctggctaattgattcatcgttctttctctctccctgcacgtcttgcaatcggaattcggaggggacagtcacaatagcagctaattaatagaggggtgtgtgtgttgaggaccacgacgagattaggaagaaacaacgcgacatgccattgcatctatctcttgtttgccttcttgtatataaagatcgatcgatcgacaagatatcggtgatcgaaacctatatatgctacccattttgagaggaaaaaaaaaaaaaaagggcggccgcttccatgttgga

SEQ ID NO: 158958 - DNA, 297 bp, Zea mays
  Clone ID: MRT4577_76544C.1
acgacgtcctcattgggctgctgttcttgctcggctcgcctgtaactctcctaacgtgcgaagccgcgggcacgtcgtttcctgtcaatatctggcccaagccgacgtccatgtactgggcggaccgcacgcggccgtcccggtgtcgccgtaggtccacatcgtcgtcgcgtcgtcaggtaacccgtacatcgtctcggcagcggactctactccaagctgctgttccaggagacgtacctgaccatcgttcgcacgcggtcaactttcactcggggcacgcgctggagactctga

SEQ ID NO: 158959 - DNA, 281 bp, Zea mays
  unsure (1)..(281): unsure at all n locations
  Clone ID: MRT4577_76545C.1
gaatnnnccgggtccgaccccgacgccgtctcgcgtcagaccaaatggcgacccacgatcaaagcaagaagtaagaagnnttcgtcagcgaccggcgtcgttctgcgccggagctcaatgagatgtnctgacgcgggagcctcgcggaggaacggcttatctccggcgtggaggtgccgcgtcacactcgatgcgcactggagatcatcatctcgcgccacgcgcacgcagaacgtgctcggcgagaagggccgcaggatcagggagctcacgtctgtcgt

SEQ ID NO: 158960 - DNA, 419 bp, Zea mays
  Clone ID: MRT4577_76546C.1
acgaaaaaaatcccaaccaatatatggattattttaaggaaacccatgccgttttgggggccccattttcgggtccttttaatttgtaatttaaaaaagggcccccccaacgatgggttgctgccccaacaagggagggttcataaaaaaaaactggttgtttggcaacaattgttgttgttgtaggaaggcaccaaccaatgggttacccaccgctaggggattaaaaaactggtgcccctgttggaggaccccaccaaagttccacacaatcagttggttaaaaggaaaaaattgttccaaggaggcaaaagggtttgccccaacttgttgaaaaaaagctggcccaatttgtggcacaaactggtgttgcaacaactgttgttgcaggtttttagggccattgcccatagggaggg

SEQ ID NO: 158961 - DNA, 341 bp, Zea mays
  Clone ID: MRT4577_76547C.1
gctcgctcgcccggtcccgcgggcgggctgcgctcccgctccgccgccaccatgccggagcgcagcgcggcgcgcgagagaggggggagcacgacggccaacatgagggagatccggcacatccagggcggccagtgcggcaaccagaccggcgccaagttctgggaggggggcggcggcgagcactggggggactccacgggccgctactgcgggacctgctcgaagcaggccgggctcgagcggagcaggggttactacaacgaggctggggggggccgggacgagccccgcgccgagccgacggacccggagcccggtaccatggaagccatgcgcgc

SEQ ID NO: 158962 - DNA, 351 bp, Zea mays
  Clone ID: MRT4577_76548C.1
cgtagggccgccatccgtagactagcgccgctgttgccggagattggtgttttttgccgcttcgagcgcagacactgtttgctctccgcggatgagccgcaacttctgtatagcgaatctgccatcaagatatgccagagatggcagcgagcggtggcgtaacactgccgatataccgatcctggcggcggagatcctcaccaggagcgggaagagggagcactacagtcgaacagtctggtcgagcatcggaggagtagtcgctggaatacccggatgcacaggctctgacgggattggtctgcgacgttctgatagctgagggccgcttgctagggcgctcaggcaaag

SEQ ID NO: 158963 - DNA, 612 bp, Zea mays
  unsure (1)..(612): unsure at all n locations
  Clone ID: MRT4577_76549C.1
tcctgccgcgcgggggcgggctcatatttggagtagggatggcgttcgtgatatggtccgccagggtctgcaccaggctgctagcagagcttgcatccagtggagacgagcacagggggctcatcgcttatgcgtgctggctcgtctacatgctcttctcgttgcttgtcatcttctgataccatttatggtctggaagattatgtgcctaatttgtttaggggatgctgtggacagtggactgccttttaccagtcacggagtgtttttgttgtgttgtcacagaactacatacgatctggccagttgatctcttagttccattgggcatggttggtgttcggtaaaaagaaaaggaaatcaaggtccagaaacagcaaatgtgcagtaattaggttttaccgaagtattggtggaaatctaattactttctaaaggtcgtggtatgtgcaaatctgtttattatgattacttaccacgactttattttaggatcaccgtggtagtttcttttcttttaatgcattttggcagagataattgttctatctttaggtatcatgttagatacttaatcatcataaatcaaagggacgttagttntctttttat

SEQ ID NO: 158964 - DNA, 178 bp, Zea mays
  Clone ID: MRT4577_7654C.1
ggttataccaaagcaaaaaaagatccgccatgttttatggtcattgtcacaaagaagtatctgcaaggtatgtcatacatagttagttttatacctatcccttttagtagttcctttattttattttctaaactacaacatggtcactatttcagttattagtagttgtacgcaaagg

SEQ ID NO: 158965 - DNA, 571 bp, Zea mays
  Clone ID: MRT4577_76550C.1
aaaaaattaaaaaaaaaaaaaaaaaaaaaaaaaaaaaaagaaaaaaaaaaaaaaaaaaaaaaaaaaaaaaaaaaaaaaaaaaaaaaaaaaaaaaaaaaaaaaaaaaaaaaaaaaaaaaagggggggagggtctttaggaggaaaaatttttaactggggaagccggggaattacctattttatggggggggcaaaaaaaaaaaatttggcgggctttttaaaaaacgaagagggggaaaaaaatggggtttccaaaaaaataaagattgtgaaaaaaaaatgttttgcgagctgggggaaaaaaaaaaaggcggccactatgggggtttctaaaaaattgcccgctacaattgggagagaggtagcgccctcttatggcgcttaattaacgggggtggggggggtttctcccaatgtgaccgttaaatttttaaaaagcgaataaccggaggtttttgattttttccctttatggttcctaaacttgaaaagggtttttcaggaaagatgtaaaaaggggggggccttaagggggctaaataattgttgtacgggggccgctggacaaaaa

SEQ ID NO: 158966 - DNA, 280 bp, Zea mays
  Clone ID: MRT4577_76551C.1
tcacataaactacgggccaacaaaaactccaaatacacttctgcaattgatatttggagcattgggcgcatatttgctgaacttctcactgaaaggccactatttactgcgaagaatgttgaacaccaattagatattataacagatcttcttgcgactacatcatctgaaaccttatcccggattctaaatgaaaaggccaggatatattttatctgtatgctcaaaaaatattcactgccctttactcataaatttatacattctgatcctattgctc

SEQ ID NO: 158967 - DNA, 235 bp, Zea mays
  Clone ID: MRT4577_76552C.1
cctcgacatcttctgacggaccgagctcgccgcctccatcgtttgtttatcttctaggtcccttagcttcacgtacatccatggcatcatcgccgtcgatacccatgttcttgcaccggttcctatcctacagattttgtgtgtgtgtgtgcgcgcgcgcgcgcgctggggtggggggtagggggatcattgattgttacagtacgttgcaataaaatggtacagtattacgcat

SEQ ID NO: 158968 - DNA, 156 bp, Zea mays
  Clone ID: MRT4577_76553C.1
ttaccaaacaaagggaacgggcaccttgtctcccctttgtttataacacattcaatttttaccttcacaaattcacgacaaaacaaaaatttataaacaagcgtataccattatttaaaaaggtgcttacaaaatattgaagctggactctaattt

SEQ ID NO: 158969 - DNA, 2512 bp, Zea mays
  Clone ID: MRT4577_76554C.1
gccggccgggttccgatttttatgaaaaaggcataaaaaaatcggacgaacctgtcccgcgaggagtttagcgaagggcttttaaaaagagaaaaagggagaaaataaaggcgagagaaaaaaaactgcggagaggtagcggtggatcgaaaccctaggcgcggtcggcggcgatggcggcggcggcagcagcggcagctgcagcgcctgagtcgtacatcgggagcttgataagcctcatgtcgaagagcgagatccggtacgagggcgtcctgtacaccatcaacaccgaggagtccagcatcgggctaaaaaacgttcgctcatttggaactgaaggtcgtaagaaggatggccaacagattcctgccagcgacaagatatatgagtacatactctttcgaggaagtgatataaaggatttgcaagtcaaatcatctccaccatctcagtcggcaactttacacaatgatcctgctattattcagtcacattatcctcatccagcttcgctttctacaagtttgccttctgctgcaagcacaataggagccaaccctacttcacagaatgctccatctttgattcagatgccaccgccatttcaagggaatttgcccccttaccagtctggcaccagcttacagtcatggaactcagcacctatgccatcatctgcaaatggcactggccttacaatgccaccaatgtactggccaggatattacacaccaccaactgggttttctcatctgcagccaccactcttccttaggccaccccacagtttggctgttccacaggtcctgcagcttcctgtacaatatcctggacttggatctttacctgctggatttccaaatatgccggagcttccttctttccttcaacctggtaacagtaatagtttaaatcaaacttcaggtgtacctacatctgtgtcaacgcctgcttcattgagtacatcacaaactgaatcatcaagaagccaactgccaaataagttttcatctgattcagcttctgtattttctgtgggttttactcctccatctgtgactccttcagtttcgacagttgaaccttccattcctgtgtcagcagtcttgccttctctggtgaacagtaagccagtagctctacctgactccaccatgccatctctctccactgccaagcctgtgattgtacctgatgcttcagtgcttacctatctatcatctcagccaccatctgctaatgatgtttctccagtcaatgctgcggagcaggttccattggtaacccctgggcaacttctgtcaactacttcctctacaattatatcatctcatgccttgcaaactgcttctgctgtggatctatcctctaaggctgccccctctacagttccatcttctcaggctacattgtttgaaggttcaaccacacaggttgcctcctcttctattttgtcacaacaggtggcaatgacaaatgaaagtaaagtagccaagcagcgtgagtggaaggcaaaacaaactgtggttggtagacccggaaataaggagcccctattgcctgaaccaaagtcggtgtttcaaaagcctgtaggagtttcctcatatgtccggtacaacagtagaggtcgcggaagaggaagaggccgtgggcaatcgcatcccataaccaagttcacagaggactttgatttcatggcaatgaatgagaagttcaacaaagatgaagtatggggccatcttggtaaaagaatagggcagttaaatgatgaaccaaatggttacgaagatgatgttatagaagatgatgagatatctcctagaaagccagaagctaaggctgtgtatgttaaagatgacttctttgattcactctcttgcaaccaaattgacaatggagggaggaacggaagagtgaaattctctgagcagaggaaaatagacactgagacctttggtgactcagcaaggcatcgaccaatgggcatccgaggtaggggcccccgtggcggcgctcgtggtcgtggctattatggtattagaggatatggatatacgggtagggggcgtggctactcttacccaaatcaccagccgtgatacctcggtgtctggaagcacactgaatggcaatggtaaattggccaatttgcgtggtaaaactgagatttatcgcagattacagtgctgctgttgtaagtgtcttattagtttgtttactgatgtggttggtaattcaagaatcaacgtctcttttattgatggcagattggtgtagaagctttcacatctatatcttgttagtgtcgatggtcatttatttccttttggaggtagaagctgttagcagattgctagatgatgtaacacagatctgtccaagatcaacggaaaaacaagcagcagtattgataatctgaaaaaaaaagggatggagttcagggtaaaaaaaaaaaaaaaaaaaaaaaaaaaaaaaacaaccaaaaaaaaaaaaaaaaacacccccccacccc

SEQ ID NO: 158970 - DNA, 245 bp, Zea mays
  Clone ID: MRT4577_76555C.1
atgtaattgctgctcttctgttcccccccgtctgtccctgatagtccctcgtcgtctccgcttcgcctcaccagccacgatgtcctcgttcgcgggacccctcgccggatccagctatcttccggctaataaatccggctgtcacaccacacggtggctgacagggtggaagtgggtccggcgccgtaatagttgcaagcggcctggtgctcaacgccgtcgtcgcttgtgtcgcgtcgctctag

SEQ ID NO: 158971 - DNA, 823 bp, Zea mays
  Clone ID: MRT4577_76556C.1
gctaatccaatcatccaaacgagatatttttacgaaaaaggcataaaaaaatcggacgaacctgtcccgcgaggagtttagcgaagggcttttaaaaagagaaaaagggagaaaataagggcgagagaaaaaaaactgcggagaggtagcggtggatcgaaaccctaggcgcggtcggcggcgatggcggcggcggcagcagcggcagctgcagcgcctgagtcgtacatcgggagcttgataagcctcatgtcgaagagcgagatccggtacgagggcgtcctgtacaccatcaacaccgaggagtccagcatcgggctaaaaaacggatttgcaagtcaaatcatctccaccatctcagtcggcaactttacacaatgatcctgctattattcagtcacattatcctcatccagcttcgctttctacaagtttgccttctgctgcaagcacaataggagccaaccctacttcacagaatgctccatctttgattcagatgccaccgccatttcaagggaatttgcccccttaccagtctggcaccagcttacagtcatggaactcagcacctatgccatcatctgcaaatggcactggccttacaatgccaccaatgtactggccaggatattacacaccaccaactgggttttctcatctgcagccaccactcttccttaggccaccccacagtttggctgttccacaggtcctgcagcttcctgtacaatatcctggacttggatctttacctgctggatttccaaatatgccggagcttccttctttccttcaacctggtaacagtaatagtttaaat

SEQ ID NO: 158972 - DNA, 723 bp, Zea mays
  Clone ID: MRT4577_76557C.1
ccggccgggagagaaaaaaaactgcggagaggtagcggtggatcgaaaccctaggcgcggtcggcggcgatggcggcggcggcagcagcggcagctgcagcgcctgagtcgtacatcgggagcttgataagcctcatgtcgaagagcgagatccggtacgagggcgtcctgtacaccatcaacaccgaggagtccagcatcgggctaaaaaacgttcgctcatttggaactgaaggtcgtaagaaggatggccaacagattcctgccagcgacaagatatatgagtacatactctttcgaggaagtgatataaaggatttgcaagtcaaatcatctccaccatctcagtcggcaactttacacaatgatcctgctattattcagcctgtaggagtttcctcatatgtccggtacaacagtagaggtcgcggaagaggaagaggccgtgggcaatcgcatcccataaccaagtacacagaggactttgatttcatggcaatgaatgagaagttcaacaaagatgaagtatggggccatcttggtaaaagaatagggcagttaaatgatgaaccaaatggttacgaagatgatgttatagaagatgatgagatatctccctagaaggcagaagctaaggctgtgtatggtaaagatgacttcctttgatcactctcttgcaccaaattgacatggagggaggaacggagagtgaaatctctgagc

SEQ ID NO: 158973 - DNA, 660 bp, Zea mays
  Clone ID: MRT4577_76558C.1
taatataaatgtttattattaaacaatcacgaatacatgaaaacaatatcaaattacagttgtaccttgagcgcgacagaaggcaagggcaaaagtaagatgtgaaaaagcgtgaacagtacgggggtactgttcatctatttatagacacaggacgcagcctgtgagaattacattcatgccctttacaaatggttacaatcataacacaggttgtcatggaccgattggtcatttcatctttaagtcggtgcatctggagatacgctacgaagctccctgattgatagcttcagcattgtgtttttggccttccgaaggtgtttcttctcacaggaccttcggcgacgaagcatacactattctgcacagggttttgatagcagagaccgtctgtctccttttaagttttaacagcaaattaaaaggattggaggtagagctaggaagtgttaactaactccattccccatctcatcggttttggagctcttgtgcttactcttcttgtgcttatgcacatctactgaatcttctgttccctcatgcttcctcttcttttcatgatggccacttttatcttttttcttatccttgtctttgtctttatctttgtccttactccgatccttatgccgatgtttgtgcttcttatgttcc

SEQ ID NO: 158974 - DNA, 728 bp, Zea mays
  unsure (1)..(728): unsure at all n locations
  Clone ID: MRT4577_76559C.1
gtggttggtagacccggaaataaggagcccctattgcctgaaccaaagtcggtgtttcaaaagcctgtaggagtttcctcatatgtccggtacaacagtagaggtcgcggaagaggaagaggccgtgggcaatcgcatcccataaccaagttcacagaggactttgatttcatggcaatgaatgagaagttcaacaaagatgaagtatggggccatcttggtaaaagaatagggcagttaaatgatgaaccaaatggttacgaagatgatgttatagaagatgatgagatatctcctagaaagccagaagctaaggctgtgtatgttaaagatgacttctttgattcactctcttgcaaccaaattgacaatggagggaggaacggaagagtgaaattctctgagcagaggaaaatagacactgaggtattcacagataggcattgaatctttaccttcccatatcaccttagcattcagtgcatatcatgatttattttggctgtagacctttggtgactcagcaaggcatcgaccaatgggcatccgaggtaggggcccccgtggcggcgctcgtggtcgtggctattatggtattagaggatatggatatacgggtaaggggcgtggctactcttacccaaatcaccagccgtgatacctcggtgtctngaagcacactgaatggcnatggtaaattggccatttgcgtggtaaaactgagattt

SEQ ID NO: 158975 - DNA, 305 bp, Zea mays
  unsure (1)..(305): unsure at all n locations
  Clone ID: MRT4577_7655C.1
gtcatccagggtaagtgggatgtggcagcgcatccaccttcactctcattttatcgttgcttaggcgcagtcctgatttattttgaagctttttgacncngggtgtttgtttctaactagttgtgcgcactggctaattttgggggggggggggtggctgtcttccccttgctcgccgctccttcctgctgcttctggcgccctctcgtggtctccttcctggccggcgcccccgcccccccccccccgcctcccccccccccgcccccccccccgcgccgcgcgggccgccccgccgggccccc

SEQ ID NO: 158976 - DNA, 817 bp, Zea mays
  unsure (1)..(817): unsure at all n locations
  Clone ID: MRT4577_76560C.1
ttgggtacctcgaggccggccggngaatatctctatttcccggagtccctttgattcagatgccaccgccatttcaagggaatttgcccccttaccggtctggcaccagcttacagtcatggaactcagcacctatgccatcatctgcaaatggcactggccttacaatgccaccaatgtactggccaggatattacacaccaccaactgggttttctcatctgcagccaccactcttccttaggccaccccacagtttggctgttccacaggtcctgcagcttcctgtacaatatcctggacttggatctttacctgctggatttccaaatatgccggagcttccttctttccttcaacctggtaacagtaatagtttaaatcaaacttcaggtgtacctacatctgtgtcaacgcctgcttcattgagtacatcacaaactgaatcatcaagaagccaactgccaaataagttttcatctgattcagcttctgtattttctgtgggttttactcctccatctgtgactccttcagtttcgacagttgaaccttccattcctgtgtcagcagtcttgccttctctggtgaacagtaagccagtagctctacctgactccaccatgccatctctctccactgccaagcctgtgattgtacctgatgcttcagtgcttacctatctatcatctcagccaccatctgctaatgatgtttctccagtcaatgctgcggagcaggttccatttggtaacccctgggcaacttctgtcaactacttcctctacaatatatcatctcatgccttgcaaactgc

SEQ ID NO: 158977 - DNA, 815 bp, Zea mays
  unsure (1)..(815): unsure at all n locations
  Clone ID: MRT4577_76561C.1
tagtcttcagaaattantctatctgtttcaattcaatttgctattcttttgtttgacgtttttgacatatcaatcagtgcttggtcagttgagtacgtgaaatgagtcacaattttgctggttcttttgcatcttcttttgtgaaaattcacctagaaaacctgatggagctatcagcgattcaggcagcccttttttctgattacaatggcaatggaggtgttgcattgctcggagagtgaatcttctgctcttcagattagccgaggtggatgctccggcttccctccgtgaagctagtctagtagtcttaagaacattattatcagtatatgtttctcatacccaatttgatattgtactttgacattttttttgtagaattaaagaaccacatgatttggtttctctatgctttgctggcagtaaatttcttgtttggggatcaattgaagcaaatgatgatagcaagacagggacatcagaaccctgaatttcaggttaatgacagactacgtctataatgggaatctctttgatgtttctgattttccccaagataaattgatctgtttttatgtctattcttttttcatattttctccttctcattcttcttcggaatccagatctctttcctgttttaacttttggctatttggatcttgaatgcgaatacttcaagcagatcatggtcagaagattgttacaccattggcaactgaagcttaacaacacatgaatatgatccgatattttgtattggaaagacagtgaacatgatctttagctgactcaaggctacttttattcat

SEQ ID NO: 158978 - DNA, 308 bp, Zea mays
  Clone ID: MRT4577_76562C.1
cttacattggctttatatatctaaagaagtgtattggctccaggatctcttgctaatgaagaatcagggttctactatgcaaatgtctggtctcgagcgagacattgatatgctaagaggcgccgtacttgaagttgacatgaaaatcaagaaaggagaagaagaatcagaagatgtgtgcaactgattgatggagcttcatacttctgttaactgagcacgccaccatgcatagtattcactaagcacattgaggatgcctttagcgcagttgacataagctcagcacttctatgcgacgctgttga

SEQ ID NO: 158979 - DNA, 239 bp, Zea mays
  Clone ID: MRT4577_76563C.1
cacacccctgcgcctaagcctgggaccactgcttaccagctgcttctatagctggagtcggacgccctttgttttgacaaacccagcagcgttctaccaacaacccatgatcggtggtgccctctgttagatctcttatgagttataaatcattgataaaggtctttgactgatgttagaggcttaccagagctccgacagtgcattgtgtgttggtaaaatgctgctgggttggcgaa

SEQ ID NO: 158980 - DNA, 478 bp, Zea mays
  Clone ID: MRT4577_76564C.1
cacaagctttttttttttttttttgttatctttttttatcataaaaagcacaatatagtaccgcaatggcagccaaaaattaagaatccttatgcttcttgtattatctgcaagcgctgttacacgggaccatcacccccgcagtgctcacaggctcctataacttgccttcttccaccatacctgtcaccatgggtgtattcagtgcgtgaaaaccaaagtgttaaaccctacaggatccaacaggcaataggggaacaactgttaccttgataacaatggagcatggcaacaaaccatcaaacctagttcaacggtggcatttggtgcttttgttaataaccaaaaaaattgaatactgccatccgatccaatgaaagaaaaaaccagggggaggaagctactaaccagctgaatggttgattttgacgcaaagaagcaacaaaacttaatgcttccatttggttcaatggaagaa

SEQ ID NO: 158981 - DNA, 297 bp, Zea mays
  Clone ID: MRT4577_76565C.1
gtggggggggggaaatagattcggcacgttaactggaaccggacaacaatacaaacaggagtatgaagtaaaggggagaagctttcactaaacagagaagaaatttagctagaaacaaaaccccccatggattgcttattgcatgagctctgcttggcaagcaacaagttctggaggtccggtgaaaagtctaacgaaagggtagccgaatttcacctactcaggcaagtttggaggtatgcttcgttaaccaaacgactctgggcgcttgctgccacgaatatctctactgaacta

SEQ ID NO: 158982 - DNA, 321 bp, Zea mays
  Clone ID: MRT4577_76566C.1
aatagacccgcagccgggcgagccaagggccgcggacgtaaggccggggccgcggccggcggcgccggaaagaaggccaagcgccgcgcgaacaagaagcggagacggcggcaaacgcggggcccgcgacagactgggggacaaccgcgccagctgacaagccacatcatggacacatgcaaacagtgccaagcgaaccaagccagcgccaccagccaggagtgagagaacgcccggggaacaggcagccaagcaggccacgcacactgcatcagcacgaggcaaaagacccgacaagggagcagcctgacaacaggcagc

SEQ ID NO: 158983 - DNA, 477 bp, Zea mays
  Clone ID: MRT4577_76567C.1
ctgtgcggcgctcgaggcggccgggtccaagagcgacgacccacaaccagaagtccccattggcgtacgcgaggcgatcggagcatcccgtcccaagaggagaaactccggccggcgacgcgggggaaaatggggaagacgccggtgcggatgaaggcggtggtgtacgcgctgtcgcccttccagcagaaggtgatgccggggctgtggaaggacatcaccaccaagatccaccacaaggtcaccgagaactggatctccgccacgctcctcctcacccccgtcgtcggcacctaccaatacgccatgtggtacaaagagcaggagaagctttcccacagatactaaatgggatgtcctccaagttgctgcggcttgtcgcagttgaattttccattttcacctttccatatgcatatacggtatctgtgcctggcaaacatattttgaggctagctaaatatgaaccttttgtac

SEQ ID NO: 158984 - DNA, 529 bp, Zea mays
  Clone ID: MRT4577_76568C.1
ataacacacccagctaagcattgacttgcattcacgaaacatgcaatatgatttggtattacagggcacaccacgggagatgccacaacggcgtggcatcacaatggcctcacagtcccattccatcgctattggactcctcaacatggctggtcgaggtcgcgtcacgggcactccccggagaaggccttcttgaaggtgttcaggtactctggctcgagcgcgaatagcacgtggatggggtcgcacttgtcgggtacgtgccgaactcagagtcgcggcatgggcatgccgagccatctgacgaccacacaggtcggactcgggcatgaactggccgcacgccgcctggtagcccttgcccgactcaagctgcacatagtatacgacagagcgcactcgggcttctgcaacgcaggccaccgcacgcttgatccgctcagccactaagcccaaatgctgttacagcacatcctgcacccccactgtgaccaggtcccacacgatggcgttctcgaactaggactcc

SEQ ID NO: 158985 - DNA, 939 bp, Zea mays
  unsure (1)..(939): unsure at all n locations
  Clone ID: MRT4577_76569C.1
tgtggtgatgaattatgaacatacttcgcatgtcagactttggagatgtttctggcatcaatgagaagatcattatataactgagcaaatggcataattccatatttctccagctgttccgccgagcgaacgacccacaaccagaagccacccattggcgtacgcgaggcgatcggagcatcccgtcccaagaggagaaactccggccggcgacgcgggggaaaatggggaagacgccggtgcggatgaaggcggtggtgtacgcgctgtcgcccttccagcagaaggtgatgccggggctgtggaaggacatcaccaccaagatccaccacaaggtcaccgagaactggatctccgccacgctcctcctcacccccgtcgtcggcacctaccaatacgccatgtggtacaaagagcaggagaagctttcccacagatactaaatgggatgtcctccaagttgctgcggcttgtcgcagttgaattttccatgatgggttgtataatctgtcaatgtcatttctttgctcagttttagttcaacccattttcacctttccatatgcatatacggtatctgtgcctggcaaacatattttgaggctagctaaatatgaaccttttgtctcttaagttgttaaataaagcaaattatctgacagtttttcaaaaaaaaaaaaaaaaaaaaaaaaaaaaaaaaaaaaaaaaaaaaaaaaaaaaaaaaaaaaaaaaaaaaacaaaaaagaagcagaaacaaaaatactattgaaagaacttaacacaagatgtgcttgtgattcccgcgtataaaagaattgcaacaatcatacaggcgtacgctatgttcagtagatcgtgcctttgcctcagtataaaaatactgcgttcgcctcgtntaatagaaaccactctccctaatgaactccctttttttttaat

SEQ ID NO: 158986 - DNA, 730 bp, Zea mays
  Clone ID: MRT4577_7656C.1
ttttcacgccaaaacctccattcacaatgtctaccgcgcaggagctctccaacatttcctcggatctgatctgggagatcgtccgtgacaacaactgcttctccgccaagagcaagaagaacggcggtgttcagttctcccgagacccccttaacctgaccaacaagacttcccgcaagcacgctggtttcgtcaacgacaaggctctcggtatctcctctggcgagaagggtgctattgttgtcacctccaagaaggctcagcccaacaagcccgcccagaaccttgtcaagacctcttacagtggatccaagagcaaccgcaagacctaccaggctgttgccaaccaggctgccaagaacggttaccgtgctgacctccgctccgctgccgttgagcgtgcctccgccctcaagaagtccaacaagcccgtcaagcccgagcccgagcagaagctccgtggcaacaaggccaagaaggccgccgccgccgctgaggagaactaagctgtctaataccaagatagaaatgtattgtgaataaggctggggcatgaagctagggaggcaagctgcatagcccacaactgatgaaaaagagatcagtgtgggaatagcacatgaaccgaggtctctgggtcattcactgctggagttagtgagcttaaaacgaatgaatatctcgctggcaatatcgccggcaacccaaaaaaaaaaaaaaaaaaggctag

SEQ ID NO: 158987 - DNA, 495 bp, Zea mays
  Clone ID: MRT4577_76570C.1
gtgaagcatacgaaagcttttggcgcgacgacaccactgttggcgcagcccctcaggacgtcttgggtcttggctggcggtgtcggcggagctcagctaccagaagatgacgtagtgccctgggtcgcttgataagcagatgaacttggagctccggcgacgagttcaggaagcccgctatcttcacaacatctctcccggcatgtatcgatgaggatctcaggcgtgccaccgaaacctgccctgctctacagctgggggtggacacaagaggcgatggttgctccatctcaccaccttcctagaagttagatacagttaacatgacctggcatttcctgagagaactgcttctgtattgcaagtactgctgcactgaaccaagtgccaattttgccatcatttgaatatttcaataacatatctcatgattccgggaaattaaaacaaaaaaaaaaaaaaaaaactcgagcccgggtcgactctagagcccta

SEQ ID NO: 158988 - DNA, 535 bp, Zea mays
  unsure (1)..(535): unsure at all n locations
  Clone ID: MRT4577_76571C.1
tctacgcgtccgcaacttctcagcctgaaggacttcctgcacagtatatttccagcctgctaatcacacatctgtgttattaggcgcttttgtccacttacaattcacattactgtttccttagatatcctccatctgggaaaaactgtgtcaagttgtcaatttttgtttagattgtgaagttatttgaaacataaatcatgcaaccttgcagaaatgaccatagcttgcaggaacagaacctccaatctcttaatataaatttaatacgaccgaataggtaaaatactgtgagttaagcctaactatagtggcgcataaaaagttgggaccccgccccaacccacccacagaaatttgggaatacaataagtatgtgaagatagatttgttacatttagtaattctgctaacaaaaactgaatttattttttcctttttgctagggcacctaacacacatgacaatgcggcatcaaatcttctgtctggaaggaatngtgacacaataattaaccagctaatggagatgggtg

SEQ ID NO: 158989 - DNA, 348 bp, Zea mays
  unsure (1)..(348): unsure at all n locations
  Clone ID: MRT4577_76572C.1
gaacgacgacagaaaacgcacgggaaccggacaccggcgggcaacaaacgcgacaaaaagccggcgcggagagaggagacacccgcggaaggaaccccacgacaccacaacaccggacgagcaacgacgagggacacgggggaggggcggacanaagaggcgacggacaagacgaggccaagaacgacgagacagcagaggaacggcaccaccgggaacaaccgaaaagggagagcgcgaaaaaagacagacaggcaagaagaccaagaaggcgacagnagaaaagaaggaggagaagagcaccaggcaacaggagaaggacgggcaagggaacaagacgaccggccc

SEQ ID NO: 158990 - DNA, 326 bp, Zea mays
  Clone ID: MRT4577_76573C.1
tgcggatattcctatggatgaacagcatgctgccagagatgaagatttcccgctttcaacaagaactagggcagtagcaaagtgcctccatcagctattcttggaccagaagtcccaggagcaaagtaatgtccctgtgacgctcggccaagcccttgaaggcagcaagaggaaaaccacagcaagattcttctatgaaactctgatcctcaagagccgcgggttgatagacgtgaatcaggagaagccctatgagaacatcacaatctctgcaactccacaactcaacgcgatgctgcagaacccagcgcccccttcaacttctt

SEQ ID NO: 158991 - DNA, 587 bp, Zea mays
  Clone ID: MRT4577_76574C.1
cctgcagttccggtgccggattcccgggagggctactcctgtcaccccggctatcctcgacactgggagtttagggctactcctgtcaccccggctatccttggctgctgttgtgttcgttgtggcattgccgctagcatgagcagggtttttggggtctcatacgaaagccatgccaggtgtagtctgcacagacaacagcaatgccctcgacgccgatgacctccttggattgttgtaaggttctcttgtgtcgttgtgcttggcactggcgttccagcctttgtcgtggtgcgacgagtgccttcctttggtgcgtctgctccgtcagcactctccttgttaacagaagcatattaatcttatgctaggtcggtgaatatccgcctctcctgccattcacccatgaggatttctcctcaagcggcgttggatggtggcattagagcccggatgcgccatcgggtgtttctgttttctcgaaaggagatcgtcgttttcggcactcataccgaattcattgttggccccaagcatgtttgaagcgaaattaatagtctccctcactgtaatttcgggatgatgga

SEQ ID NO: 158992 - DNA, 402 bp, Zea mays
  Clone ID: MRT4577_76575C.1
cacaaacacacctagcgaagcgcactatcaacgacctaacaacaatggcttgcgggacattatccctccttgcgcttcttgccctttttgtgagtgcaacaaatgcgttcattattccacattgctcacttgctccgagtgccatttttccacatttcctccctacattttcttaaattgggcttcgaacacccatgtgtgcaagcctatatgctacaacaagcgcttgcggtgtgcgtcttagatcaaccaattgcccaattacaacaacaatccttggcacatctaaccatacataccatcgcatctctgctgcaacatgcactgttccacctatccgtgttgaaccctatcgcctacttacaacaacagatgcttgcatcctacccacttgctttggca

SEQ ID NO: 158993 - DNA, 772 bp, Zea mays
  Clone ID: MRT4577_76576C.1
cgacgctggagcagcttgacctctcactggtgtcgtcgtcgcctctcgccggccggtcgcgtctcgcggtgccaggcgagcggccctgttgccattggctgggtaccgttgacatggccgcccccgctggctcgcatcgccgtggctggcacacctgacgacatgcgcgggaggcggtggtggctaggccgattgttgtgaggcatgcgggtgtcgtcgtccttggcactgtcggcccaccttgggccctggtgcgacgagtgccttcctttggtgcgtctgctccgtcagcactctccttgttaacagaagcatattaatcttatgctaggtcggtgaatatccgcctctcctgccattcacccatgaggatttctcctcaagcggcgttggatggtggcattagagcccggatgcgccatcgggtgtttctgttttctcgaaaggagatcgtcgttttcggtatgttatggtcgctatgcctctgacctcctttagcccctgttcgtggccataagtcaacgggacacgcgtagctacaaggggaggtctagatgagcaaaggcctaggtttgtcgacgagtatgttatttttagtcgaagcgctagtcgtcgttcgacaattgtcgtttcaactgctttaacatgcgacgtgttgggtttcctttctttgtttcccctgtgttgttgaagtatttgctgtgttgtgctagcacttgtttgtaatctatggtctaccacaattttatatagtgctttgcctcgtttctct

SEQ ID NO: 158994 - DNA, 1156 bp, Zea mays
  Clone ID: MRT4577_76577C.1
tttctacttctcgacgctggagcagcttgacctctcactggtgtcgtcgtcgcctctcgccggccggtcgcgtctcgcggtgccaggcgagcggccctgttgccattggctgggtaccgttgacatggccgcccccgctggctcgcatcgccgtggctggcacacgtgacgacaggggcggccggcggtggtggctaggccctagccgctgctgcatgcggtaggcttcggcttcaatggattcggctccccttgggccctcgtcgcctcgccttcagggtcgtgcactcgtgccgccaccgtcagcccccatcgccgtctctgggcccctgagaggagcatgacccgagcctccacccttgtcgccaggagaacggggctactccgccacctcggcttccttaagggccgacctagcacccccgccccctcgtcgcctccacatcttcaaggttgtgccgccaaagctggcctccatagcctgcactggacccctgattggagcacgacctaagcctccatcctcgacactgggagtttagggctactcctgtcaccccggctatccttggctgctgttgtgttcgttgtggcattgccgctagcatgagcagggtttttggggtctcatacgaaagccatgccaggtgtagtctgcacagacaacagcaatgccctcgacgccgatgacctccttggattgttgtaaggtagcctcttctccaacccttcaggcgttgtcatggaggactcatgctacgcttggtgaatttgatatcgtcatgttcttgtaggttctcttgtgtcgttgtgcttggcactggcgttccagcctttgtcgtggtgcgacgagtgccttcctttggtgcgtctgctccgtcagcactctccttgttaacagaagcatattaatcttatgctaggtcggtgaatatccgcctctcctgccattcacccatgaggatttctcctcaagcggcgttggatggtggcattagagcccggatgcgccatcgggtgtttctgttttctcgaaaggagatcgtcgttttcggtatgttatggtcgctatgcctctgacctcctttagcccctgttcgtggccataagtcaacgggacacgcgtagctacaagggggaggtctagatgagcaaa

SEQ ID NO: 158995 - DNA, 540 bp, Zea mays
  Clone ID: MRT4577_76578C.1
ctcggatcctaggatgcggtcgagcggccgcttttaaattttttttttttcaaacacacacggaaactggggaattttaaaaaggggaataggggggcttatacatattcgggtggattaaaacataaaaaaggcccgaaaccccatggacaaccttgggcaacaattccgaaacatccttgtcccacgggaccagggaaaaaccgggcaccataaagtgtttaatacataattggacgaacatttggaggaccttttccccaaaacacaaacaccggaggtgcatatatttcgcccgaattcacatctcaccgtttgatttggacggcaaaacctgaatccaaatttccttcaaagagctgggaatttggctgaaccctgctttggcgaagagcccgctccaaaatttaggatctctctgccgtccttttggaagggtcataatgcccaagaaaacaagaggtgagtttccagcataggcccagagtgggcaataataatttcaccggttataactttcccgccatcctttcgggaagg

SEQ ID NO: 158996 - DNA, 163 bp, Zea mays
  Clone ID: MRT4577_76579C.1
gccgagcgcagagtctcagctaccctgagacctgggtcctgagtacctgcggaagcttccatcgaccagccgccagacaccgtcaccacgactgcacgacacagcctcacgctcagatacgtctgacgaacccaaactcgcatcctgcaatcccctactcccc

SEQ ID NO: 158997 - DNA, 306 bp, Zea mays
  Clone ID: MRT4577_7657C.1
ccttacaaattaaacggttcaatcaggagggtgctcacacggccacccatggagaggggcgccaggaggtggctaacccccctttaatgaggaaaccaacaagcgaggaaaagagagagagggccccctacatcaggaccacagaacaaaaactccccaacagaacaccccgacggggggaaacccccaaggccagggacccaggggaaagaaaatgcatggcggaaatggccggcagaagatgcgctacctgggccgccaaaacggcggccagctcaccctgaggagccccccccacgaaggact

SEQ ID NO: 158998 - DNA, 482 bp, Zea mays
  unsure (1)..(482): unsure at all n locations
  Clone ID: MRT4577_76580C.1
gggagcggcgcgggcnngagaacaggcggncgggggggccgaanngnagncnggagaggcgnccncagcgacggaccgggcccaagnncncnggaaagggacgccngggagggngagagccccgnccggcccggacccngacacaccacaagggnccggcagggacacnnnnnttttnnntangcanncnaaancnaacaaaaaacaaagggggggggggggaaanccccggcgccccnnnnnnnnngggnnnnnnnnnnngnnnnnnngnngggngnnnnaaaaaaaaaagaaaaaaaannnnnggggggngggggggggggggggggggggggggggggggggggggggggnggggggggggggggggggggggggggngggggggggggggggggggggggggggggggggggggggggggggggggggggnggggngggggggggggggggggggggggggggggggggggggggggg

SEQ ID NO: 158999 - DNA, 344 bp, Zea mays
  Clone ID: MRT4577_76581C.1
atatatatgatcgctcgatagttcctagaatgttagcactgctggatgtgatacagagggtggagtcgagcgagacgacgtggccggcgcggcgccaggtcgtggcgtgcgccgctgtttgctggtcgtggcgtgaggtcaccaaggaggtggtgaagacgctcaaggagtgcggcaggatcaccttccccatgtcccttaagcaggtcttcacctttgcagaggcttatgattttgaagatctagaatctatggttgaagaaatagccaaagcattcaagacaaagataatgtttatatatgttgacactgctgaagaaaaccttgcaaaaaccattcctcac

SEQ ID NO: 159000 - DNA, 444 bp, Zea mays
  unsure (1)..(444): unsure at all n locations
  Clone ID: MRT4577_76582C.1
ccggtccggggtgcccggggggggcacgcgtccggaaatagccaaagcattcaagacaaagataatgtttatatatnttgacggtgctnaaggggaccttgcaaaaaccattcctcactctttatggcattgaatcagaaaaggcctactggtccaggtcttgaaagggtgggaatgtgtccaagaagacaaaggcatcgacccggcaattcttcgctacaaattaaaacaggactagggtgagatcagtgggcttgagaggagcatcatccttcaaacatgatgatgggtttctagctgatggtgtctctatagctcactggtatccttcaaaaagaaacatttggtagggcccttcggtgagcaatagaatacgacttgggctaccaaagcgtgcatagtccaggagaagacctccgatgaagaaagagacatgctggacat

SEQ ID NO: 159001 - DNA, 392 bp, Zea mays
  Clone ID: MRT4577_76583C.1
atgtgtctacacaccattagctttatatactatcagagcgcaaaaaaacccgcgcgacacggtgagggtgttgctcggcgccctctctcttctgtctctctgtgagagcgccacctacacacacacaagcggcggtgtgtgctgacacacaccgccgtcgttttatataccggcggcggcgcatgtgacacctgcggtacacctgacatctgcggagtatctcacaccgggtgtacatctgccggcgcgtgtacatctgccaccgggggcatatgtgccgccgcctttttatgtgccggcgacactatgcctatactatattaaaccgccggggtctgattcttatccagacacacacatatgcgtgtcaaaacagacatataaaaccccgc

SEQ ID NO: 159002 - DNA, 1593 bp, Zea mays
  Clone ID: MRT4577_76584C.1
aattcggcacgaggattcttcgctacaaattaaaacagcactagggtgagatcagtgggcttgagagtagcatcatccttcaaacatgatgatgggtttctagctgatggtgtctctatagctcactggtatccttcaaaaagaaagtatggtgttgttttataagctctcatgtttatgactaaggttgagatttgtgaagattcagaaataattagctacatgcccttgcgtagcttacaatgcacaattagctagcttcattgttttaacttctctgcaatatgaacatgcaaattttaaccacctcatttgtttttaataagctgaaacaaattgttggttattattcccccttgtttggtcgccctcatttaagttgtggcttagatattcctactcagagagttggtacatgttttttatgcttatctttttcatttatcaaccatatgtgtgtttgatgttttttctatgcttagacctaaacaaaacattcttggtagccacatctaaaacattcatttcaagttctacattaattcatttatattccatcaacttttaaaatacaacacttagtttgtttgaaaagaaatagtttttgtgaaatcttcaaacaaggcttgacaatgatttattcatcgacaatgcatctgagccctctttgcattgtaagctcctacaatgaagttatacaaaagtcttatctattcattttggtttaagctggttgagcactttttacaatatctggtcaacacatctaggatgactcttcacatctgtcaattcaaattctcttcaaaacagctaatattgctccatattgtcttttgaagcttcctggaaaaaatgtcttttgaagctaatcttgctccatacagctaatcttcacatctttcaaagcatttgctagggcccttcggtgagcaatagaatacgacttgcgctaccaaagcgtccatagctgaatgcaaaccattgagatggtccaggttgaggacctccatgacacctatgttggtgtgggttgtgccgccccatcgtgaccgtcatcgattgggcctccgagtccaggagaagacctccgatgaagaaagagacatgctgcacatgcacgagggtacttgcagatagatgtcggctctatggacgaacactcgaccaagtcagatgaggagtatgagggcctagccatgcgagacatgatggctaccggtccaacaatgagcagcaagctgtgagttaaagatgaactcacctgtcctggagagcaacatccataggagtgaggcaaaatggcgggtaccaccacaacatggacccgttcctgaagatgtccaaggaggtggtagccgacaccataatgtcttgcgcgtcattgtgtcaccggccggcaacacgctgcgctggtaccggcgggtgttatgtttcttaggcgtatgtttctgtgctttgagctgtgctatagactggttgtgccaactactgattttaaaagaaaaaggtgagctgaaaatcattgttgaaaacaaacatgtaacggttcgttctcatcagttgtgccaactaccaatcatttcattgatc

SEQ ID NO: 159003 - DNA, 288 bp, Zea mays
  Clone ID: MRT4577_76585C.1
gcggcatttcgaataacacaggtgagcgcgacgatgggatccctcgttaataacatcatggtcgtgggcgccgtccttgcggcgctcgtcgccggcgggtcgtgcgggcccccgaaggtgccacccggccccactattgagaccaactacaacggcaattagctcacacgactcgctgacctggttcgttcatacctatgcctgacaatgttgagacaactgcggtccctgctgtgttgagcagcattaaacgtgatgacattaaggatctttcactgaggtttccat

SEQ ID NO: 159004 - DNA, 392 bp, Zea mays
  Clone ID: MRT4577_76586C.1
gagcttatctagtcggcggccgcccttttcttttttagtttcttttgtcgtgggagtcaaaattgtggccacataactttttttggttcacgactgcacactgaactcagatcaacactcagtggctcagaacaaaatccccttaatgaccaaccactatcaaaatttattacaatttttgttgaataatagcttttgagatctagaaatgaaagattccatgtatgccttgtcgactctatgtattcctctgtgaacgtttggggcgctgatttccatcactgcaagatatagcacccggtttgggacttacaatgcctagcttctgcgagcctcgattcagtccatccagcatgactcatgctttgcataatttctgactagaaatgtaa

SEQ ID NO: 159005 - DNA, 465 bp, Zea mays
  Clone ID: MRT4577_76587C.1
cggaattttcggggcgatctacccgttcgttcttaccatgtttagctttaactggaaccggatattaattttttatagcgctccatgctcatgaccaacatagggcggggtatgaacaaaaggacctatacgacacttattaacatttggtaggttgtctctaaacggattactgggaatacccagtattggtgaatgacgaccaaaaggtatttctgggctcacatgttcaggaagctcttgatgagctacaacaaaccatgatgggtacataagctccactttttgaacttgacggcgggaaacgagacgaacctgggcttgccatgtttgaaattgacttgtcacaagatgaacctagcggggggggcgagaaaagtttctgacttgccgtggacaccaaccgcaagggccaaaactgctaaaccatatgcggaaaaagccccattttaaccgcgtgctcta

SEQ ID NO: 159006 - DNA, 340 bp, Zea mays
  Clone ID: MRT4577_76588C.1
cgagctcgaattccgttgctgtcgtgcaatggagtatttaaaactgttgggatcagatgaacattcaaatgagctggcaattttgagagatcgaattgcatgttctatggaaggtcactccaaacatatgtcacttatttgtctaccgatattctgcctttagttggtttgaagttttctgatccattttttctggtctatcttttttgctataatgtgaccacacattgttgaactgaatgggttctgtatttttcattggtgcctgtgcatattgaaaagtactgtccatcacataccttgcaccactgatcccattttagtactgccgacagcaaca

SEQ ID NO: 159007 - DNA, 477 bp, Zea mays
  Clone ID: MRT4577_76589C.1
agggcggcccttttttttttttttgaaacaggggtgcgtgttctccgaactcagtggctcagccatagctcgtagcaatgagtacaccctggctaactaatagcatttacatcagcccccatgctgcgactttctcagcccgaaactacggattcactgatatttggcaactggctccactgcctcgatcatgaccacactgtttaccctgcgaaccaccattccaatctatgccttgacattcacattgacctacacagtgcgtaccctcaccatatttatgaactctctgaatccccctagtgtgccaataacaacactatttgcatctagcttaatatgaggcttcttgtacatgtacttatttatatccggaggatgccccgagcgtgtcatggtggcggctacctatcctttatcgcaacagaggcgaacggatctatgagcgcagaccagcttttaaaaacactgacgcgt

SEQ ID NO: 159008 - DNA, 462 bp, Zea mays
  Clone ID: MRT4577_7658C.1
gggggaacaacccaaacataattttgcaaaaacaaaaatcccgggctcgttttaaaggaacaaccccgggtggcccccttttaggggttttatgggggggcaaaataacagggaaaagccttttcccaaaaaaaggggggggggttttttatttaagtttggggacccccaaaaatcaaaaaactttggctgggaaaccccccaaggggttggaacatggggggcccccatgcttgcagttttaaaaagccgggaaaattcaccaaggcttatttggccctttttgaaaagggcacccccccccagggggggaaaaaaaaaacccttctttccggggggccttcaaaggccaaagggggggagggacccctctctggcaacatcaaatttataaaaggcggttggaaaaaaggattcccccttttaagtataagggccccccccttgaggcccggggagggt

SEQ ID NO: 159009 - DNA, 433 bp, Zea mays
  Clone ID: MRT4577_76590C.1
gccaaatttagataccagcccaaaagtgaagatcacggtcaggtcgcgaactaaaataggctaaaggcgatcgatcccttggcccatatctccgttgagttgctggttctgctattccactggcttctcctacttgttcaaaattaaataaggagatgattttagcccttataattttttctagttttgtggcttctggcccttagattgaagaaatttggtaaaatgggtcgctcgtatttattgctctgcaaaatacaccgcttcaaactgacctcgttaaaaaggatccttcgagtctgcgcgctcgtcaaaagagatcacgagtaattttagggcacctgacaggtgagtccgtgaatccttgtgccgattctaccttacggtctcaggctcaacgcatgccgtctgtttcccatttctcctccttctc

SEQ ID NO: 159010 - DNA, 427 bp, Zea mays
  unsure (1)..(427): unsure at all n locations
  Clone ID: MRT4577_76591C.1
gcganaacggagggctttttggcccccccctggcggggcccaaaaggtcccgggccccgtttaaccacccccccaggggggggggggtggcccccttttttcttttggggggggattacggtacaacccacaccattgccggggggggggggttccggttcccttttaaccccaggggggcccccccgcggcggggggcccttttggggggaacggaacccccaaaaattgggcgccccttgggggggccccggtttttcggaggccttcccccttgggggggtaacggggggggggggggggtggcccggttttaaaaaccttcttcgggggcggggcgcgcattctttttacgttgttttccgggccgttcgggttggggccgttgccttgggccgggcctccgcctggtttacgggcgtttttg

SEQ ID NO: 159011 - DNA, 779 bp, Zea mays
  Clone ID: MRT4577_76592C.1
attgggtacctcgaggccggccggggagccattccgtacagacgtgggcgcagagaatcttctcccaacgaacagggtacatggagaggagaggagaggttgggtctggaacaccttggctccgatgaagctgcacggggcggagttggcgtggaacgtgaccaggtgcccaacgccgctgggagaggccggctccgactaccagatcgtgcccctctgcttcgcctccggcgagctcaagagtcccgatcacctccttcgcaacccgcttggtcaggctccacttctgcaggatggagacttgtacctcttctaatcacgagcaatctgcaagcaccctgcccgcaaagaccagccacacctgctgagggaacgatgcctccatgaggcagcaatgggggatggttgtatcgaggtggagggtaaccatctacaccgctgcactgaatcccatcctcttccaggtcctcatctgccctatgcttgggggaagcaccgaccacaaatgtgcgccatgacaaccttgagaagctgtagaatgagctagaggtgtacaaagcacgcctgactcagtgcgagtaccttgctggagacttcctcaacctcaccgacctgaaccatgtgtctgtcactctctgcctgattgctacaccctacgcatctgtgctcgacgcctacacgcatgtgaatgcctagcggtctgctctgatggagaggccgcctgacctagaagtcgctgacttgatgaagcatctgcttgaacggctgccctgtcaatc

SEQ ID NO: 159012 - DNA, 617 bp, Zea mays
  unsure (1)..(617): unsure at all n locations
  Clone ID: MRT4577_76593C.1
gtggcggtggtcggcgctgccgtgtacgagcagctggcgcgcgccaaatggccatcgggcgccggtgggacgcggtgggcgacctccagcgtgcactggacctgaagactctgttcctggaggccgggagtgctgagcttgggaacgcctacagggacgtcgccgaggcctatgcgggtgtgctggacttcgacaaggcgctgccattgtgttctaaggcattggggattgcggagagacggtttggtgaggactcggcagaagtggctaagctacggcggcttctcatgtctgtctatactggtttgggtcgccatgaggaggctctggctcaaattgagcttgctaaggtggtatatgagcgattgggattgaatgttgaactttctcaggctgaaattgatggggctaatatccgtatcttgttgggngagatcggaggaggcgctgaataacattaagagggtaatgcagcgggcagacaaggagagcgaggagcgtgcactagcatatgtcacaatggcaaagatattgatgtccgaggatacggttttggactcaaagcggtgcttgggagatcgctcaggggatcatagatgcaaaggattccatcgacc

SEQ ID NO: 159013 - DNA, 336 bp, Zea mays
  unsure (1)..(336): unsure at all n locations
  Clone ID: MRT4577_76594C.1
agctttttatctggccagacccccaccggatgggtccatacatagtgggaggggcccccnaccaacncaaagcccatgaagcgctgcagcctaaacaacgcggcaagaaaacgagagttccgcctgctgctgagcttgcaacaccatagacagaggacgatccggcaacacctccggcaacagcggcagcacatcgacatgcagctaccacgcgctcatgagcatccgcaagaacgcctacgacaccgacatacgcgccggttaccggaagctcgcgatgaactagcacccagaccagagggccagcgaccccggcgcggccggcgaggacaatca

SEQ ID NO: 159014 - DNA, 706 bp, Zea mays
  unsure (1)..(706): unsure at all n locations
  Clone ID: MRT4577_76595C.1
cgcgnattgggttgcggactctctttcctcttcttcttcgcttccccccaaagctcctcctctccatcgattccattccattcgaattagcgatcgcccactacccgcaacctcctaccttaggcagcgccaaaccctaaccttactcgggtacgccaccaatggctgagtcggaggacgccaccgccgccgagcccgggtccgggccgccccacgaggacgaggatgcgctgctcgcccgcgcccacaccgtcatctccaggatcatcgaccgcgagctcgaccccaacccccgcctcctccacaccctcgccaccatgtgcgagctccacgaagccagatatcttgagttacgttagcagtggtcacaacgcagagtacgcgggacaaggagcacatttacaattgggaagctggccagtttgctccgggacaatgacgagttttatgagttggtgttttgtaaattcttgtccgacacctcctactctgttgctgtacaagccgctgctgctaggctgctcttgagctgtcactctgcctggacgcctccgtatcctcatgtctttgaagactctatcatagataatattaaaaagtgggtaatgaaggatcctgaagcatctaatgaatgtgagtggaagtatctaggaaaaaaaaaaaaaaaaaaaaaaaaaaaaaagtactctgcgttgttaccactgct

SEQ ID NO: 159015 - DNA, 146 bp, Zea mays
  Clone ID: MRT4577_76596C.1
aggggggggttttttagaaacgtccgcccttacccccaaccgactactccgggatcaatcacgggtcatttgtaccgacaagcttgcacctcaccaggtgaaaattatcatgcggagactctttggtgacccccatgagattgtcg

SEQ ID NO: 159016 - DNA, 163 bp, Zea mays
  Clone ID: MRT4577_76597C.1
ttatactttctatatggcatagctgttctgtggaaatgtatcctacaattccacacatacaccgtaagcataaatgtaacctgggtcctaatgaggacaactaataattgcgtggctactgccgtttagtcttaacctgcttccactgataatgaatggcaac

SEQ ID NO: 159017 - DNA, 277 bp, Zea mays
  Clone ID: MRT4577_76598C.1
cagcagctagcacgctcctcgagcccagcagagaaaggccggcagagctaatcgtaatagccatgggctccaccgccggcgacgtggccgcggtggtggacgaagaggcgtgcatgtacgcgatgcagctggcgtcgtcgtccatcctgcctatgacgctgaagaacgccatcgaactgggcctgctggaggtgctgcagaaggaagccggcggaggcaaggcggcgctggcgccagaagaggtggtggcgaagatgcacgaggcgcccagcgaccc

SEQ ID NO: 159018 - DNA, 428 bp, Zea mays
  Clone ID: MRT4577_76599C.1
tcaagcgctacctcaacctcctcagaaagagagcaggacttagtgatgctcgaatcagagtgcgcacttgaatagcaaggatttttgcacggatgctgatcagctgtcaacgtgctcctcatttaccaaagccgccacactcaagcccatgccatgctggcactgacaaggacactggccagaatgcgggaacatgacctgtagaggtgactgaatccttatacaagctgatacacactgatttcttgtcgagtactaaggacataatgtatgctgtgatcgttccgtggtgctcctcgactcctgtgactacaagaccacgagctcctctacagccctatccgaaaaatgttttgctggagatgtgctgagactgccaccgccactgcagcggctacaatactaccatgtctgtgcttgacctctcg

SEQ ID NO: 159019 - DNA, 414 bp, Zea mays
  Clone ID: MRT4577_7659C.1
aaagcaagggaaattaaacaaattttggtaaaaaatcacacatccaaatgcccgtcagccggggcatggggggggttttttttcggaccccaccctggtggatcgcattaaaccccccccacccccgaaaaaccttgacgagaccacccccaattttccaattcggaaatcacaacacaaatccccttcccgttgcactggaccgttttggacaaaaaaaaacggggctttttttttgggacacacaaacacaggatttacaaccacggacactttggggccgggcgttacccggggggagaagaagaaaaaaacccgggcttgcgttaaacgggcggacaatgtttcccccccccggccagtgtgcgttttcaacgggggaaactgcccttggtgcccggggtttcaccgttt

SEQ ID NO: 159020 - DNA, 480 bp, Zea mays
  Clone ID: MRT4577_765C.1
atattcaaacaaaatctggaagcaagacaaggggggcccgggcgaagaggcgggggcaggccgcgcggccgagcgccgacgcccccggccaaaagagcaaaaccccaaagcggcccaccccccccccccaccaaccaaaggaccagcgcggccaaacaaacaaccagggaacggcgggcaggagccaaccgacggaccaaccacgacccccgccaaaccgacccacccccccccgcgggcccccaaccagccccgggggcgggggaccagccaccaggacccgcctgcccgggcggggggagcccaagggaccggggggcagggggcaaaagaaagacggagtactccaaggggggcacgggcagcgggggggccggagaaagcagacacccgggcctcatgaaacccaaaaacggacgaaccatcttggttggccaaagggggggggacaaaagcaagggtaggaaggcggtgcccgac

SEQ ID NO: 159021 - DNA, 667 bp, Zea mays
  Clone ID: MRT4577_76600C.1
gaagaagaaaaattctaatgtcccagctgggcttttctttcagcatgctggtcataggtttgttgtctgtgtcagatgcaaaaactaacccttcacactcatgcttctatttttaccatgcatttcataattcatgttgtacatcttggcagggataagatcgtagacttccactggaattcgtcagatccttggacaattgtcagtgtctcagatgatggtgagagcactggtggaggtggaacactgcagatatggcgaatgagtgatttgatctaccgcccagaggatgaagttcttacagagctggagaatttcaaggctcacctggccagttgcgctccgaggaattgagtcatgtgaaaactctgagtaggttatgtagtttcctggccataagtatggccccaattgacattggatctgtcttctcatgctcctagagctgtacccttcgaggtgcttgtgcctttgtgagcttgtgttgaaccatgttgtatgactaaatagtccgcaaacgagtcagctggatggctaatctgtaggccaactattgggatattgttggatattatcaacaaccggttcagattcgtgattagattgtccgcaaaaaaaaaaaaaaaaaaaaaaaaaaaaaaaaaaaaaaaaaaactcgagggggggc

SEQ ID NO: 159022 - DNA, 2764 bp, Zea mays
  unsure (1)..(2764): unsure at all n locations
  Clone ID: MRT4577_76601C.1
ctttaagcacatctgtccagagcttgttgttagccacccatccgaagatggttctcctggggctgcatctgctataccagaaacagatctgccagaaattgtccaggtgataagatcacgtcgagatggtatccataaggtggtggaattactgcagcacaagtttccaaatgtttcaaagactcagctgaatcgcaaagtgtgagagagatatatgactttgttgacaatcattggaagggcaagatgaatttaacatgttatgtactgcatgtaaagaaagaggtgcttgacaagctaggattagattcgtcaccagtgaaatccaagaagaataaaagcatagccatgtacttctcgaagagatgtttacctcctaaagaagctgtcaatgctctgtctgcttctcctgagttgcggttgaaatctagagccattcaaaatggcaatggtggcaccgaagctcctcagatcaatctgttccctccaaagcagtagagtttgtaacaggataccctgaaagtcggatcaggtataaatgaagctatgcacccaggtgagcacaaagctcagaggtccatgtccctcccatggctatggaagtgcgtgcaacttggttttgcatatggatgatctggatcgattatgtttccagtgcttcatgttgtaattttagcctgaaagtaggtttgttcatgaaggacattcagttcaaatgtttgacctatgttaaggcaaggcattgttctctgcaacatgtgctttgttatgaacattatgtgcactctgtgatcccacaaaccttatgatgctctttaccttgcaatccggatggttgatgcacttttatnnnnnnnnnnnnnnnnnnnnnnnnnnnnnnnnnncattggttctatgctctcctctccctgctcgcagtcagagcacagggactgcctccggagaccggagcaggccgcaagcgtccaggttcgagacgccagcacgctctcgcagtacagcagcattatcagggagcgtgccgtgggagtgggaggttgcctcaggtgcggagcagtcgccggcggcgaccatcggtgtctgagatgaaggagagaggcggctctagggcggcagtggacgagcgctacgcgcagtggaagtcgctcatccccgttctctacgactggtttgccaaccacaacctcgtttggccatccctctcctgccggtgggggccacagtttgagaaagctacctacaagaatcgtcaacgcctttacctatctgaacagaccgatgggagtgtgcctaatactctggttatcgcaaactgtgaagttgtgaaaccaagggttgcagctgctgaacatatctcgcagtttaacgaggaagcacgatcaccttttgtaaagaagtacaagactatagttcatcctggtgaagttaacagaatcagggagcttccacagaacagtaagatcatagccacgcacactgacagtccagatgtacttgtttgggatgttgaagcacaaccaaatagacatgctgtcttaggagcttctgaatctcgtcctgatctgatattaacgggacaccaggaaaatgcagaatttgcgcttgccatgtgtccagcagaaccatatgtcctgtcaggaggaaaggacaaatttgttgtcttgtggagcatccaagaccacatatctgcccttggggattcctcgtcttctcccggagcatctggcagcaagcagtctggcaaaattgcaaatgaaaaggagagtcctaaagttgatcctagaggtatattccatggccatgacagtactgttgaagatgttcagttctgcccttccagtgcgcaggagttttgtagtgtgggtgatgatgcttgtcttattctgtgggatgctcgaactggcactgacccagctgttaaggttgagaaagctcacagtggagatgttcattgtgttgattggaatccccttgatgttaactatatcttaactggttctgccgataactctgtccgaatgtgggatcgtcgcaatctgggttcgggaggagctggttctccaattcacaaatttgagggccataaagctgctgttctttgtgttcagtggtcacctgacagagcatctgtttttggaagttctgcagaagatggtttcttaaatgtttgggaccatgagaaggttgggaagaagaaaaattctaatgtcccagctgggcttttctttcagcatgctggtcatagggataagatcgtagacttccactggaattcgtcagatccttggacaattgtcagtgtctcagatgatggtgagagcactggtggaggtggaacactgcagatatggcgaatgagtgatttgatctaccgcccagaggatgaagttcttacagagctggagaatttcaaggctcacctggccagttgcgctccgaggaattgagtcatgtgaaaactctgagtaggttatgtagtttcctggccctaagtagtttcctggccataagtatggccccaattgacattggatctgtcttctcatgctcctagagctgtacccttcgaggtgcttgtgcctttgtgagcttgtgttgaaccatgttgtatgactaaatagtccgcaaacgagtcagctggatggctaatctgtaggccaactattgggatattgttggatattatcaacaaccggttcagattcgtgaaaaaaaaaaaaaaaaaaaaaaaaaaaaaaagtactctgcgttgttaccactgctt

SEQ ID NO: 159023 - DNA, 2835 bp, Zea mays
  Clone ID: MRT4577_76602C.1
taggatgtcggtggtccagcccaacttacagaagcccataaaatagtcatagcctctgtaactcccggcccaggaagccatctgctgctcttcgaacattggatcctatgctctcctctccctgctcgcagtcagaggctcagagcacagggactgcctccggagaccggagcaggccgcaagcgtccaggttcgagacgccagcacgctctcgcagtacagcagcattatcagggagcgtgccgtgggagtgggaggttcctcaggtgctgagcagtcgccggcggcgaccgccggtgtcggagatgaaggagagaagcggctccagggcggcggtggacgagcgctacgcgcagtggaagtcgctcatccccgtcctctacgactggtttgccaaccacaacctcgtctggccatccctctcctgccggtgggggccacagtttgagaaagctacctacaagaatcgtcagcgcctgtacctatctgaacagacggatgggagtgtgcctaatactctggttatcgcaaattgtgaagttgtgaaacctagggttgcagctgctgaacatatctcacagttcaatgaggaagcacggtcaccttttgtaaagaagtacaaaactatagttcatcctggtgaggttaacagaatcagggaacttccacagaacagtaagatcatagccactcacactgacagtccagatgtacttatttgggatgttgaagcacaaccaaatagacatgctgtcctaggagcaagcgagtctcgccctgatctgatattaacaggacataaggaaaatgcggaatttgcgcttgccatgtgtccagcagaaccatatgtcctatcaggaggaaaggacaaatctgttgtcttgtggagcatccaagaccatatatctgcccttggggattcctcgtcttctcctggagcatctggcagcaagcagtctattaaaactgcaaatgaaaaggagagccctaaagttgatcctagaggtatatttcatggacatgacagcacggttgaagatgttcagttctgcccttccagtgcgcaggagttttgtagtgtgggtgatgatgcttgtcttattctgtgggatgctcgaactggcactgccccagctgttaaggttgagaaagctcacagtggagatgttcattgtgttgattggaatccccttgatgttaactatatcttaactgggtctgccgataactctgtccgaatgtgggatcgtcggaatctgggttcaggaggagctggttctccaattcacaaatttgaaggccataaagctgctgttctttgtgttcagtggtcacctgacagagcatctgtttttggaagttctgcagaagatggtttcttaaacgtgtgggatcatgagaaggtggggaagaagaaaaattctaatgtcccagccgggcttttctttcagcacgctggtcatagggataagattgtagacttccactggaattcgtcagatccttggacaattgtcagtgtctctgatgatggcgagagcactggtggaggtggaacactgcagatttggcgcatgagtgatttgatctaccgcccagaggatgaagttcttgcagagctggagaatttcaaggctcatttggccagctgtgcaccgaagaattgagtcatgtgggttacctgcggaatgcaatcctgtggaaactgagtaggtgatgtagtttcatggccataagtatgagccccagttgacattgaatctgtcctctgatgctcctagagctgtacccttgaggggcttgtgcttttgtgagcttgtgttaaacctgctgtacgagtaaactagtatgtccgcaaacgcgtcagagccggatgtctgtgggccagctattgggatactgccggatatcgtcaacaattgttccagattggtgtattggatctaatgagattgtcagcaattgcttgtttttatggcattgtgttgattggaatccccttgatgttaactatatcttaactggttctgccgataactctgtccgaatgtgggatcgtcgcaatctgggttcgggaggagctggttctccaattcacaaatttgagggccataaagctgctgttctttgtgttcagtggtcacctgacagagcatctgtttttggaagttctgcagaagatggtttcttaaatgtttgggaccatgagaaggttgggaagaagaaaaattctaatgtcccagctgggcttttctttcagcatgctggtcatagggataagatcgtagacttccactggaattcgtcagatccttggacaattgtcagtgtctcagatgatggtgagagcactggtggaggtggaacactgcagatatggcgaatgagtgatttgatctaccgcccagaggatgaagttcttacagagctggagaatttcaaggctcacctggccagttgcgctccgaggaattgagtcatgtgaaaactctgagtaggttatgtagtttcctggccataagtatggccccaattgacattggatctgtcttctcatgctcctagagctgtacccttcgaggtgcttgtgcctttgtgagcttgtgttgaaccatgttgtatgactaaatagtccgcaaacgagtcagctggatggctaatctgtaggccaactattgggatattgttggatattatcaacaaccggttcagattcgtgattagattgtccgcaattgtttagttttgtgccttcgtgtgtgggtttacgttcttggcatatcgtttggtcaaaggcctattttctgcgtgcatttgcacatgaattaatagaac

SEQ ID NO: 159024 - DNA, 257 bp, Zea mays
  Clone ID: MRT4577_76603C.1
ctctaattaaatggaaatgtgaagtggtaggaccgttgaagtaaatcgctgggattggctcatgcacgttgggagatcagatcttcgcttgcataggatgcagactagcctacctactcatacgtataactagatattgtatattatatcactaagaacaattccctatccgctttaatacatggtcctgactagcaataccataactgcacccatcttaatgctctgccaatacatcacacatatgacatctgtcc

SEQ ID NO: 159025 - DNA, 497 bp, Zea mays
  unsure (1)..(497): unsure at all n locations
  Clone ID: MRT4577_76604C.1
ccggccgggaacctgtgtacccagtgatgaacaccactcgcattgtccctactcctgacccctaccgattctcgcctgctgcagccatgacgacctccgaggtgctctccaccgacgtcaatcccacccagttctaccgctcccgcgcttcgctgagaaagacgtcgaagagtgttgtgctgatgatgagactggagcgcgcccagagcttcattgtgaggcagctgactggcactatctccggcgagcgtgtattggacatgaaaaatagctaactgatgaacctcctcctcctcggtgtcatatcattgtttattgtcggcatgggcgtgccctacggcgacttcttctttgctgacggatccgngaacgccggcgaagatacctacgcgaaggacaagctgggcaacgacatcacggtggaggcgtggctcaacacgcacggtcccaacgaccgcacgctcgcgtaggggatcaagggtgaccccacgtacctg

SEQ ID NO: 159026 - DNA, 420 bp, Zea mays
  unsure (1)..(420): unsure at all n locations
  Clone ID: MRT4577_76605C.1
aacgaaatgtgcaggctttacaccgggcctttaatttatgtttgcacaaaggagcagcacgcatattttgtggggcacgggctttacacgggttcacacaggggcatggtngaagcaagcaactagtcctgcatgtttcggtggggctttttcatttcattttacaaaatcacaaatttatgcgttttgacacattggcacacaaactggggcatttttttttttttatttgactggnacttttgcagttgttgatgatggtgggcattgnatttttttttatttntttggcttaaagatccatttttagggtagccttgtngggttgaagttttttatttgttgaggagggaaccctttctgtaggggtggctttggtggngtttncaggggatgaaagaataattttttgtctacatg

SEQ ID NO: 159027 - DNA, 141 bp, Zea mays
  Clone ID: MRT4577_76606C.1
gggaagggagaaccaaagcttagcttatgagatgttagtcacaatggttaaataaacccaacaagggcaaaattttagcagggtcaaatttgattctttagaaagcccctttgtttacacaccaaaacaagctttaacacc

SEQ ID NO: 159028 - DNA, 288 bp, Zea mays
  Clone ID: MRT4577_76607C.1
atttaagtctacaaatgctgaaattagaatgtatatataatatgaaacaatccaaacattaagtacaaaatacaatgttcgtgtctagtttttttaggtctcagtgtactggtgggccgactttttgtatgtcgcggcccacaagtaccacccactagatatgccgcggccttttgagtctaacaggactggcaagtatctggtgacaacgacagactaagagtatcaggctaacgtcaagtagcagacacaagatagcactggaatttctctatcataagagttgct

SEQ ID NO: 159029 - DNA, 810 bp, Zea mays
  Clone ID: MRT4577_76609C.1
aggttccggaaactccggacccccgccgccgccgaacggtccctccgtctccaccacgccacggccgacgagggcgaggaaagaccaatcaaagagagcactacaaaaggaaggggacggggccagaagctataccaccaccactgctacttcccgcggcagcgcacgcctcgaggaatcgttctcgcagcaccggcagcagcgtctctccggcgacaaccgtgaggccatggccaaggatggagcaggaggcgggcccgactggaacggcctgctcaagtggagcctcgcccacggcagcgacggcaccaacccgccccgcgcgctcagcgaggaggacaggaaatggtttatggaggcgatgcaggcgaacacaatcgatgtcgtcggcaggatgaaggagatagcccaggtgatgaaaacccccaatgatgtgttgcagtctcatggcgtgactccagagaacattgaagatatgcttgatgagttacaagagcacgtggaatccattgatatggcaaatgatcttcattctattggtggactagatcctctacttggttacttgaaaaattcacatgctggcatccgagcaaaggcagcagaagttgtcagtacggttgtccagaataacccgaaaagccagcaacttgtcatggaatctaatggactggagccgctattgacaaacttcaggtctgatcctagcacgactgcacgcacaaaagctcttggagctatctcttctctgattcgcaataaccagtccggtcttgctgcatttcgtctaggaaatggacatgctgcact

SEQ ID NO: 159030 - DNA, 874 bp, Zea mays
  unsure (1)..(874): unsure at all n locations
  Clone ID: MRT4577_7660C.1
tgggaccctcgaggccggccgggcaagctcgcgcagatgatgccctcaagttactaaagagcatgctatgcaagcctgacacgattagcttcaatgctgtgttgaaatgtttatgtaaagccaaacgatggtatgatgctgtggagcttgtggctaagatgttaaagaaggattgccgtataaatgaaatgacttttaacatactcatcgattcactatgccaaaatggacaagtcaaggatgccattgaggtgtttgagctcatgccaaaatatagatgtatgcctgatattgtcacatacagtagccttattaatggcttttctgaacaaggccttgatgaaatggcctttgatttgttcagaagcatgccatgcagggctgatatatttagctacaatgctacattgaagggtttgtgtatggctgcacgatgggatgatgctggagagcttatagctgatatggtcacagaagattgtctcccaaatgaagtgacattcaatatactaatcagttccttgtgccaaaagggactggtcaatcgtgcaattgatgtttatgagcaaatgcccaagtatggaattacaccggatattttcacatataatgctcttatcaacggctattctgaacaaggtcgtttggatgatgccctcaagttcttgagcaccatgccttgtgagcctgacaccatttcctataattctatactngaagggtttgtgtagggctgagcgctggaaagatgcagagaaacttgtcactgagatgcttagaaagattgcactccaatgaagtacattcaagatgctaatcattatttattttaatagagtagttgatggaatactaaattcctggagctatgcca

SEQ ID NO: 159031 - DNA, 114 bp, Zea mays
  Clone ID: MRT4577_76610C.1
cacgcctccttatccaagcaatttgcgacactttaaggagattttttcattatgcccgcgctaacaatgatggccaatgctgctgctcccctattgcaccctgagtttccatct

SEQ ID NO: 159032 - DNA, 1197 bp, Zea mays
  unsure (1)..(1197): unsure at all n locations
  Clone ID: MRT4577_76611C.1
catatgaacgtgttgaacgtggattgctactgcanaaagaaacagacagcaatgaatatgttcaatgacaaaactaaggggcgatttatttttttaattgatagtcgtgcatgtggtccaagcatcaaactatcatctgttgatgccatcatcatatattgtagtgactggaatcccatgaatgacttgagagcccttcagagggtcagcatggagtcacagtctgaacctgtgcctatttttcgtttgtactcgtcttttacagtggaggaaaaagctcttattcttgcaaagcatgaccatattttggatagtaatattgtgaatataacccctagcctgagccattgtctgctcagttggggcgcatcatttctcttcaatagacttgaggagttgcagcaacatagctactcaaatgtctctggtgatgagcttttcatggataatgtagatttggagtttttgacaaaattactcagcaaggttgaactcagaactgaatcaggcaatacagccatatcacaagcttatctgtgtggatctttctattctagggctattgttgtagcgggtgagagggagggaattccatcagttgatggtgacctgccaaagttctgggcctactgggtaagtttacttaatgggaggtctcctcagtggcagtatatatctgagccagtacaaagaagccgtagaaagataaataacatggaacaacaattgaaaaacacagacaaacagttgaaaataactactgaagaaactgatgaagccagagtaaagcgtagaagaattggtgaaatcatggattcatctgcaatagactcacctggcaaaaacaaggacaccatattgccaggaaacaataccccacctagttctcatcaaatatcagttgaagatacatggcaggaactagagcgaagcaatcttcatgccacacaaaaaggtctacacgttcaactcaagccagagatttcgaagttatataagttgctgcaactgccggtactgctacacatatttaactctattgccccctccatgacttcatgttctctttttattttttaatcctgtgtaaaatcatttattaaattctcataaggtataagatagaatttggcactcttaggcttttgatggttaatatatctcagcttggagcctcgaaccatgtgtgaaatgtgt

SEQ ID NO: 159033 - DNA, 344 bp, Zea mays
  Clone ID: MRT4577_76612C.1
gcgacgaatattacctagtgttacgaggtactgcatgttatacattacggaaggacctctagtaggctaaacgcattttcgtctatcccgagccttgttcggggattgctttagacccgtggctgaagccatgtgcttaggagttttaatctgcggatcaacacactgtaacgccctccatgcacacgtacatccacaatatgaagactcacctgcgcgacctgaagaactgatcccaaccgatgcatggcaaggacagctgggtgtgaagggatctatctgcattactagagacagcgtgcgaccatacattccatgtagaagctccttaaattgattgacac

SEQ ID NO: 159034 - DNA, 494 bp, Zea mays
  unsure (1)..(494): unsure at all n locations
  Clone ID: MRT4577_76613C.1
ggtacttcctcgnnaggccgngnnccgggnatagttattcctcagcgcaagggtgctcccaataatagcgagtgagatcttccgttgatccatcttgctaataagcctgcgtgcccttctgtcttcctcgatctcgataccgagatgctccgatcatgtcctcaaaaccataattggtgcagaagaaaatgaaaaagggggtctgctgcgcaatcatcgtcagatgctcggccaccgcgagacccctgcagctacttaccatgagcccccttgcacaagggtcctgctcgtgcacactcctgatggccctggtcttgatagtaatgctatcggatcttatgctgctcctgtgaatgatgacaaccctcttgatgatccttcccggattgtagctgcccgccattgactgtgtacggatgttgccgcaacaagatatgatcctgtagttgcatgtgactcggatcctgtgcttggatacatcccttatgttagca

SEQ ID NO: 159035 - DNA, 834 bp, Zea mays
  Clone ID: MRT4577_76614C.1
cttccccgggcgcgctccggcttcctcccckgatcggcgcggggcgtgctggctccgcgccttawttcggggcttttttttttccttctcgcggagcytcgttdtaacgcttcggatctagctggattcgggcgggatcgcvgccgcccggcttcctcgttgcctgaatcgtggttttcctcggggagggaatcctgawcggatygtcgggattcctcgtkcggccggcykgkwcacgcyttcmagccakaaacatagtctgcbttgccgggattccacgwtctgttatctagacgtcgggcgcytcgtctagtgctcscygcaggscgtkgcgtactggcgttgtgcgccgccgccattgatycgttcttttttkttttcccyctagcgtgttaaaacgagcygtktagatcttaggkctkcmaagkgcggkggcggtggaatctcggttgawctttgcctcaaccgcgccartttagckcgttttgtttcagttcatctkcvaatttkgctctyttykgcttaagtcccggagcytagattatrgagcaccaacygcatcgtcatccttttggttctcatgttgatcttttggctgaagttgcagacttcaagttgcacttccawtttaccggagctgcygcacgawtatactkgaatttytagcggtagtatacgggtctyctttcaaattactttcgtttttwgggacttagcactctagtttyaagactattaaccggaatatctaawaawagcagtttctgtagttgctcaattgcagcctggtttaraattatggggacaattggccgttccamgcaaaaaaaaacg

SEQ ID NO: 159036 - DNA, 281 bp, Zea mays
  Clone ID: MRT4577_76615C.1
cataaaaaggaaaagttacactctttgacccgggaaaggaaacacaccttgctccaattaccgcatgtttagcaaggtatgcaaagctatgaggacagtggaggcttctaaagtcaattagtgtggaacactataaaccattgacagaaaccatgaatatcaatgactccatcaaaagaacgttcttgtcccggctcggaatccaacactaaacatgtacatatttctgtagagcatcatcattatgtcatgaccaacaatgcacgaagcacaagaaagtg

SEQ ID NO: 159037 - DNA, 1796 bp, Zea mays
  Clone ID: MRT4577_76616C.1
attgggcgctcgccgccgggcggggctgagtcctcacctgctggcggaggcggcccccaaaagccaaattccccaacccacaccacctccacactccaggttagggtttgctgtcggcgatgtcggatcggcagccgtcggaggagccggaggagcaggtggacctggagggggacgacgacggcatggacgacgacgacgccgggtaccgtcgccgcggaagccgggacgactcggaggagcccgaggaggatgacgacaatgacgagcgccacggcgaggccgacgacgacgccgggatggagccggagccggccggaagtaaaggcggggatgacacgggcaaggggcccgacgtcgccggtggcgggcccgaggacgaggaggagaggagcaagtgggatgacatgctcgccctgccgccccatggctctgaggtcttcattggtggcctgccccgcgacatcacggaggaggacctccgtgagctgtgcgagccgttgggagaaatatatgaggtgaggttgaccaaggataaggacacaaaggagaacaaggggttcgcctttgtcaccttcatggacaaggaggctgcgcagcgcgccatcgaggatgtgcaagacagggagttcaaggggaggactttgcggtgctctctgtcgcaggcaaagcacaggctgtttgttgggaatgtgcccaaggggctgagcgaggaggagcttaccaacactatcaaggggaagggtccaggtgttatcaacattgagatgtttaaggatcagcatgacccaaaccgtaaccgtggcttcctctttgttgagtattacaaccatgcctgcgcagactatgccaggcagaaactttcatctccaaacttcaaggttgatgggagccagttgactgttagttgggctgaacctaagggttcaacagatgcttcatctgcagctgctcaggtgaagactatatatgtgaagaacctacctgaaaatgtttctaaagagaagataaaggacctgtttgacaaacatggagaggtcacaaaaatcgttctgcctcctgccaaggctggtcataagagagactttggctttgttcactttgcagaaagatcaagtgcattgaaggcagttaaaggaagtgaaaaatatgaaatcgatggtcaagtactggaagtgtccatggccaaaccattggcagataagaaacctgatcattcacacaggcctggaggaggccctaattatccccttcctccctatggtggtggtggctacatgggagatccatatggtgcttatggtggcggcggtcctgcatacaaccagccaatgatatatggcagaggaccagcaccggcaggaatgaggatggtgccgatggtgcttcctgatggccgccttggctatgttctgcaacaacctggtggaatgccgcctccgcccccaccgcggaggggtagtgaccgaagagacagtggcagaggtggcgaagggcacagccggcgatatcgcccttactagcttttcccttatgggctctactcccatcatgtggtatgaagcgtttaacttatgagacaacgagataggagcctgtgttcttgtcccagtataagatctgcgatggcacgatgcttgtaccatctgtttcttcggtgacttatttttatcatgcagtgcatgtgacttgaaactgtgatggacttgtattgctttctgccttatggcacctgtagtagtgaactgatgaaggaagttcatgcggactctgaagctttgttggcttagaatggt

SEQ ID NO: 159038 - DNA, 502 bp, Zea mays
  Clone ID: MRT4577_76617C.1
gggggaaagggaaccattaaaaaggggggaaaaaaaaaatccatccatttcccaagggaaaaaaaggggcctcgggggggggggaaaggcgtaaactagctgtccctgaaaaaaagggggaagaaaaaaacctttgggacaaaacaacaggggagccggcaactgggatgtacaaacccgaacaaaaaagcattgggttcacctcaaaaagaaaaagaagaaaccctcctaaaaaaccgaagggggttacaaggacaaaaaacaccggggaaaacatttacaggctaaaaaaacccctccaaggctttaaaaaccgacagggggtctttcaacccgaaaaaattggtggcccggaagggggtccacccaacagcgggtacctaggggaaaaaaagggaggcacccttaaaccgggtgggaaaaaccctgaggaaagggtttcctaaagcccaacgggcgggcggttgggatctaaaaaccggggcggggggggcccccggaa

SEQ ID NO: 159039 - DNA, 686 bp, Zea mays
  Clone ID: MRT4577_76618C.1
gttacaggatgaaagcttgaaaaatcttatgacaccttctgacacagcgcgttacatcacgttgtgaatgagaaggcaattcttttctgatgataaacctgatcattcacacaggcctggaggaggccctaattatccccttcctccctatggtggtggtggctacatgggagatccatatggtgcttatggtggtggcggtcctgcatacaaccagccaatgatatatggcagaggaccagcaccggcaggaatgaggatggtgccgatggtgcttcctgatggccgccttggctatgttctgcaacaacctggtggaatgccgcctccgcccccaccgcggaggggtagtgaccgaagagacagtggcagaggtggcgaagggcacagccggcgatatcgcccttactagcttttcccttatgggctctactcccatcatgtggtatgaagcgtttaacttatgagacaacgagataggagcctgtgttcttgtcccagtataagatctgcgatggcacgatgcttgtaccatctgtttcttcggtgacttatttttatcatgcagtgcatgtgacttgaaactgtgatggacttgtattgctttctgccttatggcacctgtagtagtgaactgatgaaggaagttcatgcggactctgaagctttgttggcttagaatggta

SEQ ID NO: 159040 - DNA, 1998 bp, Zea mays
  Clone ID: MRT4577_76619C.1
cggctcgagctcacctgctggcggaggcggcccccaaaagccaaattccccaacccacaccacctccacactccagtaagcaccccgcctcccccctcgatctccctcctccaattccttctgctgctgcgactgaatcgaattgctccactgctactaatctctatactactactgcttgctcctgtttcaatcgatcaatcatgccgcgcgtaggttttttccggcgcaaagggttagggtttgctgtcggcgatgtcggatcggcagccgtcggaggagccggaggagcaggtggacctggagggggacgacgacggcatggacgacgacgacgccgggtaccgtcgccgcggaagccgggacgactcggaggagcccgaggaggatgacgacaatgacgagcgccacggcgaggccgacgacgacgccgggatggagccggagccggccggaagtaaaggcggggatgacacgggcaaggggcccgacgtcgccggtggcgggcccgaggacgaggaggagaggagcaagtgggatgacatgctcgccctgccgccccatggctctgaggtcttcattggtggcctgccccgcgacatcacggaggaggacctccgtgagctgtgcgagccgttgggagaaatatatgaggtgaggttgaccaaggataaggacacaaaggagaacaaggggttcgcctttgtcaccttcatggacaaggaggctgcgcagcgcgccatcgaggatgtgcaagacagggagttcaaggggaggactttgcggtgctctctgtcgcaggcaaagcacaggctgtttgttgggaatgtgcccaaggggctgagcgaggaggagcttaccaacactatcaaggggaagggtccaggtgttatcaacattgagatgtttaaggatcagcatgacccaaaccgtaaccgtggcttcctctttgttgagtattacaaccatgcctgcgcagactatgccaggcagaaactttcatctccaaacttcaaggttgatgggagccagttgactgttagttgggctgaacctaagggttcaacagatgcttcatctgcagctgctcaggtgaagactatatatgtgaagaacctacctgaaaatgtttctaaagagaagataaaggacctgtttgacaaacatggagaggtcacaaaaatcgttctgcctcctgccaaggctggtcataagagagactttggctttgttcactttgcagaaagatcaagtgcattgaaggcagttaaaggaagtgaaaaatatgaaatcgatggtcaagtactggaagtgtccatggccaaaccattggcagataagaaacctgatcattcacacaggcctggaggaggccctaattatccccttcctccctatggtggtggtggctacatgggagatccatatggtgcttatggtggcggcggtcctgcatacaaccagccaatgatatatggcagaggaccagcaccggcaggaatgaggatggtgccgatggtgcttcctgatggccgccttggctatgtcctgcaacaacctggtggaatgccgcctccgcccccaccgcggaggggtagtgaccgaagagacagtggcagaggtggcgaagggcacagccggcgatatcgcccttactagcttttcccttatgggctctactcccatcatgtggtatgaagcgtttaacttatgagacgagataggagcctgtgttcttgtcccagtataagatctgcgatggcacgatgcttgtaccatctgtttacttatttttatcatgcagtgcatgtgacttgaaactgtgatggacttgtattgctttctgccttatggcacctgtagtagtgaactgatgaaggaagttcatgcggactctgaagctttgttggcttagaatggtaattttgctgtattctatttcacaggagataaaaaaaaaaaaaaaaagaaaaaaccggtcctctcctcgtgcaaaaa

SEQ ID NO: 159041 - DNA, 703 bp, Zea mays
  unsure (1)..(703): unsure at all n locations
  Clone ID: MRT4577_7661C.1
gtaccctncgggttcttccgggnagcacgcaaanagctgccccanatagatctccctgactccctcctccatgatgctcgcaactcatcatagcatcactcaccgcctccacagcatcccgccaccgggttctggccaccgcaggagactccactccacagcacgcggcgccgtgcggcgagacgatgccaccacggagtcagcaggggagggcacatcgtcatcggaaagcctcagggtgagtaagcctaccgcgacgacggctccggcggggttttcgttgcccaaggactaccgccatactctgttcagctcggagtgcctggaggtgctgggcctggtggacctcgagtcactgcggaagcggccgaggctcaccattggggtgacggtgaaagcgtccgtggtgctcccggtgctcgtggtcctggcggtcctttacctctcggacgtgaccaagggtgttgtcgactggacgcatcatcacctggagaacgacgacgacgtgggggactagcttagttaaaggagtccagctctccagtgttgtgatgcaggcccgcatatatgcagcaggctcaacttgctggtgtaaacaattagcatcaggcttcagctcgtttcactttctattctttctcatttctaatcaagtgtacataaactgacttttaatggtgcgttcatgtaaagtctgcttttt

SEQ ID NO: 159042 - DNA, 360 bp, Zea mays
  unsure (1)..(360): unsure at all n locations
  Clone ID: MRT4577_76620C.1
ataaatgtcttttcttatttttgggacgcctcatacatcattccaaaaacttcatttttgaactattactcataagcaatctaaaatgggcaccaccaatgatgggttgttgggggaacactgttgggtttgtcaaagcccgtcggttgaatggctgcaattgttgccggtgttagagggtgccagcggttggcatagcgtgcaggtggaacggcaacaactgttgttgtgtcaagaaggcagccgggctcacataagctagctggctgaatggaagtagttgaaaaagctgtncttgggccccaaagttcaatgctgctagttgggtgcatggcagaaattgctgggggttggccgcaa

SEQ ID NO: 159043 - DNA, 309 bp, Zea mays
  Clone ID: MRT4577_76621C.1
ccggccaaaaaaaagtaaaaaaaaaaaaaaaaaaaaaaaaaaaaaaaaaaaatggtgtgggctggagaagacaccatggcctagcttagctagtaccagaattcagttgacttgtgataacctggtggtgataggaaagttaggagcagcatggggtactgttgctggtatggcaagcatgagtgatggtggtggacctggtggccacaggtgcacctagatttttttctctcttctgctgctgttgctgctgctggatctagcacagatgatgcatactccaaaaaaaaaaaaaaaaaaggggcggcc

SEQ ID NO: 159044 - DNA, 610 bp, Zea mays
  Clone ID: MRT4577_76622C.1
gtccctcgaggcctggccgggcggccgatcgcgacgcttcccgcctgactactaataatcagctggtgtgtgtatggcctgtgggtgctcaggttaaccggacggggtttatggccttctcatctgcactttctgttagactgcctttgacaggagtggaggggagagagagatagtacctagaccatatagtatgtacagtagaattctgtatgttttttcagtaatatagttgcatttcacatatatatatgtcgacaacttgaaatctggattctacgttacttaatttgtttgagtctggtatatgttgtgtgtgcaatcttgatcaatgctattgttttagtccaagaaaaagcgcaccgggccttgttttcctgatgcagtgaacggtaggggcgataatggatcacagctcaaatgcgaagagatgtattgtttttggcactttcttgttcaattagaatactacgaagagatgtattgaatttaggctacaagtccgaaacaatattgagtactgatcaagcagcacaatgacatttgtgactattcacctccatggggaaggcatacacagaacaggagctaaaatacagggcacacacct

SEQ ID NO: 159045 - DNA, 197 bp, Zea mays
  Clone ID: MRT4577_76623C.1
gcgaacaaaaaccgtgctcattttctaatatagtctggtttaatagcgggggcagccaaagcgaacaacaggggaccaacacctaatccaaaggctgaacggcctctaacacggtcacagaagcgaacggcaaccccttactaaagatcgagaacataacacggtcaaagccaagataggcccgaacataagccctt

SEQ ID NO: 159046 - DNA, 263 bp, Zea mays
  Clone ID: MRT4577_76624C.1
ggggaaaagccattgttgtaacaatgataatttttgggttgggcccatgtaaccgggggggaaaaccgcggggggaactcccccccaaacccccatttgtttgaaatccctgggaaacagatgtttttttttttaaataaaggggggaactccttaaatccccttttccagaattccccggccccgggtgggggggccccaccccctgaggaacccctcggggtcaggttgggtggaaatccccccgttctcaaaccggggga

SEQ ID NO: 159047 - DNA, 209 bp, Zea mays
  Clone ID: MRT4577_76625C.1
gaggtggacgaggcgcgccacctccctagcctaatctagctgcagaaaccaccttggcagggcgggacaggccggtttgggtcgcaaggttctcgcagctcgccgcgcagccgggccgcgaccgcgccgtggcggtggcggtggctccagctccgggcccggcccgggtggccgttgctgctgggggtatcgccaagttgggcgagaag

SEQ ID NO: 159048 - DNA, 128 bp, Zea mays
  Clone ID: MRT4577_76626C.1
gtgttactacagtggcggatcgtggctaggacacattggtacggatgcctgcctgcgagggtggacccggtgtatttgtggcttacattccttcatctggataataccctgcagattttctttctgaa

SEQ ID NO: 159049 - DNA, 400 bp, Zea mays
  Clone ID: MRT4577_76627C.1
ggcgcacggaggtgtggaaccaggagtcagcacgccaagctatgagaagagggcgtacatcacgcactgcaaccgcggcctcatcctaaatgctgctcgtcgagagtgaccagcggactgaccttcgttgcatgggctggcccgggcgctgcaggagagggcaagagagccagttgctgaggaagcgccagcaagctgatcagagaagctgagcagggggcacgaagatggtattgactgcgaggaacgatatcgagataggactcatcagcgagcatgatgcttgatgatgagatgattggaagcattgtacaagaagacaacggcatgatactttagccaatcccatgataggaccgtgcatatgatccactacactgctgagtgctgcatcgagtat

SEQ ID NO: 159050 - DNA, 732 bp, Zea mays
  unsure (1)..(732): unsure at all n locations
  Clone ID: MRT4577_76628C.1
aattgttctttatatgttaaattggtatttgaaagtgatgtagtagatttgtctcaaaatctagtttcaatacattacaaatatcctgtgttgagtgtttgtttgtgtgggctgtgtttgcctcttttgtagtgttctgttcttctctctttaatgaaatgatacacaanctgtcccgtgtgttcgaaaaagaccttctcacacaggtcgagaaaacccccgaacccctgctccacccatacacagcgacatcgaagcccttgtgagaacgaccacaaccagggccgagccttagacccatgctttggcgtgggacagactaggagattttttaaccatagcctgaaattcgatcccacggggagtcgaacccaggacctgaagagtgctgctcagaccatctaaccaactcagctagaggtcctttcgcctcttgtgtgttcgagaaaaaaatacattacagatatcctgtgataaaaaagtacgttgaagttttgttttgagaccatcttgatttccaaaatgtaacttttaattgagggatttgtatcttatcagtgctccaatccttgcctgttaagtgtttggaatgtggtggtaatgtctcttgtgataaggcctcccatgtaatggacagcctgcanagttagttttagtaattctgaagttactaatttctatgaaggaatattaagaaacaggaaatctccttttgtttcaagtaaactgaaa

SEQ ID NO: 159051 - DNA, 828 bp, Zea mays
  Clone ID: MRT4577_76629C.1
cccttgcgcggctccctggagctaggcacccaccagcggtcgccccatcttcttggcatggtgcttgcgcccctcctcggtcctcgacgtcgaacgccgctggctctcagcgcccatggtcgtggatccctccctgctcgaccctgcttctgccccaagcacctccggcggtcctgctcatcttgctgccaccagaaaacaccaccgggacatcatgcaggtctgcagaagcaatatctggccgcgctctgtgctactctagttctcgttcatgcctaggctcgagtttgtgtaccacatgttcagcaaaatgtgtgaaccagttgtcaaccccgccatggtcaaccagtgtgccacctatctcgcctcgccgagcggcttcctctgcttggtccctgttgtggctcgccagtgttttccccagctcgaatctcgcccgacccaagctaaactccatccatggccaactatcgattctccctagacggtctcaagcgccctcgcctccggtggtttcagcttgccgccgactgtccttgccgcacatgatttagtccgagctcggccatgtcgagctccctcggcgtccctcccatgcccgtgcttgcccatggtcgcgcgccgtcgcccagctcgcccaagtcacccatggctacgcacggtgttcttgtcgatgccatgccgttgccgatgctgtagagctctccttgctccctcgcgtcgcccgttcgtcggtctcggatacttgggtctctagccgcgcgtctgtctctagtcctaacgcattccaaagctctttttcggttggtcgtgttggccttgctagca

SEQ ID NO: 159052 - DNA, 980 bp, Zea mays
  Clone ID: MRT4577_7662C.1
cccacgcgtccgagaagaatcacgacaactgatctaaccatacacaacaacattgtggatcattttcggcagcctattttcggtggccaaactctagctgccgaaaatatttttttttaaaaactgtcgggcccttcttctctattttttctcttctctcctgcctgcaccaacgcccgccgacgcgccgctcgccgctgccgtgcccgctcgcctgcgcgcaccgcccgctcgcgcgcgccgccgagccctcctacaaccactctgtcgttgtcgtcgagccgccgcatcaagagataatttttttgcgtattttattccttattttcggtggctgttatttagttgccgccgaaattagtatatattcgtaatgtgtttgtttgattactgtttatgattagtattattgtttagttcgatttcattaatgtattagtggtatatgtgatttaggattaggggcatattgtatttaggcattaatttcatattaatatgtggtatgtactattatattattagttttaatagtacattatattggtacgtagaatagttgcattattagtgtatgtggtacttagtttgatttgattaatattatatcattctttgttttatatataagtaatatattgtttagtggcagcgaggttatgctgccgaatgtttttaagatcctgctagcttgttgtgggtttagaacctatccttgcctataaatgtaggactgatacccttgactaagttgaataatgttttcacgatatggtttggtttaacagtctcaggcatggctgaagaccgtgcaaggatgtacaatggctggagtaggaatggacgtcatttgatgattgggtagccaagaccaaagattttgtggaccacgtattctccttgtcattaaccggcactatcagatgcccttgtaggcggcacaaaaacagtatgtttcttaataaggaaagagttagcct

SEQ ID NO: 159053 - DNA, 290 bp, Zea mays
  Clone ID: MRT4577_76630C.1
ggtaaagtaacctctgattgccggggagacactttcttccccaagggcgctatcttacagcctgacaactgattctatatgtacaagatgggacgctcaataatttgtggtcattagaaggtcaatccttacaaagaaccccgaatggaagagggaaacattagcatcaggcgccacaaaaaatagctggtaatcaaaagatgctgtttcaaaagccaaaattgtttttttaagaaaaacgagccacttttttaaaaaaacatcgcgcaatactggagggagatcctctg

SEQ ID NO: 159054 - DNA, 643 bp, Zea mays
  Clone ID: MRT4577_76631C.1
tgaagggcgaggtctatgagcccttggctcgttttcagaggcccaccaccgtgagcgtagcccacaggtacaatgacctcttcaatctccgaacggctacattacgaatatgtgaccaaaaatgcgtctccaccaaaaacccagaagtgagagctatggtatactgacatagatggggggaggggtacaagcctattgcggatgatcggtgggcacacaatcactatttatgacgaaaccagcaagaacaagccactttgaatactacccgaagctaacacctatggattctccaccaagaaatggtctccactacaaatgcaagaatgggagctataggaatgaaacatatgtcgtgccagcctgatgagcaactgatcgattactaacgaccacacacacccgctttgttgaagaaaattgcatgaacgatcatttgtaaaaataccgaatgctaacacctactgatttttgaccaagaaatgggggccacctgacaaccaagaatgtgatgtataggaaggaaacatacgtggggtgagatggacaaagctttgggcgatgatcaatgaccacacaactcacatattttgttaaaatagcatgaaggaccatcatcaataagaccgatggagaccatgaa

SEQ ID NO: 159055 - DNA, 347 bp, Zea mays
  Clone ID: MRT4577_76632C.1
gtcggggcttgaaaaacgttacacacacttagcccggagcgacatatgctgatgagggcaaccgggtgaatcaaccgggtcatttccaaacgggacgcaagggtacaagctagaccgcttggcatatatgtgcaggcataaatgatttggggcttacttaactcgagagtaacagtaaggcttgaggctgggccatcgccttatagttgatcaaatctgggcttttgatgggctcgagggggtcagcctagcgcaggcgtgaacttgtcacacttccaagggtgccacgcggttgtaactatgagacccaacccagaggtaccccttggcgatatttgtttcacagg

SEQ ID NO: 159056 - DNA, 350 bp, Zea mays
  Clone ID: MRT4577_76633C.1
atactacattgaatgcggagcctctaaagctatactcaatccgcttaatctcggagcgcagcttcagcggcctggcatgcatgatcaccagcgcagctggagccggcatgaaggcaaagaagggcgcagacgggcacaaggacggctggccgaagaagaattatgcgacaaggtccgtcatgggcgctctagagtgacgcatcaggcgcatcgaacagtgtctgaagaatggccgatactcgcagcacgtttgcacagacgccaacgtatacctggtcgtcgtactggagtacctagtctgcaaagtgctggtgctacacatgtacacttgctaggtcaacacgaagacc

SEQ ID NO: 159057 - DNA, 282 bp, Zea mays
  Clone ID: MRT4577_76634C.1
ccagactgagaggaagagagagggagattctttgtttgctaccttctctcggaaaaatggttacgttcaggtttcaccagtaccaggtggttgggagggctcttcccacggaagcagatcagcacccgaagatctaccgaatgaagctctgggccaccaacgaggttcgcgccaagtccaagttctggtattttctgaggaaactgaaaaaggtgaagaagagcaatggccaagtgcttgccatcaacgagatttttgagaagaacccaaccaaaattaaga

SEQ ID NO: 159058 - DNA, 741 bp, Zea mays
  Clone ID: MRT4577_76635C.1
ttgtttttttgttttttttttttttgtttttttagttttttattttttttttttgttgttttttgttttttttttttttttgaaacagggaaacccatcactttatttattgcatgcatgacaaggccggactgaattggaacaatgcgttattagccacggtgctggagagtatgcctccagaacctctcgcggcggaaaaaaacagaaaattttcggttcgaaaccacacacctctacccatggaggatgccttaaatgactacaaaaggctagattacatccagcgccacatcgctactcttaaggaatcaatagacttgggatcaaatgtgcaaggctacttcgcttggtctctgctgggcaactttgaatggttcgccggcttcaccgaacgttatggcattgtctacgtcgaccgcaacaataactgcacgcgctacatgaaggagtctgccaagtggttgaaacagttcaacgccgcgaagaagcccagcaagaagattcttacgccagcttagaaatcgggggcctcatgatgtgggtgcagcccataaaaaactggtgtgtggtttcgaaccgaaaattttctgtttttttccgccacgagaggttctggaggcatactctccagcaccgtggctaataacgcattgttccaattcagtctggccttgtcatgcatgcaataaataaagtgatgggtttccctgttccaaaaaaaaaaaaaaaaaagcggcc

SEQ ID NO: 159059 - DNA, 309 bp, Zea mays
  Clone ID: MRT4577_76636C.1
gaaatcatgtgccgtatcagcgacagcacgtacacctgaaacgcccattgcccaaacccagaatgatcccagagagaagcacactgtctcccttcttggctcgttgccatggcccatgaggggctacctccacaggtgtttgtctatgctcacaatataggagagcggagctcctggactctaggatccatagctggttatagaacacgctgtgcgattagggtagaacttatgtgttgcgcgcctcgaccgaatgtcgaagcttgagccctaccgtgctttggccgaatgctgcaaaaatccatcaca

SEQ ID NO: 159060 - DNA, 674 bp, Zea mays
  Clone ID: MRT4577_76637C.1
cccacgcgtccggttgcgctgtgtgttattttttatgaaataaaaatctagatggttgtgtttatgatagatgttactatacggtcgcacttgccgtcaattcaatttttatttgtgcaggaatcggggatgttgataccaaggagacacctctacccatggaggatgccttaaatgactacaaaaggctagattacatccagcgccacatcgctactcttaaggaatcaatagacttgggatcaaatgtgcaaggctacttcgcttggtctctgctggacaactttgaatggttcgccggcttcaccgaacgctatggcattgtctacgtcgaccgcaacaataactgcacccgctacatgaaggagtctcccaagtggttgtaacagttcaacgccgagaagaagcccagcaagaagattcttccgccagcttagaaatcgggggcctcatgatgtgggtgcagcccataaaaaactggtgtgtggtttcgaaccgaaaattttctgtttttttccgccacgagaggttctggaggcatactctccagcaccgtggctaataacgcattgttccaattcagtctggccttgtcatgcatgcaataaataaagtgatgggtttcaaaaaaaaaaaaaaaaagaaaaaaaaaaaaaaaaaaggcccctagggcc

SEQ ID NO: 159061 - DNA, 1891 bp, Zea mays
  Clone ID: MRT4577_76638C.1
ggtgtgggggggtgttttttttttttttttttttttttttttttttttttttttttttttttttttttttttttttttttttttattgaaacagggaaacccatcactttatttattgcatgcatgacaaggccagactgaattggaacaacgcgttattagccacggtgctggagagtatgcctccagagaacctctcgtggcagaaaaaaaaagagaaaatcttcggttccaaaccacacaccagttttttatgggctgcacccacatcatgaggcccccgatttctaagctggcgtaagaatcttcttgctgggcttcttcgcggcgttgaactgtttcaaccacttggcagactccttcatgtagcgcgtgcagttattgttgcggtcgacgtagacaatgccataacgttcggtgaagccggcaaaccattcaaagttgtccagcagagaccaagcgaagtagccttgcacatttgatcccaagtctattgattccttaagagtagcgatgtggcgctggatgtaatctagccttttgtagtcatttaaggcatcctccatgggtagaggtgtctccttggtatcaacatccccgattccgttctcggtgatgtagataggtgggtttccatatttgttcttcatgatcataaggagatccttcaagccctcagggtacatgtagatccatggatttcccataggaggaccaatgggcttcccgtcaggcccgttaacttcttgactggcgtaggcgtcgtcagtgttgagcacaggtgagtagtttggtgagatatcgatgtttttggagaaccgtgaggtgtagtagtttaaccccaacatgttataggaaccggcgagcttctccttctgttcgtccttgaagaagggtagtcgttccctagccaatgatctcatggagaagggttagtcaccacgatccactggctcctagaaccatccctggttgatgtcccaggacctttccccacgcgtccgcccacgcgtccgcccacgcgtccgcccacgcgtccgaggagaagctcgccggttcctataacatgttggggttaaactactacacctcacggttctccaaaaacatcgatatctcaccaaactactcacctgtgctcaacactgacgacgcctacgccagtcaagaagttaacgggcctgacgggaagcccattggtcctcctatgggaaatccatggatctacatgtaccctgagggcttgaaggatctccttatgatcatgaagaacaaatacggaaacccacctatctacatcacggagaacggaatcggggatgttgataccaaggagacacctctacccatggaggatgccttaaatgactacaaaaggctagattacatccagcgccacatcgctactcttaaggaatcaatagacttgggatcaaatgtgcaaggctacttcgcttggtctctgctggacaactttgaatggttcgccggcttcaccgaacgttatggcattgtctacgtcgaccgcaacaataactgcacgcgctacatgaaggagtctgccaagtggttgaaacagttcaacgccgcgaagaagcccagcaagaagattcttacgccagcttagaaatcgggggcctcatgatgtgggtgcagcccataaaaaactggtgtgtggtttcgaaccgaaaattttctgttttttttccgccacgagaggttctggaggcatactctccagcaccgtggctaataacgcattgttccaattcagtctggccttgtcatgcatgcaataaataaagtgatgggtttccctgtttcaatatccaaaaaaaaaaaaaaaaaaaaaaaaaaaaaaaaaaaaaactcgagaaagggccgcggtacc

SEQ ID NO: 159062 - DNA, 217 bp, Zea mays
  unsure (1)..(217): unsure at all n locations
  Clone ID: MRT4577_76639C.1
gcgnaccagcnngcccnanagggagncgnacaagagcgcggcgnaaacaaggncaaagcagacnccngagagaaanngggaggcgccgacaggggacacagcanacgagccggaggcagaaagggaaaagccnggggagcccaaggagngagacaacagggagcaagagccgngggcgaacggggccagcgggagnaacaagaccgagcgggggacc

SEQ ID NO: 159063 - DNA, 980 bp, Zea mays
  unsure (1)..(980): unsure at all n locations
  Clone ID: MRT4577_7663C.1
gccggccgggccgggatcatcgcccccgtttccttccttcctccccattccttcccttccacgcgcccctccctcccatggtcctcgtggccgccgtcgagaacgaccaccgccgcggagccaaggtcacctctgcccagtcgaattccataggtcccgcgctgcggccgtcgtcccgcgcgcggctccacgatttctccttcctcaccgtcagctggggcacgcaccgcgtgctccgctgctccaagagcggccccgtctcgtcgcccgctcccgcgtctccggagaccctgtccccggacaaggagagagcccaccgacnccgagggcggcggctcgctgcggcagcgccagcgcttcgctcagcggccgtggaaccttcggacccgccgctccgccaccgccgccccgacgcgccaggcgggatcggacgaggagtctgaggccgcggagcgcgcgcctccgccgacggtggaggcgaagaagcgggcgctctccatcgccttgtccaagcaggagatcgcagaggacttcgcggcgattcgcgggacgcggcccccgcgccggcccaagaagcgcccgcgcacggtgcagcggcagctcgacttgctgtaaccccgggattgtgcctagcagatgtggcgcccggctcctacatgattgaacaaaggtgattgttgctttggtggagcttccgatggacgggtttccagacgttgtgattttcttcttcttctttttgtataaatcttattctgatagctaacgcgtctgtctcataagtgttttgttttcggtgggttggaggaagttggggtggaatttcctgtgattatgtactgcggcgtcctcaatttgatttttagacatgtaggattgtttgtgtaaagtattctgatcactaggtgggatggatgtcttgtcctggcgccctgcagtgtacatggtttaatatatgaagcagttttatttaggtgttc

SEQ ID NO: 159064 - DNA, 768 bp, Zea mays
  unsure (1)..(768): unsure at all n locations
  Clone ID: MRT4577_76640C.1
tttcctcgcttacggtgaattgcttacacgttccattctccaatgccctctcccccctcactcccactctttggcggtctatctcccgacaacatcctcactcctcacgagttccgcacctccctctacgaaagctccgcctaccccactcctcccaactctccgacctccatgtcaggaatccatgcctcgcaagttggtccgccccccgccagttatgatcgcactgaccgccagccttctcttcctcttgctcctcgtcttgtggagagctctctcgccgtgccgcacgtcgacgtcccgttccaatgggccgtcgcgtcgtacgccggagactccgccaagttcctcaccgacgacctctcaggatcctctcacctgagccgcctcaccatcggctatcgccacgccgagctcatctccgccgagctcgagttcgccccccttgccgccgccttcgccaagcccatctccgtcaccgccgtctggaccatagcctccatcgccccagccaccaccaccgagctccagtattatggaggccgactcctcaccctcggaggccccgtcctcatgggctccgtcacccgtatcccagccgacctcacccgcctcaaccccgtcatcaagaccgccgtgggcttcactgactgcccccgcttcacctactccgtctacgccaacggcgggtccgncaacacctccctcatcaccgtcatggtgcgaggagtcatccgnctctccggcctttcggggcacaccgtcacc

SEQ ID NO: 159065 - DNA, 277 bp, Zea mays
  Clone ID: MRT4577_76641C.1
ccaacaagtgccaacacagatggcccaggccccagggaaaatcacacactcgttttctcttgcaatgcaacattgcatgttgcgagctcgtggccttgtcccttcacagccggatcgagtggacagctgcacctcaacggcacccatgatttctccttgattcacttcctcacctataaatccatcgggcttagcaccaaaactctaccagtaagtccatcggcaagcgaagactccactccactccactccacctgttagaaacaagctagctcaa

SEQ ID NO: 159066 - DNA, 244 bp, Zea mays
  Clone ID: MRT4577_76642C.1
gtcccaccttcaataagcgtcctaaaaccgtcgcccggatacgccacacgtttgtggcgcaccttcgaagggtggaacctagccggatgatctgcaatcgcttgctggagtggatcgccgtcacaatccctcgcttaaccatgggaaaggggtcttcacttcatgattaactgatgagcaagtgaccgaggaacccaatactgagcaggagctcattgaaggatcgagagatgacgatcgtgca

SEQ ID NO: 159067 - DNA, 220 bp, Zea mays
  Clone ID: MRT4577_76643C.1
ggcatgcttgattcttctccgtcggcacatgacccaaacatggcatttcatttctgcgagatgaaaccaatgggttgtgatccttccatagtatgttgtatatacggcctgtgcaggacaacacaatatgctggtatcacccctatctacagacagggcgactgcatcctgggtttcaattcttgagctcggcgagcagaccaactgggcaaatggtctt

SEQ ID NO: 159068 - DNA, 149 bp, Zea mays
  Clone ID: MRT4577_76644C.1
atgagtcgtattacgaacagaggcgtcacgtccatcaccacggctgaaggcttgagcgacacgagcggacggataagaggccccaacgcagcgaccaaaagtgtgggcgcggctctcgaggattcatccttaccgatccctgggggtca

SEQ ID NO: 159069 - DNA, 487 bp, Zea mays
  Clone ID: MRT4577_76645C.1
ttttgacgcgtgcggtcccgccttagaaacggggaaaacatttgtttcagcatcagttgttcggacactagtcacaaccttgtcatacatgtccttgatgagcgtataccggtatagaattttcatagaattttccatagaattttcatagccagtgtggttatcatacttacttgaaaaaggatccagtcatatcatcaaagcattttcaaatgctgttttggtgtataccgctatatactactactctttcaaaatcagtttggctgttactacttcagtgctggaacaattgagacttttgaatgtaaaactatacttcaaccatattcttcatcaagcataatgtacagtgctcattctctccccttagaagacgttagacagaagggtgagctgccacctggtgctcctctgctgggcctctgcgcccctactaggctcttgtgccccctatggctaggataggaagattgatctccaatag

SEQ ID NO: 159070 - DNA, 254 bp, Zea mays
  Clone ID: MRT4577_76646C.1
ttttattttggtttaaacccgaagctatcaacatgatctctgggggatcatttgatcaaagcacacaattcaaagtcccggtacgtattagagaaaattcactaagattgtctctaaacagggtgtgcgattagacgaacttcacatagatcaccagcccccttgttgctgcatcgagttgtgatttaaccccaggaccaaacagggatgtgaatttcgcctgtctcttctaaatgcccatagcttcactgctt

SEQ ID NO: 159071 - DNA, 315 bp, Zea mays
  Clone ID: MRT4577_76647C.1
atggcggggaaaaggcctcgggcgggccggaggaactccgatgagggattctggccgcggggagagggcttgaggcgtgctaaggcctgggatagcttccgcagggcgaggggaaacccagggaccaatgcgggggcactgggccgggctaatttggccggtcaccgtgcgggtgtggcggaccgccacggtcgaactccggtgaagccgaaattggccgacgacaaagcgaaattggggaaactgagcacgagaacaggtgtctcacctcagggcagagctcggggtggcttggcgcggtctccgacgagctag

SEQ ID NO: 159072 - DNA, 403 bp, Zea mays
  Clone ID: MRT4577_76648C.1
cccccccgcagagcgaggcgccccagcgcgccaagcggggcggcgaggcgcgcgcaaccacaggagccccctcgccgaaagcaggaggcagacgacgccaccgcgagcacagccggagcaccaacagccaacgccgcagccggggagcagcaagcagaaggccccggccaacgaggacaaggcgacagcggcggcggggggggcgaccaaggacaaggcggagcgaccccaagaacggcaacggcaacggcggcaagaaagacggcggcgccgccagcgccaccagaggagagaccacccaggccggggaggagaccgcccgcgagacccagggaggcaggcgaggccaccgagcggagacgggcgacccgcaccagggcagagccccagagacgcgggccga

SEQ ID NO: 159073 - DNA, 1847 bp, Zea mays
  unsure (1)..(1847): unsure at all n locations
  Clone ID: MRT4577_76649C.1
aattcggcacgaggcctcccccgaggccccgacccccgagttcgctgcgcttccgccttccggtgacaagcgagtgaccgatctaccccgacccaccacccaccgcaccacgcgagccgcgagcgagatctctcggctccagggtaggctcccttctatggatctccgccgcctcgcggtgtttgcggccgccctcgccgccgggtggtggtcccgcggcgcggaggcgtcgatccacacctacgaccgggagcccttccgcgaggtgggcaacgccttcctcctctccggcggcagcgagggcatcgtcgccgacggggcagaccccgccgcccccgcatcctccttcatcaagtttgtgaatgttacattttggagaaccccagaagctgcggaatcacacgcaaaaatggcacatagtacaggcttggtacaggctatcctatttgaagttgtggacagggataacatcgggggatctgcctatggcggacagaggtccatatgttgtaccccagatcttgctaaactagagggctgcaagcaaggggaagtaatcaggaggccatcctctgatgatccagattggcccttcgtgctagacacacacttcagtgctaatcacctttcagtgaagttagaagatgagccagtgcgcattacaaagacaggcatgtacaacttgttcttcatatcctgtgatccaaaactgagaggccttactatgagtggcaagactatctggaagaatcctggtgggtatctaccgggacgaatggcgcctttgatgaaattttatgttctcatgtcgctggcgtatctgttggtaatgattgtttggtttagccagtacgtaaggttctggagggatatattgccaatacagaattggatcactctaatcattgcacttggtctgtttgagatgacactatggtactttgagtacttgaacttcaacagcagtggtgtgaggccagttggaatcacaacttgggtggtcactgttggagctatcagaaaaacagtttcacgtctactcatcctttctatctcaatgggttatggtgttgttcgtccaactttgggaggtctcacttccaaggtgttgctactcggacttacatatttcctggcatctgagttgctggacattgcagaaaatgttggaacaattaatgatatatcaggcaaagcaaggcttttcctggtccttcctgatgcatttttggatgcttttctcatactctggattttcacttctctttcccgcacactagagaagctacaggcaaggaggagttctgtgaaattggatatatacagaaagttcacaaatgcattggctgtttctgtgatagcttcagttgcctggattggttatgaggtctatttcaaagcgacagaccccttcagtgagaggtggcagagcgcatggatcataactgccttctgggatgtccttgcgtttgtgttgcttcttgtgatttgttatctgtgggcaccttcccaaagctcgcaaagatatgcatattctggtgaagctgctgacgatgacgatgaggaatctcaatctctgacgaaaggagatggtgcagtaaggatgggaaaaattgaccaggacagaaatgctggtgtcaggaagggtttcggcttataagatgaggctgaggaggacaagcgggaataaccatttcttggttctgatgtcccctaaggcccagaaaaatcgatattttggagaagaatatttggaagaaactttttttcagttacttggggtggtggaaaaaggcttggtattgtaaaaatggcaactctatttaanaaaaaggattaggaattcc

SEQ ID NO: 159074 - DNA, 179 bp, Zea mays
  Clone ID: MRT4577_7664C.1
tagtgagtcgtattaaacggcgttgcgggcgaggcaccagggttggggccgggagcatgttcacgcgtgcctgttcgcgctaaggcgagtagacggatggcagtgtcgcagggagctgtcgtagtcgtgtttctcggcgtcgcagcggggtgggaacgatcgatgccagagtggggagt

SEQ ID NO: 159075 - DNA, 886 bp, Zea mays
  unsure (1)..(886): unsure at all n locations
  Clone ID: MRT4577_76650C.1
agaccctatccaaaaccagaggcaagccaagacgcaagctgcaagcacgcgctcgtgcccgcgccatgaagtgctggtgcgtgcactcgccaaggggagcaatggcgacgccgctctccagccccttggctcccaccgccctccgctcccctctccggcaccgcgccctgctgctgctgctgccgttccctccccgtgcggcctcctccggcgaggacaccgccgcagcagccgaccaggagccggccccggcggccaccaagacggccaccgcggacgacgacttcgaggagcgcgtgctacggatcaagtcccgcgtcgggcccaagaagcgcggcgcgcgcaagaagaaggccgcggcgtccgcgtcagccagcgccgtgacgctcccgcccgtgccgctgcgggagccccggtcggcgctcggcgcgcccgtcgagctcggcttcaccgcgtacagcgagcggctcaacggcgcgctggccgcgctggggctcgccgcggtgctgctcgtggagctgggctccgggcaggccctggtgaagtaccaccagccggccacgctgttcctgcaggcgtacaccgtcgctgcggccgccgcgctgttcgtcaagtacgagaaggagcggatcagcacgtggccggggccgccggcaaagtgagatataatggcgttgtctcggtcgcggatctttacttgtacttttaccnnnnnnnnnnnnnnnnnnnnnnnnnnnnnnnnnnnnnnnnnnnnnnnnnnnnnnnnnnnnnnnnnnnnnnnnnnnnnnnnnnnnnnnnnnnnnnnnnnnnnnnnnnnnnnnnnnnnnnnnnnnnnnnnnnnnnnnnnnnnnnnnnnnnnnnnnnnnnnnnnnnnnnnnnnnnnnnn

SEQ ID NO: 159076 - DNA, 363 bp, Zea mays
  Clone ID: MRT4577_76651C.1
gtggtccggcttttcctaccgctcttatcaagaactcacatgctaactgaaacttactgttctactgcattaacacctcctatgccttgtgtgcagtaccgaaggtcagttaacggactcggccgtgccaacagcaccaaacactatggagaatgcttcaatctcctacgtgctataagctccactacaaggtaactaatcaaccgccacactgtgaggtgatgcagccactatttgtagaccttgttcttatatatcttgaagccatacgctatacacaacactgacccttgcgaaatacatcagctgctcatatacaataaccaactccaaggcctgctccgccacgattgcctggtcctg

SEQ ID NO: 159077 - DNA, 215 bp, Zea mays
  Clone ID: MRT4577_76652C.1
attcgtccactccttctctcacacattcaatctaattttaacatccattctctctaaaaactatggtgaattttcgcatatcttcaatcaatctcaaactcttctaaaccattacttcatactataatctatcccctaccatacttaataaacttatttaccattatcctttctctaaactattcctactttcaaacattccctctccttttcat

SEQ ID NO: 159078 - DNA, 340 bp, Zea mays
  unsure (1)..(340): unsure at all n locations
  Clone ID: MRT4577_76653C.1
ggcggcacaacaatggagcacgttcaaccaaaaattataggggcaagttaacacataaaagccttgtttcgctccaaatcagaggggggggaggggtttaaacaaaaaaggggcggcctactaacatggacaatttttccagacccggtggggtcccccaggcttcaccttcttgggctcgaaggggccggcgcctccctgggcccccaggcttttcctttttgggctcggttggccctgcncccctttgggccccttgctcccccttggggggggcctgcggggccctcccccttttggttggcttcctgcgtggttgggggggggcccccccccctgt

SEQ ID NO: 159079 - DNA, 402 bp, Zea mays
  Clone ID: MRT4577_76654C.1
atttataaaaccctttttttttttttttttttttttttttttttttttggacaagaaaaaaaagtgatttttggctttgtacaaccacccataatggagattaaactcgactttccactctttttgcatgttttgctaaacacacacacacacacacacacacacccttatttggggcacaaaagaaaaagaacaaagcgaccacacataattccacgcatgcacaaagctttccttttttttttccccttgttccaagaaagcaggttaatttttttcctcgccatgtttttggtttgtggctagctgctgttccattggtggcagaaaatgcttggggagaaggtgctttatatttaaaaccacacgcccacacctattcagggaccccttggagaaaaa

SEQ ID NO: 159080 - DNA, 214 bp, Zea mays
  Clone ID: MRT4577_76655C.1
cttgtgtaggacacttttgcagtttgacactaagataacttctgtgtgcaattttctatgcttttttaaaaactagtttcatttcattttcatgagatgtttggtttataagatctgaggatggttataaatactgtaagtattgtaatgttatgaatgcaggttatttgacagctgtttatgattatatcattcctgataatgctatgtggat

SEQ ID NO: 159081 - DNA, 256 bp, Zea mays
  Clone ID: MRT4577_76656C.1
tcgagattagtggccaaattgataggccttaattagaggggagttggtttccaaataagtcatttcctaaattagggtttccaaataagtcatttcctaaattagaagttacctagttggtcgggccagtggcctatttatatggaaccaagaggcagtgaaaggaataagaaatacatcagctttacctcccatctccctacactctctctaaagcctacggctgaggattaccttcccggagaagactgacagc

SEQ ID NO: 159082 - DNA, 655 bp, Zea mays
  Clone ID: MRT4577_76657C.1
acttaattaaccgtgcagttcctcacagagtaatcaattactcgagtctctaagtgacattttgaacattgacctggtctccaaaacaatactttttctagtgtcctctcttacaaaactatttatatttcgagacgatactcatcatttttttttcaaatatccaaactcaacacatagaaagtaatattcaaccaaattttgaaatggttgacttaggacaaccccaaaacgtaactgcttccagtagtgttttcattgcatgtctcggaaatggaagtagatgtttgttggaaggaaccagtatctcatcaagagctatcatggcaatattgtgagaaagccatagactcataaaatgttgaaaacaagcttgttttttcccccaaaatgcaggcttaattctgaatatcctgtccgagatatgttcaagctttttgcatgtgcaatttgtcaaattgacttggagtctggccaaggcatatccatacacgagggttcgtcaaagacagggaagctgcgtccctgggatggccctttcctttgtcacagttgccaggaaaagaaagaggcgatggaggggaagcgtcactcgcgaggtataaactttctgtttctataaactgccctagttctttttcatacagcttacgaa

SEQ ID NO: 159083 - DNA, 551 bp, Zea mays
  Clone ID: MRT4577_76658C.1
cctcgaggccggccgggaaaccaatcaccatgctcccgcgacctcctcaccggcgtacctccagtctccagagatccacacgatcacaccgacccaccatcatgtgaatcggctatggacgccgtgccacccaccataaccaagtccccgtcgaccctgtgtccaccagcgtcgcccactcccggtggatgcctcccgctctcctccatcaactagaccgccgccgtccgagtctctgtcaacttcatccaggcattctccgcccctacgtcaccaaaggaggactgcagcccctcatcagccatcgcctgcatgcgctgatgctttcgctaagcgctcgtgccgcatctaccctatcgccgaacgcatcgccaagaccgagcctggagagcctgaaattgatcgctcggggcataccggacgtgcttgtctgctcgttgcagaaatttgctccctcaatgaggctcgtacttaacaacgtctgctgggcctcgctaacgtggatctgctacgcggtcgacagcgcgctggcagctagagacctgccggtc

SEQ ID NO: 159084 - DNA, 384 bp, Zea mays
  Clone ID: MRT4577_76659C.1
cagaaacaacggcctgcagctcgtggctcgagcccatcagttggtgatggagggatacaattggtgccacgaccagaacgtcgtcacaatcttcagcgcccccaactactgctaccgctgcggaaaccaggcagccgtcatggagctggacgaaaagatgcaacacacctttttgcagtttgacgaggctcctcgtcgtggagagccccacgttacccgtcgcactcctgacttcttcctttgagccttctttttcttctttctgctcggctgtacatctcttctcttatctcctctttctatttttttattttttacaaattgcttcatgttaattatagttgatttttatatttttatgattcatgcctgagttggcagtaa

SEQ ID NO: 159085 - DNA, 211 bp, Zea mays
  Clone ID: MRT4577_7665C.1
gcagatgctcatggggctctacatctggctcggtctgtctagtggcaccacgcttacgttggcgatcccgctaccctgagcggtgcttataggttgtacaggctatcgcctggccgacgactatcatcggcgccagcgggatgtacccctactcggagaacctaatgcactcgcagtgcatcccgctttcggcagctggctacttcgccaa

SEQ ID NO: 159086 - DNA, 335 bp, Zea mays
  Clone ID: MRT4577_76660C.1
aaagggaagatctttttttatgagttaagaattaatgtcatatcgaaacccaagtttgttacaacaaatcattttggaagtttgtgcagtgaaatggggtagagattcatctgactctggaaaggatgaaacagtgtcactgaaaaggctgaggaaatccttaagggagcacatcatcgacgggcagttgccttctttgaaaaaaaacacacagctgtgggtggcattttccttttttttcctgggctttgatccaaccagttttagggaaaaatctttatattaattcttgaccggaaaaagggagggccaaaaacaccagtcccatttttttg

SEQ ID NO: 159087 - DNA, 382 bp, Zea mays
  Clone ID: MRT4577_76661C.1
ctgttgtcgtgcttctctctacgcccacccgatgtagaaaaccactctaatggacgctggtgtcggtatgccggacacagtcctggcttgaaggacatgctagtgagctagctggccacataggtgctggatctgtgcattcgtaaggcaaccgtgaggagaatcctactctccgtcgtgatcgggaagcatggacgacctctgcggagggaactgcattctggtacagcatgctggctcttaagagactggactcgagtcgcgccgtaatcagacggctggcgctcactaacgagctctgctacctgtgcaccaaccccgaagcgctacctcgccgcgtaccagtgttctctatggcggactccgtgctactgccgaagga

SEQ ID NO: 159088 - DNA, 760 bp, Zea mays
  unsure (1)..(760): unsure at all n locations
  Clone ID: MRT4577_76662C.1
attgagtcctcacctcggccgggacacggcacatccatatcgacgacgacgatctagctagcctgcttgagatctccatttttacccacgcgcgatcgcgatcgcactgttcttcttcttcctcgctcctacgtgcacgatcgactagcggcatatatatactgctgctagctaaccgtacgcgcaggtatagccgcagctgcgcacgagttcattcctcacctagctagctaattaagctagcctggtgaaacaaaagctagctagcagctagctagctagagagatcatatatatcgatcaagctatatatcagaagaggcgatcgacgagctaggacgatgatcgggtggggcgacgtgtacaaggtggtggcggcgacggtgccgctctacttcgcgctgttcctgggctacggctcggtgcggtggtggcgcatcttcacgcgggagcagtgcgacgcggtgaaccggctggtggccttcttcgcgctgcccttcttcacgttcgagttcacgctgcacacggacccgttccaggtgaactaccgcgccgtggccgccgacgtgatctccaaggccgtgatcgtgggcgtgatcggctgctgggccggcagcagggtgagctccgcgggcaagggcaagggcgccgtcggctggtccatcaccgggttctcgctgtccacgctaaccaactccctgntggtcggcgtgcccatggccagggccatgtacggcgagtgggcgcagcagctcgtcgt

SEQ ID NO: 159089 - DNA, 416 bp, Zea mays
  Clone ID: MRT4577_76663C.1
ttttttttttttttttttttttttttttttttggttggttttttttttttggtggttttttttttttaaatgtccaataagcccaccattaaggggggggttttataataacaatgtttactttaacagcaaccgttaaacaaacggaaaattactgaaccatatccccataaataaatgaatgggggtttaaagtttacacaccaaacaaacaccatgttagaaaaaatatacattttttgaatacaggtttcaaaaagttgttcccaacgaattagtgccaaactactgttaaaaaccaccacttggcgttaaattttatcctatctgcacttttccctaaagctttccaaaacatgaaatcatcaaccttggaaacatggggagagggaaaatcccaaattttctcttaacgg

SEQ ID NO: 159090 - DNA, 547 bp, Zea mays
  Clone ID: MRT4577_76664C.1
cggatgtctctccctccactcgatcatccaggatcgctcatcatctcataagctctgctagcttggtgcgcgcggttgacgccgcgcacgatagctaagctatctcttgaaccatcgtagtagcaaacaaaagatggttcagcggccggctgcagccggcgatcgggcaggcgcagggtggagccgggtggcggaccagccggccgcagcgggaggcaccagcggggggcggcggtcggcatcatcatcatcatcacagcagcaggagctggttttgcgtcggccccccccgatcaacaaggccaaggggtgcaggttcaagcgcagctgtttcagcaagaaggacgacgccgcctcctcccccatgtttttgctcgcctgggtggtttgcgccccctccctttgatggtgataaaaaaacttttattaactttggccgcgcctgcttgtaactaccccccatgtgatgccatgccccatgcatgtcagtctgtcgcatcggaaacgttcgctatgtaatggggtactggtcgttgattcgtctccc

SEQ ID NO: 159091 - DNA, 720 bp, Zea mays
  Clone ID: MRT4577_76665C.1
cgtacgtatgctcggaattcggctcgtgtatcaatgataccctgagtccaaacaacttcctatttggcataatacctggttattatctaacttgtgctttgttcaatttatttaggccttatgctataggtaacattttaactttgtgttttttggtgctatctcttagaatggtttatatctttagaagggactgggtcattttcatcatcacctgcagtttcatctcaaccttctagcgtgttctagggtcctatggccaaagcaagtttctaatggcttcaagaatggtattccttttatgttgctaaccatatgtttctcttcccttaaatagtaggtttcaaatacattttaacaattacctcattaaacgatgtcaacctatgtgatatatagaaactatagcaatgcactggcatctaaaaatgcaatggtatgcaattctacatatttgagaaaaaatgttggacatcaacatgtaagaaactagatagctttaatatgtttgttctattatccctaagacatttgcgctaattgtttattactccgctattaatttttaaaacagacttataaaattatcatccagacaaggttataattattttccatgtcaatgtttttggacacttgctggttttagttgttgagatttatagcaaaaaagttatctgattttggaactaccttagattttctgatgtgatgatgcac

SEQ ID NO: 159092 - DNA, 397 bp, Zea mays
  Clone ID: MRT4577_76666C.1
ctaactataacggaaagctgacacgcctgcagagcatccgatcctgtattacgggctcgatccactgtcgttcgttttttcacacgcagtaccattcgatcaacgaatcctaatcacatcagagatgaacgccagtatgcaactaactgtggcctcattgaccctaacgcagcaatgattccatacacctacttccgcagacaatagactctattctatttccaccatacggcatgcacttacacacagatcttgtagatgagatttatggcaatactcttggaccttcaggtgaggaagagcatactggctacagtgtcctcctccagcctgctgaaaaagattggagcatgatgtacacactcttgctgtatctgtctggattaccgctacaaca

SEQ ID NO: 159093 - DNA, 3097 bp, Zea mays
  Clone ID: MRT4577_76667C.1
tccatatctcagtcacacactcacgcgcgcgcgggggccgggggccgctggacccgccgttctccttctcctccccccctcgttcctctcgtctcaccattactccctacacgcgccgcggctaggattccgccgaggagacgctgcgcgcgtggatctccggtgctgtcctgctagcgtgcgacgaggccaggcaggcgcgcggccggcgccatgagcttcgggagctattcgacggcgggtccggcggcggcggaggaggaggagggatgcagttcccgttcacgaccgggttctcgtcctcgccggccctctccctcggtctggacaacgccggcggcggcatggtcggccggatgctccccgtgggcggcgcccccgcggacggcgggatggcgagggacgccgccgacgccgagaacgacagccgctccgggagcgaccacctggacgccatgtccgccggcgccggcgccgaggacgaggacgacgccgagccgggcaacccgcgcaagcgcaagaagcgctaccaccgccacacgccgcagcagatccaggagctcgaagcgctgttcaaggagtgccctcacccggacgagaagcagcgcggcgagctcagcaagaggctcggcctcgacccgcgccaggtcaagttctggttccagaaccgccgcacgcggatgaagacgcaactggagcggcacgagaacgcgcttctcaagcaagagaacgacaagctgcgggccgagaacatggcgatccgggaggcgatgcgcagcccgatgtgcggcagctgcgggagccccgccatgctcggggaggtgtccctggaggagcagcacctgtgcatcgagaatgcgcggctcaaggacgagctcaaccgcgtctacgccctcgccaccaagttcctcggcaagcccatgcccgtcctctcggggcccatgctgcagccgaacctgtcgctgcccatgccgagctcgtcgctggagctggcagtaggcggcctccgtggcctagggtctatcccttccttggacgagtttgctggcggtgtgtctagcccgttgggcacggtgatcacgcctgcacgggcgaccggatctgctccgccgcctatggtgggcgtcgacaggtccatgctgctggagcttgcgatcagcgccatggatgaactagttaagctggcacaggttgacgagcccttgtggcttcccagcctcagtggctctcccgacaagaagctgctcaactttgaggagtatgcccactcgttccctccgtccgtcggcgccgtgaagcctgtgggctatgtatccgaggcctctagggagtctggcctcgtcatcattgacaacagccttgctcttgtagagacccttatggacgtgagacggtggtctgatatgttctcgtgcatgattgctaaggccacagtcctagaggaggtgacatctggcattgcaggaagtaggaatggtgcgctgctgctgatgaaggctgagctacaggtgctctcacctctagtgcccatcagggaggtcacatttctcaggttttgcaagcagctggctgagggtgcatgggcagtagtggatgtgtccattgacggattggtgagagatcacaactctggaacagcatccaacgccggaaatatacggtgcaggaggttgccttctggctgtgtgatgcaggacactcccaatggctactgcaaggtcacatgggtagagtatacggaatacgacgaggcgtcagtacaccagctctatagaccactcatccggtccgggctggcctttggggccaggcggtggcttgcaatgctgcagcgccagtgcgaatgcctggccatactcatgtcccctgatacagtttcagctaatgactcgtcagtcataacacaggagggcaagcgaagcatgctgaagctggcacggcggatgacggagaacttctgcgccggggtcagcgcgtcatctgcacgtgaatggagtaagctggacggcgctgcaggcagcatcggggaggatgtgcgggtcatggcacggaaaagcgtggacgagcctggggagccgccgggcgtggtcctaagcgcagccacatcggtgtgggtgcccgtggctccggagaagctcttcaacttcctccgtgacgagcagctgcgtgcggagtgggacatcctcagcaacggaggcccgatgcaggagatggccaacatcgccaaggggcaggagcacgggaactcggtgtccctcctcagagccagtgccatgagtgccaaccagagcagcatgctgatcctccaggagacttgcactgatgcatcaggctcgatggtcgtgtatgctccagtggacatcccggcgatgcagctcgtcatgaacggcggggactccacctacgttgctctgctgccgtctgggttcgccatcctgcctgatggcccaagcagtgtcggcgccgagcacaagacaggcggctcgctgctcaccgtcgccttccagatcctcgtcaacagccagccgaccgccaaactcaccgtggagtcagtagagaccgtgaacaacctcatattctgcaccatcaagaagatcaagacagcgctgcagtgtgacgcttgactgtcgcgtgtcgccgcagggggggtggtcggtgatgacgagcctgagtcaagaacgaacctcgtgcgggaaagaaacctttgctaggtgataaggatccagcttggacgggtctttagcacggagcaatggtggtggttcgggtattgactcggtctctgtcatctgcttcttctccatggcaacctgttgtctgatacgggatcttgaatagtgcgtggacaatgatgtggttagatggttaaaatcttttgtttcagtcccatcgtttcatcagggaatcaaactttgagttttggccgcctcgttgttagttgtaatatacagttcattttatattgtgaggtaagctatatgccatgtgtaaacatgagagctcaggaatgttgggtagcatcatgagtgtagctaggcatcgaactatcggccaataaaatcccacgcgtctgatcgataaaaaaaaaaaaatgttt

SEQ ID NO: 159094 - DNA, 466 bp, Zea mays
  unsure (1)..(466): unsure at all n locations
  Clone ID: MRT4577_76668C.1
gggccggccgggtcgcngacctgtcatgagattcgcgacatgancattcattctcacgggaattcttcggcgacactcactcgaacatgtcccgtgcatatcaatgtctacgctcacgtcgcccgatctcatttctgcgcgctctcgtcgggcctgtactcctcatgcgtccgttggtcttcggccgccgaccgcccggtaggaatgggcgcgccggcggcactagttgaacgcgagcccgggccacctggggttcccgcaagtgagccgagctcctcgggaatccgatggcaggacgcgccttctcgcggaggtgtgccctccctcttcgatacccagcggcatgcgacagcgagagattgtgcatgaaggccggctgcccagtctggagaaaatgcgttcaaggaccacggtatgctggcgccttttacagctggctggcacaagaatgatttgcaccctctga

SEQ ID NO: 159095 - DNA, 276 bp, Zea mays
  unsure (1)..(276): unsure at all n locations
  Clone ID: MRT4577_76669C.1
tttttttttttttttttttcgctaattactcatgacttgattataatccccgacgattactgataactcggtgggtgagcaaggggcagacagacagacagcctcgctcgccccggtcaaggactcttcttcctccttgccgggggggttggtgctcggcacacatggcaacagcagcggcggcggggccacaaggccgcactgcccttagccggacggacacctcttatctctctctctctctctctcttcaccttncgctttaagaattaacga

SEQ ID NO: 159096 - DNA, 307 bp, Zea mays
  Clone ID: MRT4577_7666C.1
actggggagctggcccctctgcgttgcaaaggcactagcatctctgtgcgaacatgcctactcagcgtacaaaagcaaaacctttttcttctttcgttttgttcggagctcaaataggccatgtgcacttgatggtggtcttcttgtgagcgcacctgtacctggattctccaattctgctttggcaaatgacgttaacgtctcggtgttcacttgctcattttctggctggtgtatttagcttctctgagtggggggctcataatcacttgttgattattgggtgtcatgtatccactctttattt

SEQ ID NO: 159097 - DNA, 401 bp, Zea mays
  Clone ID: MRT4577_76670C.1
gccaacaaaaaggggggttccccctatttacgttcgggggcggggggtggaaactgtctgcagttacatacaggggccctgtccaggactaaaatttagctcaggcaatccaatgccatggactggtcacgggcaagggaaggggaagggggtaccaatatttacaggactcaaatgggaagcatgggcggtgcctatcctaaatgggggacatttttttggactcgctggtcatcaactccgtttcggagtcgatcgatttggaccatgactggctcggggggggcctcctgaaccttctcatgctcttttcctccatcctgggggcggcaatgccgtggcacattgaacccaaaggggccaccatggtgacggggccgatcgccattggccaccaggcc

SEQ ID NO: 159098 - DNA, 511 bp, Zea mays
  Clone ID: MRT4577_76671C.1
gcagggacagtgtgtttctagaggtggcataagtcaatacagttttagaaatgctccaacagttggttcatatgtacacaaaaggcttttatattaaaaagtgatggagcttttttaatgcttgcaaaaaaccaataccttcgagtgcttcgtggtgggctagtcgtcttcattttttgaacccatagaatatggtagctctttgttaagttgggtatgcttcatttttttggaggcgatggtagctcgagcttggtcagctgatccatgtttttgtagatgacttgtgaacgataagataaacattgctattttactatggtagtccaaagtgggagagcacttttgtgccgaagaatttgtaggtgtttaacttggaaaacatgtttttatcatttgttgtagagacattaacagtatacagatatctatcttcattagtatatatagaagttaagcatgtaagtacactgaatttacctctgcactgcatggcacatcggaatatgct

SEQ ID NO: 159099 - DNA, 333 bp, Zea mays
  Clone ID: MRT4577_76672C.1
ctgcagcccaaccgtggcggatctatgactttttaaataccttctacgaacgttccccacacgcagagcgccggggcgttccggccatgccccactccgctgttggtgagcagcccttgtcgcaaaaatatctaggaccgccacgctcgcgcctccgccgctggcgccgacgctaccagaagcaacgccgagggcccaaacggcctggggctcggcctgctgccagccgcgcacgagcgggatggcaagagccgccagcgacaggtgacatgcaacgcggccgacgaggctgcggcgggcgcgaagacaaagaaggacgcggtctcatgaaga

SEQ ID NO: 159100 - DNA, 723 bp, Zea mays
  unsure (1)..(723): unsure at all n locations
  Clone ID: MRT4577_76673C.1
gtgccccgtgccgtaccagttgcacggccccgtccgcctcatccgcgtcctcccctcccgtttcgtactttcgctccacgagtctctgggctctggctgcctgttgtccgctgctccccggcccccctcctctacgaactctctcaaaacaaaaaccgcagcgtacaagaaaagggaaaaatctcaccatatcgcaacgcgccgctcccaaatctagggttcctttttgaccatggccgacccgccggcctccgacgcacagccggagcaggcgcccgccgccgccgctgcttccaatgaccctgcggaggacgccacggtcgagaagcccctcgcggcgccgcccacgccgaagctggacgccgctgcggcggcggatgggtcagcgtatgaggtggaggatgatgagtacgtgagcgatcccaacgatgagccgtttcctacgatgcgtcgtcgagaggccagcgacgacgaggggtccgaggacgggaggcccagggcgcggatcggccctgaccaggacgacgacggccagggggcccccgaggcgtacgacgacgaggtggacgaggaggatgaggagtactacgacgaggaagaggaggacctgggagagggattcgaggagtacgaagggcgcgcggcacctnccatggaggacggcggcggcggcggcggcggcggccaagtctcgcgcggagaggatggcgtgcctggagagga

SEQ ID NO: 159101 - DNA, 325 bp, Zea mays
  Clone ID: MRT4577_76674C.1
cggttggtgttgggtttttttttttttttcggggaaacccatggcccaatgggccaccactggaatactggatcactgaaattctctctaccccctaattcggaaaaaaaaatgcatgcgggatttttgacaccctacacaaaagtacttactggccatattaacatttaaagaatatctacccttgaaaaggcaccctattgattagcatatgtcccaggttcaccccttaacaagagatcatcccaaaacaaccctatactggtcctagggctctgctcaaaggccaccgtggcccaaacctaaatgattaccgccttttgct

SEQ ID NO: 159102 - DNA, 388 bp, Zea mays
  Clone ID: MRT4577_76675C.1
attcggctcgagcgcaggcgcagcctttctttgcggcgaccgcccaccagtgcggtactgagagtcttgccttactgggtagagactagttcacaatgtgcaccctgtgccgctgctagtacacgctaacattcacatgcccaacaaggcaacacccaccacctcatccggaaggctctcagggggggaaacgaccttaggaagggatgtcctccggaagagagatacggactacacacatgcaaggatgaaaccattagcgcagctggaaggtagcagacactcggatcagcttcatatggaggatctacagatcggctgatgtgcacacagaagagccgctcatgcaaaagacaaaacatttccacccacagaggatccacggtta

SEQ ID NO: 159103 - DNA, 350 bp, Zea mays
  Clone ID: MRT4577_76676C.1
cagaaaaagaatcttttttggaaaggaaaaaaggggaccaatgggctgcggtttttggaggatgggcccattaaattaggttgcgggggggccgattgggccatctcccaaaaacaaaaacagagaagtcctggtttatatctttgaaaaaagcacctgtccccaattttgaaaaaagacattgacgaaaatcctgtgggctttctctgtgggggggaagctgtcgaaaaaaacaatttgcaagacgtcttcccaaacggagccgaatcgggagtcacatatccccgagacctcaatggggccggggccacaccctcccctggggggcgaggaaaatcccaactcttccc

SEQ ID NO: 159104 - DNA, 576 bp, Zea mays
  Clone ID: MRT4577_76678C.1
tttttttttttcatttcaattgttcattgaggcctcggtcgtgctgctctgccaccatggtgccccgtgctcacaagctcctcaagcttccctgcttccgccgtccctctgcccacggcgtgtggcggttgtgcagaaccctattcttcagcggggggggggccatcaggcactcgcagctggcctcttacctttgtcacccttggtcctccaacactcatcacccctcttacagcagttacctttggtgcatttatcggcccacaacatcagggcgcagcatctacaacaacttgtgctagcacaccttgctgcctgctctcagcaacagcagtttcttctcttcgcccaactggctgccttgcactctgcttcttatttgctgcatcctcggctaccattcagcccgctatctgctgcctaccccgcgcggtttctttcattcagccatctggcagccttggactctcctgcttcttttctgctgctccagctcctaccattcagcctgcttgctggggggagccctgctaccgtttgggcccatccaccggtgttgcccttctaccagcacac

SEQ ID NO: 159105 - DNA, 334 bp, Zea mays
  Clone ID: MRT4577_76679C.1
gccggtcgctatctgtttaccatgctatgcacactttccttttactttcatggacttctgagccttgtggtttgtgcttccatctgagaattcaatatttttttttaaaataaatgtgtgaaaagaaagctagactgaataatgagatattatctttttcttaggttttgaagggcgctctgttcaggacagctacggagcaaaaagagcaaacacgttacttcagcaagagtgagattcaagagctatttagtttgccacaacaaggatttgatgtttccctcacacataagcagttgttataatagcatggtcaacaagttgttctggatga

SEQ ID NO: 159106 - DNA, 3879 bp, Zea mays
  Clone ID: MRT4577_7667C.1
tttttttttattttttaagaccaaaatgaaggtactacgattatttcaggaagagatcagaacatcagtgaaccggtgaagtctgcctgattcatgtctctcttttcaaaacttgctgtcaacagcaactagtctcgtatacatctatttggctatcatatcttacacatttattacagggtgatgccacggcattatgcgatctacaagtcctaagacagcaaaaaaaattgatggtacaacgtacacgtatattcagcgaactttgtgttccgctgtcgtctatgatcaatgaggtcagcacgatcaactgtcagtcagtattctgctctggcatctcataatttacctttgcactccagggtggagtataccatgagttgtcatggcaaccaatgagtgacctgaacatccaagcagattctgcatcaacctaaaaactcagcaggaactactttaggtttgttcatttcaaattccttggaaccacttggcttggtctggagtgcagataattgattgactcatgtttcttgcttatgctaaaagccatccgagaattagttcagtatcaactcctatatatggctcaagcatagaatgatttcacgatctggttactccaaacatccaaggacacaacttctcaccatgtttcatgtgcagaacttgcccctgttaagcttagttgaagaagtatgttgaagtcagaacttccctcacgtcaaagttaccttgcggtgggcagggtggaaattctagtgtggggaatgacgtttggaactcctccagcagattttcaagaatcggcatgctgtaaagctccacaaattgttgtctcaatatctggttcatttgatcaacatcacacgcatgcacccaaaatgagtcatgaactcctgcaaaatgaaggccagactccttgcaagcaatcgctgtcatcatcatatgtgaactatccagtgagtgcacaaaatttggtggaaaagctgccttttgcctttggattgcaattgcatcaccctcccgccgtaaagccagacattgcaaagaagttcgtatcatataattcttatatttcttgtagggctgaacaactgggagaccaacaggacttgtccacttgactggttgattttttgaagcaatcatcttcgcacagtcaccaagccaggccattataccacgggcagattggaacatttgtcccagtgcatccaaagttacccgagtagcgtaacaggatacatcatacagcaatttatcatctgtgataagccctttctcttgcagtctctttgtaatctgctgacgagcaccaatgtatgtaacaccatagactgatgtcatgactgtctgcttgacaagcttcctatccacctgatcaactaaagctcttgctaatgaagcagttgggttagtagcaggatccttcatcgagtcttcacatacaacattcagtaccctagaagctatttctgagtaaatatctgcaggtttctctccgggaacaaggttgacagcaaccgcgcccatatagtcccttccaagagcggcataatgttgtaaaccattgcatgaaccatcctgatgaataggcaggtgagagacagcatggtaaggtgatggacttcttaaggcatcagaaaggtccatgcatgcagctaaacactgaaagggatcctcagcattcgtccaccagcagttcccatcaacaggatttgctgctgaatcaaatatatcaaacagttggttctccacaaaagctagcttgccctcgtgagaaagcttttcaatgccaccaccatatttgttagccaagtgtatcttcaaccagcacaaccctgactttcctagtggccgcccttcagcatactctagaacaccccgacaaagatctgaacctaggtgactcaaatgaggatgcatagggtatgcacgcccacggaaatctaaattgtgagggtaataaaatccatcctcctctctcattttacgagcaaccgagagtttgagctcagtgtcacatctctcagcatgcagttcacggttagttttctttgccttctttaaactccacttccatttctgcatttcatcaggatcctctgattctggtcgttcaggcaaaggaatatttgccttgtccaccagccctgcaatgcctccaccttgactccagatagtctcaacaacatcatgaactcttctattcaccctccatttagtactcccaaggatatctaatgcctcaaatacttttcgcagctgttttctaggaacactattaattgcatccttttggtccttcacaccatgtgtcctcataatgtatgagggcagaaaaaggtgaccacctttatcataacctttccatttcttcggaggtaccagcatagggaggtagggtatatcaacatgccgagcagtgctttcaaacccctcatgcacaaggtggtcacactctatcacccaatgcttcttctttagcctcccattttctattataggctgacgtagcacatgcttaaatgcaggtcgaatatctggagaactatctggtgtctgatcagctggtggctgcacaaatgctgaatctagtaataattcaatcaggcgacttcctaacttcacttgggcttctgtgccccattcctccaattccaactcctgttgaactagcctctgtgcttcactcatcttccgcctcttaactaaactcttaacacgcttacggcatttagcttgctccttctccaatgctggatcattttcaccttggattttcttcttcctacttttctgaaagaatgactggactttgaactcgcgctcaacagcctcaccaatgcagtgcgcggcctggacaacgcggacactgccagtgccgtccttgctggacatgagcaggcccatcatcttgtgcatgacgattacggccaccttgtcggctgggagcagaagcaggtacttagcgtagacgtgcttgacccgcttccttcgctgcacgtcctggtccctggcgatggcgtcccgcagcggctcgaaccagccgacgaagagcgcctttacgtagggcagcgcgggcgcgagcctgcggtcgagcatctcccgctcgatctcgcggtactcctcggcggcccgcgcccaggcctccgtctccgccttgacctgccgctgccgcagccgccggagttgcgctcttcgcgcccgcccccgctgcctctccacctcggcgtgcttctccagctccagctccagttccagttccagccccgcctccagctcctcttcgccctgcgcggggatctggtggtaggtgtcggcaggggagttgaggaacgcgaataggtcgagccagtggaagtcgtccgtgggcgggggcgggagcgccggaaggtcgagcgttcccaccgaggggattatacggacggcggaaggcagcggagcgacgaccgccatgggcggcggcggcgacaggcggcggagcagcgcccgcggcggcggcacgcacgcggagaaggggtagaggaggagcggcatgcgcggcctagtgtcccgctgcgagttccggctacaatggtgagggtcggattggattgaggtggaagaggggaggaggagtggcaaggacggagactcggagaggggggagcggggaggcgagaaacctcggcagaaccttggagagcgaggcggagccgcggaggcgaaggcgataagggagaaaggaaatatcggaggttaggagaccgttcctccagatcgcggccgttggatcgccttggagtgctcgtatcggacggtaagccttcatgtcaacgagctggcactgggtcaggccacagggttcatgaatatcactagctaggtatccgt

SEQ ID NO: 159107 - DNA, 578 bp, Zea mays
  Clone ID: MRT4577_76680C.1
catttctttttttgcttactgaaatagatcattcttgggctaggattaagtgataagatagttgcgagatgtaggaatcagcattcaatgatatggcagcagactcgttgcattgcttggatgcagtgggtttcaatctgagcgcggtgattgaacacagtatttacatgtggcacaaatcgaccttgttgtgaaaaacacgagtgggcttcaagcataggagacgaacgaagatatatgcttggtgctagggcaaacatctctgtggcgaacagtattgcttggacgctcgggccccacctgtaagttactgcacttcccgttggagttgccaattccggagccacagctgccagcgtactagctgtcactatcatcagcgtattcacagcttgcaccgttgatggcgatagctccgtcgtatgcgacatcgtcatcacgtcacacgtcaacagacgataccagcgcctacacatacaccaccgtagctcggcgtgcctaatctacacagctcactcaatactgggccttgttgacagtgatgtttctgcagtccagatacttgccgttcatagccc

SEQ ID NO: 159108 - DNA, 202 bp, Zea mays
  Clone ID: MRT4577_76681C.1
atgatcccagccggcttcgttttgaccataaccggagggccttaaggggggttttgggcctgggtttcaccccaaacctaaccaggcctggactggggtccaaccccttcggcagggaattattggttaaggacctgggggttatgggggaccatgaaaatgtcactggttggattttgccgaattttaaaaccttggtgga

SEQ ID NO: 159109 - DNA, 422 bp, Zea mays
  Clone ID: MRT4577_76682C.1
actcgcgcgtgcgccaatagcatcacgctacgcatttacaatccatcacctttcatccggaactcgtacaattttaactggtagctgtattccaacatctgatgcacagcctaccgatctttcatcaaacgctaccgcaatcttgacgacaacaactagaacccacagaagtacgtgcagtacatcccagatacagtcgaccaacttctaggccagctcttccaatggcaacaatggtcctaacaaacactcttaacatcatatagtgatagtgactgcattattacagacagatgccactaacttcaacagtacagatttcttactaatcaaccaccagttacttctatcactacatataatatactagtgacataaacctcatctttgcatgcactacctaattttcttttcccataaaa

SEQ ID NO: 159110 - DNA, 1007 bp, Zea mays
  unsure (1)..(1007): unsure at all n locations
  Clone ID: MRT4577_76683C.1
tcgcgatctgatcacaggaagcacacacatcactgatcgagaacttactacatagtacaccaagaaagcaagcgacgacgacgtctgggaacgacgaagccgaagctggagagctatactatacctgtcatccaaccagccagccagccaagccatcatatcatggtgaagacggcggcgagcagcagcagcgacgacgccgccgccgccaagaggaggacgtacaagggcgtgcggatgcggagctggggctcgtgggtgtcggaggtgcgagcgcccggccagaagacgcggatatggctcggctcccacgccaccgccgaggccgcggcgcgcgcgcacgacgccgcgctgctctgcctccggggctcggcggccgacctcaacttcccgctccgcctcccgttcgacctgccccccgcggccaccatgtcgcccaaagccatccagcgcgtggccgccgccgccgccagcgcctcctcctcctcctcctgcggcggtggcggcggcttgcgcgcgccgccgcccttcgcgccacgcgccgagaacaacggcaccagtgcctgcagcgacggcgacggcgacgccaccccggcgtcgagcaccaccagctcgcccaccagccacgccgacgacgtctcctccccggactccaccgtcagcagcgccggcgacgtcgactactacacctcgctcgcggacatcgacgccttcttccagtcgcccaagtgcgtggtggactacgccctcatggacccctgcagcgccttcttcgcgccggactcgacggcggccgacgacgacggcggctgctgctgggcctgggaggaggacggcggcggcattgcgctctggagcttctccgctacactggactgctgaagtgtgggcgtcaggggaagcggaagcgattcgagtcagtcactgactatagtcgccgatcgatcaagtgacagaattccatatatatatatacacgtgataattattcaattnccgnagaaagc

SEQ ID NO: 159111 - DNA, 197 bp, Zea mays
  Clone ID: MRT4577_76684C.1
tggactcctaacactcaacacatcaattctatattctactataaacacttgtggccgttaacttataacgactatttgacctactacaataacaaccctttgtacatctaactataccaaccatatcatctctctaccaacactaactcatccatctagccttctttaacattaactattacttgcaacaacatctt

SEQ ID NO: 159112 - DNA, 301 bp, Zea mays
  Clone ID: MRT4577_76685C.1
ggggggggccaaacgcatggcattttttcccatatatttttaatatataaccccgacgggttgtacatgaatttggaacaatgttcattttactacccaaaatttttgatccaatggacaaatcaccctaaaaaaaaccgagccccttttatgggaccatttcggatctgttaaaatcttttcatttgaaccggggctccttgctttccccaaaatcccaacatgggttttaacacggaaacataacgggccccttccacataagaaccccggggggcacccttgggaacttcatttttgc

SEQ ID NO: 159113 - DNA, 417 bp, Zea mays
  Clone ID: MRT4577_76686C.1
gcagcgacccgtccggacgaccacatccacttcaacttgcctttctccctccaaatcgaacacggggagggcgccatggtacgtatgtgctatcccacgccagcctgcacgaaccacaacagcatccggcacaccatcacataagaacaagtacttgaacatggtgaccatcaccaacgaagacggaagcggcaacaacacccccctgtaggtgaaggcgagcaagcgcctcaagcagacctacatgacgcccaaccgtcggcaagtgaggcatacccaggacgaccttacacgcgactggctgaccgtaccgctgatgactagcgaccacacacaagccacactaaccacacctactccccaatgactcgcactttgcagggacctaccacgcaaccaaaaacatccaaggaccac

SEQ ID NO: 159114 - DNA, 381 bp, Zea mays
  Clone ID: MRT4577_76687C.1
caagggcacaacttgcctgcaatgagctcctgctcaactacttctacttgttgaagctcaggttccacagtgggttgctcgtctactcgcatcaacacaatacatacatagtatagccaaaatcaacatcacaccaaacagatgaatgaaatatacagtaaaaatctacacattaaaatgagagcataggaactggaatcactaaatttggagttataggtttcaagttatgaatttcctaaggtttaatgtgattaaattaggattaaatgttaaattaatgttctatcagagttcatgtcaaaacagtgactctaaatggtagagaatattattacaaaattttagaaattggaatggctcaatttgggtcaaaaatgg

SEQ ID NO: 159115 - DNA, 647 bp, Zea mays
  Clone ID: MRT4577_76688C.1
attcccactcgtgccgtgatttggtgacctcgccaccaagcctcccgattaagagatctatcccttgctcgcataatttccatcatcctccatgtgaatacaaaaaaatgacgtctatgtagatgatgttgaacactccattgctgcaacggctaccacttgcgaacttatgatctatgatctccgcaacatctgcaaacgagaactagacagtcctcagaaattagtgctttatatgatggcgagaatgtctgaggagtctggtggatagaatggttcaatgctattccaagctcgtaaatcagcacctacacagatctccgatgatgtggaaccgatgtctattactgcaacgagattgatgaccatagttatgcgagctgtcgtcgaaccatcatctatagtcactacacaaagagacggtgatgtacatctcaatgctacccatactctagatgtttgtactcgaaccagctcaagtgccgccacaacaccaatgatgtgtcccactgccttatctgctcctacacatcctaattccaggactgtcacacaccatgagtgcatccaatacatgaatactgttgcacgacctactttccatatacaggagggtgatatcctacctgagaatcttgaaatcatac

SEQ ID NO: 159116 - DNA, 536 bp, Zea mays
  Clone ID: MRT4577_76689C.1
cctcgagttttttttttttttttttttttttttttttttttttttttttttttttttttttttttttggggggcgcaacaatttgtttttaacaggccactaaaaaacacccgggggggaatggcatgtacgggggcatcaacggcaccaatctccccattgtttgtttcccacctccagccacggggtcagcactaaaaagtactaaagtacgtacaaaacgactccagcctttcggacaccaaccagcaccatttttttttttttttcgcgcgcccctggccaaaaaacaaggggggggcttggcaaccgccccaaaattcaccaataaaaaaggggccacccggcccgggccccgccagaaaagtacggccaaagggaggcactacaaaaaaggggcggcttgaaaagggaaccaccacccaacagggggcgccgccggtctttttttccatttgggggttagggaaaaatcgggggggtcggtttcgggggggggggaagggaggtaaaaaagggctccggctggctggggg

SEQ ID NO: 159117 - DNA, 194 bp, Zea mays
  Clone ID: MRT4577_7668C.1
ttaatagaaataccattaccggtgctggaaaaagtcgaacctagccatagcacaatatgaagaaacagccacatagggagcgacgatgacgagagagccgtcacccagccagcagcaggtattccttaggcagtctggatctactcctactagtaattttagcaactgatttttctagctagctgcttctgctt

SEQ ID NO: 159118 - DNA, 253 bp, Zea mays
  Clone ID: MRT4577_76690C.1
cgacactctactgtgaatctttcagaactgtacaattatgagactactattaatgacgataaactggaaacggcatcaactatctccacaatcctcacattcaatgacgtttttccatccaccaagactattgcttcatataagctgcctgatcatcattctggcacgttcgagatcactactttcatgaccatgctatgataccagcagctgtcgcactggagcactacccagctattgatgttcttgccac

SEQ ID NO: 159119 - DNA, 427 bp, Zea mays
  Clone ID: MRT4577_76691C.1
gaacctttgggctgatttatgtgcctgcttatgtgcctggttatgtgcttggctagcaaataggtaaacggtttaacgcttgattacggccgcagttgcatctgcggacgtcactgaggacctgatgaccttagatcgtgttgacgttaattcggaattcgtatgcagtctcattgcgggtagtgtttgcattcctggttcctacaaggcagagatttgaagtcatgagaaattagtcatttctgtcggactctccggcctaggtgagaacgttactcataggccaatgacccgcaggaacttcgtccctgatggcacgaaaataacggggacgcgtcgaataactaactctacttttaggcgatagtaccgagctctttatatggacgccattgggcacagacggataccgtccgccttacagtct

SEQ ID NO: 159120 - DNA, 1190 bp, Zea mays
  unsure (1)..(1190): unsure at all n locations
  Clone ID: MRT4577_76692C.1
ttcctgccctcgtctaaagaaggtattttcgctttagttggtaaagataggaacattggcctgtaacctaacatctatttacatagagaattagaacatataatttgacattgataattagaataattggcttgtacttcagggagaaaacacacttttacaccgcaccactccaccttgtatatatccgcatgagttcttttattcttattattcagtttatatttcatactttataaccgttgatacgccatgcattttatactgcattttgctatagcgcgcctgcgctgtcccctgtcaggagtggaaaggatcagacggccgcggacgccagctccatggcttgccctgttcccgcggcgcgctcctgtgccgccgctccacccgccgtcccttggtctccgcagtcgtcgttgtcttcgtcgtcgtcctgctcccacaagaagctggcgtacgcagcgaggacgtggctgtccagcggggccgcctgcaccgacttctggaagtagccgaggcacctttccgggtcgtggtgcacctcccagaccagcctggcgtactgcgacatgatctcgccgtcgctgggatccgcgagcatggcgcgcgagtagtactcctcggcccttgcggtgtcgcccttcgcctcgtggaggaactgcgcgtagttgcgcaggaacagcgcgttgcccgggctgctcgtcgaccatggtcttgtactgcgcgtccagcgcggccacagcctcggcctgctgctcctccatgctggcccacgcggccgttcctgtcgccgcccgcggtgaagtagccggaggcgtggcggtcgatcccgaggcccctggcgaggaacagcggcacctccgggtgctccggctgnaccaccacagtcggcggnggctgccgacccccttcctgtccctgggagcggggnggcgangcagcggggcgagtacggcctcgcccttgccgaagnggttgtaganggagaangagagctccgtgtggaggccgccgngtccggggttgctggtcctgccggcgtcgttgggggtggatgacggcgggtggagggaggggaggtgggngtcgganaaggcgcggcggnggtgcagggaggaggagaggaaggggagcgggaacggcgtggacgagnncctcancagcatcctccgatctccctcgggttctct

SEQ ID NO: 159121 - DNA, 372 bp, Zea mays
  Clone ID: MRT4577_76693C.1
attcggctcgagagctatcctaattccagatgtctggtacctaatacctagaccctgctagatcgcaaccgttcggcctgtgagtctcgtacaggatgctgacaatgacaaaggacatgccgattgcactcatactcttaaggcccacgcctggagggctctgagccataagacaaacttgaacggctgtgtttgccagagcgacgggtggcctggccacgccgatcttgcttgacgacaacgtgacgagcgtgagcaacatgtaccattcaccatgagcagcagtcatgcctacaaacaaatgagttacgagatgcggggaattttgcagctgctctacaaggtggaggaccaggccgccccaagccgggt

SEQ ID NO: 159122 - DNA, 800 bp, Zea mays
  unsure (1)..(800): unsure at all n locations
  Clone ID: MRT4577_76694C.1
ccggccgggccatccgcgaggagcccccagccgctccttccatcctcgcggatccgagcacgctcctccccttaatcgcggctaccataaacgacgccgagcaggcctgcgacttcaggatcacaggcagctaccacgacggcgcctgcaccgtctccctcggcgactctgacaccatcatcaccaagatcgaccgacggttcagcgtggtgagcgcgctgctggggaagaactcgtacaacgtcaccgtcaacctagggatcgactatgccttcattgtcgcgctcgtcgtcatcctcgacgagatgcattaccagcgatgacacgcacgcttcagttttggttccaagccgcgtgccttcccttctgctgttgcgtggaatcaacgctcgcccattctcgaatgtgcccattctgcagaagtatggttttacaagagaattcaagattaatgttgagtacaaccatgctactctatctagacattgctgtcaccatgaactagaaaatgcatggattaaaaggctgcttgtaaatattgatgcaaacaatgtggatgatatgcagaataggcagactatttctactacacaaactctagaggatttgtttacatggtttcagcatctggcgtatctttgctaccatgcgtgctagtttttcaagttgacaagtaactgtattgcanaagaatatggtacttatgcacctatggagaaagggaagagcatactttttttggctctngtcttggtagaaagacacatatgtactctcaggaaagtctgatggtactgcca

SEQ ID NO: 159123 - DNA, 385 bp, Zea mays
  Clone ID: MRT4577_76695C.1
aaaaaaaaaaaaaaaaaaaaaaaaaaaatttaattaaaaaaataaaaaaaaaaaaaaaaaagaaatgtataaaaaaaagagtaaaaaaaaatataaataaacacatataaactatcttataaaataaaataaatataaataaactgtactcaattttacaatttcatctcttgtaaaaccttgtctttactcaattttattaccttttagatcatccttttttcatcatatggcgtatttttcaagaagtgtaatcctatacaattttccaaaatttttattaccttaatggaccattcaacattccacttttgctacatattaatcctgctagcttattctgcttatccacagattaatccttatacttgcaatttccattata

SEQ ID NO: 159124 - DNA, 304 bp, Zea mays
  Clone ID: MRT4577_76696C.1
tcgctctcatttacccatgcccccaaccgcccgactcatacccgcgccgacaacccgattccacggcagcgccccaaatcccgttccaaccctagcctttcgccatgcgtttagatctcggtcggtcatgggaaactgatgccgctcgacggtcgctcacgcgcattaggacgtcagcttctcgcacttaccaggatccacctcgtcatggagctctggcagggctgctagttcttctaccgcatcatctcacgggagcactacaccgagcgcgccgtcaccaatgtcactctcaccatcgtcg

SEQ ID NO: 159125 - DNA, 290 bp, Zea mays
  Clone ID: MRT4577_76697C.1
ttgaattcggcacgaggcccgaccgatcgacctcccctccccctcggcgcggcgaggcgcagacaaatttgtcaagctactgttgatgctccagatgtggtggaaaaccatgggagaagttagtgatgataattgcaacagtgtgctttgtaaaaagaatcggtacaagtgacatgccgctgatgaaagagtgtggtgtgaatggagagggaggaaacctgcttagtgagtgaagatactagtgagctggtttgcgtggtggggggggggaagacggggagggggggggg

SEQ ID NO: 159126 - DNA, 301 bp, Zea mays
  Clone ID: MRT4577_76698C.1
ttggcggcggacgctcgcagtttcaccctttattaaccaaaagagactaattagatctaggctatagttagacgcgcgagtattgattgtcagcatgaacctgatcatagccaccactggacactgccaggtgccagacccggacggatggggcacccgacgcagtgacaccggtggagaccaccattaccagccgacgcgcactatatgtatgccaccgcagtggccgacggcaccggacacgttgatgctactgctaatgctaagtagctaccggggtacgtgcaacacgcacacacac

SEQ ID NO: 159127 - DNA, 370 bp, Zea mays
  Clone ID: MRT4577_76699C.1
gtctctccacactactaggacaagcagcctggtgtgtggatacaagatatacgaaggaagagaggacacacgaacccaagacaacaacactgcttgcgaagctagagctttaaggcatgctaccggatgccagaggggatcgactagcacacggactgagtaagaaatggaatgaaccttattgtcgaacatgtgttatgaggacaaaacgacggagcagaacaacactataccatgaccaagacaagggccgtctgaacaatgatgagattgagatgatgatgcatgacaccaagaactactgcgctaagactaggagcacagggaagaacgaggagtccaagaactatctggagaactactcctacaa

SEQ ID NO: 159128 - DNA, 1517 bp, Zea mays
  Clone ID: MRT4577_7669C.1
catgtagccccggtgctgatgtggcatgtctgcctccacccctccgccaccaccacagccgttgcctttgccgcgagcgaccgtagcgaggtgattgcaatggtggcctccactgcttcccgcctctcgcccccgcgcttcagcaccccttccccgtctcttcatcctccaaaccgccgctcgcgcttctcccctgttcgcgcagccaagttggaagctgtgctgtctattggtgctcatctaatcccacacccaagaaaggctgcaagtggcggagaagatgctttctttgccaatagcgatgctggcggagtatttgccattgcagatggtgtctcgggatgggcagaaaagaatgtcaatccagctctattctctcgagagctcatgagaaacagctctaatttcctcaatgatgaggcggtatctcttgctaaacctcaacactatttataggcatcattttctttactctatgtgcttgtaacaaattcatgtcacatggaagttgcaggtcagtcatgatcctcagattcttctcatgaaagctcatgctgcaacttcttctattggatctgcaacagtaatcatcgccatgcttgagaagaccgggactctaaaaattgcaagtgtgggagattgtgggttgaaagttattcgtaaagggcaagtaatgttctctatatcccctcaagaacattattttgactgcccataccagataagctcagaggcagagggtcaaacatataaggatgcattggtttgcagtgtaaatcttatggagggtgatataattgtgagtggttcagatggactttttgacaatatctttgaccaagagattgtttccataatttctgagtcgccaagtgtagatgaagctgcaaaagcattggcggagcttgcaagggaaaacactcggtggatgtcagattcgattcaccctactcaatggaggcccggagtagggggttcgatgtcccctggtggaagaagctacttggaggcaaactaataggcggtaagatggatgacatcacagttgttgtcgcacaagtgaagacagtagtggtcccagaggacgaggttcagggtggcgacacagaagaacaaaaggggaatgagcagggcgctgcagctgtggttgcatacaaaatgaatgatgaagaagtcgcttgagttttgggaccatcctcattttacctttttgtgatgactgtattatactgcacataaaggaattgaagcaaaataaatttgtgtgattgtgtctaaactaataggcggtaagatgtatgacatcacagttgttgtcgggcaagtgaagacagtagtggtcccagaggcccaggttcagggtggggaaacaaaaaagcaaaaggggcatgggcagggcgcagcatctgtggttgcatacaaaatgaatgatgaagacctcgcttgagtttccggtccatcctcattttacctttttgtgaagactgtattatactgcacataaaggttttgaagcg

SEQ ID NO: 159129 - DNA, 448 bp, Zea mays
  Clone ID: MRT4577_766C.1
ccctttcgagcggccgcccgggcaggtgtacaagctctttttttttgttcattctattttgtttcattaaaaataggaacttgtagcttccttatttcaagcaagccactttcgtcaacctaaatctctattattagaatcaccacttatttgcattcaaacaaatggcctccactgagccctgttgtttatttggaggcccatgtatttccataaacacggttgacaaagggcctaatttgatgaacatcgaatagggttgtggggctcaagccgcacactgttggtccaaaggcttaaactgttgctgtgttaataatgaaacactggtcggttagcttcagcagactcagcttccttcttgtcgctgcatcagatgctgcctttgtaccagcagtttgcggttgaccactcaaccatgttacagctactacaattgttgcccttt

SEQ ID NO: 159130 - DNA, 397 bp, Zea mays
  Clone ID: MRT4577_76700C.1
aaaaagaatggggggtgccccacatttttaaaccaattgaaacccattgaaaatcattggaccgggtgggaaaaaaatgtttttacgggcgggaaaaaaaaaacggggggaaaagtggttctttttaaggaaaataatttaattttccccccccctggggctaccccttggtgagggttccttcctccccccagtggggggcgggacataattggaaacaggggggcgcccatttcgagcgtggggatcaaaggccccttattagggccttggacggcgtaggggcccaaccaggggagccccatcaagacccctcgctttagcttttggggggggggcctttggaaacttttcctgtacccatacttgtccggttttttttgggcccccatttttt

SEQ ID NO: 159131 - DNA, 981 bp, Zea mays
  Clone ID: MRT4577_76701C.1
tgcgttgattcctcgggtcgaaccaacgcgcggcgcggggtcccggtcgcggccatggcgcagctgccgcccaagatccccaccgtggcgccggcgtggccggagttcgggggcgggcaccagcagcagcgcagcccctccgtgggcacgttcctcgccgccgcgcccatgcagccgtcgtgggtggacgagttcctcgacttctccgccgccaagcgcggcgcgcaccgccgctccgtcagcgactccgtggccttcctcgagcccgtccgaccacaacagcatcaacgacgagaagacggataggggcgacgccgaggaggcacagagcaagtgccacggcgccgccgcggccaccgcggtggatcctaagcgcgtcaagaggatcctggcgaaccggcagtccgcgcagcggtcgcgcgtgcgcaagctgcagtacatctcggagctggagcgcagcgtcacgtcgctccagacggaggtgtcggcgctgtccccgcgcgtggcgttcctcgaccaccagcgctcgctgctgacgctggggaacagccacctgaggcagcggatcgcggcgctcgcgcaggacaagatcttcaaagatgctcatcaggaggcactgaggaaggagatcgagaggctgaggcaaatctaccagcagcagagcctgaagagcggcagggagcccgacgcggccccgtcggtccgcgacgacaaggacatgatcggcagcgaggggaccgccgcgcccggcccgccctcgtgatgaggaggaggtggtggggcgacacgtccagacatccgagtcggtcgctgtagtcggggatggccctgtcgcccgccctgcagcccatcacagcgaggttgccgctgccgctgctaggattggtgtgtgtgtgccgtgtgcgtgtccgtgtgtgcattctttgggggtgtgtaacgtgatgtgatgtaaagagaagaggaactgcatcggttcggttt

SEQ ID NO: 159132 - DNA, 354 bp, Zea mays
  unsure (1)..(354): unsure at all n locations
  Clone ID: MRT4577_76702C.1
aaaaanaaagccaaggcttttttttttttttttttaaagagactcccaaaattggctttggtcacacaaaaatatgcaagggtcaacaaggcttaattggactggggcgacagagggtttggaattcacatttactggttcccggacacttaaaacaacagttaacacatttcgggcatatattagtaaccgggacacatttagagaaaccctgaatgggagcaactttgtttccaagggggggggggagttaacttgacatttttgcacctaggtaaatacacaatttcatgcttgggcactttagatccaagtttggatgatcaagctttagtttccagctttttagaatgc

SEQ ID NO: 159133 - DNA, 1277 bp, Zea mays
  Clone ID: MRT4577_76703C.1
agcccacgcgtccggtttccggcgttgcgccaccgttcccgcgtgttgcgttgattcctcgggtcgaaccaacgcgcggcgcggggtcccggtcgcggccatggcgcagctgccgcccaagatccccaccgtggcgccggcgtggccggagttcgggggcgggcaccagcagcagcgcagcccctccgtgggcacgttcctcgccgccgcgcccatgcagccgtcgtgggtggacgagttcctcgacttctccgccgccaagcgcggcgcgcaccgccgctccgtcagcgactccgtggccttcctcgagcccgagcccggccccggcgacggcaatgccggggcgcatgacttcgaccgcctcgacgacgatcagctcctgtccatgttctccgacgacctccaaccgccgccgccgcagccgcagacgcaggccgcgcccgcgccggtggcgagctcgtcgtcgccgtccgaccacaacagcatcaacgacgagaagacggataggggcgacgccgaggaggcacagagcaagtgccacggcgccgccgcggccaccgcggtggatcctaagcgcgtcaagaggatcctggcgaaccggcagtccgcgcagcggtcgcgcgtgcgcaagctgcagtacatctcggagctggagcgcagcgtcacgtcgctccagacggaggtgtcggcgctgtccccgcgcgtggcgttcctcgaccaccagcgctcgctgctgacgctggggaacagccacctgaggcagcggatcgcggcgctcgcgcaggacaagatcttcaaagatgctcatcaggaggcactgaggaaggagatcgagaggctgaggcaaatctaccaccagcagagcctgaagagcggcagggagcccgacgcggccccgtcggtccgcgacgacaaggacatgatcggcagcgaggggaccgccgcgcccggcccgccctcgtgatgaggaggaggtggtggggcgacacgtccagacatccgagtcggtcgctgtagtcggggatggccctgtcgcccgccctgcagcccatcacagcgaggttgccgctgccgctgctaggattggtgtgtgtgtgccgtgtgcgtgtccgtgtgtgcattctttgggggtgtgtaacgtgatgtgatgtaaagagaagaggaactgcatcggtttggtttggtttggttatccttgcatgcatatgcatctgcatcctctaaagctgccttccaccacctcccctgaattgtaatttttggtcgagcattttggg

SEQ ID NO: 159134 - DNA, 274 bp, Zea mays
  Clone ID: MRT4577_76704C.1
cgaggccgagatcgcaccactgaaggtgaaggcaaccgccctggaaagcgacaaagcatggacaggaggaatggtggtggcggtcgtcgacgcggccgtggtggtcgggaaggcggtcgcgatggcggcgcgagaacaggagaagacgtctaccagaagtggtatccttgatgacccaacagagagggccaaggcagagaagcgtgctgctaggtttgctgggaactagtagttctcttcataaccagtacgacatgaaatttggcaagtaaaa

SEQ ID NO: 159135 - DNA, 2102 bp, Zea mays
  Clone ID: MRT4577_76705C.1
gcgccgccgcaggcacaccatctaccacggccaccgccgcgcctcgccgcaccggcccacagtccgcggcggcctcttcactgatctccgcttcccctccactatacaccgcccttcctcctccccctccaccgccaccgccttccgcctccgtgactgggatccacactcgccctcttcctcgtcgtctgctcgctctccgtcatctccttccgcctcctcctcctcctcctccacatccgcctccgctcgccgcctctccccgctcgcgcgcttcctcctcgacgcgctccgccgccaccagcgctggggaccgcccgttgtcgccgatctctccaagctccgccgcgtccctccatccctcgtcgctgaggtcctcaccgcgcgccctcccccgccgccgccgctcgcgctcccgttcttcctctgggccggccgccagaagggcttccgtcactgcttcccagccttccatgccctcgcctcgctactgtccgcggcgggcctcccagccgcggctgaccagctccccgacctcatgcgcgcgcacggcaggccggtctcccacccgcagctcaccctcctcgtccgcctccacaccgccgcgcgccgccccctccgcgctctgcacgcgcttcgccgcttccgccacgagttcgacgtccaaccccaggtccacgcgtgcaaccgcgtccttggcgcgctggctgctgcgggccacgttgaggacgcgctcaagctgttcgatgaaatgtcggagggtggtgtgcagcccatcccagtgacgtttgccatcatggttcgtgcactagcacacgcaggaatggttgataggcttctggagatgattgggaggatgcggaacgaggtgtgtcggcctgatgtctttgtgtacactgcactggtgaagacaatggtgcggagggggtatatggatggctgcatcagggtttgggacgaaatggagaaggatggggtggagccagacacaatggcatatgctactatggtcgggggactctgcaaggctgggatggtggaggaagcagcagaattgttcaaggagatgaggagcaaggggttactggtggacaggatggtgtatgcatcgctcattgatgggtacgttgctgttggcagggttggggatgggtgtaggttgttgaacgagttggttgatgctggctaccgtgctgacctggggatatataacacacttattattgggctgtgtggcataggtagggaggataaggctcataagttatttcagattgttcttcaggaggaccttatgccaagttctgatactgtttcaccgttgctagcttgttatgccgaaaagggtgaaatggttatgttttttgggttggttaacaaactggcagagatgggcttgtctgttgttgaaatgttagtagattttatgaagctctttgcaggaaaggatggtagggtattgaaggctgtggaagtgtttgatgcattgagacaaaaacagtattgtagtgttggcatttataatattcttattgaaaatctgctgaagatcaaggataggaagaaatcacttttgttgtttgaagaaatgcaaagctcaggtcatgtcggcctgacagtgtatgaaatcgacgacacactggatagcactaggggagggataaaatggatcttcttgggtgcatttgttgcttcaaggaagctttatctgctcaacatagcctattcagacacccggacagtgagtcaagaattgttctggacaaagcattccattcttttgattatgtatagtttatattttctatggcagaaaatatagtcgcgagtatttgtttgtttgtaaaaagagtgctaatcaaaaggttgcattgtcgtcttgtccagtactattgcacctttatcagtgatgtcaggctataagtaatttcagtttagataatgaacttcatcttgcacatattggtaacattatttgtgtcgaaagcagtaaaatgtcgtgatcttaattcgtagcctaacactactgcatttgtaatatcttagacttgaaattttatacagtggagtacatctatattttttcaaaaaaaaccaaaacc

SEQ ID NO: 159136 - DNA, 679 bp, Zea mays
  Clone ID: MRT4577_76706C.1
ccggccgggagaaaagaaaaatgaaaacctgctcccaaacttgtgttccagttggtcggagggtgagcaccgccgagcaccctcacgccgcggtactcaccgccgttggccacgggcgtgtatcacaggtggtatcagacgtcagcctttcctcggccgcgctccactcgcggttcgattcgttcctggtgttttcccctcttcagcaccacggcgccgcctcccgttaagccgtcgaagcagacccagctgctcctcgacgctatggcggacgcgacacacaaggaggacgtccggttgaacaagatgcaggagagtctcgatctgctgtttgcgcagatccgttccatggacacctcgcaacagcagatggcggctcagattgatctcacagcgaaggcgatgaaccagagtacccaggatcaaattctcttgtcccagcaactcaaggctacgggtgacgctgtggcgcgcctcaccatgtggcaaatgaagatggatgcagtttcttctccagtctccaacagatccgatgcagaggaagagaactggttcgcttctgcgcctaccgggcgtccgcgtcatcctcatcaccggctgcgccctgagggtcgtcaccaccatgatgatcagcttccaggtcttgtctttgggtagaacatgtcgtgctttgcatgct

SEQ ID NO: 159137 - DNA, 658 bp, Zea mays
  Clone ID: MRT4577_76707C.1
tgggacctcgagccggccgctagccgtgacgcttgccccaactctcccaagccagtaatcacaccgtctcccaggaaccaaagacatttcgctctgccgcatcaaagggatcaacgacgacatgttcgtcgtcatggacgagcacaagaaccgtgagtatcgaagatgaggaacgccgcgacgagcagaacctccagctcaacttaccgctggagccggcgcaaactgtacgtgctcatccgctactacctctgtgaccccatcctctgctacaagtgcatcgctcgcgtacaattgcatatgaaggacgatgatgcactcctttcatacatgaagatctctgctacagcgcttactctcctggtgctatacctcgattccaccactcgctatctgccatgacgtcaactaccactcaatgtgtgacgcaaaagttgtaggccgacatctgataaagcaacccggaatgctgaactaatgggactgatgctcatgaatacagggcatagtagacaactccatctcaatatactgaaactggagatgatagaatccacttggtcactagtatgtaaggatgctaagaataaatgcgcgcctcaagcgccaggtatcgggacacatagcgatgtctaattgcgctcttggcgaaaccatg

SEQ ID NO: 159138 - DNA, 258 bp, Zea mays
  Clone ID: MRT4577_76708C.1
atcacttgcagtggtacctgtttcagtgtcagtaaaaaacaagttgtcgccataaaaaaccaatccagtgtcagtaaaactttctccttggtctgtgattgaatcatcaatgccggcagctttagaaaattcagaattatggcaaaacatctcttcaagcttgaagtgcttcacaaatgaccattggcttgccaaattcgtatatgaaaacattggcaatcaggaaaggtcatgcatctattcagcaagataggtgta

SEQ ID NO: 159139 - DNA, 412 bp, Zea mays
  Clone ID: MRT4577_76709C.1
ggggaaaaaaccattaaacatggcccaaagggcaaaaaaaaagggaaaaaagcattctgggatgggaaagggggaaaaaacagggggctacaaaaacagaaaaaggggcccccaataggggggctcaacaggtcaaaggggaaacagcaaccccaggataaaaaactttgggcaaaagggaacatctcagctacgtatgggaaaagcaaaccctgaaaaaacgacggggggaaaaatttttttttgggagaagccttgggcacctggggaccggggggggcctttttttccacactttggaggaccccaacagaaaccggttgtttaatggtagggacagaaaacctacccagggggggaaactgggaaaaggtctccaccaccaagggcctggggggggaaaatttttacc

SEQ ID NO: 159140 - DNA, 623 bp, Zea mays
  Clone ID: MRT4577_7670C.1
ggtagtagttacgccacggcatcaccgctggacgaatggatcaccacccggggttacaccaggaacacttggactacaggtccaccgagcctggcaaccacaccttacggggcctggactctcccctgtctcccgcccacacgttaacgggagctgaacgagggcagaaccaccccaaggctcgtagtagatttgcacgtccacagagtcaaggtataaaacgttcagacttatttcttggttcaggtccaggttacattcatcataaatctgggaatgtattcatttgtcaaggtaaaactcgtacaagtgctatttgagacggtagaggttgaggttaaggtgctcgtgcataacgtataggtaactatgcaacatatcacgaagaaggttgtggacaaaaagatcgagtacatctctcatgttgagatgcagttggatcaggttcaagaggtgcgaaccttcgttgtaaaattcatgctctaagtcatatagtgaaatgtatgaaaggacaacgttattaataggtaggatggggtataggcatagatgtaatccggatcgagagggggggtttgggtttttttgcgaggacgacgatccgctcgctggcgcgcacgacg

SEQ ID NO: 159141 - DNA, 180 bp, Zea mays
  Clone ID: MRT4577_76710C.1
taatcggcacgaggcgacttggtcctcaagctcccctatgccgcatatctattgaagtggacatggatcgggctgcggatgcattggggtgttgcttcttgcggttctgctagtgcctgctgctttggtgcccggggtgttctagctctgttgcgtgtcgcgctgagggtggtgcctgtt

SEQ ID NO: 159142 - DNA, 393 bp, Zea mays
  Clone ID: MRT4577_76711C.1
gaaccaatcaatcaatttattgttcttatacttttcatgccctaggagtagcagtaacttagccttctcatccccgatttcacctctctttggctctacgtcgtctagaggcgtcttggtggattgccgattctaagacaaaccctagaatctctccttcttgacggggtccctccccaggggtcaatccaggtgttgttggtgaacgtcgtcgcctctgcgcacacacggatcaacctgccaccaggagcggaccgtccggcgtcagcgtagagaagaacccgctcctgccgcaggtcgtagactgtccggtcctaggtcgcggatcgtccatgctgtcgcagagagcaccgccgccgatacaccttgcagtgattgacgctcagatcaatg

SEQ ID NO: 159143 - DNA, 2677 bp, Zea mays
  Clone ID: MRT4577_76712C.1
ccggccggcttttggtttctacatgaattcttgtagtcgttgttggtcaggagtggtgcttcgggtggaggaaggaaatctgggcggtgaaaccctcaaaccctaatcctttggcccctcaccatggcggacgctgacgacgcgccgccaacgccgcctcctgaggtagtagcccccgaggagcatcccgcggtcgccgaatccgccgttgccgcgcagcaggagggggcagcgacggcccaagtcgataacaagcggaagctcgaggaggctggcgccgacgcggaggcgaacggcaccggcgaggacgccaagcgcccgcgcgtggatggtgagcccgacgctgccacaggcattgagcagcagaacgatgggtcctccgtgaatgtctccgtgaatgtggaggaacccgcagctgcagaggaggataaggttgctcccaccgatggggcagcgacggatggtgataatgacacggccgctcctgctacggattcgcaggcgggttctgatgacaaaccgcttgaagcagcagctgaagctccacaaccggaaagtgatgcagcagctgttgcccaggagatctctcgtatgatcgaagtacccaacagcagggtcggtgtccttattggaaaagctggtgagacaatcaggaacttgcaaatgagctcgggtgcaaagatccaaatcaccaaggacgccgatgcggactcaaatgccctgactcgtccggttgaactagttggaacccttggaagcgttgataaagcagagctgcttattaagagtgtccatagctgaggctggaggctggcggttcccctgccttaatagctgcgaagattctttggaagtggacagcttgggtcagagcaattttgagatgacagttcctgctaacaaggtcggtttcattatcggagaagccgttgagagaactaagtgcatggaaacccaatgtggtgctcgtagccgatgaatcccccaagacgccaccttcatcttatgggcgactgactgagcaacatcctttacttggacaaacaagtggagtggacatgggaccggttggataaggtaagctatgtaacagacattttcaaggcatacaaaccagtctggcggatatggtccacaaggttaccgccctcagggtcaaggtgccgcttctcagtgggggccacgctctcagaatcatggctatggatacccacctagaggtatgcctccacctcaaaactacaacacaccctacggtagctacccaccacagcagggaccgccaagaggtggcatgggctgggaccagaggcagggccctccaacccatccttcgtaccagggtggtgcttctgattactacaagcagggatctcagccatatgatagccagccaccgagctaccctcctggaatgcgggaagtacaacacttatgggaaatcacagggccctaactatggctaaccctacgacccgcaacatgcacctcagcagaactacaggcatgggtatggtgatcctagctacaatgccccccctccgatccagcagtactatggtcagcctccaatgggcccgcagcaaggctatcctcaacagccagatccctatgctaggcctccatacagtggacctggtcaatggacgcccaggggtgctccggctgcagatggctcttaccaggcgccagctgcatcttatggggcggccgtctcagcacccttctgcttatgggcaaacgtatggtgcagcaacgggatctgatggatatggtcaacagggttacccacagcagggtgggcaggcaccagcttcatatggtcagagtgcaccagcagctccaggctatcctcagcagcaaggtggctatgcacagtacccacagacccaaccagcatatggtgagcaagcagctcaaaccaatgcgagctatgggtaccagggagctccagcagatcctaactatggaagtgcctacccacagccaggatatggtcctcctggtcaggctactggtcaggctggttatgcctcctcagcagccagccagcctgcgtatggccaggcaggatacacccagccgcctacaaatcctccaggttatgagcagtctgcggcaccagcaacaacccagagcggctatgctgcgcccccagcaaatccacagcagcctgctgcagcaaaaggggtctcgccacagcctggtggtggtgctgctgcatatggtgctggtgggcagtggacagcatgaccctcctcgaacctcaaacatggctcgctggtagcaatatcgtgctcaatatttgcaccttccggatgcatccttggttatcggaagagattgtgtaactccttgattagtgatacttggcatctctgtagtagcacctactagtagttcgttggttaactgtgactataaacatcctaattcctattcacttcgaatcaaacttcgcagcttgccaagtaatttttttggatttgtgtttattcatgtaaaatagttactggtttggctcacagaatgatgattctgtttctgcagttcattcgaaatacactcaacatgtgctgattccttgattgtagtcgccctttgagctgtgttttcacatgcatgctactttctgaattttcctcgaatgctatatatgctctattttgcagctgag

SEQ ID NO: 159144 - DNA, 549 bp, Zea mays
  Clone ID: MRT4577_76713C.1
cggaaaatgacatagtgatcgaaccatctcagtcaggctatttatttaacagctgatacaaattgatgtagcaaaaaaaaataaaaaaaaaaaaaaaaataaaaaaaaaaaaaaaaaaaaaaaaaaaaaaaaaaaaaaaaaaaaaaaccaaaaaaaaaaaaaaaaaaaaaaaaaaaaaaaaaaggagaagggggggggccttttaaaagaaaaaaaattaacttccgggggcttgaaaaaaaaaaatttttaaaaagggaaacaaaaataaaataaatgggcggggttttaaaaaacgaggaaatggaaaaaaccgggggtttacaaaataaaatgccttgaaaaaaaatccctttttggcaggtggggttaaaaaaaaaagggccgaaaccattggcctttcaaaaaattttcaaaccttaaagggaaaagggaacccccctttaaaagccaaataaaggggggggggtggggggtttccccaaagggaaccgttaaaattgggaaggcccttgggcccgcttctttgagttttttccctttcttttt

SEQ ID NO: 159145 - DNA, 355 bp, Zea mays
  Clone ID: MRT4577_76714C.1
aaacaacttaggaaaccaaatgctttaaaaaataatcccaaacctccggaaagaaaaacaaattttttccatacccatttaggtggaaacataaaaactggttgcttttttatgggcgatccaactttttaatttaaaaaaggggccgcccaagaaggtattttaagcacagggttcttttaatgggcttggtcgggaacctaattcatccttttgaggagctcattgggggagttctcgggggtaccgggattgcccccctccaaaaagggggtccttttttttttaaggcctcccaggggggccttaaaatttaatggccaaaggaagttgttggccctcttgaggggggggc

SEQ ID NO: 159146 - DNA, 348 bp, Zea mays
  Clone ID: MRT4577_76715C.1
ccttgccctctcctggccatggcactagtggtcactcgcgcggttagtgaccactgaaacccaccgcccgcatgagcaaagatggcatctgggcgatgggacgaatctcgtgcggcggccatcctcgcgttcacgcctccccggggccatacctctcccttgcggagctccctccacgcgcgccctgcctcccatggcggccgtccggctgctcggtcgccatcttcatagcctcgcctacccctctgtttaccatgcgccaccgctccggttccagctcgcccgagctacatgactcctgcgtttactcagtcgcgcccaacttcttccgtgcgcgcgagctcctat

SEQ ID NO: 159147 - DNA, 543 bp, Zea mays
  Clone ID: MRT4577_76716C.1
ccccgcgtccgcccacgcgtcgaaaaaaaaaaaaaaaaaaaaaaaaaaaaaaaaaaaaaaaaaaaaaaaaaaaaaaaaaaaaaaaaaaaaaaaaggagaacgatggggggacccttttttgggtccccgtttttgcgcccttttatctctttttttatgtctcttattttgtttcctttgggggggggtttgcaccgttttttctgcggaaacccttgggtaacccccttggttccccttttttttcaccctgttttccatacctgttttactacctgttgggcccgccctgagggcccttccgaacgctttttcagcctgtttggcgaatggtatggcccttgtggcgccccttttttcgcggcttttttgggggttgttcccggggtttccccctcatttaccactccccttgcccccgctcttttcccttttttttttgcttttttccctactttttccggcttgcctcctgagtttttccttagggggttcctttgagggttcccttttagggttttattgagggttttcccgaacaac

SEQ ID NO: 159148 - DNA, 259 bp, Zea mays
  Clone ID: MRT4577_76717C.1
cggtggggctggcggcgtaccgggcggtgttgcgggcggcgcggcggacgttctcaggcgaccagctgatgctgacggagtcggccgtggagatccgacgccgctttgaggatcaccgcggcctcgccccaggatcggaagacgccgtccgggccctctccgaggcccgccaggccgcggacttcatagccaacatgatcgtccaagctaagcgctgaccctccggatccttgggtgtgaagcctgaaaaggaacatgc

SEQ ID NO: 159149 - DNA, 253 bp, Zea mays
  Clone ID: MRT4577_76718C.1
tgggactgcgacttcgccggcttcgcatccgtcgtctaccaagcgccagatgtcggaaattgtgtgctcccatcaagggcatgaactgaaggaccaacacggacccatcttgtatccatcatatcagaataggattatatcatagctataatactgtactatcaaatatcaacaaagttccaatcccactgtatcttggaactagagaataaagtacatcagttacaaatcgaaaaaaaaaaaaagaacatga

SEQ ID NO: 159150 - DNA, 429 bp, Zea mays
  Clone ID: MRT4577_76719C.1
gatgacttttggctaactgacatgccttacaaatagagatcaaactagtgtctttgagacacgggaaattattcaaacgtaaaataaaacacactacttgcggggagggatgaccaaaacgagcgtgccattgttgagggcgcgcccagtagctgacgaaagcttgatgaagggactcaacatcggaaggcttaatgggataaaggccgccttcacacttgccttccaagagtagtgcctgggtggctcgatcctgcgccattgccgacttgaacggagtcgccgccatggtattgctcgcgaagcgcgaaacaatctaaatcacttgtgatgtgatctgttgcgccggtgtcgttgtaccaacttggatcaaccttggatgaagaggtagcagcaagggccatggtcgaaggatcatcttgatagttc

SEQ ID NO: 159151 - DNA, 340 bp, Zea mays
  Clone ID: MRT4577_7671C.1
aaaccggccgacggacctatacttggtacctgcttgagaccattggcaagagctgtgacaagggcttctcagaaggagagaccgagcggcagattgatgagatgctcaggcatgattgatgatacctcaaaccgctggtgataacaggaactgggcccttacgctcattgaagcatggggggagtgtggagaatgaactccgttatgtgccagcatatgagggaacatacatgagcttgaaatcacgatgagcagtaatatcctgcatacgacaatcagagctcggatcctatatttactcccgcgccatcacccgctgaggctagatcttgatgcaagc

SEQ ID NO: 159152 - DNA, 345 bp, Zea mays
  Clone ID: MRT4577_76720C.1
aaagcaaatttatgcgttcgggcactagaatgtttggtgtgtatttatatagccacaccaaacatgtcaatttattcagttgttgacatctacaaatcataacccatctattcacgtgaaacctatatattttcaaaacacaaaggtgtgaacataaggcacagaataaagcaggctatactaagcgacgagcaacccacatagatttacacatcttttttggatggctaactattgacttactcttacctcaacatgtgtggtttcaaagcaatcttttcaaactgaagggcttaccaccaagctttttgggaacataatgatgtcaacaatggccgaagcatt

SEQ ID NO: 159153 - DNA, 195 bp, Zea mays
  Clone ID: MRT4577_76721C.1
cctcgagcatgggagcttagccatcatgggcaagcggctcaccctgcgcgtccgggagaagatgttctcggcgatactgcggaacgagatcggctggttcgatgataccagaaacaccagcgccatgctgacgtctcggctcgaggctgacgcgacgctttttcacaccgtggttctaccaccgcttcaccatcc

SEQ ID NO: 159154 - DNA, 377 bp, Zea mays
  Clone ID: MRT4577_76722C.1
acccttcgggaaggttctttggcttggaaccttttggggtttggttggttttaattttcaagggcccaattccaacttggccgccgaagccatgggaataacagggccaactccggacatcttggggaggcgccagtccggccaggacgtccgaacgcagaacgtgttggctggcggggcggtggccaactatggaaattcctggttgggcccggttggtttggacaggatgctaggggacgatttggtggaggttccattcactatggttggagcacccatccttaagaggttggaggtggagcatccagccgccagggttctggtggggttggctgagctccaggaccggggggtaggagatggaactacttccg

SEQ ID NO: 159155 - DNA, 386 bp, Zea mays
  Clone ID: MRT4577_76723C.1
gggggggggccaaaccaattcccgggtggggggaactttggaccccccaaagccgggacccccaaccttttcaaaacccaattaaccctggccaaaaagggtccctgggggcttttttaccaaaaaaaaattgggacgggctgttgggggcaaccctgaaagaagggatcatcggggtggggcccaccccttttgggcaaaaagaaaggggccccaaaaaagaaacccgggggaagggaaaaaaaggccccttcaattttggggggggggggggtttccatttcccctgaacaataagaattacggggggggggccaaaacccccccacttgttcttgggggggcccaaataaaggcaaatagggggggcaaatgaccccctattt

SEQ ID NO: 159156 - DNA, 461 bp, Zea mays
  Clone ID: MRT4577_76724C.1
ctctactctttcggtgatagcatttttcatttggttgatatcagaattagtggaccaactttatcttaggatagtgagggtgatcttgctttggaacctaagggacaggccttgaacattgaaaaatttgtaaccgatcaagtttgatgactcctgctggaacaactcgacaaaaacatcttggagttaacaatcagcatgacaaacaaccgatcttgatatgtgcacaattgctcttcatcattataaactaaaataaccctccaccacagtgtaaagacgctttcttgattcagaactaacctcttcagtttacagtaaacaaaactttattctaaaacaatatgaatggctacatagcaggtatactgcctttgaaactctccggatggctgagggacgtttccatatgaattatttgatgcagaactatcatcacacccttgagatacattgacacg

SEQ ID NO: 159157 - DNA, 396 bp, Zea mays
  Clone ID: MRT4577_76725C.1
gggggggtggtgtgtgtttttttttttttttttttttttttttttttttttttttttttttttttttttttttttttttttttttttttttttttttttttttttttggaataaaccaaccgaagggggattgggaaaaggccggacccaattggggggggggggggggccggccctccgcccaacccggggaattccccggcacaaaaaagcggccctctgtccccaaaacccaaaggccgggaggggttctaggctctttcccacgagaggggaaacaaaaaccacccaagtggcaacgggggggcgcgcgggcccgcccggaatccctttggggagaaccaagccgggggtgcccttagccccccccgacccggggtgcaccccgggaaatcc

SEQ ID NO: 159158 - DNA, 549 bp, Zea mays
  Clone ID: MRT4577_76726C.1
aaggccgtacggtaatgcttggcacagtctaaccatacatgaccatcgcagcacaacagcagcaacagatcctaccaggactgatccaactcgatgtggtgaacgctgtcgcctacttgcaacagaaggtgctcgcatccaacccacttgctttggcaaacgttgttgcataccaactatcaacaacaattgcaacagtttatgaaaacgctcagtgaactagccatggggaaccctggcgactacctacaagagtaacaactgctttaatctagccctctcgatgagggtaatgcacctacctacctgcaacaacaattgctacaacagattgtaccatctctgactcagctagctgtgaaaaccctgctgactacttgcaacagatgcttacattcaaccaactgactgagtcgaactactggtgtgtacctacaacagcggcaacagttgcttaatacactagcagtgcctaacccattggtgactgccttcctacagcagtaacatttgctaccatacaggcagtgatctctgatgaaccctgac

SEQ ID NO: 159159 - DNA, 208 bp, Zea mays
  Clone ID: MRT4577_76727C.1
cacgaagccaggaaaccctatcgttctgtccatgctgtagttctggatcaccgcccgactggacatgtttttagctagagggcgctctttattgtcgctgccccaagacgcctacacgaagtgctagcgtcatgtgttaacgccctctcactgtcgatctcaaacacatcctcaagtagggactctaagatagacgtatacaagagct

SEQ ID NO: 159160 - DNA, 276 bp, Zea mays
  Clone ID: MRT4577_76728C.1
gttgattcctatatgcagatctagaaggatcatataattgtgagttggaaactaacacatgcagagagagagagcaggatggcggcactgttgtgcgaggctttatcaaacatataacaataaaggaactcaattacatttacagagaatatcatataatgcatagatcccttttctttattctcttgaatcataacaacataaaccctatgtttgttcctgtgtttatcatgttatcgtgtgtttgtatgaccgttgttaccgagatatttttca

SEQ ID NO: 159161 - DNA, 287 bp, Zea mays
  Clone ID: MRT4577_76729C.1
agcctgataacttatgggttatggctcatccgataatcagggttgtgatgcagaacataaccgatgataccgcccagaacagcaagaacagacctgtccacagcagcaacgactacctgatcgacaggacttacaccgacactgctggtatgtctatcatgtacgttaccgatctcttcaactcgtaagacttcgagcacgacaagttcaatgacttgctccacgataagaacggtatcacaatatacgcgaccatggtatacaaccagagatgcattataaagtaa

SEQ ID NO: 159162 - DNA, 583 bp, Zea mays
  Clone ID: MRT4577_7672C.1
ataatagtagagatcgtctatggattagttaaataccgctacatttaagagataagtcgttcctttttttacatgcaccaaataagttaattgattcctgctggaacagtaatgataatttttcagaggcacggcagagcagtgtcatgagtcccaccccatcagcatgttggtgacttcatccacgatcttgctccgcagcgcagacgagagctcatgctcctcaccaaagtgcaatctgtagacttcccactccctatcttccacaacatgcctcccaatctcagccaagaagattcgtttctgaagattcttgagagcaagggtgatgtcatagaacaccagcggcctgccctttccagaaacctcaaccgggtttgctaccagcagctctgtgtcaggacctcggttcaccaatgccacgcgcagtggtcggaggagctccatccttaggcggcagcacagtgctcgctgcctgtgctgatcaaggatcttcttcccatctgattgcaccgcgaacaaatcgatctcacaccttccattttggctcgcatagaatcgggcatacgaaaactgaatgtta

SEQ ID NO: 159163 - DNA, 493 bp, Zea mays
  unsure (1)..(493): unsure at all n locations
  Clone ID: MRT4577_76730C.1
gattgtcgctgcaaattgatggtgtgtgattcgagtttacttatactcgctttcctggctgnaagcggcccatggggggtcgggtggtacactctgatggatcctgctcagttatctgtcgcacatgcatagtcgtctgaggtcttggagacaagggcaggtgcatgtggtcccaataacttgtaaggttctgccacagggactatagatgtgtgcggcgatggagagtccctacatgtcgtgtgtccaggttcatgtttcaaggttaaaactcgattggaatcgtctacctctcgcagataatgagactacttgttccactgtacttcattgattaataagtggataactagggtcttgcaaaagatgtagcttgatcaattgtagataccatgtgtggatagcctggtcctcatcttgtttaacgtattcattctaaaacctgaatagctcacatttgacttacattcagctagttgtttttggcaatcca

SEQ ID NO: 159164 - DNA, 207 bp, Zea mays
  Clone ID: MRT4577_76731C.1
gtcagcttgtgctctctggttgacgtgttggctcggattttttcggttcggtcggattttttttatttgagtagatttttttagattaggttaggttttaggtcaaaaatcgtaactcatatctgtaaattattgcggatcaagaatttgagttgtattggttggatgagatcggggttagtcccgaaattagcagccggcatacac

SEQ ID NO: 159165 - DNA, 375 bp, Zea mays
  Clone ID: MRT4577_76732C.1
ggggaacaacgtactaattttttggcaaaaaactctttggattactctacaataaatgcgagagataattttcctttggggggggcctggcctgtccgggttctacccgggcataacacatgggaacaaccctcaccagaggcaactaaggggggctggccccagtttcaaacaaccgggaaagcggcctcctatccagcttaacaccgggtggctcggcattcctggaaagctgtggggacttggccagcctcccatttgggaaataggccctgttgagagtggtggccaaattcggccggaggaataaaaccagcctgctttatccttggcagatagcggggaggccttccccgatcgggcgatgccaaccat

SEQ ID NO: 159166 - DNA, 581 bp, Zea mays
  Clone ID: MRT4577_76733C.1
ttcccaaatcgtttaaatattaatagagctcctgcagagatctgggggggggggggggggggggggggggggggctcctccaccctgatcaagtcccagcagggaaaccctacgggaacgcgtatctgctacccccctcccgccacttagactggctggagcgccgccaccccgttagaaaaaatcaagagtagaagacccaccccactgactagatctagcttatgggtacaaactagaccaaagaaacttcgttaacgttaataagtaagtgtacaagaacaacgttggtggttccgcctctggtatcaacaaaattaagagtggtggtgctggaagattagttgctgcgaactcggatgctgcaaacaataagaataacattaacggagttgcgaacaataacaagattaacggagttgcaaataacaagattaacggagtttcaaacatacagaacatcaacggcttcgctaaaagaagtaacaacaacatcaacaataacagcatagttggagttgcctctataatagtttgtccggttgttgagggggtggaagtcgatgaacacgccgatgacc

SEQ ID NO: 159167 - DNA, 198 bp, Zea mays
  Clone ID: MRT4577_76734C.1
ccccagtgtaaaatgtatattccttttcctttttatttttcttttcgaaatcgacagaaaccttctaaaagccataacttgagatccactacctcaaagatgctaaaactaatattctactatttctttttagtagatatacagtagaaaaatataggatgagagttttgagacctttttatgtaaagttttaatgaa

SEQ ID NO: 159168 - DNA, 594 bp, Zea mays
  unsure (1)..(594): unsure at all n locations
  Clone ID: MRT4577_76735C.1
cctactggtacaagnagccatccaancaagcatttacggtcattagcattaaccctccaacaaccatataggattgtatagttgggtatcgaaatgcctcggttgttaccggaaacggtgttgatcggctgcatcgtcgattgttattcttcatcaatcaacttgctgcaggggggggggggggggggggtccaacaacatcantttctttccttcaatcaacgggggggggtgaaccctgctatctacttgcaggcacatcagctactaccatttaaccaacttgtcggcagcccttatgccttcttactgcaacaacagcttctgccattctatctgcaagctgcggcaaacattgttgctttcttgacacatcaacatttcttgccattttacccacaatttgtggcaaacattaatgccttcttgcatcatcatcatttgctcccattttacccacanaatgtggcatacattgttgccttcttactacacctacaattgcttccattttatcctactttcttttcctaaatcctaccaccttatttgcaaccacccaccatttgttggtgccctcttctactttttttt

SEQ ID NO: 159169 - DNA, 536 bp, Zea mays
  Clone ID: MRT4577_76737C.1
ccggccgggacatcacggcaccattcaccggacatgactgttgtgtacatcatgtgctctcctagtgcacgtgcaggtgctgaaggatgtggcattagcatttctgacacgcggtgactgtcgtgaccctcccaaggatcccccgcctactaactattcacagccaaatatgctagtgattggctatatgccaaggccacatgatatggtaagccgacaggtgctggccccgactacaatggaggcgcgctgcggaaacaacgcacgctgaataatgcccctttcaataccatggccgctgtgtggcaacgtccccatcttcaaggacggcctatgttgtggatcctgcattcagatcaagagtgacaagccagcgacagtgctcatggcaagaccgtggtggtgcacattacggacatgaactacgagcccattgcggcataccacttcgacctagaagataccgcgttcggagacatggctaacaagggtgagcaagaaaagatgcgcaaggcgtccatcattttatgcgattt

SEQ ID NO: 159170 - DNA, 273 bp, Zea mays
  Clone ID: MRT4577_76738C.1
cttggaagagaaagtgcctggccgcgtttggtattgtcacacagtgtctagctccattaagagtcaatgatccggacctgcttaatttgctgatgaagatcaatgcacagctttgtggtctgaactcgttgctgccagttgaaagctcttcggcactaccacatgtgtggcgagcacccaacatcttatccggtttggtcggggatcctgcagacgcatgacaggagagatcctcatgctctacgagtgctagctatttgccaaggcgtggta

SEQ ID NO: 159171 - DNA, 540 bp, Zea mays
  unsure (1)..(540): unsure at all n locations
  Clone ID: MRT4577_76739C.1
aattcggcacgagggtttcaggattcagtggttgttcagtcttctgaaataacacgaaccataccttccttagcatccttgctaaaatctgatgatattatcaataaatactttgctgctcaggcactggctagccttgtttccactgggagcagaggtatacagcttgctattgcgaattctggtgcagttttgggtgctgtagcattgatcggacaggtagaatctgatatgccaaaccttgttacaatggctgaagaattcaagttgtcagacaatccatgtcaaataatgttgagaagcctttttgagcttgaagatgtctgcactggtgcttccgcccggaggtccatacccttgctagtggatctacttaaaccaatgccagataggccaggtgcacctctgattgctntgnaccttctgactcaactagcggaaggtagtgagtcaaataaaattgctatgggagaggctggagctttgaatgccttgactaagtatctatcttttaggcctgaagactgaactgaaactact

SEQ ID NO: 159172 - DNA, 1565 bp, Zea mays
  Clone ID: MRT4577_7673C.1
cgacagagaaatgagaatgaaaaaaacaatgtagaagatggcagttctatggcaaataatacagtgcctttacctgagaggcgaagtatggaatcattagatactgctgagaaatggtccgagaaagtagcagaacttgacaatgtaaaggattccccaagtgcaatttccgatgaaaattttcctgagattatgccaataaggaaaggtgaaaatcgatttgttgttagtaagaaaaaagatcgctcattgacatcacagcgatcaaagatggaatcagtacaaaaggcgcagtattctcgagcaggcagacagttctgattttgtcccatttgttccttttcctcctggctactttggcaagaaagatacgccaatagagagtactacagacacaggaattatgtcaggaggcagtcagccaaaaggtaacctgaataatgagaactggaacaggaattactatcaatatcaatcacaatctcaagaatttaggcctagtggtaatgcatatactggctctgggaacacaggcaactccgaggggaacattaatgggagtaggggcgaatctacttaccatgaagctaactttgaaaagcgatcttattataactcaggttatagcaacaacggttattggagcagcgataacaataacagcaacaatgcctggagtgacaactctaattataacaacaataatgcttggagtggtaacaattcctataacgggtgtattaggaacgacaataccagctgcaacagcaatcgtgattataactacaatgatacatggagtgccagcagcaacagtgcatggagcagcagcaacaacaataaccagagtggtccatttgctgacaatagcaatgccactagaagcagtagttccgtgaatgctaatcactcggttcacagctcaggttatggaggaaactcgaacagaggttatactggaaagagcttggaaggatctgctgtgaaggatcctgatcctctagacatgtctgaggaagctaaggctgagagatggtttaggagggcagctcagataaaggacatctctgagctggcgaatattcccgacgaggacttccctgagataatgccgatgaggaagggggtgaacagattcgtcgtgagcaagaggaagacgccattggagaggagattaacatccccgcaatacagaaggaacctgccaatcgttagttctgaaacggacaaagatgccaactgaaaacagaggtattattgcctgcataccacaatcttaactgtactgcgacgcaccatttttacaccaaggtattactctttgcgacgataagggatcaatcagaaacaagaatcatcaagaataatgctccaggaaagtttttgtacggtaaaaattatgtccgcaatgacctagggtttgctggattgtgttcgctacatgtacactatacacatttgcgttgtactaagaaccttttaacaaaataatgccccaggaaagttttttttggcttgtctgagattacatgtgtaccgaatttgtttataaatactgatactac

SEQ ID NO: 159173 - DNA, 391 bp, Zea mays
  Clone ID: MRT4577_76740C.1
ccctcgttttcggccggggattttgccctgcacagggtcattcaagaaattgttgaggccataatcagaagattccatcctaaattcttcatgtcatgtatgcattaccgagctgtgggggccaatagtgggttgggagttgggacatcggttccgtgcttaaaacggtcgtggtgtggtctcaattcaatcgattagttatttgttaacgtcaaaaaaaaaaaaaaaaaaaagaaccctctaactctacatcttgtgcccccttgagagaggttttttcgcccttttagagaaattgtgcccatcgctgagctctgtgagaaagttatctgctctcacagtcacacacaatatcctgacacaaacccatacagtgtaacccctggtgaca

SEQ ID NO: 159174 - DNA, 301 bp, Zea mays
  unsure (1)..(301): unsure at all n locations
  Clone ID: MRT4577_76741C.1
tttattggggggggggggaatgagtacaaaaaaattagtgttcagaccagcgacggatacatctgggtactcttgataccataccgcccagaagttaaacacgggctacacaaaagagtgacagaagtgcacaagcctcgaggaggactttttttttgaatggacctctcgaagaatacttggcgggatatcaattagaattgcaacgtanagcacggatctctttttttccccaaggtgtgcatgaactggggattcgatactgatgtttggaaggtagaggacctttgttccccccccc

SEQ ID NO: 159175 - DNA, 449 bp, Zea mays
  Clone ID: MRT4577_76742C.1
ttacccacgcgtccgccgggccatgcgcggcagggacagccagcagggaaggagccattcaggttgcctaccgtcagctgcctgacattaggaagaccgaggtggtagaacgtacatgaccccggcgtcgtcagggaagtatatggattattacagggggcttcggcttcggcataaaggtcttctcttatggcaaagacatacaatgtgaagatgtaacccgaaggtgataagaatggtcaccgaaggtgtagccgaaagagcttcggcttaatatgatgacgaagaccaaatatgatgctgaccgaaagggggaagaagactatttagtccttaatgattcatgttatgataataaatagatgtcagggacataaatgtacttttacccgggttgcatctcgtgtctataaatagatgaacagtagcatcgtactgttcacgctgga

SEQ ID NO: 159176 - DNA, 1916 bp, Zea mays
  Clone ID: MRT4577_76743C.1
cccgggtcctaggccagcaaaccccctctgtaccctccgggcaatcgggcatgaatccacccatccgcgatgctacatggagctcagcaagcctcggcgtcgtcgaccgcaggcccgcgccccaagagcactgctatcctgcagtctgatcagccacctcgcgccgccgccgcgcgggaggggggccgcggcggcacgggtccggagtcgcttgtgcgcggctcggtcgtcgcgccgtgcgtcagctgcggcatctgcggcggactcctccgtgacgccaccgccttcaccgagtgcctacacgccttttgcaggaaatgcatatatgacaaggttgcgaaagacaacataaagtgttgcccgaagtgtggcatttttatgggaaatccgttggagaagctcagacctgatcatagcctggaacacatcaggccactgatatttcctgctaagaggcgcaaggttgtcaccatgaagaagaggaaggaaagggtgtcctctgaatcaacccttccttcagtggtgggtaccactgcagaagaaagcactgcactgatacctgctgcttcagaaagtaaggcacaaaaggatcttactcctgtcggaagagatgctttgtcacgaattaggggtcgagactttgactcagcatgtggtcttactgaggatactggagccttgattgtatggcaagcaccacctattctagaggagacggctgcccacaatcagttagactccaagcaggacccagatagtttcaggcctccggcgacctctgatattgagtaccagcgacaaggaccaactgcacaaatgaccaatatttcgtttatggttgggaactcatcccatgcaaggccgactgaccaggatgatgaaaacatgagaggagatattctcacattgatcaatgagagcaatgcaagaatcatggaaatgtatgatgcccacatcagcaaactgaaggcagggaacataaaactaatagagcaactggaaaatgaaagagcagctgcacttgagaggacaagaatccttgaagagaggctccagcaagagttggaaaacgaaaggacagttgctgctgagaggacaagacttcttgaaaagaagctccaaagagaactggaacatgaacgagaagctgctattgagagaacaagagttcttgacgagagactccaaagagaatctgaaatcgcacgtactgctgcaagccggaatgaagctttaaaagaggagattttcaaacttcaggaggaattggaacatggaagagcatacaaccaggctctgatgtcagatattttggagaaaagcgaggaactcgctacgctcacatattattctaacctgcttgagtcagagaagacatatctagaaaaccaagtcgaccatcttaacgaggagttgaagtgtactaggaaagagcatgcagcatatgtccgtaaggtcttggacgcagcaagagccatccctaacgacttggagccgatcaactcggcaactccgatgctctgccgagatcgcggtgcacgtcggggatctgttagccagccacaggctggccatggctaacggccagcccccacaggcagctgatccttaagagtttggacctaatcttatttctgatagccctttaggacttctttgactgaacctgtgggcggtgttgagcgacttcccagctcgctgtccaggtggtgataattggcgttttattttgtctagcttcaggtgatgttttggactgtttcttcctcaggttgcagcagtacagtatagtgtcgcttccttctgttcagttgtagcttgcttcttagaaggtggtcggttcgtccgttctgttgtgtactctgctccgttgggcgtatcaagataaatgtaaattccattctgcttgcccaccc

SEQ ID NO: 159177 - DNA, 424 bp, Zea mays
  Clone ID: MRT4577_76744C.1
accacattggccattgtcatccaactcttttctgtttaagtagcatcgattttgttccttaaaagggtgctaagttaggcacatttggagtattcagtcacattgcaatgattgacttggtagaaagattttcatgtgatttcttaaggtgggttagaggaaatagtcttttagggaagtgagctgaagtgttataccgtagagtgacctgattacacaaaatcagggtttcagtgtttttcttcttctcatattcagggatgagggagtggactacatggcttataggctgaacttgcacagtgaagtacttctgtaaaactcatagtgcttctaaaatcaaaatattgagaggaaatttattttttcagtttatgtggttttggttcttggaaaagtaaagcagttctcatggcagaaatat

SEQ ID NO: 159178 - DNA, 144 bp, Zea mays
  Clone ID: MRT4577_76745C.1
gcaacaacttccttcattcgctttgaggcgtgcccaaccatggctgtcctcggcaccgcggcggttgaggtgctcatcccggagcggattggtgcatcgtttccgtgtgagggatgggggcaagtccggcttcacccgagacgg

SEQ ID NO: 159179 - DNA, 442 bp, Zea mays
  unsure (1)..(442): unsure at all n locations
  Clone ID: MRT4577_76746C.1
ggaaaaagaagaccgcatcccccggaactcaggatccccgtgggctctccgtgcctgatgccgccattggcaaaaccctgaaagccctaaaccttccgagacaaccatggacgagctcgtgtcggtggcgctggaggaggtgtgcgcgcgcctcgcgccggggatccccgtcgtggacctatggccagcgctccgtggcacgctcgatgcgacggggctcccgctaggcccagcagtcaagcgcgccctgtgggctcgcatccttgcgctccgcgtcgtcaacctggtggagggggatggggacggngtgcccatctcttgccgagacccggcggagaaggacttcgaggaggccgaacggcggtgcatgcggctcgtggcaagcgcggngatcagggacaacttcctggggttatacgagcgcagattcgcgaagtcggag

SEQ ID NO: 159180 - DNA, 339 bp, Zea mays
  Clone ID: MRT4577_76747C.1
gccggccgggtccagaagcttcagttcagagaggtactaacgccaggacaagtcgcagaagattccgaatgatttcaactgctccataccgggaccgtcttagccgcgcccgagtcgtaagaaatgttcctaaggcaccgccaccacctgttgtcgaggccacgacgaagattacctatcgctgctctgtgctgatccggcatgtccacctcctcttccccaacttccgtccaccaacatcaccgcctccagcagagtactactgcctgatgaacaacagtctcaacatcagaccacgcgcacatcaccgatgacgccttcactagcttcatcagccca

SEQ ID NO: 159181 - DNA, 388 bp, Zea mays
  unsure (1)..(388): unsure at all n locations
  Clone ID: MRT4577_76748C.1
ggggggggcacgaagcancacaaaaaaggcaccaggggagacacaanacaagcagcacacggccacngggaagaaagnggcacaacgccaaaagccacaggcaaccaaggagacaaaccggacaacagggggcaaacaccgacncggagcaagggggggggcggcaacnnganaggcaaaaaagcnaccacagnagacacgnnngangcgccaggcnaaccgnggccgaacgcagaagccccggncgggaaagaggacgggngcaacaagcgaccagaggaacagaccngccggcgcccacggggnggcaancccgacccagaccagagggcacccaacanccacaagccggccggncgcaccaaccgaagncgaccagccagccaag

SEQ ID NO: 159182 - DNA, 341 bp, Zea mays
  Clone ID: MRT4577_76749C.1
cggcgagcggcgattccgatcaggtactggtggaagcaaacggctctacacggacattggttttgaataggccaaagcagttaaatgctctctcctctgcaatggttacaggacttctgaaatgtttcacttcttatgaggaagaaaacacagttaaactgttgattgtcaagggaaaaggaagggcattttgtgctggaggcgatgttgctgaagctgcccaatctataaatactgatacctgcaaatatggtgctgattttttccatactgaatttttgctaaactatatcattgcaacttataccaaaccacaggtttctctacttactggaattgtc

SEQ ID NO: 159183 - DNA, 453 bp, Zea mays
  Clone ID: MRT4577_7674C.1
agtaacctctgccgttgttgtttatatgttcttctaccatgatgaaatagctggcacccgtccattagctaatcacagttctttatcatgttgccaaggggattcgcattgtgtagctggagcccccgatgcaatgcaacaggtactctgccttctagttgcgccatcgtccgtgacaaatgactctgtggtcttctgatttttgacccatcagctgccgctttctggcgaagctgtaacactatcgtatttagcaatgcttttgcctcatttcgtgcttactcaactgctgctttccggagaagctgtaacagtataacacaaacacctgttgtgtttagttttgctttcgtatcgctttattcttacctcaggtgatagtgatacttgtaacatttttcttttttaatctgatcatcaaaggatgaatatcggcaattccgtcttatctgt

SEQ ID NO: 159184 - DNA, 263 bp, Zea mays
  unsure (1)..(263): unsure at all n locations
  Clone ID: MRT4577_76750C.1
aattcggcacgaggctcacatggcctcgcttccttccgtttccctagctgccgcgaacgcccgccgtacacggacaccgacagctatgacgcggcacttctcgtgctgggttcggggagctggaaaaagactngaccatgtcgatggggtacgcgcggacgctgaangcggcgggcggggcggttgctgcgccgggggcttgcggttcctttgtcccgcgggggggggnnnnngnnncnnnnnnccngncccccccccccccc

SEQ ID NO: 159185 - DNA, 365 bp, Zea mays
  Clone ID: MRT4577_76751C.1
ccgcagtgtgctggattcgtcttagagtggaaaacgcagagacgcggggaacattattcctttactgttacgcattcctgtaattgttaacgcatcactcgggaattatatttgtcaaggcaaaggtataatgtacataaacgttgtattaaatatcttaaattcatataataagatatgtgaataatgtgatttaaaaaaaatttttttattttgaaagtaatataggggcgtctatgaattcttttgagttaagaaaaaatatacccccccaccaatattaccgcatattaaaaaggatcctttgttttggccccaccctttaggggggaattgggagggtataaccaaaaaccggtgggctt

SEQ ID NO: 159186 - DNA, 293 bp, Zea mays
  Clone ID: MRT4577_76752C.1
cccgtgggccgctcggcggaggtgaaggcggagccggtggacgcgcgtctcgaccatcagcacagcgcgacggagccgcagtcgtggcccatttaccggcccaggccagtgtaccacccgctccgggcctgcagcggcttggtcagcgctgggagcgaccacgactggtccaacaactcgaggtgacttttgcttgcaagcccaatcgtccacaggttacaggttaaacttagaatgagagatcaagtgtttatgtagcaataactttttgttaatttatctcatattaccgc

SEQ ID NO: 159187 - DNA, 443 bp, Zea mays
  Clone ID: MRT4577_76753C.1
ccccagaagtttttgccccttttttttttcccctttcacaatggtccttcccgccggttgggtccaaccttccgggcccaaaaggtttttgttaacagtttgggggggggaaaaaaaccaaataccggaattttacccttggcccacgggggccccattttcccaattttggccgggcccgggagtcttttacaaaaaattggccctaataaacaaaaaaaaatgggccctgcctccccataaatccggggaaagggccttgaacccattttgttcatttttttcacccttggccaaattttgggacccctgatcaacgatcagggtttcgggggggggcttttttgttttagaactggcccaaggttttccccggaatccgggggaaaatttcgggggggaaaatccaaaccatggcccttgcaaaatttagggccgggaaa

SEQ ID NO: 159188 - DNA, 311 bp, Zea mays
  Clone ID: MRT4577_76754C.1
ggcaagcgatgaaatgatacaagtgttaatccctctttcaggggaagaacattagcgggatgcattaattcgttaaattaaggggaaaggggggacaaagaaaaagagggcaaaaggggtgtcgaatcaaaaaacatgcccacccattggaatgcgcgcagccatgttactttttttcccctttgtttttttcttggcctccgggcgccccggccggtttacttaatgtagtaggcgaaaaaagaggcgacgggggccccaagggcggggcccacggggggcgccacgggggaagaaccccttgtgggggc

SEQ ID NO: 159189 - DNA, 491 bp, Zea mays
  unsure (1)..(491): unsure at all n locations
  Clone ID: MRT4577_76755C.1
cttccgcaattaacttatcgaccttcagaatggagaaccttgacaccctgaaagggctgaacggtggccttggttttctggggcctggtgggaaccggcggcttcaagaccagccgggggtgggggtggcaaaaaccaacggttcatttaaccgcttccgtttattaggccgcttccgtctattttggccgccgaacaagaagccgaagcctgggaataacccaattaacccaccgaagttaacccggggccagaagttcgaatcttggggggtcggaagggccggaagcccgttcttgggccgtgcggcaagttcctgaggcaccagtgcagcccggcggcaacgccctacagctcgccacagtgccaggcgctgcagcagcagtgctgccaccagatcangcaggtggagccgctgcaccggtaccaggcgacatacgggtgtggtcctgcagtccttcctgcagcagcagccgcagggcgagctcgcg

SEQ ID NO: 159190 - DNA, 1523 bp, Zea mays
  Clone ID: MRT4577_76756C.1
ccggccgggggaaggttgctccgcgtgtgcgcgctcacccgcctcctcctctccttcgcaagacggcaaagagccaaagaggagtcgccatcgcccgccccatctagtcggtgtcggtgtggtgtgtgggggcggtgctgcgcgtgtgcgctcctctgttcggcaggactccttcaagcagaaggggcggagcagcatggcggggcgctacgacggcaaccccttcgaggaggaggacgtgaaccctttctcggaacaagcgcgcggcaaggctggcgggcagtccaacttcggcggtggtgcgttttacatgcctaacaccagaaacatgcctcctgcatccaattcgcgcctttcgccgcttcctcctgaaccagcagacttcagtgctacagtggacatacccctggactcgtcaaaggacctgaagagaagggagaaggagctgcaagcaagggaagcggaattgaacaagagggagaaggaactaaaacggagagaggaggctgcagcgagagctggcattgtcattgaggagaaaaattggcctccttttctgccactcatccatcatgatatcaccaatgagataccgagtcaccttcaaagaatgcaatatgttgcatttgcgtcgtttcttgggttggtttgctgcctcttctggaatgtcatagcagttactacagcttggatcaagggggaaggcgttaagatctggttgttggcaataatctacttcatatctggtgttcctggtgcatatgttttgtggtatcgtcctctatataatgcaatgaggactgatagcgcattgaagtttggattgttcttcttgctttacgtgttccacattcttttctgcgtattttctgctgtggctcctcctgttgtatttgaaggaaaatcattggcaggaattttgccagcaattgatcttattagcgtgaatgctttggttgggatattctactttgttggatttggactgttctgtctggaatcattgctcagcatctgggtcatccagcaagtgtacatgtacttccgtggaagtggaaaggctgcagagatgaagcgtgatgcgacgaggggtgcaatgagagccgcattttaagtgtggtgtggtattttttttgtgatgacagtcctaggcccaagcgcatacttccggtggataggttgtgcaccgaacaaaaagcagatgtttcttccttggttgctgactatgataccaaactgccagtaggttatcatgatgttacaagtgacattatatcactccctgtcctgatctaacaagaatggggaatgtgcagcttttacagctttacttaatcgttttgttcttgctagttgaaatgtggaatggattatgaatcaagtttagttaagttgtacagtgctgttaactatttgtactccttttgaacggctatttgtacttcgttggaacaataatacagtggtgatattggcggaagcatttggcaaggcgcaaaaaaaaaaaaaaaaaacccgcggcc

SEQ ID NO: 159191 - DNA, 190 bp, Zea mays
  unsure (1)..(190): unsure at all n locations
  Clone ID: MRT4577_76757C.1
aagtaggngaagngacgcccacgnaaacacataggtcaggacagaaacaagacgaaaaccaggaaccacagacagnagcgccacattgaggaanaancgggaaaggaagaacggcgacgcgaaggggccagaangacacaaaggacagaatgccgaccccagaagncacccgaacaaggcgagggagggc

SEQ ID NO: 159192 - DNA, 863 bp, Zea mays
  Clone ID: MRT4577_76758C.1
tttctcggtacgcgcgcccaatcctccgcctccctcatcttggcgatcccaccattgcccgggcacatatctactttccttatttggcaccgggttttttccgagaatcagtggggtattcgctacttcactcctctttggatctggacggggcgcagatctgaccacgtctcggcgatggcttgcagtatcgccgtcaccgacaccgctagtgcattttttctccttttttctagcctaatgatgcaatgctgcccttgaacctattgtgcgtggctgtggttgaagtttttattgatgggtttccttggtagcaacaaacgcgcggcaaggctggcgggcaatccaactttggcggtggcgcgttttatatgcctaacccccaaaacgtgcctccgacatccaattcacgcctttcgccgctccctcctgaaccggcagacttcagtgctacagtggatataccccttgactcgtcaaaggacctgaagaaaagagagaaggagctgcaagcaagggaagcggaattaaacaagagggagaaggaactaaaacggagagaggaggctgcagcaagagctggcattgtcattgaggagaaaaattggcctccttttatgccactcatccatcatgatatcatcaatgagataccgagtcaccttcaaagaatgcaatatgttgcatttgcctcgtttcttgggttggtttgctgcctcttctggaatggtcatagcagttactacagcttggatcaagggggaaaggtggttagaaatctggttattggcaataatttacttcatatctgggtgtcctggtgcatatatgttttgtggtatcgtcctctgtaaatgcaatga

SEQ ID NO: 159193 - DNA, 831 bp, Zea mays
  unsure (1)..(831): unsure at all n locations
  Clone ID: MRT4577_76759C.1
accgccgcacggctcctccccccgaccttcctctcgctttcgcccccgcccccgcccccttgccgccgccgccgcagcgattctccgagccgagtccttgctttgaccagccgcgtctcgccgccggccgggggagcgtcttcggcggggtagctccggcaatcgatcgtagccgggggataaagtgggctccgtaggggagtcctaggggggggtgacaggggggttagatcgggcaagatgaaccgctcaatatcctccgccgtgacccctgctgatgctgccgctaaccctaggtttcctactcttttgcccttatctcacccgaccgatattctttttctcctcatcgatattgaagtagtctatgctcagaggttcctccattagcttagtgtaaatattagacttgttggggtttagtttgctagaaggaattagtctctgcttggtgttcatttctgcttgctacaatggctgcgatgaacgaaaaggtgttggctaaatgtggacagaatatagttagcctcaagaggaagcgggacagccccgctgcatatcatgctgatgcctgccacacctctcaatcgcatcagcatcctactggaaactctgatatcaggttgtatgttggtgaagatcgcaaggcgaacatcgcgtgccacttcaacaagcagattttacagagctatcagaactacatgaccagtgcatcacctaagcgtattctgctccgccaaagtggcaactgggaaagaatttccaganaaaattgtcaagctggctcaagttgatttccggacaaagagaccatcacagaagtaggataca

SEQ ID NO: 159194 - DNA, 445 bp, Zea mays
  Clone ID: MRT4577_7675C.1
ggctgctaacgccgctggcccatcctatctcgccctcgggccacctgttaaacgctagctccgatgccagtgagccaccgccctgccgcggcttgaggggaacaccagatgcactcggacagggagcgtagtgcacagctcgcgagaaggggatttgttaatggttgatgccgcacaagaggactcctgccatctgggtcaaaacagataccaccgaggcgttagagggggggaccaaggctttcaataagtttcagatgccgacgcagattggtgttatgatccgcgaccagcacggcatcccgcttgtcaagagcgtgactggtattaagatactatcgatactcaaggcccatgtgttgttgctggagatcctggagggtctctacttgctcattaagaaggcgtttgttgcttattaagaatgtggaggggaataggaagg

SEQ ID NO: 159195 - DNA, 162 bp, Zea mays
  Clone ID: MRT4577_76760C.1
gtgtgtgggcctgtgcttgcctctttctcctttggtcttgtgcgtggtgtgttttgcctttgtctggcttgggtgcttgctgggctgctgccgcgtcgggctttctgtgtttggggtctgcttacttgtccgctttggctgtgtcctctggggctccgtgct

SEQ ID NO: 159196 - DNA, 146 bp, Zea mays
  Clone ID: MRT4577_76761C.1
atagagaactgtacttgtgggtgttgattcttgtatggtgatgtgaatctgttttctatctgaactgttgcattgcttactactagcttgatttgaaaatgggttgtaattaccgctgttttctttggaatttactcctaatagat

SEQ ID NO: 159197 - DNA, 520 bp, Zea mays
  Clone ID: MRT4577_76762C.1
tgctcaggtgagaattgcagtcaactgcggttgagagctgatccgttctcatgacttgatcaacaattgatttgccatgttttaatagcagcctgctgtataattttgcacatactgttgaaattcttgattttcttgatactctgcacactgtactgtaagtacattactttcatgtgaggcttgctcctttatcaatttgatggttgggcaatcggcctttaagaacatggacccatccttgaaagttcaggattcaaacatttggcttcaataatataactgagcattgtacattgttggaatatatttctctctcccaatttatgcctgtttatccatgtaaatggccaccttcgatttaacttctaaaataaactatggttgtctagtactttgtgaatacccgccagccgaaaattttagtacttcatgaaaagtattgcggagttatgacaattaggttggatgtccatttactgattagattgcttcagcactgaatggtcccagacaaaaa

SEQ ID NO: 159198 - DNA, 232 bp, Zea mays
  unsure (1)..(232): unsure at all n locations
  Clone ID: MRT4577_76763C.1
aaatacgacccacttctccgtttttttttagcccnccaaccccaagctccgaacgccgtatttaaaacgcggcccgcctctttaaaacctatatggcacttcccaatcaggggaccgttgattaccccatctttaagctctgtatcgtaagcgatggtggaactttttaaactacatttctgaacaggcatcttactgtatagtttgagaagaaatatgaaccacccatttt

SEQ ID NO: 159199 - DNA, 288 bp, Zea mays
  Clone ID: MRT4577_76764C.1
aaaaacagcgcagtcctggcaagaaaagctcgatgccagtctgccattgggatggccgtctatttggccatggtgtgcatgctgatcttgctagcacatcgctctcctacacgccagtgcactcacctgtcagaagggataaagagatggactgatcgcacttttgaggagggatgcctaccaggggacggcagtgtttaagggctatcagtagcttggggagaccgttgccctgtacgatagtgacaaggacaagtatgcacccttcgaagacattattacagctgc

SEQ ID NO: 159200 - DNA, 528 bp, Zea mays
  Clone ID: MRT4577_76765C.1
gcccacgctcggtggttcctctacgccgcgcggtgctcgagaagacgggtttctgctcggaccggcttgcagcgcggcgatcacggccccctttacctttgagcctctcagcagggcgggattcgtgcccgtcatccatacccgcatgaggaagagtgacaccggcgcgtctttggacggcaacttgtacgatctgcctttcgggcgccttggaccagtccaggggacgcccccaatggaggcggccattggcggctgggactctgttgtgagccgcctcaagctctcccgctttgtcgtggcctccgtcctcgttcacatattacacgtgtttggcttggcgcttgggcttggtgtggagtggaggctgctgtatttgccctgggacggagcttatggcctatgcgttggagttgcacatactacagttgttggatatccagactggatagagcctgagctgaacctactgtttattagtgctgccactgagggcgcgttgatgtggctgataatagccataccggg

SEQ ID NO: 159201 - DNA, 283 bp, Zea mays
  Clone ID: MRT4577_76766C.1
tcaccctagctcctgtctcgcagtcacgaccttcacttacacatcttccccggcggccgcgcggtcagctgaaccatggcggactccaaggccacctcggcggtcaccatccgtacccgcaagttcatgaccaaccgcctcctggcccggaagcaaatcttgcttgacgtgatccacccctgccgagcttacgtctactaggcagagttgtaagaaacgcttgacaaggcgtactaggtgaatgacccctgcaccatcttagtctataagggccgcacccact

SEQ ID NO: 159202 - DNA, 284 bp, Zea mays
  Clone ID: MRT4577_76767C.1
aaggacgcgtgggcggacgcgtggggggtgccagccacgctgctgctcatgttcgagcatccgattcacgaatccgccgacaccgtaaagacggcgctgtcccgagcgctggtgtactaccaccctttcgccggtcgcatcgctgccggagccgacgcccacgccgacggcggcaagctccacatctggtgcaaccgcgagggcgccacattcgtgtctgcgcacgcaagctgcggggtgcaggaagtcatagggctggatcgctcgggagcaccgacgacctt

SEQ ID NO: 159203 - DNA, 788 bp, Zea mays
  Clone ID: MRT4577_76768C.1
gctgttccgttgctgcagaaggttgcaaacatgaattctgcacaagatgtgctctatacctttgctcaactagctacacgtcagcgagcccagcgggtgcaataccatgccctctctgcagacatccgatcatctcgttcaacaccctccccggcacgagcccgataagagagttgccgaggaacagcctctcgctgtcgttctgcacggcgtgcccagccgtgagctccgactcttccgccccggtcggcgcccatccgtgccgctccgagttccagtgcgtccgcctgccgccgatgggctcgtcctccttccgctcgctgagctgccagaggataccagcgatgaagctgcacccatcgttctgcatgggttccatggacacgaacccctgcctcataaggtgctcgaggttcgggtctggccttgggcggtcggcttcccagagagagggggctaccagaagagcttggcctgtgacgttcagccccattgctgccaccggcagctgaattggcggttttgtgccccccgtttttttgaggtcgggttttgtttgccaattttttggttggtttgatataatgttcaccgttgtgatcgatatggtatgaactcgctggttccaactccttgttattcggagtacttatatatgtctgatcagaagcagcacgtaactgcttactaccttggtatgtaaataaccccgtggtgtttgttgtatgtttctgggaggcaatgaaatgcaaattaaggaaaaaaaaaaaaaaaaaaaaaaaaaaata

SEQ ID NO: 159204 - DNA, 747 bp, Zea mays
  Clone ID: MRT4577_76769C.1
gtgcggcgctcaggcggcggttcagaacagactccctacgcaaatcgtcttgaggactacaactactatcatcttcctcctcctcctcctcgtaacagacacagatcgtcgctccccttcatctctccgtggaccgcgacgggcatccctcgtccacggacatcatgctagtccataaatctagctcgacagatgcgaaaaatctggtgtattcttgctgtctatcgaaggcggcccaaccatgggcggtattgtcctctaccgtccacacattgaagactccgccctcgaaatctccaagcgccgcattcaggactgcaacacagaaactgtgcctatctatcaacatgatctccatgatgatgtgaacgaactgaggggcatgaaactcttgttcagcagtgatgcggttaatcacggccatgacgttgacataatccttgctcccgtgaacatcccaatgaagaccggtgttctaggagcaggcaaggctggcgaactaacatactgcgagagcgctgcccgcatgagtcttcatgaatccgagtctgacaacatcgttgcagagaagtctagtgaccgtgacaatagcgctgaggctatgagagaatatcttgactacacatcggaaggcgatgcaactaccagatcctttccaacccagagttccttgcggagggtactgccattgaggacctgttcagcctgacagagtgctcatcggtggccgggagacccctgaggcag

SEQ ID NO: 159205 - DNA, 256 bp, Zea mays
  Clone ID: MRT4577_7676C.1
gaaaaactcaccggggtagtactaaatagtaaaaagctgtaataccctttttttttttctaccaatgataagtaagggggggttcataaaaatatgaacaggtcgtatcgtgaagataaagtattggtagatttatcaagtaacttctgccacataagcggtgtttgaggtcactataaatgaaatccccctttccggtttttaaacacatcgtgaattgcttaaaccaaattaacttagttaaattgaggaggat

SEQ ID NO: 159206 - DNA, 126 bp, Zea mays
  Clone ID: MRT4577_76770C.1
cccacgcgtgcgcaatcgcgtacgcctctacttgatttttttttacaacttccaaaacttgcaaggctggttggggcaacttcctcactacaagggcgacgacgcttgcgtaccatgatatagcct

SEQ ID NO: 159207 - DNA, 523 bp, Zea mays
  Clone ID: MRT4577_76771C.1
cctcgaggccggccgggatctcgttcgtaacatttggtatccgattaagtcatcctagatctacttgttgctgtgccacggcgacaccgatcttccacgatggagcaccaagacgccgccatccgcaagctgctcgatgaaatgcgactcatggaggcgcgcttgtccgagcgcatcagcggacactgcgacgatgtcgagcactacctagacgagcactgtgaagagccctgtgacgagacgtttcaagaagagccctgtgatgagacgtctcaagggtcccatcttcgacgtggagctctgtttccaccgccgcatcctcaattcggatccaatctctccctacgactaggtcgatctgctttcggtcgtccgtgtcgcggccccgagcttccgggatttgcttcctccactgggcatccgtgctgtgccgagcagctacgtcgcgagcgggcatccacaggaggtggtcggcgtcgacgtccgagccgacacgctgaaggatcttttcctgcttcgcctc

SEQ ID NO: 159208 - DNA, 228 bp, Zea mays
  Clone ID: MRT4577_76772C.1
gctacaccccgactgcacaagcgacacacggggggcttttttaatgtgttttgtgtatttcccgcccacccccagacgctcttgatacccgtatggtgggacagcaacgccgtagggggactcgggcccatgttcataattacccacatcaaggagcactgctcgcgggggctagagcgaacggagcctgatgagccaaccatgtactacctctggctcgcaggagta

SEQ ID NO: 159209 - DNA, 2427 bp, Zea mays
  Clone ID: MRT4577_76773C.1
ctcccggccggcaagcaggatcaggggcccgggcgtcccggatccttgcaaccgttccgtttcccgcggccgggctggcttacttctgcggcgctcgttgccatttcgggccaaatttgttgcgtgaagcggggggatttggattgaatggcgcgcgttgcttccaatctacgccctcttgggaattcgttgagaataggaaatcgccgtatgagaaagtttgttgggtgggtcgccagatcggggcaactccgtcgttcgttgtcaacagcatgccagcgagatcgaggagttgctagcgtgtgccgcctcgaggtacaacatctaatgctacaatatataatattttgctcagtgaattgatcaagtttggcgcacgagtgtcatgctcctaggttttgtactaattgaagaagtagcaaatgtagttcgtggtggtggtttaagtcatgtctgatgaaattgatgcttatataagaggggttctttgtgctttcgaaagaattctgcaggaaaatcgactggcatttgttgttcttgggtacacaatgaaagatgggaaggcatattttcccccacatgacagtatctatacatattgcagttgaaatggaaataattgaaatacaaggtatgtgcaggtgcagtctattatattggagttaagagagcgctagcttgcagtcacactcgatgaagttcaaggggaggcgggggagatacggccggccggggaattgtttaatcccccgtcaccggctcctatcgccatcaccccacccgtcccccttggtccaggcgcaggcgcgagcgcgacgtccggcgtccggcttcggcggcggagtggagcgattccgatccacacagggaattccatcgctgtcatggcgtttggtggcgctcctcccggccgtcaagctggatcaggaaatcgcacggaggtgagaagaaacgggtgtggaactagagctaggcgagcctgtctggtacctcgcggaggagatggacgagaacgccacgatggagagcaagctgggtcccgcaggtgtgttgggatatcaagggcgtgcaggtggcctgtgccgatggccgcagcatctgcctcgacgccttctgcgacagcaacccctccacgatgaccaagtgcaagcatgactaccatcttcagtgcattcttgtatggtgccagagaagctcccagtgccccatgtgttggcagcatatcagcatgaaagttcctatgagccaagagctactagaggttgttgaacaagacgaggaacatccgagctaatccttcacgtaatactcgctgttttcaaccatcaaatgactggggaattttgagatccctataggttcagatgatgcagcaacttgaagaacgcattattcagcacttggctgccgcagctggcagtgcgtaggtcacaccgtcatcataatagaagagatgggcaccagagcagatcagaagcaagtagccacccacagtttctggtgctctcagcagacgagcgcacaatctcaggtcaagaaggggactacgaacaagcatctgctgtagcttctggccgccctttacgtacacttgttgaacaagaacgcactcgagggttagcggatgcttccagtccatctctccgttgttctactcctgctgatagtactggtagatcaaacaataggatttctgggatcgaatctacacctgtggatcaagacggaactggaccatccgctgtacaatcaatggtacagggatttcataatcaaagtgcaagtggatggagggagaggtggttttctcggagcaactctttactggatcttggttctgaggtgaggagggaggtcaacgcggggattgctgcggtgtctcgcatgatggaatggcacgatgcaagggacgggacgggagcggggccttctcctacctctgcatcaagatctggttctcagtgaaacactctgcacttgaaaggaccgatgcaaatgtaaagattaaggtatgtgctcatgctgtgctaatgaaagccttaaattcagtgttttgttttttttctggtggcgtactgtcactgttgactggcctacggatctgagtttttgtgtaattgtttggaagcaattccattgtcgccgaaatggcgcggtagtttctctgactgctgctgctaaatactaggaactttagttttcttcaagtccaaagggtcagagttgagagcacctgagatccggcgatgcttcatggccacggtcccccagaggctattcgcaatagttgactctaaatttctctctatatatcagttttttgtgtcacattatcaacatttcataccttactttttttaggagcagctattgtttgaggagcactttaggaagacaatcacctgcaacttctctagcatatatgaa

SEQ ID NO: 159210 - DNA, 446 bp, Zea mays
  Clone ID: MRT4577_76774C.1
acccaaaatggcctgggggggaattggttgacagaaagaacggggacttaaccaaaaaaagaaaaaaaaaggtggagccgggggggggatgggggacccggcgcactgaaaccgggccccaccaccatttccacccggcgcaaattttttttagcccaagttatttggagcccgcaccggaaacgttcacccgaaaaaaactgtttgttacgtaccggggttcgttcgaaacacacacccccacccccgggggggcccccgttaccggggggttctgaaaaaaaaaaacccgtgttatactgccatgtacccccgcgaaaaaaaccccgccacgcgcgcaccccaattccctgggggctgggccctggccccccccctttggtgcccacggcctcacttggtgggctttttgggctcctaaggaggaaaaacctcccccttggggg

SEQ ID NO: 159211 - DNA, 741 bp, Zea mays
  unsure (1)..(741): unsure at all n locations
  Clone ID: MRT4577_76775C.1
ggcgattggttccctcgaggccggccgggacctgtcattgcttcaaggggaggcgggggagccacggcggcggagggaattgtttaatcccccgtcaccgtctcctatcgccatcaccccacccgtcccccttggtccaggcgcaggcgcgagcgcgacgtccggcgtccggcttcggcggcggagtggagcgatcccgatccccacaaggaattccatcgctgtcgtggcgtttggtggcgctcctcccggccggcaagcaggatcagtcgacgccctcttggcttgcctttggctgtaggaaatcgcacggaggtgaggatacacgggtgcggaacgagagctaggcgaacctgtctggtacctcgcggcggagatggacgagaaggcgacgatggagagcaagctgtcctcggcggcggccttcgtggaggggggcgtgcaggacgcctgcgacgacgcctgcagcatctgcctcgacgccttctgcgacagcaacccctccacgatgaccaagtgcaagcatgactaccatcttcagtgcattcttgaatggtgccagagaagctcccagtgccccatgtgttggcagcatatcagcatggaagatcctatgagccaagagctactagaggctgttgaaacagagaggaacatccgagctaatccttcacgtaatactgctggtttccaccatcaaatgctgggtgaatttgagatccctgtangtgcagatgatgc

SEQ ID NO: 159212 - DNA, 406 bp, Zea mays
  Clone ID: MRT4577_76776C.1
cgcactctcagcagcttcagcgtcaacggcgcctacagcgagaaaaagcccgtcggcgacgcgtgggcggacgcgtgggggcgcacacggatggtgttccacaccagtgcccatgggacacaggcctagccaagcagcgctaccgtatatctacatgcgaccgtgggacagcgtcagccggaggccggagcagctcgatcgggtagttgccgcgcgaccgtcagagacctctgtttctttgggttgggttcggtgtttctctttctatttatgttttactaattagttgtccgtgtgttgcgacggtacataaacaccattgataaagcattagtagtaattaattttagatcacttcatgagatgcgctctgccgacatgaggaaaaactcattcattttttatt

SEQ ID NO: 159213 - DNA, 849 bp, Zea mays
  Clone ID: MRT4577_76777C.1
cgcgtttcccttcacggaattgagagatgaagctggtgtcacatactcacatccgcagggatgggtcacgttgcagacacttcctaatgaagtccttgtagtgctgcgaaaggtaatcagattttgttagtagacaacacaaggaaggaagcacaaggaagtttaacctgtatagcacaaggaagcaagcagctcagcctccattttatttggaaaagtcttatacttatcagaagtaagtttttgatcctctattttattacagattttgtgattccagatctgttgacctcaagccagattgggtacaaccttattgttgttttgttgaccaactctagaaagaaaagctaaaactctaccctctgcgcccaccttcaaggtcgctccctatcttccttcactctccatcaaagctttgctcgcatcaaattaaatttcttttcgttacgaatttagcttcattatataatattttgctcagtgaattgatcaagtttggtgcacgagtgtcatgctcctaggttttgtactaattgaagaagtagcaaatgtagttcgtggtggtggtttaagtcatgtctgatgaaattgatgcttatatagaggggttctttgtgctttcgaaagaattctgcaggaaaatcgactgcatttgttgttcttgggtacacaatgaaagatgggaaggcatattttcccccacatgacagtatctatacatattgcagttgaaatggaaataattgaaatacaaggtatgtgcaggtgcagtctattatattggagttaagagagcgctagcttgcagtcacactcgatgaagtcctatagggctagattttaaaa

SEQ ID NO: 159214 - DNA, 826 bp, Zea mays
  unsure (1)..(826): unsure at all n locations
  Clone ID: MRT4577_76778C.1
ccccacccgtcccccttggtccaggcgcaggcgcgagcgcgacgtccggcgtccggcttcggcggcggagtggagcgatcccgatccccacaaggaattccatcgctgtcgtggcgtttggtggcgctcctcccggccggcaagcaggatcaggtaccctcccgtcccggatcctcccaaccgttccgtttcccgcggccgggctggcttagttctgcggcgctggttgccatttcgggccaaatttgttgcgtgaagcggaaggatttggattgaatggcacgcgttgtttccagtcgacgccctcttggcttgcctttggctgtaggaaatcgcacggaggtgaggatacacgggtgcggaacgagagctaggcgaacctgtctggtacctcgcggcggagatggacgagaaggcgacgatggagagcaagctgtcctcggcggcggccttcgtggnaggggggcgtgcaggacgcctgcgacgacgcctgcagcatctgcctcgacgccttctgcgacagcaacccctccacgatgaccaagtgcaagcatgactaccatcttcagtgcattcttgaatggtgccagagaagctcccagtgccccatgtgttggcagcatatcagcatgaaagatcctatgagccaagagctactagaggctgttgaacaagagaggaacatccgagctaatccttcacgtaatactggctgttttccaccattcaaatgctgggtgatttttgagatccctgtangtgcagatgatgcagaacttgaaagacgcattattcagcacttggctgccgcagctgcagtgcgtag

SEQ ID NO: 159215 - DNA, 667 bp, Zea mays
  Clone ID: MRT4577_76779C.1
cccacgcgtccgcccacgcgtccgaacaagtgtacgtaaagggcggccagaagctacagcaggtgcttgttgaacaagaacgcactcgagggttagcggatgcttccagtccatctctccgttgttctactcctgctgatagtactggtagatcaaacaataggatttctgggatcgaatctacacctgtggatcaagacggaactggaccatccgctttacaatcaatggtacagggatttcataatcaaagtgcaagtggatggagggagaggtggttttctcggagcaactctttactggatcttggttctgaggtgaggagggaggtcaacgcggggattgctgcggtgtctcgcatgatggaatggcacgatgcaagggacgggacgggagcggggccttctcctacctctgcatcaagatctggttctcagtgaaacactctgcccttgaaaggaccgatgcaaatgtaaagattaaggtatgtgctcatgctgtgctaatgaaagccttaaattcagtgttttgttttttttctggtggcgtactgtcactgttgactggcctacggatctgagtttttgtgtaattgtttggaagcaattccatggctcttatggagattagtgttataacctcgtcgccgaaatggcgcggtagtttc

SEQ ID NO: 159216 - DNA, 358 bp, Zea mays
  Clone ID: MRT4577_7677C.1
aaatgaactggggttttttttattaatattggaaggaaaatttgctttaacagttgcaaaaaaacagactgattgccttaccaaatgtaaatcaaaacccaaaccactggttgcgggggaaaacaaaaaaaccaccacctaaagaacaaaaagagggccaaacctccccccccccgcaaaaaaaccccccatgcctgggggaagcattaacatagagagcctcaccttccccccgggaggctatccccaaaccttttaaaaaactgcgcacacaacaacaatttccccccccccgaaaacagtggtggggccgaaacctccctggaaccaaacattcaaggtttttgaccctcccctt

SEQ ID NO: 159217 - DNA, 1115 bp, Zea mays
  Clone ID: MRT4577_76780C.1
gtgggcggacgcgggggaggccgtaaaaggccttggtcttttttttccactcttccggccggggttgtgtcgacgcttaaaaagtaaaaaccctccggcggcggcggggttcctcgaggccggccgggagcggaaggtcccggcgctctcatccggtgaaaataaagaggggaaacggacaggagccgcctcaaatggacagcggaagcgattccgacggcgctcccgaggagctcacggctgtgcagggtgttgcgaagcacgaagagatcagtaaagtcgagaaagacagtgttctcagagtaacacgggaaggaaaggaacggaggaaacgttgggcccaacgaagaacatcctctaaaccagataagaaggcgccaaaggaagtagaagatgaagatactaaaaaaagtgaggagcatgaggagacaaatactatgcctggcatgctccccactagtgtaattgaaattctagcagctcgtgagaagcaaaccttcgcatcagattccgaggaagaaaatgtaaagcagaaggtccagaggagaaagaagagaatgaaaactgatgggcctgaaactattctgctgaaagatgtccgttcaacgcaacacgtgaagaatgcccttgatttcttggagcataggaaaaatcgtgtcccaaggtcaaatgcagttttgaagaatgccagtaaggctttgcgtctcctgtcttcgaaaggtaattttctaagttaagcgtgtggtagaatagcacattttctgaatctgtgcttagaccatcctctcgacatcagacatggtcaagagacttaggaccaatgtgttggaatggaatctacctggcatgtgaaatgtaatgcagcatatccttttgtgtgaatgtgatgattagcacacatgttccttgtaagaaatccaaggtttgtaatcattgaatatatttgagtttgagttatctatttatatgtttgagttttggtgaagaaaactctgaaagatctccaaattttgatagccctgtggcacttgtatcatactatcagagggttgtcgtagtgacttgttgtaaactcttgctattaccattcgtctgaatatgttttacctgtgctc

SEQ ID NO: 159218 - DNA, 390 bp, Zea mays
  Clone ID: MRT4577_76781C.1
ggccgcgggttttttttttttttttttcttttttttttttttttttttttttttttttttttttttttttttcttttttttttggggggaacaaacggttgtttcattattgattcaggtagaccaacggggccaagcccacacggttaattattattattcccatgattattattacagtaggcggggggggccggactaagcagaaaaactttggcttaccttgacagagggggcacctgccaacccttttttggggaggagtgactacctgcatgggccatggggaccacgggaagcccgtcgcctaaaaaggaagagaggaccatggatccagcagggagcaggaggccagcccagtatgtgatggcgaccctctcgttaatctgg

SEQ ID NO: 159219 - DNA, 607 bp, Zea mays
  Clone ID: MRT4577_76782C.1
cattgctgaaacggagcagttgttgaagaaaatgtatatagctgactacctcgacaagaatgggcgaactgtgtttgtagccatgccgtcaataaagagcttagttccagcgaaggagcaggtaaaactactagtttacaacttggaaagttgtaccatgagctcagaaaatgcacaagaaaatgttgtttgggtagttgatttcagtggatggacagtatcaagtactccattggcggagtcccgtcaatcagtgcatataattcagaactattatccagggttgatagatgttgcaattctttgcaaccctccaaagatgttcgaatccttttggaagatactaaattacttcatcgagccagaggtgaaagagaaagtgaaatttgtctacactaacgattccgagtgccagagaataatggctgacatgtttgacctggacaagctggagtctgcatttggtggctgcaacacctctggtatcgacattgtcaagtattctgagagaatgcaaagaagggatcagactaggaatcttcatattccataagaccataatggcaaatcctcttcatatataccattgcgcttgcatagttcgtct

SEQ ID NO: 159220 - DNA, 273 bp, Zea mays
  unsure (1)..(273): unsure at all n locations
  Clone ID: MRT4577_76783C.1
gcagcgcgtaatgaggatcgccgaacagaacagcaggaagatggccatcggtctcgtggcgtgcctggctctgtcagctgccatcgcctatgtaatgcagatgccctgcccctgctcggggctgcatggcttgtactgcgctggctcccgcctgacgacgatgatgggcgcccgctgactgtacccctacgcggagtacctgacgcagacccactgcagcccgctggctgcagcgccctactacgccnggtgtggtcagacgagcgccatgta

SEQ ID NO: 159221 - DNA, 238 bp, Zea mays
  Clone ID: MRT4577_76784C.1
tttccctcaatcgctaacaagctccttatagattcccaattcttcccccataccttgccatcaatgaattgctacagtataacgaaaacccacctcttcaaccctatacgctacaacacgcaatcgcacccagcatcatacctttatcacccttgtttcaacaatacccaaccctatcttttgttcagacattggttcaaaccatcatggcacactatctttaccaactcttgctacc

SEQ ID NO: 159222 - DNA, 411 bp, Zea mays
  Clone ID: MRT4577_76785C.1
gggccgcgtacacctggacgcctcctttctcgacatgcgggctgttgccttgactcacgtgctctcccctcgtcgcctgcgactccacctcccctacctgtgctttgagagaggagagcccggacccggtatgaccgcacagcaagcgcgaggcagaggaagagcatggcggcccagccgacgaggcctctgagactcagcaaggagacctgaacacgaatggatctctgcgccgctgcaaccccggcacgtcgaagccatggggtccggggactggctcaagacgatcatgatcaagagaaaatcgaagcggggaaagtcaaagcacgcaaagctctctggttaagtaacaaatggatgtatccagacatatcagaagttggacgggccttgttattttttgttgtccat

SEQ ID NO: 159223 - DNA, 178 bp, Zea mays
  unsure (1)..(178): unsure at all n locations
  Clone ID: MRT4577_76786C.1
caatnnngaggtgngtcaagttctgatcgtanccatgcgacactcnagaagatctaggnataanagncatgatananactcagcttctcctgatgccatcagtcnctcaantagatgctacggataaacatctccgtcctgatacaagcccacgtcatgccaaccggcattcanagaa

SEQ ID NO: 159224 - DNA, 519 bp, Zea mays
  Clone ID: MRT4577_76787C.1
ggggggggggggggggggtaaaaaatttttttttttgtttttttttttttaaaaaaagggactcctccttttgccttattattatttcatacatatatatatgccctgggggttaattccagccctggaaaaacatattacttgcttttgggggggggggggggtcaacctttccacaaaccttcttcaaaaaattcagggaagatatccacttgggtccacaactggacaccattgggggcattcagatacccggggggggaacttcggggcctctcctacttttttacaccattttaggggggggggggggtgaaggatcttggggggtccaagtccttttttaccacattcgccccaggggaagaaaaccaccttcagtcaggagcccccactccaccaggccctttatagtcacctaggggcaagtgggttggtgccctagccagcgctgccgccacccccttgaagggaaagagttggaccccggggggtgctcccctggcttacgaggccggg

SEQ ID NO: 159225 - DNA, 415 bp, Zea mays
  Clone ID: MRT4577_76788C.1
acggccgtacggttctattgaccacacctccctcctcagcttcttttttcaactttactgtcaaatacctctaccttgtggacgggagcaaacaaaacctgggactcactacttcaccggctgacagactcatactgatccttccataaaccaccataacactgaagaaggactatgcgttttccacgtactacgataaccattctgggcaccacctccacgcgcacgacgctgagcgccccacgaccaagtacaacatcctctttgtcaacctgtacctcttctacatgatgcacactgccgtaacgctccctatagattagcccaaagttctacttctacaccacgcgggaccgaaacgtctcaaacgggtacaagactaaccgacccaaaaacaacatcatcattaacgcca

SEQ ID NO: 159226 - DNA, 999 bp, Zea mays
  Clone ID: MRT4577_76789C.1
gtgggcggccacgcgctcaagaccaacatcaccacgctggggcccctggtgctgcccttctccgagcagctgctcttcttcgcgggcgtgctgttccgccacctgttcccgtccaaggcctccacgccggcgccgccgaccaccccaggggacgcctcggccgccgcgccctacatcccggacttcaagcgcgcgttcgagcacttctgcatgcacgcggccagccgcgacgtgctggagcacctgcagagcaacctgggcctgcgcaacgccgacctggaggcctcccgcgccgcgctgcaccgcttcggcaacacctccagcagcagcatctggtacgagctggcgtacctggaggccaagggccgcgtccgccgcggcgaccgcgtctggcagctcgccttcgggtcgggcttcaagtgcaacagcgcggtgtggcgcgccgtccgccgcgtgcgccgccccgcgcgcagcccctggctggactgcatcgaccagtacccggcgcgcatggacgcctagcacgtacctgcaactgcaatgcagtggctgctatctatctatcgttcgcttcgctaccagtgcagtgctgcacttcaccgatggatgatggatcgggtatgatatggtataggacgcggtcggtcgatttgcatgcatgcaccaagtgttactataccgttctgaaggtacgtttgaactttgttcgtttgtattgcactattgcttgttgtttaagtagcggttaagggagggagacgtaccgctgtgctaccataatggaagtactactccggtccggtcctgtgtgagccttatgtacgtgcaattttaatgtgttttgatattacaagacttgacggttggcaatagatgttgctgttgtgtttcgattgatcaaaataagccccggccgatgcttctgaaattgatacgcatacgcatgtactaacaagtggcggagcctggaacaaaggaataaaatataagttaggctgc

SEQ ID NO: 159227 - DNA, 725 bp, Zea mays
  Clone ID: MRT4577_7678C.1
ggccgctttttttttttttttttttcttttttttttttttttttttttttttttttttttttttttttttttttttttttttttttttttttgggaaaaggccctaaccccacttttaaaaacccttaaaaaacctaaaaaaactaatggcccccacaaaaaaaaaaataaaccccgccaccaaagggaaaacccctaaaacccaacccgggggtaaaaaaaaaaccttaacattaaaattatttccccggggggtttattcaacaaaaaaataaaaaggctttaaaaaaggggccccccccattaattaaccccccggaaaaaaactggggccctgaaaccttgaggggttaaaaccggggcccctgggccggaaactggggctgggggaacccccccatggagcccccaaacccccccttggggaatgcgtccccccccggggcccgccccccccccgggaaaaggggggccccttggcccggtttgaaaaaaaaaacaaaggaccgggggttccccccccccaggggaaaaacccgggcccaggccctggggaagccccccttgttgaccccccaaattgggcccccagggttaacaaaaaaggcccccggaagggggggcacatggggcccaatggccggccttgagcccccccaggcccgcccccctggggtccggaaaaaaaagataacccccccgggttgggggggcccccccagccc

SEQ ID NO: 159228 - DNA, 581 bp, Zea mays
  Clone ID: MRT4577_76790C.1
gggaccaggcccgggcgagacaagctacctttcctatccgatcagaaatcctatcgatatcctcggcaaagcaaatagtccagcatgggcattacattaagtagaagtagaatttgctagttgtatacgaaccttcgccaattaaagcgagctattcctacaatggtgctgctcaatcctttacggctgtagttctgaatctagtgatcggctatggttgaagctttagtgccttgtagatgtcaaatagagatcaagcaaacatgcttccgcggggatcagatttaccagatctggtattagtctaacttactgaggtagtcgattggagaagagggccacatcacactctagacagatccgaagcgaaagaccagtatcaatctcttcccccgagccagccctgcgggtatccttttctccgccgctcttcagataagataggctacactcgaaaagcgtaggcccggcagttggtacgaaaacagaaccattagtggagtaagatcccgatcaaagcagagcggtctcatcgaaagaagcatatccaagagaagagacaggcaggcgcttaggccagt

SEQ ID NO: 159229 - DNA, 836 bp, Zea mays
  Clone ID: MRT4577_76791C.1
tacggatttttttttttttttttttttttttttttttaatagaacagattcctttgttccagggtccgccacttgttagtacatgcgtatgcgtatcaatttcagaagcatcggccggtgcttattttgatcaatcgaaacacaacagcaacatctattgccaaccgtcgagtcttgtaatatcaaaagacattaaaattgcacgtacataaggctcacacaggaccggaccggaccggagtacttccattatggtagcacagcgtacgactccctcccttaaccgctacttaaacaacaagcaatagtgcaatacaaacgaacaaagttcaaacgtaccttcagaacggtatagtaacacttggtgcatgcatgcaaatcgaccgactgcgtcctataccatatcatatccgatccatcatgcatcggtgaagtgcagcactgcactggtagatagcgaagcgagcgatagatagatagcagccattgcattgcaggtacgtgctaggcgtccatgcgcgccgggtactggtcgatgcagtccagcccaggggctgcgcgcggggcggcgcacgcggcggacggcgcgccacaccgcgctgttgcacttgaagcccgacccgaaggcgagctgccagacgcggtcgccgcggcggacgcggcccttggcctccaggtaccagctcgtaccagatgctgctgcttgaggtgttgccgaagcggtgcagcgcggcgtgggaggcctccaggtcggcgttgcgcaggcccagtttgctctgcaggtgctccagcacgtcggggctggccgcgtgcatgcagaagtgctcgaacgcgcg

SEQ ID NO: 159230 - DNA, 893 bp, Zea mays
  Clone ID: MRT4577_76792C.1
gggtcgacccactgccgtccgacgaccgcgctcttccgctccgtgtaccaggaggaggacgagcagcggatcaagggcctgtccatcagcagctgctcttcttcgcgggcttgctgttccgccacctgttcccgtccaaggcctccacgccggcgccgccgaccaccccaggggacgcctcggccgccgcgccctacatcccggacttcaagcgcgcgttcgagcacttctgcatgcacgcggccagccgcgacgtgctggagcacctgcagagcaacctgggcctgcgcgacgccgacctggaggcctcccgcgccgcgctgcaccgcttcggcaacacctcaagcagcagcatctggtacgagctggcgtacctggaggccaagggccgcgtccgccgcggcgaccgcgtctggcagctcgccttcgggtcgggcttcaagtgcaacagcgcggtgtggcgcgccgtccgccgcgtgcgccgccccgcgcgcagcccctggctggactgcatcgaccagtacccggcgcgcatggacgcctagcacgtacctgcaatgcagtggctgctatctatctatcgctcgcttcgctagctaccagtgcagtgctgcacttcaccgatggatggatcggatatttgatatggtataggacgcggtcggtcgatttgcatgcatgcaccaagtgttactataccgttctgaaggtacgtttgaactttgttcgtttgtattgcactattgcttgttgtttaagtagcggttaagggagggaagtactactccggtccggtcctgtcctgtgtgagccttatgtacgtgcaattttaatgtgttttgatattacaagacttgacggttggcaatgttgctgttgtgtttcgattgatc

SEQ ID NO: 159231 - DNA, 671 bp, Zea mays
  Clone ID: MRT4577_76793C.1
cctcgagccggccgggccgggttttcaaagaggggggccagctctgtattctccaccggggaccgtgacgctggccatggcgatccgggccacctcttgatttgtaatagcagtactggggtctgggggctgatcttgggaacgtgcatcatccggagcatctgatagtttacgagaacagcctccaagaaactatgccttccgagcttcgggagttaggacaaagatcgtaagctcggacctggataaaaacaacattccgcggagactacctccttcacctgcagaggctgaataacgagcatgcctgccgctcatggtacagcaagggagtgctgataccccaacggaggtttatggaatatctactgtgcatcttcttgatgcatcaatgaatgatttatgcgtgacgattcgcccatctggaccctatgagcaccgtgctcttatcatttgtgacaatgatgcacacttggatggtgctgatgtacagggcgtggtcatatatgaggccgaatgtcttagggcggacctcccacgacataatctgtagcaagcaatggacgaacaccgctaccatatatgaggactgtgccggctggcagtcctacatgcccgccgcatacttctaacttgtaggttgctgcctgaccgaaaagtactggatgtat

SEQ ID NO: 159232 - DNA, 767 bp, Zea mays
  Clone ID: MRT4577_76794C.1
agccatttacgcccgacaccgtctccacggccccagccgacaccgtcttcagccaccatcatctccttcgccgcagaagagattggagctgaagagaggaagcagcgcgtcctcgcctaaagccctcgccgccctctttcggctcctcgcctctcgtccacgcgcgacgacgtgtcggcaaacactcagtccatcccaagactcgcgaggcgatggtggacgcgtggtggcctctgctgggcgcggcgatcccggcgctggtggcgggtcagtttgtccgcatcaagcgccgccgcgacgaggagcagcgcctcaaggcggcgcgcgggcgggagaagagctccgacgaggtattcgtctgcgagcgcgtgtgcacctccaagcgtatgctcaagaaggtaggggccttctccaaggaccccataccggagacctgcgtcaccgtctgcggcgtctctgaactcgacgcctgcgccgacgcttgcgcgcgcaccgtctgcgtcaaccagcaccaggtgcccaattggaacgacgtctgcctcaagaggtgccagagcgagtgcctcaaactctcctcaaacctaatgtaatgaccatctcgctattgtgctgcgctccttatatgccaaccgtgaggttcttctctgttccgttctgcttctatccatatcatgcatcatgcttgaggaccttcagacactgataaccgaattggagcgagtgaaaaaaaaaaaaaaaaaaagaaaaaaaaaaaaaaaaaagcggcc

SEQ ID NO: 159233 - DNA, 332 bp, Zea mays
  Clone ID: MRT4577_76795C.1
attcggctcgagggcgcggcggatgttttcgacatgagcaacgagcagttcatgtcgggccagctcgaagaggccaaggcgacggaccctccggtcgcgccgtccaaggcttgctgagacacgctggcgggggcggacctcaagtgcctgtgcggttacaagaactcgcctgagatgggcgtttacaacatctatcccaagcacgccatggagcttacggccaagtgcggtctcgacacgactgccgactgctagcactgtgctagccaagccatgccaagcaggaaggtccacggcatcgctagctgtacgtgtctgtgtgtgcatctgca

SEQ ID NO: 159234 - DNA, 282 bp, Zea mays
  Clone ID: MRT4577_76796C.1
tcagaagacagtttgatggtgttaagtgcaagttcatgtacttatatgtttagtacggattcatatttctcaacatcgtcaaagttcagaataagacagttttactcaaatatggaagggagctgcgtaacattatagtaagaaaaaagggcaagaacccttacgaaacaggcacattcacacagattgcaacatagacatttatgtgtttatccagatttcgagtttgtttagtctcgtcatattgataaacacaacgagaaaattttctgttgaagtttg

SEQ ID NO: 159235 - DNA, 153 bp, Zea mays
  Clone ID: MRT4577_76797C.1
attaaacatacccagctctcgccatgcgaactcagttacatccagggagtaaatgagatttagagcgatgacggagctgttcgacactgccgtcaccagcctccgccatctgccggaggtgcagtactgcctcgccaccccagactgctaccg

SEQ ID NO: 159236 - DNA, 904 bp, Zea mays
  Clone ID: MRT4577_76798C.1
aaaaaaaaaaaaaaaaaaaaatcagaagagattggagctgaagagaggaagcagcgcgtcctcgcctaaagccctcgccgccctctttcggctcctcgcctctcgtccacgcgcgacgacgtgtcggcaaacactcagtccatcccaagactcgcgaggcgatggtggacgcgtggtggcctctgctgggcgcggcgatcccggcgctggtggcgggtcagtttgtccgcatcaagcgccgccgcgacgaggagcagcgcctcaaggcggcgcgcgggcgggagaagagctccgacgaggtattcgtctgcgagcgcgtgtgcacctccaagcgtatgctcaagaaggtaggggccttctccaaggaccccataccggagacctgcgtcaccgtctgcggcgtctctgaactcgacgcctgcgccgacgcttgcgcgcgcaccgtctgcgtcaaccagcaccaggtgcccaattggaacgacgtctgcctcaagaggtgccagagcgagtgcctcaaactctcctcaaacctcatgtaatgaccatctcgctattgtgctgcgctccttatataccaccccgtcaggttcttctctgcttctatccatatcatggttgaggaacttcagacgtcgataaccgtaatttatatatctcaaggaattggagtgagtgaatgtagctggtcaaggcggttatgtctttcattacattggctcttgcacatttctcttcggcagaatttgtttccctaccgaagatttgtttctctttggcagaatttgtttccaactaattgtgagtactaggtaccatttcctgtttttttgagtcacaacaggacctctgagttctcccggatgaatgctgatttcgacattgatttttaaaaaaaggccaaaat

SEQ ID NO: 159237 - DNA, 755 bp, Zea mays
  Clone ID: MRT4577_76799C.1
cattgggacctcgagcgggcgaagtcttctccttccctgccgccgtcttgctttcccctttcctccaggaagctaacaccaaatctggtcgtgcaaccccgattcccccgcgaacttgcgaagcgatggtggacgcgtggtggtctctgttgggcgcggcgttcccggcgctggtggcgggtcagttcatccgcaccaagcgccgccgcgacgaggagcagcgcctcaaggcggcgcgcgggcgggagaagagctccgacgaggtcttcgtctgcgagcgcgtgtgcacttccaagcgtatgctcaacaaggtaggggccttctccaaggaccccataccggagacctgcgtcaccgtgtgcggcgtctctgaactcgacgcctgcgccgacgcctgcgcgcgcaccgtctgcgtcaaccagcaccaggtgcccaactggaacgacgtctgcctcaagaggtgtcagagcgagtgcctcaaactctcttcaacgctaatgtaatggccatctcgctattgtgctgcgctccttagatgccaaccgtgaggttcttctctgttccgttctgcttagatgccatctcgctattcatcatgcttgaggacagtgaatgtttctggtcaaggccgttatgtcttccattccattcgtacttgcacatttctttaatttaacaacaaaactctttttatgcacaataatttacttcaaaacattaattttcctaaaaaaaaaaaaaatttggggccctcg

SEQ ID NO: 159238 - DNA, 1589 bp, Zea mays
  unsure (1)..(1589): unsure at all n locations
  Clone ID: MRT4577_7679C.1
atggccgccgcgacagagaagacggctgaggacatccgccgcgagctccaggagctccagcgccagcaccgcgaggtacacctctttctttgtccggcgcatctcgaagccccgagcctccgtgccgtctgccctgacccccgtgtcgtcccgtcgcagatcaccgagcgcctgcgcgacccccgtggccttcgccgcggcgcccccggccctggtcctggacctggccccccccgcccgctccgcggcttcgtgagaccccatgtgggtgcggaagtggcggatcaggctccgcagaagcgtcggctgctatcggccgtagttaaggttgatggcgctgaaaataatgaagaaggcacaaaggatgccaatggggaggggcaagaggcgggttcaggtgccactgaaggcagtgacaggaggactttcaacactggcgggttcagaagggacgggagcctgtggatgcagaggagggtggactataattcgctgccagagccagctccaagggagcttcccaggaatgaggacccgagtttggtgagaaggaataagaggatgctggggcagcttcttgtcggtacattagagaaatttcaacaagaggataaaaagctatccaactctgaggcttttctgcgcagatcagagactcagcgaaaggctgagcaaaaggttcgtgaagaaagtgaaaggctgcgacagcaggaacgtgagcaaattgcagagaagcgtaagcgtgatatgacgctccgcgctcgtgtagctgctaaggcagaagaaaagaggttggagctgttgtacattcagtggactgagcatcataaaaggctgtccaatttcttaaggacaaaagctgagccacctatttactacatgccaactaaaccaattattgacgatccagccattgttgaacagaacaaggaaaaggtattcgaagaatggaaatctatgcgcagggatgagctgactcggttccaaaagcaagttgaggagcaatatctctcaaatgtggagaggcagctggagaggatccagaatgcccggaacgctcgaaaggcgaacgggcatgctaacatgcaagaaatggacaaggagctggacacacacagggcggagcatggtccgaagactcggcgagttcctgaggagggcggtaatgatgacgacgaagacgcagaggacatggctgcggaagacgaggtgatggatgaagttctgggcatcaacgatgggatcaacgaggacccatccaagccgtccgaagaagctactactgaaggtggtgagcctgcacccgaggaagcacaataggattctttgttcacacaagctaggcacatagccgtacgtaccattccgtatgcttagttgccgtattgttgggaactgtttgtgcgtgtatttctgttagacgttccccgctggtttaggctgtgttttatattgctgttttgtctttttgaatgttgagaccatacaactgtcgatcattatctcataattgttgtaaaaatactataattgataccttgatttggacgtcggtggcgttaaacgtttcgggttctnnnnnnnnnnnn

SEQ ID NO: 159239 - DNA, 357 bp, Zea mays
  Clone ID: MRT4577_767C.1
tttaaatataatatataattatattttttaaaatgggatgggcttgattctggcccacaatgaacgctaaaagcacacataacacatgtgagttgaacgtaaatttatttatgtagcgtactggtgagtaatatttaagatctaccttatagcttggctagatcccgaataaatattttaaatcgctttgtcgatttaaatataaaaatatattgctataagcggaaattaaacaagattaagtagttggtgaggtaatagctcaccaagctggaaatctttagctaatctgggaggatgcatagccacattgggactgaaaacggcccaaccttttggcagcagtgtggaatattt

SEQ ID NO: 159240 - DNA, 329 bp, Zea mays
  Clone ID: MRT4577_76800C.1
gggaacaattaaaatttttaattttattccgggaggggggacattaaactttttttccccggctttcttttttattttagggggttaaaaacaaaccccaaatgggtgccttggatggccctcttttttggtccccacaggggggccttttttttttaagtaattgggggcccatttaactttcccatgcctaaattggggaatatttgatggcccaaggggaattttttcccaagggcaataagttggtttttgggggttttcttttgccctctggctttgttccggccttttttaaagttttttttagcaaaaatttcctttttcct

SEQ ID NO: 159241 - DNA, 560 bp, Zea mays
  unsure (1)..(560): unsure at all n locations
  Clone ID: MRT4577_76801C.1
gaaaaagtacactttccaacaacaaatgtttatacagatagaaagaagtttggttgtcattgttttataagagtactcacccaatgtttataagctagaaacaagtttatttggctgttatcgttttttaagagtgctcaacatatttctacagctaaaaacaggtttggttattgttttttaggagtactcgcctacggcgtgcttttcccgccgccaaagaataaacgtacgataaatattttcaattaattttgcatcaacaataaatattttcaattaattttgcatttccccttgatagtttgttttttttcttttctttgtagtatctcacctacggatatctttgcaggcagaggaaacaagtcggtgcatggcgcttgttttgcatttccttttgttccggctgggcagctgcattcgtagtctcctggcgtgttcttgcatttgccaccgtagcacggatacatgtgtggccgagcgcactcatcaatgtctacaaatcanacacaacttttacaacagttaaaaaagattatagccattcattcagaaaa

SEQ ID NO: 159242 - DNA, 362 bp, Zea mays
  Clone ID: MRT4577_76802C.1
ctgcaggtaccggcccggaacttactggctggaccgacccacgcgttttttttgccgctgcggagccactacggagatgactgacctgtgaatcccgggaggcgactggactcttgtttgactaccatgaccactacgactgctgctaaagcaccgtactagtactctccctcgcaggcgcggcttctcgtctgatggccgctgacgaggaggcctcgggcctaccttgccacactgacggtgatcatcggatgcgcctacactacgctgacatgcgctacgccgacgggcatctactgaacgggcttgcgctcgccttctccgtagaggtgacattgacagaggtgctcatggctactaag

SEQ ID NO: 159243 - DNA, 218 bp, Zea mays
  Clone ID: MRT4577_76803C.1
gccatctctagatcattacacatgcttaggctgacttgctcggtcgggccggtcgtctcaaagaagctggatgagctgatggaggacataccgacggaacctgactctgtgctatagactcctctgctaggtgcttgcaggcatgataagaatgttgaggtgggggaacggacggctgcaaaagtggtagagcttgatcctgaaaactctggacccta

SEQ ID NO: 159244 - DNA, 137 bp, Zea mays
  Clone ID: MRT4577_76804C.1
acgcgtgcgtgtaagactgtcctccatatccaaagccggggcgccgcccctggctgtgctgggctgtgcgccctacgaacgcgcgccaacaccagccctagcgccgcccgtagctctagcgacgacgccctgccgac

SEQ ID NO: 159245 - DNA, 420 bp, Zea mays
  Clone ID: MRT4577_76805C.1
cccacgcgtccggagattaacaactgaagtgagcactgaactctgaacagagttcagaatagactggctgcagacggttgccggagttgagcagtgagcagaggcgagcgccggagctgagcagaggcgagcgccggagcacgggagcagagagcagacagtcaccggagctgaggaccaccggagttgaggaccaccggggcagaggaggcagaggcggcagcttagggttttagggtttctaactttctactgtgcttgtactgtgcggcacagtggcagtagagcttctttctactgtggacaggagatagtgggtcgccagcccatataacagaggacacatttttttacaggcccaaacctggcacaagctagtcggacatggcaccctaagggcgactaatcgcgattagtcgg

SEQ ID NO: 159246 - DNA, 723 bp, Zea mays
  Clone ID: MRT4577_76806C.1
ctaaaacttcgacggtgattctgagagaaagatgctagcacatctctgataaagtcaattccacacagttggcgtctattggtagctcatcaagcactggaaaaaagaaacaacccgtaatctctgacaataatgtgccaatcgagaggacacctcaattgattgctgatcattttcagctaaaggaggaccagggtagtagtagtagggctagcagttctgctcagaataagggttccatggagacactttcttctgacataagccagctaagtatcgaaaggaataatgtcaatgttgcacagcctttacctgaagagtataagcctgaggggtggatgctagctgatcaggagtccggggtgctgagccaactaaaccttgcaatagtgggtcatgttgattctggcaagtcaacactctctgggagattgctacacctattagggaagatatcgaaaagagatatgcacaaaaatgagaaggaggctaaggaaaaaggaaaggggtcatttgcttatgcatgggccatggatgagagtactgaagaaagggcaagaggtgtcacaatgacagtggctgtcgcctatttggagaccaagaaataccgtgtagttttgcttgactctcctggccacaaagatttcgtgccaaatttgatatctggtgcaacacaggctgatgcagctattcttgtggttgatgcatcaactgggtcttttg

SEQ ID NO: 159247 - DNA, 387 bp, Zea mays
  unsure (1)..(387): unsure at all n locations
  Clone ID: MRT4577_76807C.1
cgcctgcaggtaccggtccttaatggggagtggaggacgcgtgctagcatgcgactgggtttgtgcaatgtgcgctgaancgtgatgaggtttntgagggtatgaggtatccgggggacggggaaacactattgatgtatatctaccaccacctggtgatttggtggaccacanactggcgggggtaggtggaaatgacagggaatggttatggttctaggggcaatggngatatttgggtttggacggcgnaaaaaaaaaaaaaaaaagataaaaaataaaaataaaaaaaaattaaaagggagatattttttaaattgtgtaattttagaatttattatattgaaaggggggggggggtttgataaggtatttttatttttgttg

SEQ ID NO: 159248 - DNA, 537 bp, Zea mays
  Clone ID: MRT4577_76808C.1
cagaacgaggcgttagctggatgatgtatgtggccaaccagaaataagaagttacatttccaaaaaaaaaaaagagttatacataaaggggaacaatgtttaggggcaacataccggattaccgtacccactgaccacttatgtacaaagaatggggggggggagttaacgcttttttcaccgagccttgctttaacgagtcggtctagactcaaacgggtggctcagtggatctttgacgtgcgattgtaagttcacttgaccccaattaagggttttggtgattgagtgacaaaataaatagctgtttctaacacgtttgctcctagtgtttactcaccgtcagggcagatggacgcgccttgcaactgtgcttgataacgcgaagagaaagtatcttggacacaggagatacattaagtgttgcctgtgccatgttcccctactactttcgttttttactttctctttttcttaactcgcccggtttattccttccttggtctttttcgggggcgtcctgttgggtgcctttgc

SEQ ID NO: 159249 - DNA, 291 bp, Zea mays
  Clone ID: MRT4577_76809C.1
agaggtggaaaaatattttttttgtcaacctaaaagtatgcttcttattaccaactaggactacatcccagttaggttcagactctgtaaacaaaggccaataccctgtcagcacagctcacactgttccaggtatatgcacaatgttaccagtgaagtataatttcagacaggtatatgcacaatgtggcacctgatagttcaaagaccatcatggaaaaaatcagtgagtatgacgagaccctgtttttcttttacgaaacaataggttctgatgcatgtgtgatattg

SEQ ID NO: 159250 - DNA, 575 bp, Zea mays
  Clone ID: MRT4577_7680C.1
cccctctcgccgccgccgccgtcatccatgtcgccggcaccaaagggaagggttcgacatgcacattcacggagtcaatcctgcgatcttgtggcttccgtaccgggctcttcacctcaccgcatttgatggatgtccgcgagcggttcaggctagatggggtggatatttctgaagagaagtttttgaagtacttctggtgctgctggaataaactgaaggagaagactgatgatgatattcccatgccagcctatttcaggttcatggccttgctcgcattcaagatattttctgctgagcaggtagatgtagctcttctcgaggttggtcttggaggaaagttcgatgcaactaatgtggttaaatctcctgtagtctgtggaatatcctctcttggatatgatcatatggaaattcttggaaatacgcttggtgaaattgctggggagaaggctggaattttcaagaaaggagttccagcttatactgctccacagccagaagaggcaatggttgctctcaaacgaagagcttcagaattgggcatttcactccaagtcgttgatcctttg

SEQ ID NO: 159251 - DNA, 339 bp, Zea mays
  Clone ID: MRT4577_76810C.1
aacaaaaaggggttattaaaaaatggtctgaaaaaaaaaaaagccatcgatgttcgatggagcctttttttaaaagggggggggggacggtaaaaaggatacacgcagggagggggctttttgtgtaaaaagaggaaagcgcagggggggtactaaggctgtttggaatacaaaaccagatagatttgctccacctcaaatattatatataaaaagggggccctccatgcaagggtggtttggtatggaccccgcgggtgctaaaaaaacaagaaatttgagggggccctttttcaaaaagggggcctggacgaagaaaattgaaaagttttttctttg

SEQ ID NO: 159252 - DNA, 247 bp, Zea mays
  Clone ID: MRT4577_76811C.1
acaagctttttttttttttgccggacaatcgctacctatcttgctagttttctcatttagcggagatgagtaacgtagtgtcacccatcaccatgggtggcagtgtgagcattggcctgaatgaaccattgaaatggaagaggagtggggggtaatgaaaaaagctgattcgcccctggggtgtggggtttcacgtttaaaagacacgggtggtgcccgttttttttggggaaaacccctccccccc

SEQ ID NO: 159253 - DNA, 547 bp, Zea mays
  Clone ID: MRT4577_76812C.1
aatcttcacacccttccgccgccgccgacgccgacgacgacgctaaccgaccgagcgcgagcaccgcaccgccgccgcggccgccatggtgaacgttccgaagaccaagaagacttactgcaaaaacaaggagtgcaagaagcacacccttcacaaggtcactcaatacaagaagggtaaggacagcctgtctgcccagggaaagcgtcgttatgacaggaagcagtcgggatacggtggtcagaccaagcccgttttccacaagaaggcaaaaaccaccaagaagattgtgctgaagctgcagtgccagagctgcaagcactactcccagcgcgccatcaagaggtgcaagcattttgagatcggtggagacaagaagggcaagggaacatccctcttctagattgctttcacctatatctgtagtcgttgtgttcaagaactattactacttgtcatattgttttggtgttatgagttgaatcaatcagaccctgtcatgtatccaaacccctttatctggcatttgagcaacgatcgacttgtc

SEQ ID NO: 159254 - DNA, 2112 bp, Zea mays
  Clone ID: MRT4577_76813C.1
ggtcgcccacgcgtccgcccacgcgtccgattcctcctacctcactggctcactctcgtctcggtttacaaagcctccgccgccgcaagtccactcccccccgccgtccaggttggttggtgggtttgaattcgagctcaacgagcgacggcttgcccctgccgtttctctgctcagcgtgccagagctagttcatctccagcatctccggccgttacttgctctgagccaacaacagtatcaaaagccccgacccccccatcctccggcgacgatgccttccggcgacgattccgaccccctgctggcgcccgccgacggcatacgcttcgcggcgctggactaccgcgaccaccccgccgaccgcggcgccaccggcggctggcggtcggcgctcttcatcatagcggtggagatctcggagcggttcacgttctatggcgtgtcgtcgaacctgatcaactacctcacgggcccgctcggagagggcaccgcggcggcggcggcggccatcaacacgtggaacggggtggcgcagctgctgccgctgctgggcggggccctcgcggacaagtggctcggccgctaccgcaccatcgtcgtcgcatcgcttctctatgtcatcggtgcaggcatgctggccttctcgaccttgctctcctccggcagcggccaccaatgcaccaccgccgggggccagacctgtgcgccgtccaccattaaggtgaccttcttctacgtctccctctacatcgtggccgtggcgcagggcggccacaagccgtgcgtccaggcgttcggcgccgaccagttcgatcagagcgaccccaaggagaccgtctccaggagctccttcttcaactggtggtacttcggcatgtgcgccggcactgccgtcacgctcctgctcctcagctacgtgcaggacaacatcggatggggcctcgggttcggcatcccgtgcgccgtcatggcagccgcgctcgccgtattccttctcggcactcggacgtaccggtactacgtcactgccgggcagggcctgttcgctcgtgccggcgaggctttcgctgagtggcggagcaggcgcaaggcgggtcagcttgttcggattccaagactcgatccgcccgcagcagatgcgccaaggttcagtgctggcgtcgatgtggaggagcaggctgcagtgagaaataatggaggcctcgtcaaggaggccaaggccatcatccgtttgttcccgatatgggcggcatgcctgctctacgcggtggcgtactcgcagtcgtcgacgttcttcacgaaacaggcggcgaccctggaccggcggatcgggcggcacgtccaggtgccacctgctgcgctgcagagcttcatcagcgtcacaatcgtggtcatcatccctatctacgaccgcgtcctcgtgccggtgtcgcgccggtactccggcaaaccatcagggatcaccatgctgcagcgcatcggcacggggatgttcctctcgctcttgtccatggtgatcgcggcgctcgtcgagaagcaccggctccgcgtcgcgggggacgctggcctcgtggacaagccgaaggtcccagtaccgatgagcctgtggtggatggtgccgcagtacgtgctgttcggggccgccgacgtgttcaccatggtcgggctgcaggagttcttctacgaccaggtgcccgacaagctgcgcagcctcgggctggcgctctacctcagcatcttcggcgtcggcagcttcatcagcagcgcgctcgtgtcggtcatagacagggtgacgacggacaggggcgggagctggttctccaacaacctgaaccgtggccacgtggactacttctactggctgctcgccgcgctcagcgccgtcgagctcctcgcctatgtcttcttcgcggtgacatacaagtacaagaacagaggagccgtacatgcaactgttgatggttagcgggaggagtaagtacatagtataggttatggtgcatcgtacttgtaaatctctttttttttctcaactaggatttgtgatccaaactttaccttcgataatgattcccgttttttatgaaaaaaaaaaaaaaaaaagcggcc

SEQ ID NO: 159255 - DNA, 311 bp, Zea mays
  Clone ID: MRT4577_76814C.1
aaaacacaaaaagctgcaacagcgggaggcatggggcaccgggccaatgacaccgggccccaccaccattaccacccgacgcacactttatttagcccacgttacttgcagcccggaccggacacgtccacgcgaaaggaactggtagctacggaccgggcttcgttcgagacccccccccccccaggggggggcccccgtaataaccggagcggactgaacaaaaaaatcccgggtaatactgccatgtacccgcgcgagggaataccccggcacgggcgcacgccgattccctgggccctggccccccc

SEQ ID NO: 159256 - DNA, 2075 bp, Zea mays
  Clone ID: MRT4577_76815C.1
cattgggtacctcgaggccggccggggtctcggtttacaaagcctccgccgccgcaagtccactccacccgttgtccagccggccgttacttgctctgaaccgacaacagtaccgataaagccccgactcccccatcctccggcgacgatgccttcccgcgacgattccgactccctgctggtgcgcgccgagggcatacgcgacgcggcgctggactaccacggccgccccgccgaccgcggcgccaccggcggctggaggtcggcgctcttcatcatagcggtggagatctcggagcggttcacgttctacggcgtgtcggcgaacctgatcaactacctgactggcccgctcggggagggcaccgcggcggcggcggcggccatcaacgcctggaacggggtggcgcagctgctgccgctgctgggcggggccctcgcggacaagtggctcggccgctaccgcaccatcgtcatcgcctcgctcctctacatcatcggtctgggcatgctggccttctcgaccttgctctcctccggcagcggccaccaatgcaccaccgccgggggccagacctgtgcgccgtccaccattaaggtgaccttcttctacgtctccctctacatcgtggccgtggcgcagggcggccacaagccgtgcgtccaggcgttcggcgccgaccagttcgatcagagcgaccccaaggagaccgtctccaggagctccttcttcaactggtggtacttcggcatgtgcgccggcaccgccgtcacgctcctgttcctcaactacgtgcaggacaacatcggatggggcctcggtttcggcattccgtgcgccgtcatggcagctgcgctcgccgtattccttctcggtacaaggaggtaccggtactacgtcactgccggggagcggggcctgttcgctcgtgccggcgaggcttttgttgagtggcggagcaggcgaaaggctcttcagcatggtgatcgacctgtagcagagggggcgccgggattcagcgctggtgtcgacgaggaggagcaggctgcagtcagccatgacgcaggcctcgtcaaggagaccaaggacatcctccgtctattcccgatatgggcgacgtgcctgctctacgcggtggcgttctcgcagtcgtcgacgttcttcacgaaacaggcggcgaccctggaccggcgcgtcgggcggcacttgcaggtaccaccggccgcgctgcagagcttcatcagcatcaccatcgtggtcttcatccccctctacgaccgcgtcctcgtgccggtggcgcgccggtactccggcaacccatccggcatcaccatgctgcagcgcatcgggacggggatgttcctctcgctcttgtccatggtgatcgcggcgctcgtcgagaagcaccggctccgcgtggcagtggacgctggcctcgtggacaagccaatggtccccctgccgatgagcctatggtggatggtgccgcagtacgtgctgttcggggccgccgacgtgtacaccatggtcgggctgcaggagttcttctacgatcaggtgcccgacaagctgcgcagcctcgggctggcactctaccttagcatcttcggcgtcggcagcttcatcagcagcacgctcgtgtcgatcatcgacagtgtgacgacggccaggggcgggagctggttctccaacaacctgaaccgtggccacgtggactacttctactggctactcgccgcgctcagcgccctcgagctcctcgcctatgtcttcttcgcggtgacatacaagtacaagaacaaagcaaccgtgcatgcaactgttgttggtcagtcgctttagttcaaaaatgaattagcggcaacaaatattcgagaatggagttagtacatcatcctacgacatagtataggtgatatgacacacaactaaatgtaaatggtaccttttctccgttagggtttgtggtccatacttatctttgattttgattcccatttgtatctgttgggacttgggagggtcaatgctatcattcaattcttaaggcaagggttcatccgtaaaaaaaaaa

SEQ ID NO: 159257 - DNA, 156 bp, Zea mays
  unsure (1)..(156): unsure at all n locations
  Clone ID: MRT4577_76816C.1
gcgtcgtcgcaggttgccgtctcgctgccgcccgccggccacagttgctgcggngccgtcggccatatctgacgcctgaccccttaccgggagggggcgtgggccctcacacttccatgcactcgcacatcgaaacgcgacaaacgaccagaacag

SEQ ID NO: 159258 - DNA, 1069 bp, Zea mays
  Clone ID: MRT4577_76817C.1
tcgtttgcggacgcgtgggcgcgagcggcgccctttgtttttttttttttttttgtgttttttcttgataattccaataatgcaaaagaggcccgatttcggttttgtaagtttcctggactctgagtccgtaaaacagatcttatcagaaaggggccctcatttcatctgtggaaatgaagttcatgtcaaagcatacagggaaaagcatgaattggagtacatgatgttaactgagaaagatatccattgtaactgcggtgtacgcgatgtgtcagatgtgggcgatttgcaattttgccaccattggcagtggacttcgctaatttgctatcggacacacaaatcatagacacataccggacccacaaatcatagacacttgggggtggcgacattgcaaatatttcgtcagatgtagatgcagttggtgagcatcatacagtgactattggtgactttgggcttcagacgaccttggaatttgactactgagactctgagaggaagcttcgtccactaacaaacattgacaaaagactcaagtgcaagtgctctgatcagtgacttagaagacttcaaatacagttcatttttcagttaacaaaaggaggaagttagaactacgccgtataacaatcaaatacaatacaattcatttttttcagttaacaaaagaggacatgacagaacatgaacatttcatacgaaacctgtatgaccggcagatacatctaggtgtagttgaagtatgttagcaactcgtaatacacgacctccaaaccaatagctagaggaacactctgtatactattctggcaaatcagggtacaacagaatgtattagagatagaagaaccggtaacatgagaggaaaggagaggaggcagatgagagtaatggggaaatgtagtcttcagtttgtaaattgattctttgatgatcctccacagcttcaacatgtctccttttatagctgaatatgcctaattgccacctgtcaaagaccccacatgacagtatgctggcatttcccaccgcttcaaatgcgggttggcccccaaccctt

SEQ ID NO: 159259 - DNA, 754 bp, Zea mays
  Clone ID: MRT4577_76818C.1
actctgcacctttttttttgttctagaacaaaaaacgacattatgttgttcttttctgttttgctaccaaaagatgtgaggctgcatagtatttgcttccttaggcgctactggtcacgcgtaaccatggggttattcacaaccatgtcagcaacagaaagtatatgtacgttgattttgtgttttttttttctaatggctaactaggtgtgtgcccgtgcgttgcaacggaaatatataataccatgacaacttatgtacaaaaaaaaaaaaaaaaaaaaaaaaaaaaaaaaccaagaactcgatccgcctgcagcagacgcgccaaggttcagtgctggcgtcgatgtggaggagcaggctgcagtgagcaataatggaggcctcatcaaggaggccaaggccatcctccgtctgttcccgatatgggcggcatgcctgctctacgcggtggcgtactcgcagtcgtcgacgttcttcacgaaacaggcggcgaccctggaccggcggatcgggcggcacgtccaggtgccacctgctgcgctgcagagcttcatcagcgtcacaatcgtggtcatcatccctatctacgaccgcgtcctcgtaccggtgtcgcgccggtactccggcaaaccatcagggatcaccatgctgcagcgcatcggcacgggggatgttcctctcgctcttgtccatggtgatcgcggcgctcgtcgagaagcaccggctccgcgtcgcgggggacgctggcctc

SEQ ID NO: 159260 - DNA, 612 bp, Zea mays
  Clone ID: MRT4577_76819C.1
cattgggtacctcgaggccggccgggatgcgctgcgcacgggacggatctgagaccacgattgacgaccccccctcccctcagaggaaattgatatatgccctctcttccgactcgactattcctcggcctcgcgctgactcctccgctctcctccggaggactatgagggccacctcctcgcgccgcggccgggtgccagccgtcgcccaccgagaccagggccctctcgacgacgctctcctctctcagcatatcagctctgtgccagaggtacacactgacccgttctgccaccagtctataagatgctggtctggaccgttgtcttgctcaggaccctgagaaggaaggtggtcgtgaaagctgctgcaacacccacatgggcctgtgatgtggtgaccatctgcacgcgctattgagcttgctgctaccatgtagaatgctggagctgccttgactttggaagctggtagaacgacgaatgactcgactgtggacgctgccacgagtgtgtctgctttcagtaggaagatcctgatattgctcatgttgagcattacctcttgagcaaatgccgcgagcagtaagaaggtgattgacaagactgctt

SEQ ID NO: 159261 - DNA, 1418 bp, Zea mays
  Clone ID: MRT4577_7681C.1
aattcggcacgaggcacctcaccaccccccgcccgtgatgcccgctgccgcgcgcatcttcctccccgcaccccgcatgccccgcgccgcgaactgctcctcccgcacgccccgcccgtgatgcccgccgccgcgcgcgtcttcctccttcctccccctagctccgcgcttccttcgcccaccaacgcccgcacccgccaagtcccccaccaacgccactatagcccgcacctctctagactagggcacccaaacccgagccgtcgtccccattgtgcctctcgacgcgcagccaaacccaaacccttcctcccgacgggcgacggcgatggccgccgcgacagagaagacggctgaggacatccgccgcgagctccaggagctccagtgccagcaccgcgagatcaccgagcgcctgcgcgacccccgtggccttcgtcgcggcgcccccggccctggtcctggacctgggccccccccccccgcccgctccgcggcttcgtgagatccatgagcttctcacatgcccccactcattcctcatttcgtttaatcttaatctatttgtgtgcgtgcaagacattttttttccaatgtttatgatgtagcatgtgggtgcggaagtggcggatcaggctccgcagaagcgtcggctgctatcggccgtagttaaggttgatggcgctgaaaataatgaagaaggcacaaaggatgccaatggggaggggcaagaggcgggttcaggtgccactgaaggcagtgacaggaggactttcaacactggcgggttcagaggacgggagcctgtggatgcgtggactataattcgctgccagctcttcgaggacccttttttttttatttttaaaaaaaaaattacatgccaactaaaccaattattgatgatccagccacttgttgagcagaacagggaaaaggtattcgaagaatggaaatctatgcgcagaatgcccggaacgctcggaaggcgaatgggcctggtaacatgcaagaaatggacaaggagctggacacccacagggcggagcatggtccaaagcctcggcgagttcccgaggagggcggcaatgatgatgacgaagatgcagaggacatggctgcggaagacgagctgatgggtgaagttttgggcatcaacgatgcaatcaatgaggacccatccaagccgtccgaagaagctactactgaaggtcagccagcaaccgaggaagcacaataggattctttgttcacacaaggtaggcgtaccattccggcattccgtatgcttagttgccgtcttgttgggtgctgtctgtgcgtgtatttttgttagacgtcccccaatggttagactgtgtttaatatttgttgttttggccttttgatgttgaggccatacaactgtcaattattat

SEQ ID NO: 159262 - DNA, 296 bp, Zea mays
  unsure (1)..(296): unsure at all n locations
  Clone ID: MRT4577_76820C.1
gtattttttttttttttttttattcggtttttttttattattaaaaaaaaaaaaaccacggctgaaaccgaagagagaacaaacccagaaacccaaaacatgacaacggatcggggaagctgtcctttgttcccattttggagggggggggcaaanccaaatttgaaccattgacccatcccaaacactaggcgggggtgaaggggggggccccttccgtgctacagggtgggctctgaaaatcccaaagcttgggaagcatgtccctaaaccagtaggcccgacgctgggggggg

SEQ ID NO: 159263 - DNA, 315 bp, Zea mays
  Clone ID: MRT4577_76821C.1
acccacacttccgcccacgcgttctcggactcatggggttgtttccatgcttactgcacctaacaaactacagggattaatacattcggtttaggcttaatccatcatatagtgtggactaatgcttgttggagcagtttcttgaactgtactccattgtgtctgttcgatccacttacactctcattctgactgtgttatgttatcatgacaatttttctgtatacatatttttttaaatgatctcttacagctttccttatcaaaactcgtatgactcttaagcttattaggagggtaaactgacaatttatt

SEQ ID NO: 159264 - DNA, 180 bp, Zea mays
  Clone ID: MRT4577_76822C.1
tttctccttcactgtctcacattttacctctttgtatcaacttttcagaggtagatatatttccctttacctcaaagatcatcacttatagtatctttaggaacgccttcttaaagatcttatcaataaacactcatattttatcatctacccaatctctctctttatccataataccac

SEQ ID NO: 159265 - DNA, 468 bp, Zea mays
  Clone ID: MRT4577_76823C.1
acgaaggagctcgagaggacagaatctgtttttgatcaagggaaagaacctagggttagtgtaaactactaattatgtcactttggcagccttaccttaatatagaatcaccaagggtaaaaaacactaagtctaatcttgaaagattggaaaaacttttttgattaaaagtctactctgaatcaattgctcatattctatttttatataacagtgaaatgctttatcgaaggaaatctaattattaaacgggtatgtcgctactcttttgatagaaaaaagaatactatataccgaattaatgtctaaacccaaggattctacaaatcatagataaaggattccgtaacatgtaaacacgatttctaaccgcttcaacaataaaattactatctgaataaggaataaaagtatatttgttcgagatgagattaataaatgagtttagagacgactcaaaactttcga

SEQ ID NO: 159266 - DNA, 385 bp, Zea mays
  unsure (1)..(385): unsure at all n locations
  Clone ID: MRT4577_76824C.1
cccacgcgtccgaaaaaaaaaaaaaaaaaaaaaaaaaaaaaaaaaaaaaataaaaattcggcaatctagcgaaaccaaactttcgttcccctataatttcaattcctatatccttccttttttctacatccctcactgtgtccatctcttgccttacccattgttaatcatcttttttatacatcccctttttccaatttatcccctttccacatagccccgttcccataacccttatcaactccccaccttcctaaccttcctatacatccccctttttcctgcctcattaatttcacccactgctgctccttccattattcctancgtttttctttttatcatagtaattggggtattttttatttatttatataaaagaaaa

SEQ ID NO: 159267 - DNA, 527 bp, Zea mays
  Clone ID: MRT4577_76825C.1
aaggaggagaagagaaaaaaaacagccatccagtgggtattacccacgggaaaaaaaactcgactgctaagagaaaaccaaaatatcttgtgccacaagttacaaaatagcaaaaaaaacccaccccaaactcattagaaatcctaaaaatagggaggggcccgctgcaaatgacaacagatcttcttgtgtcgcaaatccaaacccttgccatcttattcttcccaggccatcacccaaaaataggtacccagggagagggcataaaatcagaagcttctaccggaagtcataatggaccccgaaagcatacacaaaatgtccccgaggatcgaaaaaattcctcatcggctctagaaatgctcgcctcataggacccaaggataatacccaaaaaattattaaagagacctcataaaccagcatggacttggcagcaccgaaagcatacaaccaaggtaacccccatgacactgccattttcagcgagcttgcgcggaaggaaaggccaaccaaggaagcaccca

SEQ ID NO: 159268 - DNA, 417 bp, Zea mays
  Clone ID: MRT4577_76826C.1
tttgggctgatttatgtgcttgtggatgtgcgggtggatgtgcgggtggatctgcgcgctattaatagtgttcctgagttactgcgtacgacggttaagcgtgatttttgttacggtaagcatacggtacgtcgttctacgcattgcggcgacgcggcctttaaggatgcgaatgtcgtcgcggttataactaagattaagtgtattacttagcctgcggatcggcgtttgatcggtcctaagcgtggaactaatcattagttctttagtgctgcttttggtggcgattcggttaaggcgtagtgcgttgcgcgtacgactcttaatcttattagcgccgcggaggctcctctttgtaccgattataagcctgattctacgcatgttaagtgtgttcctgcgtatcggcatgctggc

SEQ ID NO: 159269 - DNA, 1900 bp, Zea mays
  Clone ID: MRT4577_76827C.1
cggacaggcggcagacgcaggtagcagcagcagcagcaggcgctggtggtgggactggtggcgctggccgttggcgttggcgttgtgaacaagaaattcctcgggtttcacgcggctcccgtcgctttggcgttttggccccttccttttcttcctttccgctagttttctggtgatggggggttttgcgccggttcgtgttgggtttataggacggcacggctccagctgagttcacttccccatcccgcttgctccgtgccgtggtctccgaggtcggggttcctttccgatttgatccgcccagctggaaaacgaaaatcgctgatgggttttggaaggaaagtcgtcatttcttggtgaggtttccgtttctggatcgactggctgatcgatcgtactatcctacatggcgccgtcgggcatcgaggccggcggggtccggctgccgcacgtggagatggtctgccgtccctccgggggcccgcgcctcccgcgctccctccgcgctgcatcaacgcccgcaggttctgcctctccctatcactacgccgcctgcccctgccgcacccctccccgtcaccaggggcggcgccgcgtcgcgccgcctcctcggcctcgcctccgcgctcgccgacgactcgtcctgctccgacctcctcccgccgttcccagtccccggcggccacgccgccttcctcctccgcgacctgccgccgccgccgcctctgacgccgcggatccccgccaccgagagctgcccgctgccgtcagcagcgtcttcagcgagttccgcgacccggcgccatctcctgtgacccctgacgacgctgaggcggcgcctgatgagcccagggatcttggcttcaacgatgacgacggtttcgacgccgattctattctgtgcggcgtcgaccagagcgcggccgagggcatcgatggcatcatgggtaagctctctatggaaaacaacggggcgtccggatcaggctcaagcgttgactccaacatgcccgaatccaagatgcacccctacctcaggaaccttatggtgctcgggctcagcttccggcaggatcagaatatcatcatcaatcaagcgctgaagcggcatagtgtcgatcctgaatggtggatgtgccctgccatacctgtgaaagacattaccccggcaccaccgccttcagtggcaatggccaaggtgacagacaagaagaagactaagaagaagtcactggggacaatatacgaggaggggagtcctgagcctgccaatggcgatgacgatggagctttggcactgccagagacaggattggggcttagcttgaatactgacggggtgctcaaggcgtggtgtggcagaggctctgcgtttgctgatggcaatgggcctgacttgccattgtcccctgctcatgtggtagttaaacatgaagacaatgatctcttcccaaagaatggtaccggcgctgttatcagggaaggcaacattctgaagatgcagcgcaagcagaagccatgcactcccctcccatccaacaagcagagtcggtactaccggcctcgggtcaaggggaggtttgtcagcaaggcttgttttctccagcgacagcaagcgttagagaaggagagctagagaagatggatcctgctccaaggcgcatttctggggctctcttggagaagcagcagagcttctccgttttcatctctgcggcggtacagtcggcagatgtagatcccatattgtggagggttcgaacgtgcctaaagtgaagacagaaaacaacaacaacaacaacagactcctagttcacacacaatacgttctcagagcccaggttacgtacccaagactcggttacgtacccagcactcgaaaaaaaaaaaaaaaaaa

SEQ ID NO: 159270 - DNA, 1213 bp, Zea mays
  Clone ID: MRT4577_76828C.1
acaggcggttccacgcaggcagtagcagcagcaggcgctggtggtggcgctgggcgttggcgttggcgttgtgaacaagaaattcctcgggtttcacgcggctccagtcgctttggcgttttggccccttccttttcttcctttccgctagttttctggtgacggggggtttttgcgctggttcgtgttgggtttataggacggcacggcaccagctgagttcacttccccatccccatcccgctcccgcttgctccgtgccgtggtctccgagatcggggttcctttccttgccgatttgatccgcccagctggaaaacgaaaatcgctgatgggttttggaaggaaagtcgtcatttcttggtgaggtttccgtttctggatcgactggctgatcgatcgtactagcaaccatggcgtcgtcgtgcatcccggccggcggcatccggctgccggacctggagatggtcaaggccgcgccgccgccggcgccgccccgcccggcgcactccgcggcgtcctccacgctctcggaggcatccaactcgtccccagcctcctcctcgtcggtggcgtcgctgtcgctcaagcgcccgcgcacgccgcgaaagcggcccagccagacgtacaacgaggcggcggcgctgctcgcgtccatgtacccctccgtattccccgtcgccaggggctgggggggccccgaggcggcgccaccccgcctcctcggcctcgcctccgcgcttggcgacgacccgtcctgctccgacctcctccctccgttccccgttcccggaggccacgccgccttcctcctccgcgacctgccgacgccgccgcagagccccgccggcgtcgccaagagctgcccgtcgcccgcggccgtcagcagcgtcttcagcgagttccgcgacccggcaccatcccctgcaacccctgacgatgctgctgcggcacctgacgagcccggagagctccacttcgacgttgacgacggtttcgacgctgactctattctgtgcggcgtcgaccagagcgcggccgaggcatcgacggcatcatgggtaagctctctatggaaaacagcgggacgtccgtgtcaagctcaagcgtcaactccaacctgcccatatccaagatacacccttacctcaggaaccttatggtcctcgggctgagcttccggcacgatcagaatatcttcaaccaagcgctc

SEQ ID NO: 159271 - DNA, 278 bp, Zea mays
  Clone ID: MRT4577_76829C.1
aaaaaaaaaagggattccaaaatataaagattaaacccggttcttcgaccaggtaattgggcttttgccgtaaaggggtccccatctagccacaaaattaggcccttgccatgccatgcaaaccggggcaggccttccccagcagacaaaagccaactgagtttcgtcaccctttaatggcaaaagcagattttacacttctttccttcttttgaggttaaagccgcaaggacaagcaagcagctgcaagatgaagcaaaaggggccctcttcaaatg

SEQ ID NO: 159272 - DNA, 592 bp, Zea mays
  Clone ID: MRT4577_7682C.1
ggagtccttccttgccttctctttcgtttccaagcctttgaagtccttcgctgacttctcttttattttcacatctttagaatctttcctggcattctctttctcagcggagctaactactacttcctccatgtggccatcagagtttacatctttgtcaacatctgagcgagcaagagaactggatgaatctgaatcattaccaccagctccactaccttcttcaacagaattgtttcttcctgcagtctttctccgcttgttcgttggttgccctttcttcttcgaaggtaaggacctcttttttgacttcgtttggctaggaggagacttgctgctgctagttatctccagtgctcttcctgggtttgtcccaagatgatccttcttttgcttcttcactgatgagtcattactttcaatcagtatccacttctctttagccaagttaagcacttcaacatctccgtcatcgtatagcaccctatgttttttcttggatgaatcgtatgattgcacggcaccttcataaaatctcttatccaaaggccaccaaacttttattcggtgtcctaccaagtctgtactgctt

SEQ ID NO: 159273 - DNA, 765 bp, Zea mays
  unsure (1)..(765): unsure at all n locations
  Clone ID: MRT4577_76830C.1
gggacaatatatgaggaggggagtcctgagcctgccaatggcgacgaggatggagctttggcactgccagagacaggattggggcttagcttgaatactgatggggtgctcaaggcgtggtgtggcagagagcagtggtaacaacgcagagtacgcggggacttgccattgtcccctgctcatgtggtagttaaacatgaagacaatgatctcttcccaaagaatggtaccggcgctgttatcagggaaggcaacattctgaagatgcagcgcaagcagaagccatgcactcccctcccatccaacaagcagagtcggtactaccggcctcgggtcaaggggaggtttgtctgcaaggcttgttttctccagcgacagcaagcgttagagaaggagagctagagaagatggatcctgctccaaggcgcatttctgaggctctcttggagaagcagcagagcttctccgttttcatctctgcggcggtatagtgcggcagatgtagagatgcctgtagagtggtgcttgttaacctcaattctcagtttcttatatccattccaggttcccatattgtggagggttcgaacgtgcctaaagtgaagacagaaaacaacaacaacaacaacagactcctagttcacacaaaaaaaaaacagaaaacaacaacaacaacaacagactcctagntcacacagggctctgcgttgttaccactgtttaagggcgaagtctctgcgttgttaccactgtttaagggcgaat

SEQ ID NO: 159274 - DNA, 310 bp, Zea mays
  Clone ID: MRT4577_76831C.1
gtttcatcagcttggtcatggagaggacagtgctctgggtgtgaaagacatcctttttctattttttcagctgtccagcatttgtctctaatagtcaaccaaataaaaaccttgcattttggaggcgcccaagatttccataaccttttccaaggttcaaatttaatggagcctagaaagaaggtttttatagcaggtcttagggcttgtttggaaacttaaatcccctccgggatttccagggctaattttcccctcaatcctcaggagtcccggaggggatgtaagtttccaaactagcccttagaag

SEQ ID NO: 159275 - DNA, 2192 bp, Zea mays
  Clone ID: MRT4577_76832C.1
tcgaggccggccgggccgggagatcggacgggcgccgtgagtccaaacggttatcctcgcagccctctcctctcctctggcgtctgcctcacaccacctcgaacgcgatggcggcgccgctcgcccctctcactgcggccgcggtgctccgcctcgggagccgaggcctgcgccaccgcatcctcctcgcttcgctccgcccctgctcctccgcaaccccgccccatcgttccgccctcccggccgctgcacgccgggccccgccgcctcctcgccgttgcgcccacactcttgccgcgtctgcggccacggccatctccgagggtcaggcggatttagtgcctggttcaacaacttcaaccaagggacgcatctaccacgagacgtatggttgccaaatgaatataaatgacatggagattgtgctttctatcatgaaaaatgaaggctatgatgaaattgtccctgatcctgagagtgcagagataatatttatcaacacctgtgccatccgggacaatgcagagcagaaagtctggcagcgtctcaactacttttggtttttgaaaagggaatggaaagctaatgttgctgaaggtagagcaaaatctatgcgtcctccaaagattgctgtcctggggtgcatggcagaacgactgaaggagaaaatactcgattctgataagatggttgatgttgtttgtggacctgatgcacatagggatttgcctaggttgcttcaggaagtcgattacggccacaagggcatgaacacacttctatcactcgagggaaactatgctgatatcaccccagtaaggatctctgacaattcaattacggcatttgtgtcaatcatgagaggttgcaataatatgtgctcattctgcatagttcccttcactagaggtagggaaaggtctcgcccagtgtcttctattgtccgtgaggttggtgagctatggaaagttggtgtgaaggaggtaatgcttcttggtcagaatgtaaacagctataatgacacttctgaagtagaagagttggagcctggcaaaaattggcaactcagtgaaggattttccagcatgtgcaaggtgaagaatatggggctgcgttttgctgatctcctggatcgattatctttggaataccctgagatgcggttcaggtttacctcaccacacccaaaggatttcccagatgagctactgtatttgatgcgggataggtataacatctgcaatcttattcacttaccagcacaaacaggcagtacagcggcgctggaacgaatgcggaggggttacactcgagaagcatacttagaacttgtccacaaaattcgtgatgtcattcctgatgttgggctaagcagtgatttcataactggcttttgtggagagacagaagacgagcacgccgagacccttagccttgtgagggctgttggatacgacatggcctacatgtttgcatacagcatgagagagaagacccacgctcaccggaactacgaggacgatgtacccgaaggtgtgaaacagaggcggctcatggaactgatcaacactttccgcgagaccacgaagaagaactacgactctcaagtcggcacagtgcagctcgttctcgtggaggggcccaacaagcgtgctcccaaaacggaagtgatagggaagactgatcggggccacaaggtgtcgtttgcccgcgtccctgtcccgcacacgttcgaaggcgaagaagcacgtgagccggcagtcggtgacttcgtcgaggtgagaattctcaggtcgtcgacagcaacgttgttcggggagccgattgcacgcacaagcctgagcgcgttccacagaaatgtttcacccggagcgcaggctgctgctgcgtgagtagcggttgaatttttggttgtggattgaaatatgtagtgatattttaaatgactagagtttttgatatagaggagaaactgagaacgtgcatgtcagcctcatgagccttggtcatttacttttttgataaggttgtattgccatgtaaaggtcaaacaatgttgacaaagttttttgcttgttactatgaagtatgaacgtcagcttgaaatggcttttaaaagcaaaaaaaaaaaaaaaaaaaaaaaaaaaaaaaaaaaaaaaaaaaagggggcggccgttttaaaaggaatccaa

SEQ ID NO: 159276 - DNA, 2461 bp, Zea mays
  unsure (1)..(2461): unsure at all n locations
  Clone ID: MRT4577_76833C.1
gaagcgctagggtctcgcttgcttgctcccggaccgagtcggatcgagtcggaggcggctctctgcttcctccgcccgatgctcggttcacttcactccaaccaagtccaaccacgcctccgctgtccgcccgtccacgctgcctctctctgcctgccctcctctccttcctccactccttgccgaaactgccacgagcacctcctgagccaagttcgtttacttttcgagtttggtgcggtgctcgcagctcgctggtgctgctgacgcggccgccgccttgattagcaacaagccacgcccgctgttcctggcttcctgctcgggctggccgctttgattattcgtctctttttctttctcggcgatcgcctttttcccgagattgcatttttctttatttgtcggcggtacggcactttggctccttccgcgaggccgccggccgtgaagatgcagcagcagcagcagaagctggtggtggcgtcgtgaacaagaaattcctccggttccacgcggtcccctcccctcgctttggccccatttattttcttccttttccgctggttttctggtggggggcggaggggttttgcgctggttgttccggttgggtttaggacgccaaccagctggttttccccaccccgcttgcgcttccatccgtgagctcatccgcccagctggaaaacaagaatcctcatgagttctagaagggaagtcgcgatctctgggtgaggtgtccgtttcctcccgttgctggatccgctgactgaccgatcggcagagccgccatggcgtcgtcgtgcatcccggccggcggcatccggctgccggacctggagatggtcaaggccgcgccgccggcgcactccgcggcgtcctccacgctctcggaggcgtccagcgcgtccgcagtctcctcgtcggccacctcgtcatcggtggcgtcgctgtcgctcaagcgcccgcgcacgccgcggaagcggtccagccagacgtacaacgaggcggcggcactgctcgcgtccatgtacccctccgtcttccccgtcgccaggggcggcgccgcgccgcgccgcctcctcggcctcgcctccgcgctcgccgacgactcgtcctgctccgacctcctcccgccgttcccagtccccggcggccacgccgccttcctcctccgcgacctgacgccgccgtctctgcctctgacgccgcggatccccgatgccgagagctgctcgtcgcccgctgccgtcagcagcgtcttcagcgagttccgcgacccggcgccgtcttctgcgacccctgacgacgctgcggcggcgcctgacgagcccagggatcttggcttcgacgatgacgacagtttcgacgccgattctattctgtgcggcgtccaccagagcgcggccgagggcatcgatggcatcatgggtaagctctctatggaaaacaacggggcgtccggatcaggctcaagcgttgactccaacatgcccgaatccaagatgcacccctacctcaggaaccttatggtgctcgggctcagcttctggcaggatcagaatatcatcatcaatcaagcgctgaagcggcatagtgtcgatcctgaatggtggatgtgccctgccatacctgtgaaagacattaccccggcaccaccgccttcagtggcaatggcgaaggaagactaagaagaagtcactggggacaatatacgaggaggggactcctgagcctgccaatggcgacgacgatggagctttggcactgccagagacaggattggggcttagcttgaatactgacggggtgctcaaggcgtggtgtggcagaggctctgcgtttgctgatggcaatgggcctgacttgccattgtcccctgctcatgtggtagtaagtatttccagcttatctaaagatataaaagatcttacatttccagttaaaaattaaagatggctagagctcttggaaccctgagtagtacctgctattagttcatatcgtctggtaagtagaatctatttcacttcagtagaagtacagatcgtctgttgttttatatcagcagtgatcagaaaatcttggcatgcattgctttgtttcagtcccttcgcatttcttgtcaatggaagatttctcccagaagaaaatctgtgtctgaaatttgctaatatgaaatagtacagtatgcccaccagtacttgactttactggctcaatgggccaggcagaaggaaattccaattggttgttttctttgagttgaatcattataacaaacttagccctcattatgttgtatctgcagtttttgaattcaattgaagtaaaaggaaaatcatagtttggtcctttcgcgaattttttttgtccaattttttgtccttgtaggtttttccgttgcattagaaaacactgtangctgcttccttgcgttgcctctccgtntgcagga

SEQ ID NO: 159277 - DNA, 1116 bp, Zea mays
  Clone ID: MRT4577_76834C.1
cctcgaggccggccgggagctccggccggtacacggaatccgggcacccacggtttccaccaaagcgacgcgccccgcgacatggcggtggtgcgcctgcgcgtatctccacgcctccgctccattcccctcctgctctcccagccagacgccgctacagtccggcgtagtttcgcctgcgccagcgcctcccaagcccccgcacccgcgcgggctatggcggccccgtcctcctcatccgcgacgccctccccgtacacgacgctcgtcgggcgcgtgagctgcgagcgcgagatcaagcgcagcaagttcatcgccatcgcggccccggtccccaacgagcgtgccgccatggccttcctggatcaggtcaaggatccacgtgctacccataattgctgggcatacaagctgggagatcaattccgttacaacgatgacggtgaaccttctagtacagctgggaagccaatatactctgccatcatttcctctggcattgataaggtcatggtggttgtgattagatattttggaggcataaaactgggaaccggtggactggtgagggcttatggtggggttgcttctgaatgtcttaaagatgctcctacttgtcttgtgaaaccaaaggctcgtgtgggtatggaagtaccatttaatctgttgggaacagtctatcatcagctacaacatttcgaagctgaagatatcaaacaggactatgacactggaaaagatggtaccgttatggtcatgttcgaagtggaatatgaaaaaattgagaatcttggaaatgcagtgaactcagcttgcagtaggaagatagaactatatctataaaccacaatcacgggttaaggatgagtgtaagtgtggagacacgcaatcgtatgtacttgcaagcctctagttcttattcatttgcatcgatatttattctggaatctccatggtttttttttcaccaagcatgtaggcaccagaaatattcagcgccttatccaagctaactgctagagtgctaggccatattgaactgctccagtgtaaactgtacagtcatctatcttttgaatttcaccatggtaatagtttaatgacctttttttttac

SEQ ID NO: 159278 - DNA, 622 bp, Zea mays
  Clone ID: MRT4577_76835C.1
cattgggtacctcgaggccggccggggaacaatattttttcctgtctcttcttctgcggccctctgcattcgaactgcgtatagagtgctagactgcctggacacgatgtgcgagtgcacgaacgtaagaacgtggtacagtagctccagtatggaagaagcatcagtgtctgatcgatggtgagctccgttctcctctcgaatggagatctgctgcgccgccccttgtagtcggccgcgtctacgtcatcggcgaggtatgagcccatcaccctcgcgaccagctccaacactccatccaagcaaggtgtcgacaggcaactgtggtacacacaccaatgaatctctctcctacatacatggcacgctgcccatcgattatgactgcgacccgatgagactctgggactcggaggcacactgatgtcttcatcaagaccaatcggctggactacaggtaggcgattgacttccgctacgtcatagcgtggccgtgatgagcgccatccccacggatatctacaacgacatcgtcatcatcgcgtcggtgaccgagctgccttagttcaatactgacgacttaccgcctgcgctaacctacgaatagtgggccgactcctac

SEQ ID NO: 159279 - DNA, 285 bp, Zea mays
  Clone ID: MRT4577_76836C.1
tttgttttttttaaagaagcccatcaccattcccatatgcttttcctgttgggtcacagatgaaagcacctaacggaaacaaaaccgcagaacatacttatacttagatcaaacctaggcaaccactatgcgctcgaactcgaaattctcactggtctttatcaaacattaaccttcctttgaaatcgggggggaaaaacccctttactgcgtattgatcattaatgaacatttcgtcgtatattcactgctggagcccacttcgacagtgactcagacacactg

SEQ ID NO: 159280 - DNA, 562 bp, Zea mays
  Clone ID: MRT4577_76837C.1
tcgcgatctagacttttttttttttttttttttttttttttttttttttttttttttttttttttttttttttttttttttttttttttttttttttaaaaaaatttggccccccccaacccaacaaaaaaaaatggttttgccgatccaaaggggggggggcgggatagtggaaaaaacaaaaaagggggcgggtcgattctccatggggggggccaacttacccgaaatttaaccgcaaaggggccaattaacaaccaaatttaaaggtacccctccccccccaaagggaggcggtttttgggggggcccaaaaaaagctttaaagagaaaaccaaactccggaacctaattggggggggggggttccaaaacgggcccccaaagaaaagcaacccaaaacttggagcccttgacggggggggttttgggggcggggggaaaaacacccttgggggggccggggggagcccaaaaggtggccctgcccccggggaggaagggagttttagccttttccagggtttccaccttgccaacccaagccttgggggggcccccc

SEQ ID NO: 159281 - DNA, 228 bp, Zea mays
  unsure (1)..(228): unsure at all n locations
  Clone ID: MRT4577_76838C.1
ccggtaccggccaattcccggggcgcctccctnatccaatcttctcctccctcccttccccgcgtcgcggcgggacgacctcgccgctccctgcctccctctccccgccgcaggggctggagatgcaggcgactgccgtctccttcctcgcccgcccactcccgcgggttcggcgcattggcagctggggagcggatgcggcgctggtgcctgagggcgtgatcgggc

SEQ ID NO: 159282 - DNA, 436 bp, Zea mays
  Clone ID: MRT4577_76839C.1
ctgcgatgaccctcctaattcaaaactacatgatgaaagcctagcgtgtaccagatgaacaaccgcctgcggtcttgcgacccaagctctcccttcaccgggctcaagggcgagggtagcagccgtgggtcgggatgatatctgcgttcggcacacctccttgttactttaacggacgcgaagatggcatctctgatctcgttcttgaataggatgggcttgtgagcacgacggaccacgctcggaccttggtttgtatcggtcttccttttgctgtctacgtcattctgtaagaaagaggctacagagcccacgcaacacggaatgcagctcatgcgactctgcgcggagcgtaatcagagaccttagatacccaagaatcaaattctcatatttggacgccaaaaaaaaaaaaaaaaaagggccctaaggtcgc

SEQ ID NO: 159283 - DNA, 759 bp, Zea mays
  Clone ID: MRT4577_7683C.1
ccggccgggtccaaaagtgtccatattgacaattaaattgagggaagatacattctaattgacaaaagctgagccacctatttattacatgccaactaaaccaattattgatgatccagccattgttgagcagaacaaggaaaaggtattcgaagaatggaaatctatgcgcagggctgagctgactcggtttcaaaagcaagttgaggagcaatatctctcaaatgtggagaggcaattggagaggatccagaatgcccggaacgctcggaaggcgaatgggcctggtaacatgcaagaaatggacaaggagctggacacccacagggcggagcatggtccaaagcctcggcgagttcccgaggagggcggcaatgatgatgacgaagatgcagaggacatggctgcggaagacgagctgatggatgaagttttgggcatcaacgatgcaatcaatgaggacccatccaagccgtccgaagaagctactactgaaggtcagccagcaaccgaggaagcacaataggattctttgttcacacaaggtaggcgtaccattccggcattccgtatgcttagttgccgtcttgttgggtgctgtctgtgcgtgtatttttgttagacgtcccccaatggttagactgtgttttaatattgttgttttggccttttgatgttgaggccatacaactgtcaattattatcttataattgttgtaagcatactataattgtcaaaaaaaaaaaaaaaaatttgcg

SEQ ID NO: 159284 - DNA, 670 bp, Zea mays
  Clone ID: MRT4577_76840C.1
ggtcacagcagcgagccatcaacacgatcacgagtcgcaagcacgtacgttgacggaagctcaagttatgaagaagcaccagtgcatgatcgatggagcgccagcctctccactccgaccaggacctgctgtgcctgcgagcgaagcgcccctctcagacgtgtgcagggagagacgctgtcatggcggctgttttttgcgagcgtgagctccgcccgctgacggtcttggacatcgtggctaggcaccttcatcgtgtggcagattcgtcaaggtacgcaaacccttctacctgtgtgtcgctcagagttgtagtttcccgtctaaactcttgcttcacacatcccgcatccacccctgcttatcaataagcaaagttagccagatgattcttcgaaatttatgtcctccgtattagagcttgcttctcaagcttcttggtattgcactcctactcgatttgtgctaatcgtgggggcaagaacggcaaacaaaaatattttctttcgttatcccctccttcagacgcaagtttacgatggactaatgaatctctacgtccggcatgggatttaccttcagctacagaccaaacttcgtatgtattcctggaaatattacttcctctcattggttgctgcaaaagttattcttcatccgcattttttgg

SEQ ID NO: 159285 - DNA, 827 bp, Zea mays
  unsure (1)..(827): unsure at all n locations
  Clone ID: MRT4577_76841C.1
tattttatgaagtatgtgaatatgagtgatgagcgtaaaagttccacatcagtcgaatcacatgacttaaagaaagggaagaggcatagcgaggaagatagtgtagttgcaaagagaaatcgacaagttatggaagatgaggctttggcaagaacatcgcaggaaagctttgcagaagagagtacatctgttactgaggtagtaagttcacttgatagtgctggttcttccgagagaaacaaagagagaacacattctgtcggccctttgaaagatgtacttccgttgacttttcgactcatgcgtgtccaaggtcttccatcatggactaacacttcaacagttaccattccggatgtcatacagggtgaagtgcttcttgctgtactctcaaattatatggtggacatggattggttgcttactgcatgtccaagtctaaggaaagttccacatgtcctagttctgcatggagaagatggtgcttcattggagcgcttgaagaaaacgaagcctgcaaattggatccttcacaagcccccgctcccaatatcatttggaacacatcattcgaaggccatgctgcttgtatatcctcaagggattcgtgttgttgttcacactgcaaatttgatacatgttgactggaataacaaaagtcagggattatggacgcaagattttccatggaagaaagcaaatgatacgagtacaaaatattggttttgagaatgacctggttgattatctcagggcacttaagtggcctgagttcagggtaatctcccagtttgccgntgatgtcaacatcaatgcagcattctttc

SEQ ID NO: 159286 - DNA, 790 bp, Zea mays
  Clone ID: MRT4577_76842C.1
agtccccaccgtcacatcacatcacacttcactcttttcctccactttactcttcactacgctccatgggctagaatctctctctgccatcatcacacttcacagttcagagagagaaaagaagcagcagagagctacaagaagaagagctagaaggaggagggggaatccatggggaacatcctgaagtgcttcaggggagacgaagaagaagaccactacccctactaccatccaggctccaggccccactacccccagcagcagcagcagcagcaagctgatggccatggagtcgcctccctggcgcacgacctcctcaactttgagagcgcgtccatggttcctgaagggctcaagcagcatgttacggcgtccaagaaagcacagattaaatggtaccagaatatgttggaggcatataagaatgccagaaccccaccgagaacaccggaagaggctgcacaactagtcgtatcagccctaaactggatccagagagctgatttggaggttcataaccaaaacattggagatggcgatggctttaccgcttatgttgccacaaccgatccgagggagtctgggaatgttcctatagaagtacatgagatggtgattgcgaggactgaagcacgcaatcgtagggattacaagagtgccgatgcacttcaaagtagacttaaagaagctggatacaagataatcgtctgttcagacgaagagatcctagcaaggaaataccgaatcagaatgaggggaattgatgcaccagagcttaagatgacat

SEQ ID NO: 159287 - DNA, 230 bp, Zea mays
  Clone ID: MRT4577_76843C.1
gagctcactagttggtggccgccctttcttttttttttttttttttttgggatgctcgaaaatacttcatgcaccaaagaatattctcggggtacatataacatattgtggaagaatcaaaagcgtgacagggctcttagagatagccgggaaccatagaggcgccatatttggctttttcgaggggaaaaacgaggggttgacatctttgaactagtggcatcgcagag

SEQ ID NO: 159288 - DNA, 421 bp, Zea mays
  Clone ID: MRT4577_76844C.1
gggacacgcaacaccactatactaatagcacgaatgccaaaaagcacacaagagggcaagtggaaaatataccaaaccaagaacagcggaccaacaacatcgagagaggatccaagacgaaagcgacgcgaccggcgctagcaggacaaagcaagcaacgagaccatgcaaatgcagaagatgagctcagatcttgccgagcgggcccagctgaggcgactcctgagggccagccttgaccggcaggaggaacatggacagcgacgcactgaccgaggacagaagcgatcccccgcccagcagcaggaacttgaccagaaaacctctcttggagaacgaagccgcccaacgcctccaagaacttgctctgcagagaatagtcggacgaccgccacgtcagagccgtataggaccaactgcc

SEQ ID NO: 159289 - DNA, 257 bp, Zea mays
  Clone ID: MRT4577_76845C.1
tccctatagagagtcgtattaactgcgcaggattgagcatcgtgcatgtgtaaggaactctggggagctttcgactcattacctacttcatcacacgggttgaagattcgagatcagctgcttatgtccagcgaatattgcttgaggatgggaatcatacagcagcgttaagggaaagatcggactgccgactaagtagtactgtcagtggagaagttttgttggttcccggacaggaacgagctcctcctggaaca

SEQ ID NO: 159290 - DNA, 171 bp, Zea mays
  Clone ID: MRT4577_76846C.1
ccttctactctgggcttgaggacaaattttggttgactgtaaaactggttcccggggaaaaatttcccgaactgcacccttgttttccccttttggttcaaccggtgacaaaaattccaaccaaattctggtccctttgcaaacccggatggggaggggaaaatctggggc

SEQ ID NO: 159291 - DNA, 366 bp, Zea mays
  Clone ID: MRT4577_76847C.1
agctgattatatagccctagttccaataagatgaaaatatacacgagtggcacgtaccgtgtgaccgaaatggaagctgacgaatcaagggaccagatgattaccccaacttaaagctcgataatcgaaagcgatggtgaaaactggtaaaatctacatttgtgaagaggttaactcaatggaagagtaataaaaaaagggggggcccttctatgggtgaaggtttttattccgttgaatttcaacttttaattttttttttgggggcccaaaaatacattttttgggagggtgtttaaaaaggtgggggtgggaaaatcgtgggggataccaaatatatgtgttttggaaaaatactcctttttt

SEQ ID NO: 159292 - DNA, 437 bp, Zea mays
  Clone ID: MRT4577_76848C.1
ggggaccaaaccaaacttaaccgggggggcatagctttttacaggggcatcaagggggggggggaacaaagggaccctttttaaaattaaagctcaggtccacacttccaccccaggagagggacccggggagttacccctatgcaggggggagaggttccgttttcgacgctaaaaacccttttttcctttttttggcccccgactgggcggccgcgttcttgaacaaaaaaacaaggacccggacaaggacggccacaaagtcggggaaaagggggggggggtgcttaacggggcccatgtccccggggggcgccctttcaaggaaccccgggggggggaacaccacggagcccaggaagaagagcagccccaagtaaaccccaaacaaaaaactggttgcggaggggccaaaaaggaggggggaagctgcaccc

SEQ ID NO: 159293 - DNA, 710 bp, Zea mays
  unsure (1)..(710): unsure at all n locations
  Clone ID: MRT4577_76849C.1
ttttnnntttttaaaaagaaatccttaattaatatatatagctaccgtaatgtgtttacatttttttttatatatgtatatgcctttattttagacatacagacagaaaacatgaaaacgaagaagcccaaaacattgttaaaggaggagagctgctgagtaaggacgactagaggagaattaacaaagcgcggtctctaagctcccgactgttccgtatgaattggctttgatacagtacatacacggcgatcgatgattatacctcccgcagggctgaagaacccttcagaagaagtcgaggctgaagtcgccgaccacggcgccccggccgatgtcgaagtcgaaatgcggaaggagcttgtgctccagcagcgactgctcctcggcgccgtagccggcgaagggcgcggccttgctctcggaggcccagtgcagcggcgcgtcgccgccgtccagcgcattgttgttgttgttcacctccggcgcgcagttccagttgttgctgctgttgctggagctctcgccgtagcccaggttctccgacacgtccagcacgctgctgtagtccacgaacgcggccgcgtcctgctgcttgccgccgccgcccatgtggccgtacaatgcggcgccggccgcgtcgtcgaagccgccgccgaagctgccggtcagcgggaacgggtcgaacacctgctgctgctgctgatgct

SEQ ID NO: 159294 - DNA, 1982 bp, Zea mays
  Clone ID: MRT4577_7684C.1
aattcggcacgaggccgtgatgcccgctgccgcgcgcatcttcctccccgcaccccgcatgccccgcgccgcgaactgctcctcccgcacgccccgcccgtgatgcccgccgccgcgcgcgtcttcctccttcctccccgctagctccgcgcttccttcgcccaccaacgcccgcacccgccaagtcccccaccaacgccactatagcccgcacctctctagactagggcacccaaaccacccgccaaacccgagccgtcgtccccagtgtgccactcgacgcgcagccaaacccaaacccttcctccctcccgacgggcgacggcgatggccgccgcgacagagaagacggctgaggacatccgccgcgagctccaggagctccagcgccagcaccgcgagatcaccgagcgcctgcgcgacccccgtggccttcgccgcggcgcccccggccctggtcctggacctgggcccccccgcccgctccgcggcttcgtgagaccccatgtgggtgcggaagtggcggatcaggctccgcagaagcgtcggctgctatcggccgtagttaaggttgatggcgctgaaaataatgaagaaggcacaaaggatgccaatggggaggggcaagaggcgggttcaggtgccactgaaggcagtgacaggaggactttcaacactggcgggttcagaagggacgggagcctgtggatgcagaggagggtggactataattcgctgccagagccagctccaagggagcttcccaggaatgaggacccgagtttggtgagaaggaataagaggatgctggggcagcttcttgtcggtacattagagaaatttcaacaagaagataaaaagctatctaactctgaggcttttctgcgtagatcagagactcagcgaaaggctgagcaaaaggttcgcgaagaaagtgaaaggctgcgacagcaggaacgtgagcaaattgcagagaagcgtaagcgtgatatgacgctccgcgctcgtgtagctgctaaggcagaagaaaagaggttggagctgttgtacattcagtggactgagcatcataaaaggctgtccaatttcttaaggttatttttatttctggtccaaaagtgtccatattgacaattaaattgagggaagatacattctaattgtatgcagacctgatgtttgataactattagtgtatctatttacattgtatactgatgaacaatatttgttccatgtttgactcttatcttattacccccttatgtttggcaggacaaaagctgaaccacctatttactacatgccaactaaaccaattattgatgatccagccattgttgagcagaacaaggaaaaggtattcgaagaatggaaatctatgcgcagggatgagctgactcggtttcaaaagcaagttgaggagcaatatctctcaaatgtggagaggcagctggagaggatccagaatgcccggaacgctcggaaggcgaacgggcatggtaacatgcaagaaatggacaaggagctggacacacacagggcggagcatggtccaaagcctcggcgagttcccgaggagggcggtaatgatgacgacgaagatgcagaggacatggctgcggaagacgaggtgatggatgaagttttgggcatcaacgatgggatcaatgaggacccatccaagccgtccgaagaagctactactgaaggtcagccagcacccgaggaagcacaataggattctttgttcacacaaggtaggcgtaccattccggcattccgtatgcttagttgccgtcttgttgggtgctgtttgtgcgtgtatttttgttagacgtcccccaatggttagactgtgttttaatattgttgttttggccttttgatgttgagaccatacaactgtcaattattatcttataattgttgtaagcatactataattgataccttgatttggacgttctttttctcgtccc

SEQ ID NO: 159295 - DNA, 318 bp, Zea mays
  Clone ID: MRT4577_76850C.1
attcggctcgaggggttcacagtttttacgatgtggatcagccataccaacacgtggcgtttcaaatgatggcctgccaaaactagtagagacgtccgatgaatggattgcaggtcgaactgggattcccgacacgcgagctcttctacgacatgaaacatagcggcggctctcaataaaagcgcctgaaacggcacttgaactggtacaaagtagaacctgaagatgctagaccttgttctcctttgtgcatatcctccagatgatctcgctggacgtgccacttaagcgctgacggacgtgacgtgcacaaaggct

SEQ ID NO: 159296 - DNA, 1029 bp, Zea mays
  Clone ID: MRT4577_76851C.1
attgggacctcgagccggccgggaaccccttcaccacacgcgaccgccgtccccggtcgacccacgcgtccggaacccacgtctcccctcgccccgcgccgaccctaccaaccctcgggcccgcccatggagatctccgcctccgctgcgccggccgcctcctccccgcccgccaggccgctggtcctgcgcccgttcgcctcgtcatcgccccacccggctacgtcctcctcgaccaccatccgccgccgcccatcctcatcggccactgccacggtccgccgccgcgcgcgcacccgcccccgtacagggcggtccaagccccccgccgacgcgggcgactacttctccggcaacgacggccccggtctcggtggttccggcggcggtgacggaggaggacggtggagctggaacagcgggttcggctctggatcagagggccccgacgactgggagcccgatgtgccggcgccccggaggtcagcggcggatgcggcgctcggggtcgtctacgagctcatgtgcctcatcgcgctctccaactgcacccagttcgccgtccgcaggctcgcgggcctcctctccgcccgcgtcgccgcattgcgattcgtccccaccgtctgctgatcatccgtggggtttgttttacttcctcttcctcctgcccgtctacctgaaatcgcttctgtacatatatctgcctgcaactgcggttttaggggattggggccttgggggaatcaggacctctgcctgttgttcctcggtgcgtgcctcaagcattataccgttgaacagtagcaaaattcgtcgaatccaattggagaaacacaaaaataagaccaacttgtttatcctttgttgttgtactcaagattgattgatgcctattgtgttaggatgcatcattatctgttccatgtgtatataaatgtgctgttatttattttcttggtacttcatggaatgtcaagggcagtgcgtttggggaaaaaaaaaaaaaaaaaaaaaaaaaaaaaaaaaaaa

SEQ ID NO: 159297 - DNA, 366 bp, Zea mays
  Clone ID: MRT4577_76852C.1
atccatgacaaaacatggctgtgaatgggagtgctatgtggtcggttttggggccccaggttccaatggttgtgcctttggtgtttttggtaagcggcccttgggccgtccttccaaaagtcccccaagccagaaccttaccggcacctattggcagggcctgcttgacccttaaaccaccttgtattgcaaggccaccggtgcccgtccccattaccaccgtggccgcttccggtaccaggacctgaaccaagcccccttcaataacatgggcgcctgccgcaacattcccatttttaaagattggcttgggtgtgggttctgcttcgagaacaaatgccataagcctgtggagtgctccggcaa

SEQ ID NO: 159298 - DNA, 3211 bp, Zea mays
  Clone ID: MRT4577_76853C.1
atgcagcttcataccctagaggatgggtttcgtgctttactattgatatctcatgttattgtcagtgctggattgacattgtttgatgagggtgctagtggtggaggagtgcccaggggcgttgttcccgtgggtgctgctccagatggcagggctgagtggatgggcatgaagttggacacttttgatggcagtggtactccggtcgaggcaacgaattggctaacttacgtggaggataatatgaatgtctttgagattgtgtatggtgattgtgttcgctttggcacacagctgctgaagggagaggctcaaaattggtggagaggcgtgcaggcagctcactcttcttcaccaagagtcctgtcctgggatgttttcatcaagcaatttgagaggaggttctacccggtcaccttcctggagaaaatgaagatttatttgcaatcctacaagcaagagaagaagtctgtcacagagtatgaagtgggcttcaacaagatggtccgctttgttcctcatgtggcttacaatgagatggagaagggcactgtcaacatgatgtcaagcgttgagcagcaattttcagttccactccctctgcaggagttttatgtgcctgagacttctcagttcgtgccgatgcagggttttccgcagtatctagctgcgcctactcctgcaccgactactcctttgtcgtctcagtttggagctccgcgtctgcctcacccgacggctcagtggggttcttctgttaacttcactctaggagcttcctcttctgcggatcgccggtcaaggaagtcgggaatcttgttctccatggtggtggagggtgaggctgccttgcgtgtgcgggacatccgagtggtgtgtgactttgccgacgtgtttccagcagagcttccaggcattcctccggagcgcgatgcagcttttgaaatcaagctgattctgggtacgcagcctattcataaggccccatatcggatggctccaaaggagcaggttgaattgaagcggcaattggatgatctgctggctaagggtttcattaggcctagcaggtatgggcattacgagttcgtagtcatgtcttttggcttaactaatgcccctgttgcttttatggaagcaatgaataggatgttacatgagttcttggatgactttgtggttgtgttcctggatgataccctgatctattcaaagaccaaggaagagcatgagcggcatctctgtctcgttctgagtgctcttaggaagaatcaattttatggcaaattgaagaagtacgccttttggctgtccgaagtggctttcctagggcatgtgattagtcagcagggcattgcggttgatcccaagaatgtcgcggctatggtggagtggaagagaccctctagtgtctctgaaatccgaagtttcttagggctcgctggatattatcgacgcttcgtaccaaatttttccagcattgctaagcctttgactagacttttggagaagggtgttctgttcgtctggtccagcgattgcgaggtcatttatcagacattgaagaacaagttggtgagcgcccctatcctagctttgcctgagagtgggaaggcaaatgtggtggctgatgcccttagcaggtccggggttccaaaagtggccttgcctttgatcactgatctggaccgtttggggatcgctttgtgctatgtcggcaccgctagtgaggagactcggatgtttattcaatcctccctcatggagagagtgcgtgtgactcagcagcaggatcgattattgcaggaagctcgaaagagggttggcgatggtaaaccccgtgagttcaccattgatgagaatgatttggttcatttcaggggccgtctttgtgtgcctcagaaatcagaggtgaagatggatatcttgagagaagttcataaaacgccttacaccgttcaccctggcgaaaccaaaatgtaccgagatttgaagcaaaacttctggtgcaagcggatgaaagttgacgtttctaaggatgctatatgggtggtagtggatcgcttgactaagtctgcgcattttattcccatgaagaccaccaattcagcttcagaattggttcccttgtatatgaaggaagtagtcaggcttcacggggtacctaagtccattgtttctgatcgagactccaaatttgtatccaaattctgggagagtcttcacagtgcattgggtaccaagctttcgctcagtgtcacttttcaccctcagactgatgaattttcttacaacaacatctaccaggctagcatcaagatggcaccatttgaggctttatatggcaggcggtgtatctcccctctgtgctgggagactttgggagagagatccctggttggtcctgattgggttcagcagacttctaagaaggttcgggaaattcgtcagaatattttggccgctcagagccgtcagaagagttatgctgatgtgaggagacgggatttggaatttgcagtgggtgaccaagtccttctcagggtattacctactaaaggagttgttcagttcggtgtctctagaaagcttagcccgagatacattggactgttcactatcttggcccgggtgggcagcctggcttatcgcttgcaattgccggattccatggcaggggtacacccggtttttcatgtctctatgttgaggaagttcttgcgggatccggaccatcagattgagatggaaccaattgcggtgcagcaggatctgactctggagtgtcgttcggtgcgtatattggaattctcggagcgtgtgttgaggaagagatcaattaagtatgtcaaggtcttatggactaatcagtctgagcgcgaggctacatgggaacttgaggagctgatgcggcagaagtacccggaacttttcgttgtgggtggtggacttccggatcgttcttagggattttgcccaaacttccggtgaaggcacctaatttctgcttggggaatagagggatgtagcagcacggtcacttcacctttaattaaaggaacccccacttaataatgttgttaatcagagttggtcaagtccagtgaattactttgttcttggttgagcgtttgttttgggtgggctgagttccttatcccatttgttttacttcagttgggtcctaattaagttttaccacttttgcatt

SEQ ID NO: 159299 - DNA, 258 bp, Zea mays
  Clone ID: MRT4577_76854C.1
cgctgagtggactgtgatgactgtgctagctgcttgctctgttcctgcctcacctcttcccgttccagaaatagataagttctttcccgtcaatcctctaggccctgagtggcgcgtcccgtctgaagagcaccagattgcgcacctccccttgagtggagtgcctctcatgatccttgacgaggagagagagcttgaaaagctgtttcagctgggccccccttcacctgtgaggatgccctctccaccatgggaatc

SEQ ID NO: 159300 - DNA, 1701 bp, Zea mays
  Clone ID: MRT4577_76855C.1
gtagctgggaggatcatcttgcactggcagagtttgcttataacaatagctaccaggctagcatcaatggcaccatttgaggctttgtatggcaggcggtgtatctcccctctgtgctgggagactttgggagagagatccctggttggtcctgattgggttcagcagacttctgaaaaggttcggaaaattcgtcaaaatattttggcagctcagagccgtcagaagagttatgctgatgtgaggaggcaggatttggaatttgcagtgggtgaccaagtccttctcagggtatcacctactaaaggagttgttcggttcggtgtctctgtaaagctcagcccgagatacattggaccgttcactatcttggcccgagtgggcagcctggcttatcgcttgctattgccggattccatggcaggggatctgactttggagtgtcgtccggtgcgtatattggaattctcggagcgtgtattgaggaagagatcaatcaagtatgttaaggttgtgtggtctaatcagtctgagcgtgaggctacttgggaacttgaggagctgatgcggcaaaaatatccggaacttttcggtgtggttcgtcatgatcttattgtccgaccgtaccggtatattgagcatcatatgttgcccgagaaggggtatgatgcagcttcatatcctcagagatatgaaggcagaagtcattactgcatttgtagtcatgtgcattcatggagagggcaactcggaagtgcaagtggttcgaccaccaataccttgagacatgaagagtggcaccatatcatgctatatatgttgaccaaccttcacgaggtaatgccatacatgcagcaatttcttgatgacttctcgtgtcgatcaagggatccaactccacaggaatatgatacccttcttagaaagggtgtgggaaatggattcccgatttcatttcctggttcaaatagaagggttaggacatttttgggtatgacgttaatggataccgttttcacacaacaagctacgaccaaagtcagcccaatcgaaaagctgcatgttttggagtttttataccagggcttgatgaggttgagtattatggaagaattgaaaaaaatatacgaattgaattttcatggttccaaacctctaactctagtgatattcaaatgccattggttttaccctgaagtgacgagatggacacattctaatattgcgctagtagaaattcgacaagtttccatcttaccaggagacaatgtctatatcatggcccaacaggccacacaagtgtattatctctcatatgcatgccaaatgaaagagcatcttaagggttgggatgttgtgtataagatatcactgcatggtaaattacctgttccaaatgatgaagattataacttagacccaaacacatatgacatagtgttctttcaagaagatgggctagaagggcgatttgagatagacttaaccgaagcgattggaatggaagtagatattgcaatggttgttgacgaggaggataatgaggtgcaaaatgagaatgacttagaaatgcttgaaggattacatttaggtaatgacaatgacaaacttgcacctttagatagtgttgactatgaaatggttgatagtgatgatgagacttatgatccggctaatcctgaccatgaagattatttttaa

SEQ ID NO: 159301 - DNA, 2378 bp, Zea mays
  Clone ID: MRT4577_76856C.1
gaagggtgttcccttcgtctggtccggcgattgtgagatcagttatcagtcattgaagagcaagttggtggacgcccctatcctagctttgcctgagagcggtaagcgtttcacagtttatacggatgcttcgcgtattggtcttggctgtgtgctgatgcaggaaggcagggtgattgcttatggctcaaggcagttgaggaagcatgaggggaattatccaactcatgatctggaattggctgcggtggtttttgctctaaagtcgtggaggcattacctttatggcgaggcttgtgacattttcactgatcacaaaagcctcaagtatatttttactcagaaggagctgaatttgaggcagcgtcggtggctagaattgattaaagattatgaggtgtccattcattatcacccggggaaggctaatgtggtggcggatgcccttagcaggtccggggttccaaaggtggccgtgccgttgattgctgatctggaccgtttggggatcgctttgtgttatgtcggcaccgctagcgtggagactcagatgcttattcaatcccctcttatggagagagtgcgtgcggctcagcagcaggatcgtcttttgcaggaagcccgaaggagggttggtgatggtaaaccgcgagagttcaccattgatgagaatgatttggttcgtttcaggggccgtctttgtgtgcctcagaaatcagaggtgaagctggatatcctgcgagaagctcataaaacgccttacaccgtccatcctggcgaaaccaaaatgtaccgagatttgaagcaaaacttctggtggaagcggatgaaggttgacatttctaagtatgtggccgcctgtgaagtatgtcagcgcgtgaaggccgaacataagcggcctgcaggtttgctgaagccattggaaattccagagtggaaatgggagcatatcaccatggattttgtggtgggtctacctcgttcccctcgtggcagggatgctatttgggtggtagtggatcgcttgactaagtctgtgcattttattcccatgaagaccacgaattcagcttcagatttggttcccttgtatatgaaggaagtagtcaggcttcacggggtacctaagtctattgtttctgatcgagactccaaatttgtatccaaattctgggagagtctccacagtgcattgggcaccaagctttcgcttagtgtcgcttttcaccctcagacggatggtcagtcagagcgaacaatccaaaccttggaggatatgttgcgtgcttgtgttctgtcatggaagggtagctgggaggatcatcttgctctagcagagtttgcgtataacaacagctaccaagctagcatcaagatggcaccatttgaggctttgtatggcaggcggtgtatctctcctctgtgctgggagactttgggagagagatccctggttggtcctgattgggttcagcaaacttctgaaaaggttcgggaaattcgtcagaatattttggtagctcagagtcgtcagaagagttatgctgatgtgaggaggcgggatctggaatttgctgtgggtgaccaagtccttctcagggtatcacccactaagggagttgttcggttcggtgtctctgggaagctcagcccaagatacattggaccgttcactatcttggcccgagtgggcagcctggcttatcgcttgctgctgccggattctatggcaggggtacacccggtttttcatgtctctatgttgaggaagttcttgcgggatccggaccatcagattgagatggaaccaattgcggtgcagcaggatctgactctagagtgccgtccggtgcgtatattggaattctcggagcgtgtgttgaggaagagatcaattaagtatgtcaaggtcttatggtctaatcagtcagagcgcgaggctacgtgggaacttgaggagttgatgcggcagaagtacccggaacttttcgttgtgggtggtggacttccggatcgttcttagggattttgcccgaacttcggtaaaggcacctgatctttgctttgggaaggaagggatgtagcagcacggccaccacacttttaaataaaggaattactgattaataatgatgttaaacaggaagggtcaagtctagggaattattacattctaatctttcatggtagttgaactgtttagtttggtgggcggtgatgtctatcttttgtctggtcatgaatgttcttttctaccgttgcattttgattatactatgtcaattatctttcttttatatcctgtataaactatatgcttcccttgttatgctactttcaagggaggtgctgccggattttgcagtactttctttcat

SEQ ID NO: 159302 - DNA, 310 bp, Zea mays
  Clone ID: MRT4577_76857C.1
cccgggaaaaaggggggcggttaccggaaaacggggctccttttggtcccttttaacaaggggggcccatccttttttggggggggaaatttttcgccccccagggggaaaaacccccgggcgccgccggggggaaaaaaaggggcctcgcatttgggggaaaaacccgggaaagggtccagtttccaagaccccccctccccgggggtaaaggggaggggtttttccaaaggggccggtaaaacgaaaagattttgtggggtcctcccgggggcgggggccccccgggggcttatttttttttcccggg

SEQ ID NO: 159303 - DNA, 468 bp, Zea mays
  Clone ID: MRT4577_76858C.1
ggtgttttgggttttttttttttttttttttttttttttttttttttttttttttttaggatatatatatatatataggataaaatcatattatacggggaccaattaatatatggttaaaggaaacgcaatcggatcaaacaaaatgcatggagggggaggtacatgagcaaaaaaactgacgccaaaaatgcaaagagagagatagcaaactgaaaaactctgtttttttttttttttaaaaaaaaaaaaaatacctatgtatgggaaccagctcggccttgcttattattgttcaaccaccaccacaagctagatagataataatcatatccatgggcgtcgatcgatgtgatcaaaaattgcaagggtcgaacttgaaactgttaccgaaaccgaaggcgtgggcggcctccccggacttcgccgggggctcgaagaactcgggcgcgggctttttctccgggg

SEQ ID NO: 159304 - DNA, 856 bp, Zea mays
  Clone ID: MRT4577_76859C.1
ccgcgtgtgggccggccccgctacagcaaagtactggatgcccccgggctggcaggacactcggcacgagaattcggcacgagggtgccgtgcagttcaaccacacttgggggaggcagagccccaagcgcgcgtccgacctctggacctccgcaggcggaacctattgctccctgcaggttctctcgcgggcctagccgtgcttcttccccacccggaatctgatgggatcgctcacgcgggtgccggcggaggacccagcagcggcggaggaggagtggtccgacgaggcggtcatctacgtcaacggcgtccgccgcgtgctcccggacggcctcgcccacctcaccctgcttcagtaccttagagatattggccttcgagggacaaagcttggatgtggtgaaggtggttgtggagcttgcactgtcatggtctcttgctatgaccgaattacaaagaaatcactgcattttgcaatcaatgcatgcttggctccactttattccgtggaaggaatgcatataatcacagttgagggaattggagatcgtcagcgaggtttgcacccagttcaggaatgtttagccaaggcacatggttcacaatgtggattttgcacccctggttttgtgatgtctatgtatgcactgctgagatctagcaaacagcctcctactgaagaccagattgaagactgccttgcaggaaatttatgtcgttgtactggctaccgaccaattatagatgccttccgtgtgtttgccaaaacagataatttggcatacaccaattcatcttcagaagatgcaaaggaccaagctttctgccctttactgggaagccatgttcctgc

SEQ ID NO: 159305 - DNA, 151 bp, Zea mays
  Clone ID: MRT4577_7685C.1
cgctgccgtaagtgggcaaagaggcggtggtggaggcacctggcaccggcaccggtctaggtaaagggaaaccgtggagactacagccatggtggtacggatccgaatggcgcggaacgggtgccaggatcggaccttataccgattgatg

SEQ ID NO: 159306 - DNA, 201 bp, Zea mays
  Clone ID: MRT4577_76860C.1
aactagatatagaatcgaaagcggtcaacctaaaaaaaaatacaattaaaaaaacaacgcagggctaatgtatatcccctggaagttacaaaaaacttatcaccgagggagagagagagagagaaaatcctccaagaggggagggtactaaagaagtaagtcgatggcctaacgcacacacgccgtgtgatcctggtcttg

SEQ ID NO: 159307 - DNA, 231 bp, Zea mays
  Clone ID: MRT4577_76861C.1
tgtctctctcgatggaccactggatccaccgtatacctctcccctcggctttgataccacgtgttggaaccaaccgtcgaagatcgacggccgcgagtccgcgacgccggccggtggtgaccgcggacgctggaaactcaggaacgagagtatagagaagacacgagaaatttctctgcaaatgcgtgcaatcagcaccaatgcaatccttgttccttttatagagggatt

SEQ ID NO: 159308 - DNA, 577 bp, Zea mays
  Clone ID: MRT4577_76862C.1
ggccgcttttttttttttttttttttttttttttttttttttttttttttttttttttttttttttttttttttttttttttttttttttttttaaacaaccgccacccaaaaattgggttccgggccaaaaaaacaaagcgcttgtaatagtccaaggcgatcccctctcagttttgggtaaacttgcctggggttatgctttaactggtgaataaagggataaaactgcccaagaaatttttctaccaggtgccccccccgaaaaacataaacaagattttttggggggacattttttcgggatcaaccctggccaaaaccttggggaagcccccgcgaagtggaaaaaaaaaatttgcctaaaaactggaaaaaatccttcgttaaagttccctgtacgaaaagtgtttgaaaattatatatgggaagaaacctttttattacccgccacccatttttaaacccccccaaatttttttttttgaaaaactgcaaaggtttcccccacccgaacaataggttgaggcatttttcttaattcatttttaaaagaaccaagaatattcatttttttc

SEQ ID NO: 159309 - DNA, 369 bp, Zea mays
  Clone ID: MRT4577_76863C.1
gacaagtacatatgtcaatatgtgtcgcatgcttgaagaacacaagaagttgacagtagatgtaaacttgtgacattagttaatgttatatgatgtattttggtccttactttgtatcagtatgcatttcaagtttattattatgcatatagcggaatgatataacatatctctgcaagtccaatagcatatatgatcttactaatgtgctccctaattcacaatatctgtccaatttattaggatttacttcttacagtatctctctgttgggagtatgccaatggtttgagcaagccattgaaaaggagactagcatgttataatattttttctgttagttacttcaattctcttatcaccactaca

SEQ ID NO: 159310 - DNA, 404 bp, Zea mays
  Clone ID: MRT4577_76864C.1
ggctagaaaaacgtgagtgaacatataaatatgctagtcactctccaaacaagaaaggaaaagaaaatcatatttttccattatttaatcatgtcttcactaacatacataatccgacactactgctgtaattattatgcattgtagttatgattgtagaagtacaggttctgccgacccaatatggttgcctactagtacacctcagcagtctactttgactttattatccaattcagtgaattcttcaaaatatgccttgaggtgttcatacgagtagttgacgtcgtcaacggcgcacatctccctgatgctgtgcatggacaattgtggcgctccgatatccacagtacgaataccaacaccgctagagagtattggcccgattgttgacccacaagcca

SEQ ID NO: 159311 - DNA, 787 bp, Zea mays
  Clone ID: MRT4577_76865C.1
ggccccggcgcgaacgcgacggcgggcgtgccgccgtacgtgtacgtgagcttggggtggcagctcaaggaccccctcttcttctgcggcgagcaccagctcgttctcggcaaggtcaactggcagctgctgtacagtgacctctacttctccctgtcgttgtacgccgtggccgagttccaggacgagctccggcggctgttcccggccaaggagagcgtgggccacctcctgtcccggtaccttttccacccgaccaaccccgtgtggagtctgaccaccaggtactaccgctcgtacctggctaccgcaaagcggaggatcggtgtgcaggtcaggatgttcagctatggctccatctccgccgacgacatgtacagccagatcctcgcgtgctcccagcaggagcacatactgccggagaccgacgacggtgatgaggacgaggtggtggccgcgacgaggaacggcgacaatgccgatggctccaactccacggccatcttggtggcgtctctgtacgcggactactacgagaggctgaggtcgaggtactacgaccacggggcgaagggtggcgagagggtggccgtgttccaaccgtcgcacgaggagcgccaggcgacggacaacatggcgcacaaccagagagcgctcgcggagatctacctgctcagcttctccgaggagcttctcacgtcggggaggtccacgttcgggtacgtgagcagcaacctcgccggcgtccggccgacgatcatgctcccgcttatggccgacagcaacg

SEQ ID NO: 159312 - DNA, 168 bp, Zea mays
  Clone ID: MRT4577_76866C.1
tatttgccgcccttgttgtgtttttttttgcagtaagtctaatcatatctgggagccacaaaaaaacttgtgatgatccatgagatttacgggtaaagacagtcacacagtttagctcgacattttccacaaccctcttctcaatctaaaccctgcgggttcttttta

SEQ ID NO: 159313 - DNA, 548 bp, Zea mays
  Clone ID: MRT4577_76867C.1
gcccgcactaccacgcccccgctcctctcgtctctatcttcgcctcttccatcgcaggattcagcggccatgggcggcggcaacgcccagaagtccaagatggcgcgcgagaggaacgccgagaggaacaagggcggcaaaggcagccagctggaggccaacaagaaggccatgaacatccagtgcaagatctgcatgcagaccttcatctgcaccacctccgaggccaagtgcaaagaacatgcggaggcgaggcatcccaagaacgacctctaccagtgcttcccccacctcaagaattagtaagcagcagaatcatatgctctgctcagctaaaacacaagtactacatatatatatacgctgtgtgtcaattaatgggttctaggctgctgttgatgcggctttcctgttgccccgtctgattatgtactgtaaccttggctgtcagcctgctgtgctaaaaaccactggttctgtggattcatgctgcctgtgctgtgcttgctcaatattttcttttgaaaaaaaaaaaaaaaaaagcggcc

SEQ ID NO: 159314 - DNA, 546 bp, Zea mays
  Clone ID: MRT4577_76868C.1
ccgggcgcccgcactaccacgcgaccacgcccccgctcctctcgtctctttcttcgcctcttccatcgcaggattcggcggccatgggcggcggcaacggccagaagtccaagatggcgcgcgagaggaacgccgagaagaacaagggcggcaaaggcagccagctggaggccaacaagaaggccatgaacatccagtgcaagatctgcatgcagaccttcatctgcaccacctccgaggccaagtgcaaagaacatgcggaggcgaggcatcccaagaacgacctctaccagtgcttcccccacctcaagaattagtaagcagcagaagcatatgatctgctcagctaaaagacaagtactacatatatatatatacgctgtgtgtcaattaatgggttctaggctgctgctgatgcggctgcttcgttcgtgttgccccgtctgattatgtactgtaacccttggctgtcagcctgctgtgctaaaaaccattggttctgtgtggattcatgcaaaaaaaaaaaaaaaaaaggcccctagggcc

SEQ ID NO: 159315 - DNA, 592 bp, Zea mays
  Clone ID: MRT4577_76869C.1
tcgtagcccttcaaatgctatatggttcaacatgagcattgcacacctaatctgagtcctcacatataaaagaaaaagattgtcatgggacttgcaggccgggagcacactgccaaacaacttctacattgatttgtgaagaagaaaaaaaaaaccaagactgagatatgaagatcttaatcctttttctctgatattacaggcatcaccatattgaatgaaattgccaccatgaagcgctttctagaaaatgattttgcttttatttatgttggcacttgtagtggatcagaaccatatattctttgctgtagctgtatttaatgctctttcatagagggttaacaactattcaatcgcctagtcggtagggatcccctgtataacttcctggattagggagcacaagatcctatattttaactgacacagtgttctaaaaaaggctaagtgggctcctggtgctgtctaccaccagattgtgtttctgttatccttttttggtcttttgctgtgaagcctacatgtataatcggatagctccacttttctattttctttaatgtttcaggtaaaggttttggttatgatg

SEQ ID NO: 159316 - DNA, 739 bp, Zea mays
  Clone ID: MRT4577_7686C.1
tccggatgcttctttctccacgcgtgccggcgctctcctctccagtcgtgctcctctgcttgcccagtgccccttagccctcggccatggagccctccggtggccgtgcccagctctagctcgatgcccagcgctcacccctgctccttccatacgcctagttcctgctcccagtgcccctcagctcgctccctctctgttcactgcgtccagctcagatctcgcctgctccagctcgccgctcccatggccgagctcgcccctgcgcgcgcgttctcctgtgtccagccctggcgcgcgaagctctctgctcgccggttgctcctccctgcgtcggcctcccctgcaaactgctcgcgaagctccctcctctcttacggtgttttactggccggcttccaatctcccatagcgcgttcccgctcggcgcccagctccctcgctcctgctactcgccctggccggctccctgctgcgctcgcccaggtcgccgccgtcgagccatcgaatcctgcccaccctttgccagccgttgttctctggtccgtgtgctggtcggtgtcgttgagttttgtttggtcggctcgtcgttgaccttactggttgtcgacgattgctttcgcttcagtgccatatacgatcatccttgcttgctggccatgcacttcaccctattgttccattctgcttgttgtcgttgcttatccgcatcaagacttcacttgccatgattcagctc

SEQ ID NO: 159317 - DNA, 551 bp, Zea mays
  Clone ID: MRT4577_76870C.1
cattgggtacctcgaggccggccggggcccgcactaccacgcccccgctcctctcgtctctatcttcgcctcttccatcgcaggattcagcggccatgggcggcggcaacgcccagaagtccaagatggcgcgcgagaggaacgccgagaagaacaagggcggcaaaggcagccagctggaggccaacaagaaggccatgaacatccagtgcaagatctgcatgcagaccttcatctgcaccacctccgaggccaagtgcaaagaacatgcggaggcgaggcatcccaagaacgacctctaccagtgcttcccccacctcaagaattagtaagcagcagaatcatatgctctgctcagctaaaacacaagtactacatatatatatacgctgtgtgtcaattaatgggttctaggctgctgttgatgcggctttcctgttgccccgtctgattatgtactgtaaccttggctgtcagcctgctgtgctaaaaaccactggttctgtggattcatgctgcaaaaaaaaaaaaaaaaaaaggcccctagggcc

SEQ ID NO: 159318 - DNA, 361 bp, Zea mays
  Clone ID: MRT4577_76871C.1
ccaggagcgcctcatctagctctaaccttgactccccagctccaaaatcttcggtcccgttagctgttcctcctgtaagccaggctccgccagcaacactgatcgccactacaactgcagcagcaataatgcctagaggtacggtactgctggctgcatcgtagttctcgttgctctcttcctccactgtattgaaattgtatcgttcttgtccgtccgatgcagctgtccctcaagctaggaaggcgtcccttgctcgattcttggagaaaaggaaggaaaggtagaatccatactcttattctcggtgattccattccaccacacatctgttttggttttgaggcagatctgcaactgt

SEQ ID NO: 159319 - DNA, 336 bp, Zea mays
  Clone ID: MRT4577_76872C.1
attcggctcgtgctcttaggaacggaggattttttaccttatcacaaatcataaggcatggctgagctatctgacaaacatgggcaccgaacctgatgcgacctgttacacaggatggattgatggacagtggcaagcaaactatcttgatgatggactgcgacttgattgcatgagatgttacgcagaaaggactcaccgatgatgtttacatgtacacaccgtattataaatggatactgtaaccagggcgagatcgctaatgacaagaatgttgtacaagacatgacaaatcaggtgttgaaggcatactgatctgatcttttaagtattaca

SEQ ID NO: 159320 - DNA, 232 bp, Zea mays
  Clone ID: MRT4577_76873C.1
gagggcaataataaggttcacgacctgcttctgatagactttacccctatgtcctttggtctagagactgcttgataattactgacagagctgatcccgaagaacaccaacattcccaccaataaagagcaagtgatattcaactactcggacaaccagcccggtgaacctgatccaggtctatcagggtgatgaggaccctaacacgccacaacatcctgctacacaagtt

SEQ ID NO: 159321 - DNA, 789 bp, Zea mays
  Clone ID: MRT4577_76874C.1
ccggccggggcccgcactaccacgcgaccacgcccccgctcctctcgtctctttcttcgcctcttccatcgcaggattcggcggccatgggcggcggcaacggccagaagtccaagatggcgcgcgagaggaacgccgagaagaacaagggcggcaaaggcagccagctggaggccaacaagaaggccatgaacatccagtgcaagatctgcatgcagaccttcatctgcaccacctccgaggccaagtgcaaagaacatgcggaggcgaggcatcccaagaacgacctctaccagtgcttcccccacctcaagaattagtaagcagcagcagcagaagcatatgatctgctcagctaaaagacaagtactacatatatatatacgctgtgtgtcaattaatgggttctaggctgctgttgatgcggctgcttcgttcgtgttgccccgtctgattatgtactgtaacccttggctgtcagcctgctgtgctaaaaaccattggttctgtgtggaaaaaaaaaaaaaaaaaaaaaaaaaaaaaaaaacatccccaccgcagcacagcgccggcaaccgccgccatcgatcgatcgcccggaaactgacctctaccgatgtctggagccggcgaggaggataagaagcccgcggagggcggcgcccacatcaaccttaaggtcaagggacaggatggcaatgaggtgttctttcgcataaagaggtccacccagctgaagaagctgatgaacgcctattgcgaccgccagtctgtggacatgaatgccat

SEQ ID NO: 159322 - DNA, 1010 bp, Zea mays
  Clone ID: MRT4577_76875C.1
aataattaaaagcaagggacgaaggacttgttgcataaataaaagggacgcgttggctggcgtcggtccgccgcccgcactaccacgcgaccacgcccccgctcctctcgtctctttcttcgcctcttccatcgcaggattcggcggccatgggcggcggcaacggccagaagtccaagatggcgcgcgagaggaacgccgagaagaacaagggcggcaaaggcagccagctggaggccaacaagaaggccatgaacatccagtgcaagatctgcatgcagaccttcatctgcaccacctccgaggccaagtgcaaagaacatgcggaggcgaggcatcccaagaacgacctctaccagtgcttcccccacctcaagaattagtaagcagcagaagcatatgatctgctcagctaaaagacaagtactacatatatatatatacgctgtgtgtcaattaatgggttgtaggctgctgttgatgcggctgcttcgttcgtgttgccccgtctgattatgtactgtaacccttggctgtcaacgtactgtgctaaaaaccactggttctgtgtggattcatgctgcctgcctgtgctgtgcttgctcaatattttcttttcttttaaaaaaaaaaaaaaaaaaaaaaaaaaaaaaaaaaaaaaaaaaaaaaaaaaaaaaaaaaaaaaaaaaaaaaaaaaaaaaaaaaaaaaaaaaccaaaaaaaaaaaccaaaaaaaaaaaaaaaaaaaaaaaaaaaaaaagttttttcccccccgggggggcccccaaaaggggaaaattttcaaaattcccaaaaaatggggggccgttgaaccttccttttaagggcccaaatcccccttaagggggggggtttaaaattaaatggccccggttttaaaacggtggggcgggaaaaaccctggggttccccaaattaatccccttggaaaaaatcccctttttccccgtggggttttatcggaaagggcccccccccatccccctttcc

SEQ ID NO: 159323 - DNA, 240 bp, Zea mays
  Clone ID: MRT4577_76876C.1
gtgttttttaacttcccacaaagagggcaactctatggaaagttggttcataaagggctgaagaacgcacacaacatgtgggcataaccatcaaatgcacccacagaagtgtgacaaggacaggtattaacggtcaatttaacatggaggtctacattgacaggtaggcggtttcactgcatcagctgcaaaataagccccctttgactgctttccattgggggggccataaaaccctgg

SEQ ID NO: 159324 - DNA, 676 bp, Zea mays
  Clone ID: MRT4577_76877C.1
aattcggcacgagggagagagagagagagagagagagagagagagagagagagagagagagagagagagagagagagagagagagagagagagagagagagagagagagagagagagagcacgcccccgctcctctcgtctctatcttcgcctcttccatcgcaggattcagcggccatgggcggcggcaacgcccagaagtccaagatggcgcgcgagaggaacgccgagaagaacaagggcggcaaaggcagccagctggaggccaacaagaaggccatgaacatccagtgcaagatctgcatgcagaccttcatctgcaccacctccgaggccaagtgcaaagaacatgcggaggcgaggcatcccaagaacgacctctaccagtgcttcccccacctcaagaactagtaagcagcagaagcatatgctctgctcagctaaaagacaagtactacatatatatatatatatacgctgtgtgtcaattaatgggttctaggctgctgctgatgcggctgcttcgttcgtgttgccccgtctgattatgtactgtaacccttggctgtcagcctgctgtgctaaaaaccattggttctgtgtggattcatgctgcctgcctgtgctgtgcttgctcaatattttcttctctaaaaaaaaaaaaaaaaaagcggcc

SEQ ID NO: 159325 - DNA, 116 bp, Zea mays
  Clone ID: MRT4577_76878C.1
tgctggaggccgcccctccggtgaccgccatggactgcaatgtcgggtgtgacgaggtcacggggcgcactccacatgagcatggacgtgcttcatgaagaagtccaaggagatcg

SEQ ID NO: 159326 - DNA, 314 bp, Zea mays
  Clone ID: MRT4577_76879C.1
tcacgcgtccggtcagatgctggtgcagaggttctcatacgctacggtggatagagtggacgaataccaggctgaagaatatgccttggatctcccaaacgggacagaggacgagccacaaactgcagaggtcttccgtgaacgtctcatatgagacggggcttctcatggcccaggatgagaacgaggtgggggagctggagatcatagagactatccatagagtaactagtgacaacttgtatatgacctgggttgacaatataaggttcccgcatgcagagacagttggctataccgttaccacgacggtg

SEQ ID NO: 159327 - DNA, 939 bp, Zea mays
  Clone ID: MRT4577_7687C.1
cggacgcgtgggccgagcgcagccaaacccaaaccctcctccctcccggctctcgacgggcgacggcgatggccgccgcgacagagaagacggctgaggacatccgccgcgagctccaggagctccagcgtcagcaccgcgagatcaccgagcgcctgcgcgacccccgtggccttcgccgcggcgcccccggccctggtcctggacccggggccccccgcccgctccgcggcttcgcgagacccgctgtgggtccggaatcgggggatcaacctccgcagaagcgtcggctgctatcagccgtagttaaggtatcttctttttctgcttcaatttcgcttctgtttccgcacgctgtaatggtctgcttgtcgaaacaataaaattatgtctggttgcttgacataacaactggaggtggatggggctgaaaataacgaggaaggcacaaaggatgcggatgcggaggggcatgggacaggttcaggtgccactgaaggcagtgccgggaggggtttcaacaatggcgggttcagaagggatggtggcttgcggatgcagaggagagtggactataattcgctgccagagccagctccaagggagcttcccaggaatgaggacccgaatttggtgagaagaaataagaggatgctggggcagcttcttgtcggtacattagagaaatttcaacaagaagataaaaaactatctaactccgaggcttttctgcgtagatcagagactcagcgaaaggctgagcaaaaggtccgcgaagaaagtgaaaggctgcgacagaaggaacgtgagcaaattgcagagaagcgtaagcgtgatatgacgcttcgcgctcgtgtagctgctaaggcggaagaaaagaggttggagctgttgtacattcagtggactgagcaccataaaaggctgtccaatttctta

SEQ ID NO: 159328 - DNA, 230 bp, Zea mays
  Clone ID: MRT4577_76880C.1
atgctatcaagggatagctatatttcataacaaatgtcgaactctatcattttaaacaaccaatatttgactcaatgccattattaatcgaaaaatacaaatccttgctttataatatatgatattatgatgtaccatggcctttatataacaatcttgtattgtaggctgaaaaattataaaaaactatattctaaacatatttaaagggattgttacttgtgattatc

SEQ ID NO: 159329 - DNA, 252 bp, Zea mays
  Clone ID: MRT4577_76881C.1
tcgggaccttcatactcataaacacattccatactttgagatacaaaatctgactggaacaacacgttatggtaatattaatacttatcttggaatataacaaagcatgatagatgatctggagtctgttggctatcttctgctatattttataagaagaatggccttaaagctggcactaagaaacaaaagtattataaaattagtgaaaagaaaatgcttacctcggcagatattctgtgcaaatcttac

SEQ ID NO: 159330 - DNA, 258 bp, Zea mays
  unsure (1)..(258): unsure at all n locations
  Clone ID: MRT4577_76882C.1
gtgcgtgccttgggttgcgtgtggcgtgtngtgggcttgtgcgggtgctgcgcgccggcccgggggccccgctgggcgttgcgtgcttgctgggtgggggggctgtgggggggtttgttgtggggggggcgtttgggcgcgtcggtgcgcctgtgctggtgcgtgtcgtgggtcccttggtgacggccttggctggggctggcgtggctgctggtggtgtgcccgttgttggggttgtcggctctggttctcgtgttc

SEQ ID NO: 159331 - DNA, 789 bp, Zea mays
  unsure (1)..(789): unsure at all n locations
  Clone ID: MRT4577_76883C.1
tccctttttttgtcacgggggggggggggggggaatcgaaatacttagaaggaggtgtaagaantttccgactaagctaccnnccaaggaataatgtggataatagtacncgcggcgaanattatataagatggggtacaatacnatatatangaatatcagacnnntaccactaatgtggtcctacagtantcnccagaaccccctactatatgggccttnngcagctgncctcgtagtacnnntaaatgggntgtgacngnnatgtcnngtatttggtcnngtcttaggttgggtctttgggtagtcannnatgtactatntnncattgnnttgtcnngacgttgggtnggtcacnntcttcnnttaccgttggtanntcccttgtacnnnacaatgtannttggttggttaggattnnntgtattcnnnatcgattnnacgctanntcaacccctatctggggcctnncgatagnncaccgntcnnaatggcgncnncgtcagctnncccacaaaatattnggttataatatggccgncnncacggnnccacagtaggctnanntatcctatctgggctattgggccnnntaccgtnncttattancctnnataatctggaccacctggccgnnacggcagcttctatggggcaacttnnacgtccctattttaagttatcaatgccnnagccgctcgggccgtggcagccgccttatactactaggtatagttggccccattatagtattatccgatagcacctactancttagcgatggcttag

SEQ ID NO: 159332 - DNA, 822 bp, Zea mays
  Clone ID: MRT4577_76884C.1
gccggccgggtcggggcaattgagattactgaagatagtgataacgatacggattgtgaatatgcttaacgatcctatgatgatgtagctgtgttgatcaccgaatatactatctacattaggaaatcccaccctaatcgggcgaggccgaaatacgatgatgaatccttagatggcagataggactgagcatggaacgctagcgctgccatgaaagaatagagcgacactatgtcatcaactgctcctgcgatcgcgacctccatatgaaaagctgaagattgatgtcacctcctcctcatactagcattatctttgatcatcataatcatgttggtccccatagaactgcctatcttcgcacccatgccgtgatccgtataacacccgtgcgtgcgtaaacattacatcgtaaggaaccatcatggtgcatagatactatacgaccagagggaagagcgatagactacatactaccgctgcagtgacacctgaagcagcacagcacgtctgcgaagctactgtgacttcttgagacagaccaccaacattagactgagtatacgttgacatgatgcagactactagacgcctacggtgatcatcgacaacgaggatctcctaatgagctaccagtggagaatgaaaggctaaaacatgatgatctgaaactgacgagtgtacatgaacatcttgcaacgagagtggaaaagttcaacaagggccaatacctctgaaacgagttgcttatgaacactgacatgaaaaacaacaacattgttcactggatacaatgcttttgtgcagaacaaagctactact

SEQ ID NO: 159333 - DNA, 228 bp, Zea mays
  unsure (1)..(228): unsure at all n locations
  Clone ID: MRT4577_76885C.1
gggcggccgagaggcataccccngatgagaagaatgttaagacctctgaaggcgatactcgtaagttagggtggtatggccgtaagaggtgtggtggtcgtggcggtggtaattaccattagctgctgggtctgatgacgattccttagtagaatagttcgagtcatgtgattacgttggagctgttgcctaaggatctgatcattgtatactagcctgcgttgagtt

SEQ ID NO: 159334 - DNA, 183 bp, Zea mays
  Clone ID: MRT4577_76886C.1
gcagcggctcatctctgctggcaagcagatggcggatggccgtacccttgcggattactacatccagaaggattgcaccctccacttggtgcagcgtctcagctgcggcctgcgcatctaggcatgtacattggctggctagaacactacctgggcagaggaaacgtctgacccaacatcact

SEQ ID NO: 159335 - DNA, 286 bp, Zea mays
  Clone ID: MRT4577_76887C.1
cccggggggggaaatatttctaaatcgggaattactttattggcccaaccattccatccttttgccaaacataatagcaggaccaaaaaaaacatagggggccatagcccactagttagtctgaattgccatggcagctctcatccaacaattgggaatcccgagggaaaaaaattttgctccctgaaaacttatcccctcatccttggggggggggccatcatttgctctccacataaaacagttcccatatgagggaggccccgggggcaaatgccccggcaag

SEQ ID NO: 159336 - DNA, 326 bp, Zea mays
  unsure (1)..(326): unsure at all n locations
  Clone ID: MRT4577_76888C.1
cgaggaggnaanggnaggggagagagccgatccgcccccggaagccgaggagccgagcgaaaggaaaccgccgccggagcggggggcgggcggccggcgncgcgggcggcgggcaacaaagcacgccaccaggcaggcacccgcnggcggccgaaaccgacgaagcgcgaggccggagagcgagnacagccaccacaacagaagccaaggcgcccgcgccgagcaggaggagaccggaccggcggcaaggcaggacacggccagcgcgcgcacaagacaggccgccccgaagacggccagcgaggaggcccgagcacaggcgaacc

SEQ ID NO: 159337 - DNA, 208 bp, Zea mays
  Clone ID: MRT4577_76889C.1
acgctttcttttacatctttatggggcgctgttcttgttcactacgccaccaacctcatagtgtccaggtcgaaagctcggatggttttgttactcacacttgtactaattttcatgcatctatggatcgacaatactcatactgtcaaccaactgaacccacttccctatcgtgctcaactagctactttatacccatccttttctt

SEQ ID NO: 159338 - DNA, 137 bp, Zea mays
  Clone ID: MRT4577_7688C.1
cggacgcgtggcaaagagccggagccgcgaccgacgactcatcagacatggcgaaccggcggcggtggggaagccctcttctgcgtcgaccgttgcactgacatcggttctggccctggcttcgggtgtcctcctct

SEQ ID NO: 159339 - DNA, 2056 bp, Zea mays
  Clone ID: MRT4577_76890C.1
cgcccccgcccgccactcaagcactcccttccgctgaactaactccctcccgccctcacgcccacaaaaaatttctccgcttcccgccctcctccccaatggcctcgccggcgaagcgtgccaagccctcgtcgccggccaagccctcgagtgcgccgcctcaggaagaggcgaccgccgccgccgtctctgaggaccccgtcgtcctcctccgccgccgctgggaacttgcatccgtgctccactttctcagggtgtttgagccggtgatcgaggcgaacttggggctatccgcggatgagatcgagatggcactcgcgtccaacaaccgcgacctagctcgcatacacattgcccttttgaagggaatacctccagttaacaaacatctaaaagatgaggatggatggattattgtaactgccaaaaagctaacagattggtggtcatgggttgctgaaggagcaaaccctttcagaaataattcagggaaagaagtcgagatgtataagcagcaagatccaatcaagcggttgttgatactaaaagcgctttgtgaagtccgatctgagcaagatgatgcggtgtggtatgttaatgatgaaatgaagaaaggaactcatatttccaactttcggaaagataaactaggcagtggcagtagtgggactacatactggtatgacggtgattcaactattggccatagattatacacagaagtcgaatcagttaattttaagcagaattggatgggaaagggtggccgtttgacaaaaccagttaccaatatttactgggaaacagttgcaactaaccttgacgagtttcttgaaatatcagagaagttatccaaaaagggtcgtgctgaatctgctattgcagattatcttaagacagaagttattccagctgtggagaattttcaaaagaaaaaagagagacgtttaaaacggcaggagaagaaggacaaacttttagcttttactaacacattccaaacccgttcattgcgggaacgtcggcctgtcagctacaattactctgattttgatcgttccatcgaggaggcgataagagctgtacagaaaggaaaagtacaaggttcacgtgaggcaggaacagaagagaaacctgcttcacatcatggagacaaaggtgccgatggaagatctgacatcaattctgaaaacaacaaaaatggaggacaggaggatgccaagtacctaagtgacctgagctctggcgatgaggaagacggagactacagtgacaggggtgtcagctccgctgacagtgacggagacaataatgcttctgattcctacaagagcgacatggaggaggatgtgtctgtaccacgcaagagaacccgtcttgctgcccgtttggcaaatgacaagcctcggccagggcttcgtcggagccaacgaaacatgaagaatgatgaagagactatgcatccaggtcaggtcacccctccaccaatggcgaagaaaacactgaggcaaaggcccacgcctgtctccaagcagcctgacattactttctcgagctctgaagacgatcttgcacaggttgttgcagactcagaggatgaaagtgggtaatttggcagaggttcggttgcatgcggtattttggattttgctttgtgggagccggttgaattccacaggtttagcgtcactaggcacttccatagtttcacactttcacttctaccggctggccggaatcagacgcagacagcaccggcgttttccccatatccgatgagttatcttcacgaagtcattggggcacctctgacccacttgtatggtgatttgtacatatgcatttagacactatactgcgatgcatcaccactggagcacccaaaaatcttgctgatgaaatgcttctgctgtgaactatattatccatgcattcgaagggaaatggtgcttatgtttgctttgacagcttgcctctctaacttaagataagcaggtttatgtcagcctgcaatattttatgttgattgccaaaaaaaaaaaaaaaaaggccccta

SEQ ID NO: 159340 - DNA, 169 bp, Zea mays
  unsure (1)..(169): unsure at all n locations
  Clone ID: MRT4577_76891C.1
cttctcttnnnnnttttctctcactctctcacacaggtcatatgcccaagggcgcgcacttgatctgggacgtatgaccagtgaccctgggctttgcacacgcctgcatcgagctctgaccgcggttcctgtgcgttcatgaccaggatgggcttctccctttagagcg

SEQ ID NO: 159341 - DNA, 288 bp, Zea mays
  Clone ID: MRT4577_76892C.1
acgcctgatcggccactacccgctggcggtcgtccaaagggctgtagcgctggtgctgcagtgcctcgtcgaggactcgaccatcagggcagccatgggccacgtcgtcgtctcgctgcagtacctcacaatcgcgcaggagcacgacgatgcccaccggtcgtcgcgcatgtacccactcgatcaccgtcaggctgcggcgctcaacatccgggatctgaacgctcatctccgcatgtccgccttgcctctacacgagtgagctaccatattcataatcgatcatct

SEQ ID NO: 159342 - DNA, 286 bp, Zea mays
  Clone ID: MRT4577_76893C.1
gaccaaaggactgctatcgccatcaatattgggcacactgcattaactacgcctggcatcaagacgcgacatgaggaggagccagtctgcccccactcatgacctacgggtcctaggtctgagccccactcatgacctatgggccctagacctgatcccaccatgacctacgggccctaggcctaagtcctcttacaccctacgaagcacgtaagatgtcgaagggaagccagaggtcaggctacaaagtccaatggtcaagtcatgcagatgtggacaaaaggag

SEQ ID NO: 159343 - DNA, 536 bp, Zea mays
  Clone ID: MRT4577_76894C.1
cttcgtgatggtcatcgccctgcacttgtgcagcagccagcctagcagcagccgccgtgcccgcaagctcgacatggagggcctcgaggagaagtcgcccgagtacgtggccgtcaagaaggcgtcgtcgacaccgcagaagagctcctcgtggctcgggaggagggcagggtcgtcgcttggtgggcttggacacagacgggccgcttctgccgcgaaggtggacgatctaagcagcagatccgcgggggatctggtcatggtgaacgaaagcaagggcgtctttgggctcacggacctcatgaaggcggcggccgaggtgatcgggagcggtgggctcgggtcggcatacaaggcggtgatggccaacggcgtggccgtcgtggtcaagcgctccgcgacatgaaccgggcgaccaaggacgcgttcgaatccgagatgaagcggctcggcgccaatgcggatgccaaactgctgccgccgctggcctaacactaccgcaaagacgagaagctcctggtctacgagtacatccc

SEQ ID NO: 159344 - DNA, 159 bp, Zea mays
  Clone ID: MRT4577_76895C.1
atcgaccgaatcgtgcaagcatctggaggcggtgcacggcaacgaatcaccgcttcaccatgtgcgaagctagaccagtaacccgctgccgcttcacatacgagagaggcgtacggtgaagacgatgacgcagtctatatgtccctccgccatcgagtt

SEQ ID NO: 159345 - DNA, 486 bp, Zea mays
  Clone ID: MRT4577_76896C.1
taaaaaaaaaaaaaaaaaaaaaaaaaaaaaaaaaaaaaaaaaaaaaaaaaaaaaaaaaaaaaaaaaaaaaaagggaaaaaagaaaaaaaaaaaaaaaaaagggcgtccagctttaatggaaccaacgtttcttttcgcgtggtgtgccccttaattcgggttccttggcccggccgctttacatccgttgagagtggcgcgagccctgccaccttccccccttgggtagccccctggcgtttccccctttcgccggctggcctaatatccccttggccccggccgttccccttttcaaagggcccggcatgctggatggtcccagcggcgcgcccttttttttggcattgggccgccccttttggtggttctttcccgctgaccgttcattttcctgccccctgttgccggttcctttggctttgccttcttccctggtcctcacgtttgccccctttcctttttaacccttaactccggttttcc

SEQ ID NO: 159346 - DNA, 1030 bp, Zea mays
  Clone ID: MRT4577_76897C.1
acatgcattcattcatgcactggtaactagcagttttttttttttttacagcaacggagctagcattgcttcctttcttttccttggtagcagcaattaagtacgtaaaagtggcacgcgtactcccattgactacatatatgcgtcgcgtcgtatagtggggcctacttgatgtgccgacgtacccacacacgtacacttgcgaagtccgcaaggggcttagcacatgaagttattctgagacgacgacgacgactgcccgatccatcgtacgtatcagttgttttcgctggccttgagttcgtcgctgccgggggggcagggacacggcttctttggcggtggcggcgccctgggcgtcggtggctttggcgctggcgaccgcggcgtcggcgtcggcggtggcttgggcttcaccggggcaggcggcttcggaggaataggcattggaggccatggcatcgagagagatcattagtagtccagataataagactcattccagaaacaaaattgtatacgatccatgggtcttatcagctgcttgaccatgcagcagagctagcacatacagggtgggtagcagaggcagttggtggcgacgcactggtggtagcagagggccggcaggtcctcgaagcactcgctgaggcacctgtccttgcacttgccgccggagacggcagcgacgacgacgtgggaggagccctcggagtggcgggcgacgacgtcgtcaaaggcgtcctcgtcgcggcagttccccgtgcacgacttgaagcacttccagtggtacatgtgctcgtcgtccaccgccatcgccgcggccgccgcgaggagcgcggcgacagccaggacgacgccgagcgccccgccctgcgctttgtagcccgccatcactggctagctagctactaccttagctggtcggtcgtcctcctaggtacggtgagctgatgagcttgttggctgcagcgcaggccgcctgcagctctatggatggggatggagatgggatcccggccaggccggc

SEQ ID NO: 159347 - DNA, 127 bp, Zea mays
  Clone ID: MRT4577_76898C.1
caaagtcgcagctgacggacgactgtaaccaccgacagacaacatggaccgcctccgacctccaccgtactccggcactcgaacggacgccatccctggaccagaccgcacacggacgatatctcca

SEQ ID NO: 159348 - DNA, 984 bp, Zea mays
  Clone ID: MRT4577_76899C.1
tcccatccatagagctgcgggcggcctgcgctgcagccaacaagctcatcagctcacccgtacctaggaggacgaccgagcagctaaggtagtagtagctagctagccagtgatggcgggctacaaagcgcagggcggggcgctcggcgtcgtcctggctgtcgccgcgctcctcgcggcggcagcgatggcgatggcggtggacgacgagcacatgtaccactggaagtgcttcaagtcgtgcacggggaactgccgcgacgaggacgcctttgacgacgtcgtcgcccgccactccgagggctcctcccacgtcgtcgctgccgtctccggcggcaagtgcaaggacaggtgcctcagccagtgcttcgaggacctgccggcactctgctaccaccagtgcgtcgccaccaactgcctctgctacccaccctttagcaacgagaaagtgatgtgcctgaagagctgctgcaacaagtgcttccaccacggcccgcctgccccgaagccgaggccgccaatgcctggtcctccgaagccgcctgccccggcgaagcccaagccaaagccaccgccgacgccgacgccgaggccgccagcgccaaagccaccgacgcccaggccgccgccgccgccaaagaagccgtgtccctgcccccccggcagcgacgaggtcaaggccagcgaaaacaactgatacgtacgatggatcggccagtcgtcgttgtcgtcgtctcagaataacttcatatactatagcacttgacttcgcaagtgtacgtgtgtgggtacgtcggcacatcaagtaggccccactatacgacgcgacgcatatatgtacgcaatgggagtacgtgccacttttacgtacttcattgctgctaccaaaggaaaaggaaggaagcaatgctagctccgttgctgtaaatgatgcatgtactgatagttatacataaatgaatgaatgcatgtatgatgccgcag

SEQ ID NO: 159349 - DNA, 367 bp, Zea mays
  Clone ID: MRT4577_7689C.1
agttttgggcatcaacgaatgcaatcaatgaggacccatccaagccgtccgaagaagctacaactgaaggtcagccagcacccgaggaagcacaataggattctttgctcacacaaggtaggcgtaccattccggcattccatatgcttagttgccgtcttgttgggtgctgtttgtgcgtgtatttttgttagacgtcccccaatggttagactgtgttttaatgttgttgttttggccttttgatgttgggaccatacaactgtcaattattatcttataattgttgtaagcatactataattgttaccatgatttggtcgtttttttgtcgccagacgtttattgccagcaggttatgttcttc

SEQ ID NO: 159350 - DNA, 835 bp, Zea mays
  unsure (1)..(835): unsure at all n locations
  Clone ID: MRT4577_768C.1
ctcgaggccggccggctcccgctcctcggttcccgtgctcgtgtcatcgaccgccggggcccactcaccagtctcccaacacgcagcgagcggcagctcctcctcgtctctcaaagtcgagccgccactcgattaagcgattccaaggcggagcggtgaggtggctatggagtacaggagggtgaaggatcaggagatttatgatgatttatctcagaaggatgtggaaagcctgagtgggaggacactatctagtgccaatactacagctattggtcccgcttctgcaggaggcgcaaaagccaactctagttggaagctaaaattaaccacatcttttgatgaagttggtgtatatccgattcctgctgttctttacatggtaaagaacttattgcagtactatatctttgtctacgtggatgcaccagcttatcaaatcttgaagaacctaaatatcatcagcacaggtgttttgtaccgcatcattttgaagaaaaatttcccccctgtcccttttaggctaagtgaaattcagtgggcagcatttgttcttctatgtgctggttgcacaacagctcaacttaatccttcgtctgaccatgtgcttcaaactcctattcaaggtgatggctcttttgagtggttttgctgnggtgtatacagaagctatcattaaaaaacggccatcaagaaacatcaacgtgcagaacttttggctatacatnatttgggtgatcttncatctagttgtaatttgtggtcaggattatgatgcagtcatgaataaaggcttttttcatgggtattcattcatcacagttttgatgattct

SEQ ID NO: 159351 - DNA, 389 bp, Zea mays
  Clone ID: MRT4577_76900C.1
cccctgaaaaacaaggaaattatgaaacaaggggggggccaaaggatacatttattggcccgggacagcacaaaaaaaaattttttttaggggcagccttagcaaacgaaaataattacggggggaaaaatgaaatgaagtaggggggggggaaaaaaaactttttattttttttttccgggttttccttccttccttgggacaacttaatccaaaaatgggaaaccctttcccttggggggggaaggggggccccacttttttatggggggagaaaactgaccgagcgggcttttggaaaaaccgctcacggggaaccttggggtctcccccaccttgaccggcaggcctttaggaaggggcatccaaacagggggggggaaacccag

SEQ ID NO: 159352 - DNA, 590 bp, Zea mays
  unsure (1)..(590): unsure at all n locations
  Clone ID: MRT4577_76901C.1
gggacgccacgagnacaaccgtgaggacaggacagcggtcgcctttgcccgcggatccgcggatttcgtcttcttgggtgccatggatccagtcgccggcacggcggagcatcggggcccgttggaagtgcgcgcccgcgcgcccggcaagatcatcctcgcgggcgagcacgccgtcgtccacggctccgccgccgtcgccgctgccatcgatctctacaccaactcctccctcctcctccgccccgcaggcccaggagagggtggcggcgctggctccggcgcggtggagctgaccagctggtcgccattgccaggctcttgcaggaccaggagatccctgaggccaagatctggctctccgccggcctctctgccttccttttcctctacgcctccattttgggatgcaggcctggcaaggcagtggtgtcctcggacctgcccatgggcgcagggctcggctcatcagcggcattttgtgtctccatgtcgggggcgctattgactgctgttggtgcagtaagtattggagcacgcaggggtgctgagggttgggaggtgttggaggagagtgctcttgagctggt

SEQ ID NO: 159353 - DNA, 1960 bp, Zea mays
  Clone ID: MRT4577_76903C.1
ggccactctcggcaccggcggggccggggtgtccggtggctgctctcttttatcgttgatggtgacgccctgggcgaaccgtgggtccttgctgtcggtgcgcttcgtcggcggatcctcacaggcgaccccgccgtccgtccacggcccccccgccgccgccgcggccatcggtcaccacacgaactccgccccccgcctcgcctccgcacgcgcaggagaggcggcggcggtttggtcctatgtctgggcaactccgcccttttcgcctccggaggaccgacagcgacggcgccagtagatagatgcactactgacgccactggccacctcgagttcgagtgccaagggacgccacgagaccaaccgtgaggacaggacaacggtcgcctttgcccgcggatccgcggatttcgtcttcttgggtgccatggatccagtcgccggcacggcggagcatcggggcccgttggaagtgcgcgcccgcgcgcccggcaagatcatcctcgcgggcgagcacgccgtcgtccacggctccgccgccgtcgccgctgccatcgatctctacaccaactcctccctcctcctccgccccgcaggcccaggagagggtggcggcgctggctccggcgcggtggagctggacctcagggactcgggcctcaccttctcgtggccgtgctcgcgcctccgcggggcgctgggggaagagatcagcgccaaccccggggctccggcgccgtgctcccctgaccagctggccgccattgccaggctcttgcaggaccaggagatccctgaggccaagatctggctctccgccggcctctccgccttccttttcctctacgcctccattttgggatgcaggcctggcaaggcagtggtgtcctcggacctgcccatgggcgcagggctcggctcatcagcggcattttgtgtctccatgtcgggggcgctattgactgctgctggtgcagtaagtgttggagcacgcaggggtgctgagggttgggaggtgttggagaagggtgctcttgagctggtcaaccaatgggcgttccaaggggaaaagattattcatggcaagccttctggcattgacaattccgtcagcacttttgggaaaatgatcaaattcaagaagggggaactgacaaaccttgagtcctggaacccagtcaaaatgcttattactgatacaagagttggtaggaacacaaaggcattggttgctggtgtgtctgaaagggcgtctaggcatccagatgctatggcttctgtcttccatgcagtgaactctattagtgaagagctttcaagcattgttgagttagcagccgaggatgagatagccatcacctctaaggaggataagctagcagagcttatggagatgaaccaaggtttgcttcagtgtatgggagtcagccattcttctatagaaactgtgttgcggaccactctgaaatatagcttggtctcaaagctaactggagctggtggtggaggctgtgtgttgactctaataccgacgttatcggccaatactgttctggagaaagtcaccacagagctcgaatctcacggttatcgctgcttcaaagttgaggttggtgggcgaggtctccaagtattccgtgtataacactcatcctatttcaaggagatgttgtaccaaacttagatggcttacctgcattgaagctgtttagattctcttcttgagttattccaagatcatgataggatattcttctcctaagcccagcggctagcaggttcttgtatccagtacttgagttgctccaggattaggacattcttatgctatccctagcgatcttgtatcaaataagctcatagatgcatgatcattgctggtgtgattgttgtattaagtaaacagacttttaattgctccaaatgttgtatcaaaaaaaaaaaaaaaaggccccta

SEQ ID NO: 159354 - DNA, 326 bp, Zea mays
  unsure (1)..(326): unsure at all n locations
  Clone ID: MRT4577_76904C.1
agtttgcaatgactgctgngaggataactganactgtacggatataacgaaagataacatacccccccccccccccccccccaannnngagggnccggccccccaaacttttctatgnatagggnncctccgctgnaaatcaaaggatgtcacccaaaaaaaaaaaaaaaagggtttttgttcaggggaaaaatataatataaaaaaaaaaaaaaaaaaaaaaaaaaaaaaaaaanagcctcccctttctttnatttccaattttccntttccctttcctttcaaatacatatctttttttttttttcccttaaaattcattcccc

SEQ ID NO: 159355 - DNA, 534 bp, Zea mays
  Clone ID: MRT4577_76905C.1
ggccggccgggaaaaaatttccccaaaaaaaaaaaaaaaaaaaaaaaaaaaaagaaaaaaaaaaaaccaaaaaaacaacacaatgaaagaaaaaaataaaaaaaaaaaataaaaaaaaaccgaaatcaaaaaaaaaaaaaacaagaataaaaaatgaactgaactaaaaaatgaaatacaagataatggccccccgccgggccccctttcattgaagagaggagaggatggtttcaacaccttcttcagggagactggttctgggaagcacaacccccggggggggtttgttgaccttgaacccactgtcttcgaggaggtgaggactggcacctatcgaacacctcttggggggtgagtagctcttcaccgccccgttttatgaagacaagagcttggaacaagccccccccccctttgtttatgaaattgtggacctgtgccttgaccgcgtggggaaggttgcacataattgctctgttctccagggattgctcttcttgggggtggtggtggaggaacacgctctgggct

SEQ ID NO: 159356 - DNA, 853 bp, Zea mays
  unsure (1)..(853): unsure at all n locations
  Clone ID: MRT4577_76906C.1
tgggaccctcgaggccggccgggattcctttccgacaatgatttttcaggcgtggaatgctccttcgcgcggcctgctcgccatacacctctgcctacctggccattcacctctctccccacctccaagcgcatcttcccaacacctgcccgccggtgctgatccattcccacgcggcgctgctgctccatcccacaccgcggcgcggcgcggtgtgttcccacacgccgacgcgactcccttcccaaacttcggcgagacgcggttcacacacgccgatggtcgtccctctgcagcccccgatcgaatcggcctgcgggagcgtcacgctccccacatgccggagtgtgtgggaaggagaaacagcccagtggcggcattagcgaccacatactggcagcacccgatgttggcgacgaactggtcgcagcaaccggcgtctgcgacgaactagccggactagtactctagcagcacctggacataaagctaaaggctcccgtggcgtcaaagctgaaggcacttggatgcaacttccgtgacacaaagctgaaggcaccggaggaagcttcatacgcatgacatggaggaagcttcataatttgggtgatgccaaagaaattagcattgtttgtgctgctgccatctgttgggccctttggaaagctagaaacaatgtgtgctttcaaaacattgtggtcaactctcctgtcgaaattgtatgtcatgcttgtgatttgatcttcaattgngcaggtctgagcaagaaagaagtgcaggatttactttaggatagggccaagcttctactgaaagctgctaatgcgaggaaaatctggagagagctaaaggg

SEQ ID NO: 159357 - DNA, 267 bp, Zea mays
  Clone ID: MRT4577_76907C.1
gtacgaccacttttttttatgcatcctaagccacaggcggagcgtgggctctcgaatacagatggatttggaggacacctcctttcctgaggcaaaaacacttgtgcatgaaaactatgatagcctcatcgcgcctgaagtgatgcacgggactgttgagcgggctctgttcaaccttgatgacaagatgcagatcatgggtatggtgaacctaattctgccggaaaccactctccaagttatggacttggagatgggcctgctggt

SEQ ID NO: 159358 - DNA, 511 bp, Zea mays
  Clone ID: MRT4577_76908C.1
gggggtgttttttttttttttttttttttttttggttttttttttttttttttttttttgttttttttttgtttttttttttttttttttttttttttttttttttttggggggggggaaaaaacccaccccctggggaggggaaaataagaggggcccgccctgggggggaaccttcctccccaaatgaaaggggggccccccccccctcgttttttatggggggggaaataattcccttaaaatttggggttttgggttggggccaacctgggccaattaagctcggggcctttttaaagcgggggaaaccccggccccccttttccaggggggccccggcaatttcggtggaaaggaccccccctttttcgaactgtcccttccttgggggacctggggggccaaaaagccccccaggccccgttcccttttttttggggggcggcccccctttgccctttgaaggggtgaacctttgcccccttttcgtttttttgccccctttccc

SEQ ID NO: 159359 - DNA, 235 bp, Zea mays
  Clone ID: MRT4577_76909C.1
attcggctcgaggaataacagaagggttctctttgagacgtcaggcaatgcagctactaatattaaccaactggtgatggaaatagcacagaggttgcctatggcaacggattaaagaccaaacactggcgtgtattgattgtcccatgtacagaatgccagctcatgctcaccgatacagcttggactaccgagacacactcatatgaagatattgagcccactctgtcatata

SEQ ID NO: 159360 - DNA, 356 bp, Zea mays
  unsure (1)..(356): unsure at all n locations
  Clone ID: MRT4577_7690C.1
gactctctgttgttttttattttgaaggatgtatttttttgttttttatctttttttaataggttagtgattatattttttatagcactgtctttgttacttgtaagtatggtctcaattgatgaaaactctgcctatgatgtttcacactccaggacccattcacagtgccaaaaaaaaaaaaaaaaaacggacgctctccaccccaaggagcccccggggtgcgggagacccctatcactcttatagaaaccgcggaccacgagggggggcccggggcccacaaattgggtcgcctttagagaggggcaaatgcgcgctcgagagnaaacacgtgcatggggtgaaaaaagaga

SEQ ID NO: 159361 - DNA, 358 bp, Zea mays
  unsure (1)..(358): unsure at all n locations
  Clone ID: MRT4577_76910C.1
gggggggggggggnnacagagagaggggagagtgggagacggtcggtgtcagaggcctncctcctccacactctcagtcgtcttctcgtcccagcgctttcttggctcgcgaggaaacctcttcgtgtgtttgcnnttgcatataactgtgtgggggggggtggttgctcggtgtgttggccttggccctgcgcctcggcnggatcatcgcctagctgcnggcaggcctcnctggtggcgctcattgaccctgctctcgctgtnnngatagtcccgcggtgctttcctgtttccgcttgatccaactctcgacctgaacgccccactcggcactnctccctccctgtctgctatgccc

SEQ ID NO: 159362 - DNA, 335 bp, Zea mays
  Clone ID: MRT4577_76911C.1
gcctgcaggtaccgtccgggattattcccgggtcgacgagctcactagtcggcggccgccctttttttttttttttttttttttttttttttttttttttttttttttatgaggggcaaaagtaatttgctgattttatgaatttaggaaagtaggaaatgaataaaccgaataaaggcaggaacttgagccagtgttctaagcattaaccccaaaagtgcaggacagcaaaccaagtcgtgcataccgtattgatgtaaggggaaacggggattcaagggtctgaccgaggtgttgagatagatgaaaatatactttcaaggttcctgaaaagg

SEQ ID NO: 159363 - DNA, 187 bp, Zea mays
  Clone ID: MRT4577_76912C.1
cccacgcgtccgcttacacatggggttactataaaaccctatatagaatccgtgggctattgcaatataaatgctcaatatcatgctaatgaattccacatcataaataccaaggcttcacttttgcatgcctttgatctacatgttatagccactcaccaatattttgtaacacaaattatatgct

SEQ ID NO: 159364 - DNA, 295 bp, Zea mays
  Clone ID: MRT4577_76913C.1
ctgacaactagagatacagggcaggaagtacatgataaatgaatccgctattgatcattctgctggctggaccatgtggagtacgagtgcttacaagtagctgtaaacatggtcattataagtcatgcttactctgtggactatctcgtgactgaataagagctaatcgcccgactacactcactgattgatcaactgagcggcgaagtgctactaactaataccactgattaatggtcactctatgatgcagacctatcagatgagctaggctacacaaggcttaatgttgcca

SEQ ID NO: 159365 - DNA, 225 bp, Zea mays
  Clone ID: MRT4577_76914C.1
gtatggatcaaaactccattcatgggggggagtactacagtgatatacaatcagaggactatggataaccaacacatgttaagggaaaaaatatttaataccgcatctgctagactatggggcggaaaatttctactggaacaggctttgtatcggcaaatgtccacctcctgggtaccaaaccgaatcaggagcacgagtttgtggaagaacaaaaacgtctcc

SEQ ID NO: 159366 - DNA, 833 bp, Zea mays
  Clone ID: MRT4577_76915C.1
acgacaactcacaggagagtcctgtgcgacggcgtcgcgagcgtgatcaaagaaggcacaagagcttcccaagcggccattcttcgtggtccttcgctggcctaggcttcctgtcgtggtacctggcgggcaaggtcaaggcgttcgaccggcgcggccacgtggccaagctctgcgtcgtgctcctgccgctgctgctcgcggccatggtggcggtgtcgcgggtggacgactactggcaccactggcaggacgtctttgccggtgggattcttgttccctgctgcagggttggtggttgcgtctttctgctaccttcagtttttcccaccgccatctggtgaacaaggattctggccccatgcgtactccgagcacattctcaaccctgagcgcgagggccaagcgcagtcaacagcgagctcgaaccagcaccgacgcctgtccagcagaggccacgtggcagtggagatgagcaccgcgatcgcgaccgcgaccgcgagccaggacgcatcgtcgttaggtcccatggaggagatggagatggaggaaggacgcggagcccggtgacggaccagcacgctgcatgcatgccgcccgttacgaacagcgcgcgctagctgcagcttcagtcttcaaagtcgcttcgtttccttccttccttccttttcttttttttttttcttcttcttcttgctcgcttggttgatagatgtgatggtctatctagtagcagtggcggacccagcccaaatattgagtgggggcccaaatgtgagtgggggcctaaataaagtgctgttaataaataaacctttgtaactacagtaaat

SEQ ID NO: 159367 - DNA, 468 bp, Zea mays
  Clone ID: MRT4577_76916C.1
atggccaccgccaccgccgctccagcatctgtggcgcgacgacggatctggggacacgctcgcgacggcggatccctgaggcgcgacggcggatctggggacacgctcgcgatggcggattcctgtggcgcgacggcgaatctagggacacgccgcggcatcggatcccgagggcacgcacgcggcggcggccccatgagggttcggcaaacatttgatacaagggaagaagcctacctcttttaccttgactatgcaaagttggctggttttagtgtcaggacaaagagatgcaactgctggtctggttcgaaaattgtagcattctgtcgggagcgtgcgggagggaccaagacgaagcgtcggttcggcctgggtgggacgattggctcgaaccaggtgctcctggcgcgtaggttcgacctgggtgcattctctatattgaatgcacccaggtgtaatatataa

SEQ ID NO: 159368 - DNA, 144 bp, Zea mays
  Clone ID: MRT4577_76917C.1
gtggcctgcagtgcgagttgcttcgatccacctacttgttcagacatacataatatagagtactacagtacagtatattatgtatgtgtggcctgcagtgcgagttgcttcgatccacctacttgttcagacagtttaatggtt

SEQ ID NO: 159369 - DNA, 274 bp, Zea mays
  Clone ID: MRT4577_76918C.1
gatcttatctgccgccgctgctcatctcacatgcctctagaagacgcctgatcctcgccgatcgatacgatggccgtcttctccgagctccacaccgccgaatgactcaagtcgctcgaggctcatctagccggcaaaacctatgtgtcttgtgactccattactacggatgacatgaaggtcttcgacgcggtgacgtcgaagtctggcgctgagtttcctaatgccgcccgcatgtactagatcgtctctgcggctgtagctcaagattcct

SEQ ID NO: 159370 - DNA, 576 bp, Zea mays
  Clone ID: MRT4577_76919C.1
attggttgagcttttagtggaacaaggagcggcggttaatatgcaaaatttcgttggagagacggcactctttattgcttcttctttgggattaaatttgatttgcctcttcttgcttgagaatggaggtgacacaagaatatctaccttagaaggatcatcacctcttcacgctgcatcagcatgtggtcatctttctgtcattaaatcccttgtttcacatggtgcctttgtgaattctacggacgaagaaggagatacgcctcttcattatgctgttagagaagggaagaaagaagcagttggattacttgttcaattaggtgctcaattgatcaagaatgaggatttggaatctccattggatttggccgaagaattcgatgagacttggatggttgatttgctttcaaatcatttcccttcccttagatctgactccgaacatggcttctgtttctaaaaaaaatacgtttatataatgaggagagggggaacacgagttgtccgaaaggagtcctcgttgtgtagctttcagcaattcactattagctatattaaagttttccttcactc

SEQ ID NO: 159371 - DNA, 269 bp, Zea mays
  Clone ID: MRT4577_7691C.1
cttgaaaatcacaactcttcaagttgggggcagcattttctatgttactccaggctttagtcctatgtcttctgattaagagatgcttagccatctgagcaagctgtctaattcaggaaggctgagaagctcagggaagggctgcctggagcttataaacagatcctgtcctgttcccactttaatgttgtaggatcacacttgcactgagaacattaaaaaaagacactggaggatgatagatgtgaagtactgtgtccattagctgt

SEQ ID NO: 159372 - DNA, 386 bp, Zea mays
  Clone ID: MRT4577_76920C.1
tggttaccacgggatggagctcatggacagggaggtgcaggcggagtttatgaagacgtacagcctcttcgactagtacaagttcaatggccatatactgtggatctcgggccaaataaaccgcgttcgcttcggggagctagaccgatacattcgtgagaccaaaggcagcattcgtgcatcagtgcgttctacgaagcagtcgagctgacatgagatcgagtccatgacgtgcggtttgccaacaatcgagatctgccatggcggccctgctgatatcatagtagacggggtatccgggctgcacatagacctttacgacatggacagggccgcggatatccggagaaacttttttgtcagatgcaagggagatccgagctact

SEQ ID NO: 159373 - DNA, 379 bp, Zea mays
  unsure (1)..(379): unsure at all n locations
  Clone ID: MRT4577_76921C.1
cgaccgcgtgcactaagagcaagcctcagtcaggcacacctatagggggggggaacacagatattttcgggtgcncaacaacactactgtagatcaattgacctacaaccaacattttcatgtgtgaattaaagagactctaaaaaaagcttgaaaattcacattatctcaataacacattgaagagcaagatgccaaaaataaacaatgtctgtaatgcatgcaaagtatcattttctacggaaggtaccatatatcaagagatgctcgagagaatacatgcactgttagatgacataagacctgtagatgttggcctacataatgaagcacaaaatgcacgcaactacagtaatactactcctccatcaaatgggag

SEQ ID NO: 159374 - DNA, 590 bp, Zea mays
  Clone ID: MRT4577_76922C.1
ggaccaatgcgctacctactcccagcagctggtcgcggcggtggcggcggcagctgctgctgctgctggcggcgggggccaagacggcgacagcgggcgtagctgcagcaggtgacgtcatggcggcgccgtgcctcgaccacgcaatgggcagaacggcacagacctccggcgactgctgcaacacggtgcgctacctcaacagccacacgtcgaccactgccacaccggcaggccacctgcaactgactcaagagcatgactggccggcttgacaggcgattaagcatggtcaacgccagcaacatcctacgtaagtgctgcatgtcacaacagcgtgcccatcaagacaaccagtcagactgtaccaagatcaactgaacaatggaaccattatggaggtaactcgatagtaggatagcatcgtacgtagacatcagcaccatgcaaaaactgtcatagcaccacagcactagcatacgagcgtgtaatccatcacactgtcacataataaagaattaatcatgcacccactagtcatcactatgaataatgtccctccacctaatgtccacatacagacctgagta

SEQ ID NO: 159375 - DNA, 328 bp, Zea mays
  Clone ID: MRT4577_76923C.1
cgccgccgctccgccttagcgcatcgcccgccgcgacctcatcgatcaccttcagctttcaatcatggcggacgtcgatgtcgaaccggaggttgccgccggagctcccaagaagaggacgttccgttagtacagcttccgcggcgttgacctttatgctcttttcgacatgtccacggactatcttgtccagctttttcccgtgcgcgcctttgtaaggttccagaggggtctgtataggaagcccatggcgctcattaagaagctgcgcatggcgtaaaaggttgctcttgctgtggagttgcctgtgccagtcaagactcatttt

SEQ ID NO: 159376 - DNA, 411 bp, Zea mays
  unsure (1)..(411): unsure at all n locations
  Clone ID: MRT4577_76924C.1
ccaaanccggttcgaaaggatatataacttccagtctcctaacgaatttaacataaaacagaaagaaaagttcaagaaaatttgttgtaacttaaagtaacttacacaagtcttggccaaaaaaaagtttgaaaatctaaaaaaacaaaaaaggggttaaaagggactgattgatgatcatttggaaacaaaaagggtttccttcttggtccataaattaaaacacaattagggggaaaaatttttcctctgcccttttttttcgaattttcctcattcatcaagaactttattaaccccctcactaatctttgattcaaaaaacggggcttcctctgtctttgattcaccaaacgccaacaacggtttgatgtcaccgttccaaatgcggggggaaaccaaaaacccaat

SEQ ID NO: 159377 - DNA, 332 bp, Zea mays
  Clone ID: MRT4577_76925C.1
ggccgaccacgcgtgcgtccagacatcaaacctcattttaaaattgatcccacaacagaacaccaggaatatgggcgtctttctcttcgtgtgccttgccctcgcagctgtcaacagcctctgtattgctcatgccctacccccgcgcagagctaccgggctcgttctatactcccgccccgctctctacgacgacggaggcacaaccgctgtacccctacgcggagtacctgaggcagcccatatgcacacccgctggcgtgctgagccctactacgccggatgtgggcagactatctccatgtaccatcacgtccggcaccaatgctgcc

SEQ ID NO: 159378 - DNA, 522 bp, Zea mays
  Clone ID: MRT4577_76927C.1
tcccgggtccgtacccacgcgtacccattggaaagggtggccatggcgtggctttccgaactccgttccgtctccaacccctgtgggatggccgtgcccgcgcccggggaggctgggcgcttgcttgccggctgcggggtggtgctagttctgatgaggtgtgtccatttccgaggagggctctccttgggttcccccaccaacaagggcctaattttcaacatgcatcctgtgcttatgatactaggattcatgatcctatggagcgagaccatacatgagctacaaaatcaggacatggtagtcatgatacaaacaggatggttcacatgcttcttcatgctggtgcactcttccagggtagtgatgtgatatatgctgccttcaagtttcacaatgaaagcggcattgataatcatgacaggttgaattcgttggttggactaggaactatttgtctgctctgaatacagtagctatatgagggttgctaccttctttttacctggtgcttagccaaca

SEQ ID NO: 159379 - DNA, 511 bp, Zea mays
  Clone ID: MRT4577_76928C.1
gaatcagacttgtacagcctcttcgacgtgaaggccgtctcgaagaaatcgttcgccatgccttcctcacactccgctagaggaggacgacatgtcctcttgccgacggctgttgccgcccgtgcggcgctaatattgggggcagagtggctccctcgcgactagttatccgggcacgatcatgttcggcaactcgctgtacgacacgggagaactacccgtacacttactgcatacgactctgcttgtggcgggaccgcgatccggccaccctactacgagaccttcttccaccgcgccatcgcgggcacgcctccaatggaagcctcgagtcctacttgatcgcgcacaccgaggacctcccggtcgcgtcaccggatctgatcgtacagagatcgaaggacttcgcgagccatgcctgcttcaccgatatgcggtaccacttagctcagcccggacattttccagaaaagggtgttctacaacatgcgaaacctagtgacctctacat

SEQ ID NO: 159380 - DNA, 238 bp, Zea mays
  Clone ID: MRT4577_76929C.1
acctggttactgttcaattctgtttaaacacaaaaaggaccccccccgggtctaaagtaagtgggtgcacaccccatcggggaaaccccacaggacccgggggagatacatattgaagggcgccggggccacccacccttgaaaagcactcgtgcaaaaaccgcagggggggcacgtaacaacaaagcaaaaaagaaagttggaccggggccaaagggccacttcagaccgggaacct

SEQ ID NO: 159381 - DNA, 315 bp, Zea mays
  Clone ID: MRT4577_7692C.1
acgctatgcaattattgtcgcagcaccaagaagctccattgttcacttacaatgaacctataatgacgcctgacgggggacacccactccattgatccataagacgtggtggttgaagcctgggtatggtggaaccggaggcgaaccccacgatgccttctgagctaaatggaccttgcaatccaaaacacaaatgggcaccggccaactggatatgcacgacaattaaccttctgggctagggataacataccgggatccatcaagataactggggggtgcgggcccgaacgctgagttgctccatgatccgtc

SEQ ID NO: 159382 - DNA, 622 bp, Zea mays
  Clone ID: MRT4577_76930C.1
agaaatggccgtcaagtctacagtagaggggcagcagctacgggagcagctccgcgaccctaaccccgccgggtatgggcctaattccgcacatcgaggactcgcatcctgacccgcatccagccgcacgccggcggggacgccgtgtactgggagaccaccaccagctccgccctggaggactaccgcgccgtggagggcgtcatggtcgcgcactcggggcgctccgcggtgaccctgttccggttcggcgaggccgccatgagccacaccaagacgcggatggaggaggcctggagcatcgaggagccgaggaggtggcgttcaacgtccccggcctgtccgcggactgcttcatctcgtcggccgacatccagtccggtccagtcggcgaggcatgcgtgttgtcatcgtcccagtagcgcgccaaggccggcgcaagatctcgaagaggcactcgtctgggagcgcgtcgagcgacagcagcggcagctgcctctgcttcttggccgccctcacgaactcggccgccgcggcgaccgcggacgcggccaccagcgtgcgcttccgctgctgcacggcgccgcgggagaagagcccgcccagctcagccggcaccgag

SEQ ID NO: 159383 - DNA, 467 bp, Zea mays
  Clone ID: MRT4577_76931C.1
aaaaaaccgggaaaggaacctcttatttcgggggggcccccaacctcacccaaaaaactttattatgggggtgcggccaaaaacccacccaaaaaagggccccccccaagatgggttgttgggaggaggccgctgggtttgtcaaaacaagggggacaaagggcaacaattggtgtaattgaaaaaggggggcgggggtacccccaaaccgcggggaaaaaggcaacaaccggtgctggggcaaaaaagaaaccccggttgctgcaactaactggctaaaagggaaaaaaatttgcggcggcaaaaaaaccgcgggggtcagggcggcccattgggtaaaaggaaaaaattgttgttgaaaaaaatgggcaggaactacccgggcgaaagggaaaagagggggctgcaaaaaaacccaggggtcaagggaaaaagtggggtgaagggaaaaaaatagtgttcctcaa

SEQ ID NO: 159384 - DNA, 587 bp, Zea mays
  Clone ID: MRT4577_76932C.1
ggggggggggtgttttttttttttttttttttttttttttttttttttttttttttttttttttttttttttttttttttttttttttttttttttttatttaaaatgggacccaaccctttaaaaccaaaaaaattaacccccctccatggggggggggggggggctatttcaacaccccatttgcaagccgctttgaaaatttaaaaaccctcacaaacaaaaacccccccttttttacaagcttgtacacaggctttaaaaaccacacaaaaagctgctgcaccaggggcatttccccaaagatgcccaaaaatccccccaccaaattgtaaaaccgaaacatccccaaaaatttcgggcaaagctggcaaatcccaaaaaaaaaaacccccaaaaaccacccgtaaaacacccggcatggaaacccacccccgaaaaaaaaaaaaccccaaaaaccaactttttaaaaaaaaacatcgcccaaaaaatcaacaaaacccaaagttatttgcgcgttccccttttaacttacctacacactgacccggagggatataaacccccccccacatacccaaggcttt

SEQ ID NO: 159385 - DNA, 378 bp, Zea mays
  unsure (1)..(378): unsure at all n locations
  Clone ID: MRT4577_76933C.1
ggcttcctccaccagcagctccgcaagtcttctcttctctgataacttggttctctactcttggctgcttgttgcccaccccgctctcaggtcagtttgctccgctcggaatggcctccccgtcgacggaagccccgctgcctcccccgaccatccgggacgtcatgggccacgacgacgacgactacgacgactacggcgaccacaccatcgcagaggaggaagaaggggacgaggaggaagaggagtgggacatgagcaagcgcatgtcgcgcctgtccttggagggttccgacggcggcgacgccgacgacgaggccgggggagacgaggaagagcaagaggaggacggggnngaggggccggaggggaggaagg

SEQ ID NO: 159386 - DNA, 570 bp, Zea mays
  Clone ID: MRT4577_76934C.1
gaaaacccggtctatgattaggacccgcccttggcctggtccaaaaccataagcccaagggaagacgctgagccgcaacaaccccaactgagaatgggaaaaacggcactggaaaattccaaatgaaatttccttatacgctacagtttttaatcctatccaaaccatggccaaagactgaaaatttaaagggttggcgcccccctggaaaaaccaaagcaaaaggttgttgggctttcaccttgggcccccataccacaaggcctttctccttggacgggggaggccctaaccaaaaattaagggctgaaaagaggcttggtgttggcaaaaacattgactggggaaaagagccttgggcaacctttgaaatgtgccagggctatctggaagtgtaaaagctttggaccgcgcctaagataagtggcggacaaaaactccccctccaagtttaggacatggccttgaacattatcatccatttcctgagggtcattcagattcgaaatgtctgacccatgcctagcattcttgctcttgcggatcttgacacaggctgggaaaatcttt

SEQ ID NO: 159387 - DNA, 410 bp, Zea mays
  unsure (1)..(410): unsure at all n locations
  Clone ID: MRT4577_76935C.1
ttgaaagagcttagtaacacaaacttgggaggctttcagctacagcaaacccttacttttattgtttgacaacaaccaattgttcctattacatcaactttcacttactcatcttactcttcaaaccattttcatcgcatccactcatctatttctacctgcactgattcctaatatctttggtgaggcctgtccccttctttcaacatcaatttcttgcatccttcccactttctctttcaaacatattttcttaccaacaacaacctctcttacaacaccttctacctnctctcattcatacaatccttatcaaccctatctcctaccttcatctcatcaacttatttcatctatccctctcnctttttttaattcacctacatacctccaacatcattttcttcaac

SEQ ID NO: 159388 - DNA, 378 bp, Zea mays
  Clone ID: MRT4577_76936C.1
gccacgcgtccggatccactacctcagacagttgtgagtgcaccagcgtacacgaactgcagggggcaaaggtaccagctctgaatgacatgaactgcccgagatgtcatcaactgtgcgatctatgcatgactcgacagcctacactatgaagccactgtatatgacctgatccgatgtcatatctgggatcatcatgttagacaggctcgatcgccccaatacttgaactgaaactacggctgagtaccccatgttatgaagatggtacaaggagcttgtactgacctctacaatcgacttacgttaaccctatacctgcatcatacgcaggaggcgcatcagctgttatctcagcatatactgatggccgaagtg

SEQ ID NO: 159389 - DNA, 270 bp, Zea mays
  unsure (1)..(270): unsure at all n locations
  Clone ID: MRT4577_76937C.1
ccggccgcggatgccctntcctccacatacaagaccaaccgcagatcaacacacgcaactcactcactctactgcctatcaccatcctcttcgcctagcgagaagggacgccatccatccatccatccatccatggagctctttgcagcagccgaggagaagccgtgcaggctgttcaaaaagaggagcggcggcggcggcaaggggggcatgggcgtgcgcgccgacggcagcggcaagggcgggtccttctccgggcggcgcgcgcgc

SEQ ID NO: 159390 - DNA, 543 bp, Zea mays
  unsure (1)..(543): unsure at all n locations
  Clone ID: MRT4577_76938C.1
cggacgcgtgggtttcttccaccccggggcgggccgcggccatcagccaatccgccacggccgtgccagccaggcgaaaagacacctcctttttcccttgcaatttccctttccctttcccagcagccagcctttgacctcagattcccgctccaaccttcgttcgtttcccttccagtccatcgctcgcgttcgcgttcgcgtcgcataaatagacctctttggaacaccatccgcgcggcgcgtcaaaggagagggagggagagagagagagctccccacgagcctcagccctcacggttgacctgtagcagaagcggcggcggcggcggcggctagggcggttgctgctcgtggccagcctttggccagagcatagcgcaatggcggcgcagtctctgtccgtgcccgtgcccatgcccagctccttggacctccgcgcggcggcgccgttcctggttgccgcggtggctttgtacttcctgatggagcangtgtcctaccaccggaaagaggggccccctgcccgggcccggcgctcgt

SEQ ID NO: 159391 - DNA, 433 bp, Zea mays
  Clone ID: MRT4577_76939C.1
aagcacactttaataaggggttttatattcaaagagggaaaccatcggcggggggggtcctgccagctaggcctttttgacacgatcgatcaaacatccatcgaggatcgatccaacacaaacacaggaagacccccccgaagaacaaatatatgctggatgcatgcatgcatgcatgcccatgacgatgatagcaaattcgggaaaaaacacacccaaaacaaagcaaagcaaaacaaaatgaaagcgatgaacgaaaagcgatgggtactaatagcttaacttggacttggtggtgaaacctgaaaaaaatataattattatttaacccggccggcctggtgcaggggggcgtgtgcatatatatccatggatcgggaaacgacgacgatggggagacgacgagagggagggatgcatgcatgcatgcctg

SEQ ID NO: 159392 - DNA, 239 bp, Zea mays
  Clone ID: MRT4577_7693C.1
aaaaaaaaaaacaactatataccttactttttaaaaacttaatacaaaaaatatggggtgggttcaactaaataatgagccttggtcagcaatcctatttatccctttgtcatatacgagacttatctcgttgtaaatttcctttgggttcaaccaaatataatcaactaaccccaactttacatatttgtctaccataataaccctgtcgaccaaatttttaaacactttaatgaaca

SEQ ID NO: 159393 - DNA, 316 bp, Zea mays
  Clone ID: MRT4577_76940C.1
gagtattatttttctagtgttgatccatgtagttctttaaattggatgatttattgggattacaatgggtctttttgttttttaaaaaccgaaagcccttattgaaacattggggcgctttaaaaaaaggagtggaaaagggtatccagggggcggtaattaaaaaaaggacccccccccaaaatccaaaggattcacattgggagggttaaactaaacaaaaggtggttttgggatccgggggtagggaaaaaatctggcaagggccaattgtcagaaacaagggaattttttttcccccgggaaaagtaacccc

SEQ ID NO: 159394 - DNA, 647 bp, Zea mays
  unsure (1)..(647): unsure at all n locations
  Clone ID: MRT4577_76941C.1
gcctcccctacgccatcttcgcaccttgcctcctgcctctcgcgcccgcacaacgagcctcgaggtctctccgtcgccatccccgtcctaggccccactttctcggcggcgttgcgattccaccagacgttagggcgaggtggcgtggttcgtgtgacaatggggctcaccgcttgcggcctcgtgggtgctcggcgatgcgccaatgtgccatgacgaccggtcggctggagcacggggccgtgggacgctgggcggctgccgtatgagtgctggggtgtcggctgggtctaggagctggccggtgggcggctgcggctcagccattgaggtgaggatatcgtcttccatattaaattcaaatccgatttcgcaagcaaccatccctatacctcatcatgttaaacttcgattccacatcagattcaattatccctacggcctacatggggctatatccattcagaatgtctgtggcaaccgtccctacacctctttattatttactttacggatgagtttgctagccgtatagactttccatattgaatatgcatatttttcttttgcttcttattagntcggagactacagtcctgttgatcctcttgctaaaaaaatagctcatcttcagctatgcgtaataa

SEQ ID NO: 159395 - DNA, 700 bp, Zea mays
  Clone ID: MRT4577_76942C.1
cctccatcccccccactcccccctcctgcgcccgaggcctagcgccggcagcccgggcccccagctgctacagcaacgcctgcccgccgccgcgatccccagcggcaggaacgggctgcacccgcacccgccccagccccagccccagccgcccgcagcgggtaaaggggccaaagagccgtcgccgcgcgctaactccgccatcaacagacctccggagaagaggcagcgcgtgccgtcggcgtacaaccgcttcatcaaggacgaaatccaacgcatcaaggctggcaatcccgacatctcgcacagggaggccttcagcgcggcggccaagaactgggcgcactttccacacatccactttggactcatgccagatcaccaggggcccaagaagacaagcctgctacctcaggatcaccagagaagcgacggcggcgggctactaaaggaagggctgtacgctgcggcagccaacatgggggttgctccatactaatataataataatcactcctacttacgtgctcaagcttataatattagagtagcaaagctgctacgtactgttagggctctatggactactacgaagctatggacgtgtttggtaggctgcatatgggccggccaggctggtaagatacagcgtacgcttgtttggttgctaaaaaaaaaaaaaaaaaaaaaaaaaccgatt

SEQ ID NO: 159396 - DNA, 460 bp, Zea mays
  Clone ID: MRT4577_76943C.1
gaggcttccagttgctgcactcgacgcgcgtcccccaaccgaatcgctaacccgagcacagaccccctcgtcgcgtatggctcgagccgtcctctggggccataactcggagcgagagggacccataaggctccgctagtgtccagaacacatgctattgtgttggctgagagaccaatagatggcaagagaacgagggagcgacatgatggatcgataagagatagaacagcgggagcaggcaggggaggcagacgaggttgaggcgaagatgaacctcttgcatggctatcgacatctggcccgagcgctggaactacatcaccactaccgaaaccaggctcaacgatcgcgttgtcgacgattggcccaaagattaatccatcatactaaagactgctagtgatgtgacactaataagtcgaggcaaaaatctagaaaatgacaagaatgttgcaca

SEQ ID NO: 159397 - DNA, 399 bp, Zea mays
  Clone ID: MRT4577_76944C.1
aaaaaaacacgtacacaaaaagataaaacattaaaaaaaaaaaaaaactaataaaaaaaaaagggaaaaatgccgaggcgttctacatgacccaagctaacttacacagccatgcgcaagctaacgttttctatacagtaacctaacaccaattaattggacttcgttctaaaagctcgtgactgtgaaaaccatgcgttaacaaaaattaaaggccttgcgcatacataaggcattcgcaaactggctaaatagcgattaggcccccaccaatagctattacaaacagttccacagactgaatcactaatgggaccccccatgtaccggcgcataaatcacataatctgagatgtaaacccccagcatgcccggtaaaattacaactaccctaccgcc

SEQ ID NO: 159398 - DNA, 271 bp, Zea mays
  Clone ID: MRT4577_76945C.1
accgcgcagatgtctgcataactttacagcgacattaggcccggactccgtgatgcatcatcatgggctgtgtcgagaagcgggtaaagggggactcctgtgccggtgccggactactctgcctgctcatccacgactgcttagaagacggctgcgacgcgttcatcttgatcgatcctatgtccaatgaggcctttgagagggaggcggggagcatacatgtgcgcggagggctaccacgtgatcgatgggatcaagacggccatgggga

SEQ ID NO: 159399 - DNA, 839 bp, Zea mays
  unsure (1)..(839): unsure at all n locations
  Clone ID: MRT4577_76946C.1
ccggccctcctctcacctcacttgctcgtcgccgcacctggatctggctctcgtctcctccaagcacggattaggagtgcacctattttgattctgcgaactgagtaactgattctaaaggatagggcaagaaggctcctttctaagcctatcaagtttttcaatgaaatgcaagagttgtttattaacagcagtgctgatggctctctagccatggaagctacaacttgtatgaatgaaactcatcctggagatgacagtgacttcaatgatgatgtgtgcagtgacttctccaactatcctcagcctgtgcatgatctaggtgatgattctgacactttacaatctcccaatcatcatccatctcaaagtgttgatcatagctcgtcaagttctggactgaagcgcccacaaggagagggagtaccagcgaagaggaacgtggaaccaaagagtcgcacaacaaaggaatgtatctagcacacaaagatcaaaagggtatgcgtggtttcttatctgctgcatcagacataacatttgagtcatgggtactaaagcatctgagtgatttggacctatgaatcgactagcaggatgatccatgtaggagatgaatggtgtgatagnttgggggtttttgcatttcttctaggttgatggatgtcaattgatggagatatttgggtggnttgtgactagtgttacattgctctttttgggtgattttaactttgagggtacccatgagcatagtgcatagcaccagtacctttttacattatggaatctctgcaaagcaggaagggcatggactgtaataaattttgctccattttcgc

SEQ ID NO: 159400 - DNA, 376 bp, Zea mays
  Clone ID: MRT4577_76947C.1
ggggaaaaaacacagttttggggtgatcatactaccaacaccaaaatcggatcgcgtttgtttgctgtaaagacacctggcgcaataaaatatggttttcactggggacttgtggagagacaagattctgaggggacagttttacccttggtttagccaaggcagtttgaccaaaccatttgttttcccacctttttttcctcctgaaaccactcttttcgtccttttatttcctctttcgtccggttcatgttgaaaccatagccactaaaggaccagcaaagtttgaggttggcgacgagttctcaatctgcattggattcgggcccaccctttttttaagcgttcagacttcaaagatgctcaaaggaacctt

SEQ ID NO: 159401 - DNA, 365 bp, Zea mays
  unsure (1)..(365): unsure at all n locations
  Clone ID: MRT4577_76948C.1
gaaaagagctagatataagaagatgattcgccggcatatggacttccgaatgcttcactctaagatcaagagtggcgcaatctcttgcaccaaggagcttctgagagatgtgctcattttcatcaataatgtaataacattctatccgaaggctacattggagcacatggctgcggttgagcttcgtgagtctgcatgcaaaactgtgaagcagagtgcaagcttgttcttgaaaagccatggagagaccggaacagctggtgcccctgtagtaaagaatactcgagtcctgcagcctcgatgcnctggccccggtgatgcaaggccaagcaaggttttcttcaaggacgctactgccaaggaaa

SEQ ID NO: 159402 - DNA, 889 bp, Zea mays
  Clone ID: MRT4577_76949C.1
cattggtacctcgagccggccgggatactttttttcgccgcatctggggcgctcgttttcgatgccccagcaccgctacgcgccgcacttcgcccccttctctccctctcatgccgctggttgatctctcgtcatctcctcctccaagcacggatcttctcgtcgtctcctccaagcacggatcaggagcactgaaattctatctcaaccggttctgccgactggataacttgaattctaaagatgggtgtgaaggagatgtatcttcaatattacaatagttacatccagtacctacgaagaagaagggtgcttatttacattaccatttgtgtggtttttctttggtacaaactgaatagattacataggaagagtgttaaatatggtcctttgttacaacgagatttggaacgagagaggcggctcaaccggttgtataatgggacagaagccaattgtattagtgagttgcgcatgcgcaaatttgttttccataggttatgtagccatttaaggtctcgtaggttgttagaggataatgtcaatgtctctgttgaagaacaagttgctatgttcttaaagtttgttggtcatagatggacaaatagttcagttgggtttgaattcatgcggtccggagaaacagttagcaggtacttcaaccttgttttagatgctctatgtgtcatgtcacgtgacctcattaccatgagaaccacagagaaccacagggacacaaccaaaggtctcgtaggttgttagaggatgctctatttgagtcatgggtattgaagcatttaagtgatttggactgtgaatcgactagttgatccaagcagagtgaatgtgtgatgggtggtatttgcattttctctagtgatgctga

SEQ ID NO: 159403 - DNA, 348 bp, Zea mays
  Clone ID: MRT4577_7694C.1
tttggggtattttatctctgacttttccaggggtttctttacatcatctgggggtctacttatatcagtgtgcaactgtgcatgcaatgtcgaagtcgtattctgatatgattatctctaaccagatgtacggatatggtccgctctccggaaatttagaaaagtgctgtatttaaacttcctgtatctaagggttgggctgctggtcatctatttcattgtttatatatggcaccacttaaagccagctcttgttttgatgtatgttggacatggattccttgaccatttgccctctgtgggtttcttgtgcttggaagcccacagctgaagtttcacgtgatgaca

SEQ ID NO: 159404 - DNA, 779 bp, Zea mays
  Clone ID: MRT4577_76950C.1
gccggccggtccgggaaagtaagatgccacacttctgtgggcaagtgtttggttcgtgactaactttaggcagccacaaaaagtgtggcgaggttccctgagcttgccatactttttttcgccgcatctggggcgctcgttttcgatgccccagcaccgctacgcgccgcacttcgcccccttctctccctctcatgccgctggttgatctctcgtcatctcctcctccaagcacggatcttctcgtcgtctcctccaagcacggatcaggagcactgaaattctatctcaaccggttctgccgactggataacttgaattctaaaggttgatccaagcaggaggtgaatgtgtgatggttggttattttgcatttcttctaggttgatgcatgacggttcatggagaaggctggtggttgtgatagctatcacacactcttttggttaataattagatactctttttgttgagcaatgtgaacctttaatggtgtttatgggtcttgtggagttgtgatggggctattatgaagatgctatggcctgttatggatgattggacatgttatgggctctatatattaatctgttagtttggtttcctcaaaaaaaaaaaaaaatggggctattatgaaggttcttgcagctgctaaagtgcatctgtgatatttgtaaatgagttattggtaactgaaatgaaggaaagggatctgagattggcttccaaaaaaagaaaacaaaatgcccatattcctcaaaaaaaagcttttgcacctt

SEQ ID NO: 159405 - DNA, 339 bp, Zea mays
  Clone ID: MRT4577_76951C.1
tttttctttttttttttttttttttttttttttttttttttttgggggaaaaagaatatcatttcgcttctgatctcatgcttattttcaggacaggaaaactccggcgccttattttacaataatcatgaaaaatacgggtcccgggaccggatgaagctcaacggatcccaaaactgaggggcccctggggacgaaatcatggctagagcaaatgaatggggccctcccttagccatatgcgggggccccaatctctggcgaaatactttctagatgagcaggttatttagagaagggtaagaaaaatatcaaggccgataccttccctcaataaaa

SEQ ID NO: 159406 - DNA, 1523 bp, Zea mays
  Clone ID: MRT4577_76952C.1
ggccggccggggcccaggatcaaacacgccgcacttcgcccccttctctccctctcatgccgctggttgatctctcgtcatctcctcctccaagcacagatcttctcgtcgtctcctccaagcacggttcctgttttagctggccgctagctgatgcaaaggtgtgctggatcaggaacctgttttagcagctggaatgatcaggagcactgaaattctatctcaaccggttctgccgactgggtaacttgaattctaaagatgggtgcgaggggtgttacacaacccttgccgtatttttttaccgcacctggggcgctcgttttggccgccgcacgccgcacgcccactcctcctctcacctcacttgctcgtcgccgcacctggatctggctctcgtctcctccaagcacggattaggagtgcacctattttgattctgcgaactgagtaactgattctaaaggatagggcaagaaggctcctttctaagcctatcaagtttttcaatgaaatgcaagagttgtttattaacagcagtgctgatggctctctagccatggaagctacaacttgtatgaatgaaactcatcctggagatgacagtgacttcaatgatgatgtgtgcagtgacttctccaactatcctcagcctgtgcatgatctaggtgatgattctgacactttaccatctcccaatcatcatccatctcaaagtgttgatcatagctcgtcaagttctggactgaagcgcccacaaggagagggagtaccagcgaagaggaatgtgaaaccaaagagtcgcacaacaaaggtagtagatgaactcagtgctactttggtagaacttcgaaatgatcttaagaagccaccacctccagtgcctatgccttttgttaaccctgatgcaatattgtggcaaaggcttgagaatatgacaattactactgatcaaaagttaatggtaggaacgtatctagcacacaaagatcaaaagggtatgcgtggtttcttatctgctgcatcagacataacatttgagtcatgggtactaaagcatctgagtgatttggacctctgaatcgactaattctatctccggttctgccgactggtaacttgaattctaaggttgatccaagcaggaggtgaatgtgtgatagttgggtattttgcatttcttctaggttgatggatgtcaattcatggagatatttggtggttgtgattggtattacactctcttttggttgatttttaactttgagggtaccaatgagcatagtgcatagcaccagtaccttttacaattatggaatctctgcaaagcaaggaaggcattggactgtaataaattttgctccaatttagcattgcgaacctttaatggtgtttatgggtcttgtggagttgtgatggggctattatgaagatgctatggcctgttatggatgattggacatgttatgggctctatataattaatctgttagtttggtttcctcgaaaaaaaaaaaaaaaaa

SEQ ID NO: 159407 - DNA, 578 bp, Zea mays
  Clone ID: MRT4577_76953C.1
gtccttaactcctttgtgacccggcgcaaaatatggcgtgccaccgtgcctgcgccccacggacagactccacaagcacaacggcctctcccgcgttctgctcatttaccagatgtctacctactcggcctacaatcgatctccagtgcctctagggacatttccgcctcctatcctgcagagcctgcatacagctgggctgagctccagagaccctaaacaggggattgacgtgcctagagatgaaagaactgagctaccaggaggctacactgatacaagacatgatggaaaagagactgccaaaagtccctaaactaaagatgacagattgatagaaaaactaaagagatatggcgttgcaggggatctgtaatatggcctactaaacactggctactatcagactgcatgttggatagtctgactgcgaaattcacctaaccagctgtgaaagggatatgttgcacccgcacctagaaggataggatatagtgcacttgatgagaggattgttaaactaatagcaatacggtgagctagacagcaagttactaagattaaacgagctggaggag

SEQ ID NO: 159408 - DNA, 647 bp, Zea mays
  Clone ID: MRT4577_76954C.1
ttgggaccctcgaggccggccgggaataatttttcccacggctattcttctgcgcccctctgctactgagctgcggtaggcgtcacagactgcctcacacgattgtgcgtgcacgcacgtaacaggtggtccgaagctcaagctccattacgcacccagtgatctgcatcgatagacggtcctctcctctccgtctcctaccgagattctgctgcgccaccccttggagtcgggcgcctctactacatcgcttaggtaggcgtccatcacggatgagaccagctccagctctcccttctagccaggtgtcaacaggctcctgcggtaatccaccaagaaattcctctcctactgccatggaggactggccttctaatatgtcttcgacgcgttaagcttctaggactctcgaggacgcccacttctgcatcatgcacgagtgttctgtgctacagagacgcgatcacatcccgctacgtcatacatgagctcgcagagccccctccccgaggacataatccaacaacatcttcatcatttgggcggagaaggagctgccttggttcaattatggcgttttcacgcccgtcgatacctacgaatactgtgtctacttctacggctatcttcgtcttcattttggagct

SEQ ID NO: 159409 - DNA, 312 bp, Zea mays
  Clone ID: MRT4577_76955C.1
aagacaacaaaccccccggggggatttattctcaggcacaacaaccggagagaaaccgatcaaagttcacggaccccttggtcaaattgggcacaaccccccggggaggttatacaagaccccaaaggtccccttgggagcacccacaaaaaaattcggtcactcaacccaacaaagataccaacccacaacccgagtctccctttttccattactgggataaactgggattccttcatcataaaaacaaccccccgaccaaaattgggctgcaagcctgagattttatccaacaaaagcaaaattttaatg

SEQ ID NO: 159410 - DNA, 315 bp, Zea mays
  Clone ID: MRT4577_76956C.1
gtgttttttttttttttttttttttttttttttttttttttttttttgggccccacgggggcggtttatttcacaaccggggggaccccaaagggggcttaccccccgggcccttttgggcctcccccatacatgtccccaccccaaagccggggggggggcggagcccgggggggtttctgggcccctgtccagggttccgggcctaactggtctgcctgccgggcccctaccctcccgttcctccccggagggttaaacccctcggcgggggttgggcccctggcctctgggccctttttcatggccgggccg

SEQ ID NO: 159411 - DNA, 381 bp, Zea mays
  Clone ID: MRT4577_76957C.1
ctgacgctttgcctgacgcgttttcctttgcatgtgctggtcttcttctcccttctcttaccgaccaggttggtgcggctctatggatctcgcctacctcgctcggcggctccttatcgcgctctcctatcacctgcaccgttcatgtacccaggaggctgagatgctcaagaggtatcacttatccgcagcacgcgcttcaggacctacgccgaggctgcttgccgtcaaggacatgcggacccggaagccgcacgaggtcaagggcttcgaatacggtaccgttcgcaccaccgacttcaagacgattaccactggaaaggacgaccagggtcttaagattcatgatccttattaccttaacactggccctgttctctc

SEQ ID NO: 159412 - DNA, 222 bp, Zea mays
  Clone ID: MRT4577_76958C.1
gggctggcgcttgtcatccaagaggcctgcacaagttcggcgctaactgtggccctgaggctgtctggttaaaaaccggcccgctgttcctgaacggcaccaccctcaacttacttcggcaacagcttccccatcaacctgttggggaccgtgatcgcgaaggccatcctcttaggaggcgccaaaccctaccgaataaccaaagaactggaccttgaggac

SEQ ID NO: 159413 - DNA, 295 bp, Zea mays
  Clone ID: MRT4577_76959C.1
gggtttcgtttgcggacgcgtgggcggacgcatggggggaatacactactagcgactttgatatgttctgaccggtaaggtggtactttctaatttgcacatgataattataaattgtggaactggggcgggtgtcaaaaataatgtgaatgtctggctgtattttattatattagaatctgtgatcaaactaatgtctttgctagttgtgctcaacaggcaatgattgtttttaaatgaaagaaacaggtcaaaactgaatcgtttaaataattgacatttcagtgcaagggat

SEQ ID NO: 159414 - DNA, 589 bp, Zea mays
  Clone ID: MRT4577_7695C.1
ggccgcttttttttttttttttttattttttttttttttttttttttttttttttttttttttttttttccaaagaaaaaaaagaacgcaacttggaaaagtgccaagaccagacaaaacctaggacctagaaaaattaaacaacctccctttttttgtggttgggggtcgcaccactgaccacagtggggtttgccccactccccactatgaaagaaaacttggaattaaaaaaaaaaggaaaaacgcacaccttgtggtttgccacgagacacaagatccaaaaccttgcccgttgaaaggccgaaggcccgaaaccttaaaccttttaagaaaaaccccaaaggctcggggaaacgaaaacggggaccgggggggcccggggcccttgaagctattacggcgaacaagggacaatcccgggtcctggcacataggccttgggatccaaaatccacaaaaggggcaaagggcggaaagggggaacccttctacccaaaaaccgagaacccttttggggggaggcagcacccaccatcttaatcttcatggggcaaggggggagggcccctttctccttcggcaaacg

SEQ ID NO: 159415 - DNA, 361 bp, Zea mays
  Clone ID: MRT4577_76960C.1
cccacgcgttcgtccacgcgtccggtggagtcctgccattacctgtacttgatcatagtgtgcaggcttgcattgttacgggctattgggaggatgttgcgagcttcaaaccattgtttgctgcgctcttgcccctggctgtgcatccttcgcagcttgtctttttacgatccgcgagagagggtgggtctctgggccccgatgctcgcctgcgactcactgggacacgtgcacgatcttgtgtgcgtttatctcatatggttgcttactgttgagacgcttggtgcatctttctgtgcttggagtctggtcacgtgtcctctctggctgtgatctcggggacttcgctgtgatgggtgcg

SEQ ID NO: 159416 - DNA, 258 bp, Zea mays
  Clone ID: MRT4577_76961C.1
taactattaagttcttgtatgtgtcaagttttggttggtgttactctccttgtcttggtaaatagggccctttaacacaatgcaagacctatagaaaggactgtaatatgttaacatatttttttgattgcctcacacctctttctttgccaagccattgaatgtttattccttttttccattaccatttatggaatgtcgaatcagtttgcacccaaaccttttgaggaacttgaataaagagagaacttacagttg

SEQ ID NO: 159417 - DNA, 211 bp, Zea mays
  Clone ID: MRT4577_76962C.1
agacaagctagccgagcgagtgatgccatggcgagctggcactgctgcggcagctgctctccatctgctcctccgcctcggcgccgacgcagcaggcaggaaacgacggcgggcatcgccttgacctagaccctgacgacgacaggcggcaccaccagacaaggagacacttgcaagggaggcagaaaagtgaccacctgaagtcaaggcc

SEQ ID NO: 159418 - DNA, 193 bp, Zea mays
  Clone ID: MRT4577_76963C.1
acttcacctccgatacgccaacactaggccgaccgccgccgccctacgctacaactgacccacctgagcctaggtcttacgactcttcgtcgtaacgcttataccgagcgggaagacatacccatacaccaccaggatgctttcattgaggtaccgtccatacgacaggatggcgctaaggggggtctggcac

SEQ ID NO: 159419 - DNA, 396 bp, Zea mays
  Clone ID: MRT4577_76964C.1
gaaaaaaacatccagctcagtaatgtgactagtattatattacagccaagtatcatattacagtgtgacaataattctaactaacatgattagatatccaacattttcaatgaacaacttcaggcacttgatcgacctctaggatgaaagcatacacatgccttctatttgaaatagcatgagtttctaaactaatccagtaaatccaatctgaccttaagccccaaatccagcagtgatgtgatggtggagtagagtcgggtgatgggacccaaccatccaagggggtcttcgaggagtaccgcccatcttgtgtgtggcatgaagacccgacggtggtcggcgtcgcggcggcacaggaaatcggggccgccaaggggaggcaagacgcagatc

SEQ ID NO: 159420 - DNA, 525 bp, Zea mays
  unsure (1)..(525): unsure at all n locations
  Clone ID: MRT4577_76965C.1
caggcacaagctttttttttttttttttttttttttttttgttttttttttgttttttttttttttttttttttttttttttttttttttttttttttttttttttttttttttttttttttttttttttttttaccttggccgggggggggggggggggtattttcaacaccctggggggcgttaataggggatcccgggtgggtaccaaatttggcgaaataaggggcaaagttggttcctgggggaaaatgttttccccccaaaattccacaaaaaaaaaaaaccgggagcaaaaaaggtaaaaccgggggggcctaaagggggggccaacccaaattaattggggggggcccactggccgtttttcagggggaaaaaccggggggcccctttgtttaatttttttggcaacccccggggaaagggggtttgggttttgggcccttttccgctttctcggtcaattactcnnttgccttggtnnttgcgttgggggggggggttttttttcctttaaagggg

SEQ ID NO: 159421 - DNA, 372 bp, Zea mays
  unsure (1)..(372): unsure at all n locations
  Clone ID: MRT4577_76966C.1
cgggcgggcgggttcgnnggttgnttctcgtcactgaacatcgncgncggttaggcggaggagaagttcccggcgngncgacgncgaaaccgncgtcgngtgttttgaagttctcgaaaaaagggngngcaggatgagagngggcgtgaactcggcacctccgcactgctactcgcgccgtcgtgccagcgccacggtgctggatgcgtgccatgtgttcgaccacgtgttggngcagtgtcttaccgaacctggacgngggactctgcgtgtgggctgtcgtcgggggcgggtggaggttcgggtggggttcgggcggattttgtggttgcgtgtatctgtgggtttgtttcagttgttcggtttgtttag

SEQ ID NO: 159422 - DNA, 185 bp, Zea mays
  unsure (1)..(185): unsure at all n locations
  Clone ID: MRT4577_76967C.1
ggccgcttttttttttttttttttgccatcaatccggcaaatgtttgccattaagtgtttaagaatcgaacatcataatgtannatttggttctggaccaggagnnatatgatatatgnnatatatccatgcaccatgggctgatccctctaaaggngtcatctgcccaagctcggcacatgcac

SEQ ID NO: 159423 - DNA, 341 bp, Zea mays
  Clone ID: MRT4577_76968C.1
cccccccctccctcttcttctcttctcccccccttctctctctttctctggggtgggttctcaatctcgtggttgtctcccggcaactactccctgtgagccacaggggggagcccgggaaggcagatcaaacctggagaaaagacggggagggaggggggcaaaccgcggtaatgaggggaaatgaaccaccgaccgaggaacaaacggagaaacaaaccgggagcaagaaggaggaagcctggggagccaaaagagaaaaaaaaggagaaaaaaaaaaaaagaccacggggggggctagggggggaggaaagggggttaaaaagcggggggacaagaag

SEQ ID NO: 159424 - DNA, 144 bp, Zea mays
  Clone ID: MRT4577_76969C.1
gattcaaaacaggagttgacacaaagggtgggcaagagacaattaaaggcctgttcttcatataagaggctaataagaacattaaacgttctctgagatgctacctgttaaaagacactgccgtgcccagcactcggagaactt

SEQ ID NO: 159425 - DNA, 243 bp, Zea mays
  Clone ID: MRT4577_7696C.1
cccacgcgtccgctcacagagttcattgcttaacagcaagcctgactcgccgagatgctgataggatcctgctgctacattcgcccatgttccacgcgtctcaggtcttattagccgcatgccactcatgagcttgaatatgcatactcatagagcatgtcatgagtatataatgacatagacagagaggagccgtaagtgtaaatacaggaaggttatatgctatatatgcgacgatcaaaa

SEQ ID NO: 159426 - DNA, 626 bp, Zea mays
  Clone ID: MRT4577_76970C.1
cctcgaggccggccgggaggccagggtagatggttcaactccggccgcggtcgccgcctctcgcgccccggtgtcgggactcgttttaatttgcactatatatcgaaacagttccctgctgatgaactcgctactagtgtttttgatgatatatacagctgctcatgcagccgtctctggacttcgatctgcatctggagggcttcacttatgtgcattgacctgccagattcccgaaccgtgtcaccttctgaaggttcaggtgcggcggcggcggtggtggcggcggtgaagcactcccttggcatggggcgttgtctgctcccgtccggcagcctaccaacgctgcatgcgaaacagaggcaagcttagcgcatctcgcactggactgaacggctggggtttcagttacttgagctacactgtattaagaagcatatatatatgcagcctaccattctttgcgctggcagcatgagattgggcctggagattcttgctgagtctgtatttctatgagacaagcagaaaaagaaccaaaaaaaaacatctatcttagtttgtgacgacgggaagccaaaatttgtttttgatggcataccaaaaaaaaaaaaaaaaaagcggcc

SEQ ID NO: 159427 - DNA, 609 bp, Zea mays
  Clone ID: MRT4577_76971C.1
ggcttcccgtcgtcacaaactaagatagatgtttttttttggttctttttctgtttgtctcatagaaatacagactcagcaagaatctccaggcccaatctcatgctgccagcgcaaagaatggtaggctgcatatatatatgcttcttaatacagtgtagctcaagtaactgaaaccccagccgttcagtccagtgcgagatgcgctaagcttgcctctgtttcgcatgcagcgttggtaggctgccggacgggagcagacaacgccccatgccaagggagtgcttcaccgccgccaccaccgccgccgccgcacctgaaccttcagaaggtgacacggttcgggaatctggcaggtcaatgcacataagtgaagccctccagatgcagatcgaagtccagagacggctgcatgagcagctagaggtatatacaaattaaatacaagcagcagctctctagttttattaagatatctcagcgtccccgtgatatagacataatgcagaagaaccactacctgtatatatcatcaaaaacactagtagcgagttcatcagcagggaactgtttcgatatatagtgcaaattaaaactgcaggggggaac

SEQ ID NO: 159428 - DNA, 409 bp, Zea mays
  Clone ID: MRT4577_76972C.1
atccgtttccccgtctgcacgcagaaacggaaagacgttcggccggctgttctcttgcagttgcagggattttgcttgctccttccagaaaaaataggaacaacactgtgtggcctgctgattgacggggacatgcatgcgaggattgttggttggttggttgcttcggccggctgttctctcgcagttacaagctatgactggaacaaagacgtgcttacaacaatcgtcagccgctaccagtcctctgctctggaaatatccaaatcggacaggaggaacgatcaattagtggcggcgcacttatatacggtaacatctctccatatattgtcttgtcgggcgtgcagcatatagccatggcaaagcacagagggtgtcttagacagacagacggataggtccagcg

SEQ ID NO: 159429 - DNA, 383 bp, Zea mays
  Clone ID: MRT4577_76973C.1
tttttttttttttttttttttttattggaagaggggaaacaataaagatcttagcaaaactttgcacgacatggttcaataagtttttacattttaagaaaatggcgccgacttttaaaccggctccaaattttataccaaaagtttcaaccctttaaaaggaactttttgaatccgaaagccagggccctaaacactaaaaaaaaaatttttgccaggaaaaaaatttggaattaattggggagacccaaaattcctaaacttttattggttttcgaaaaaaaaaaaaggggtttttttttaggacacctaatttgggaataatttgggcaaattcaaaaaaaaaggtttttttttcttcctagactcttttgggccttttt

SEQ ID NO: 159430 - DNA, 410 bp, Zea mays
  Clone ID: MRT4577_76974C.1
attcggctcgagaggcgttcccccctcttcaggccaagcgcgagtaccagccgcgagacttgccgatcaccgggcatggccgcgcggcgcccgggatccgccacatctaggtggctgggcccaaccgcactggtcctacaggcagccagtgctgtcctgtcgacccgcgcagccggcccgggccctgcgggtccacctctagtacggccacaccaagtgcgtatgcgacacagatcaaggacaacgccatgggcgcctgaaagtaccacagggatggggccgaccccaactaacccaacagccagatccccgagaccgaccatatttccctgatggtgacatgcccgaacaggaaccggatgcactactcagagaacgtgcaatcgggccactttgatcttcacggaggc

SEQ ID NO: 159431 - DNA, 441 bp, Zea mays
  Clone ID: MRT4577_76975C.1
gggaacgggcctggattttaattggccttaaaaatggctttttggggggggggggggaaaacaattaaaaggcccagacaaagccctccatggaaactttaaaaaaattaaaaaaaaaacgcgcaaatccttggggcaaggacggatcacaaaccggggccgagggcctaggggggcccaaagtagtcctcccaaaggggggaaagcaggtcgaaaaacccggccccctgcatttgatcaaagctttgggggaactccaaaaagccggggccgccgttgtaaccaaacgtaccgggcagggaaacgtgggaacaaccggaccccaaccaatcaatgggaaccggataatggcccgggggggtaacccccgaagaagggccaaaacaaggggccgttgccgttgcccccgcccccggcgggccggacgctggggtcaacccg

SEQ ID NO: 159432 - DNA, 273 bp, Zea mays
  Clone ID: MRT4577_76976C.1
gccggccgggtcgggctcacgtgctgctggtagaccgcagctacctgtctctcttcttgcacccaccgctgacgtgctgcccagatcccgctcgacggtggggttcccctccccccgcgccgttgtggccggcgaagagagggggactgtccaaaccctaatgggagatcgagactaggaggaagggcgcgagatccggcggcggccaccccgatgggggacttcaacgtcgcgctggtgatcatggcgtgggtgggcaaagcgctagtgctg

SEQ ID NO: 159433 - DNA, 294 bp, Zea mays
  Clone ID: MRT4577_76977C.1
ccttccttttttttttggggactgtgacttcctggcgggagacagacagcccggctgcacaaaatggaacaactaggatcctggggaactgaggcccccggggtggcgtgacagacacgcgaggaggacagaatccgggggggcactgcccagctgaggcaagagccaccacctccaggacctcatagagggctcaagcagggaccctcggtagccacggatgctgagggttccctaacagcagacgctcagaggaaccaggagcccagcgaaggcctctaaacctagggccga

SEQ ID NO: 159434 - DNA, 498 bp, Zea mays
  Clone ID: MRT4577_76978C.1
gcccgaacaagcttggtagttttaggggggtaaaaacaaaccaaaaaggccgggcgggcttggttggttataaaaccaaacaggggggcctatttttttaaggtaatggggggcacattacacttacacaagcctaaattgggacagggttggggccccaagggcactagctccccacgggcactagcttggttttgaggggtttcctggggcccctgggcttggtcccggcctttttaaagggttttttgagcaaaatgtccgtttgccgctccattttggggatttggtccacgggcatgccgaaccacttggggatccacgcaaaacaaaaccggggggatgccaaaaaaaaggcccttttccccgaaaagaagcaattttccaggggttcgccgaggccccatatgggagcgcccatgggcaccaacttggaccggggcataaccgggtgggacgaggccatccctcccttggaaaaggggccccgaactggcc

SEQ ID NO: 159435 - DNA, 326 bp, Zea mays
  Clone ID: MRT4577_76979C.1
gggggaaaaatttttgacaggtgtttttttttttttttccccacgtgggggggttacaaacaagacctttaaaaaacagctccccaaaagaggcatttttttgtgctggcttgaccccaattattagcttggctcacattaggggctccgacgaacaaaacgcagcgccaaaagaacaacccccccttttgggttggttgtccacacatttcaagcgggttttttagagcgtgggggatttaaacgtgagctccccaatgaccgctttgaaatttgccttcacgttctttacccaattctcttgttttacttttacaggcgtgctt

SEQ ID NO: 159436 - DNA, 366 bp, Zea mays
  Clone ID: MRT4577_7697C.1
tgactcttgggctgactcgtttttctggccgacctctcccgttcgcaggtgggggggcactggcgagaggcgtcgtccgtctctaataatctacttcagagcacggtgaaggcggcgtggatctcttggacaaccttcctggtgctggtggtgccactgatcatcgtgatggaccgggagcagcagctcaacgacctttagctgcatcagcagacgcttctgggctgtgcctcaacttcgacggcgaccaagttgattgatccgtgcatcgaccctttcgcatccacccctctcgatctgtagaggtatctgatactatcaagttcatcattcgagttactatcaaggtcatcattcgagttacta

SEQ ID NO: 159437 - DNA, 714 bp, Zea mays
  unsure (1)..(714): unsure at all n locations
  Clone ID: MRT4577_76980C.1
gacgcccgcaggtttcggtccggaattcccgggtcgacccacgcgtccggcaggttgttgattctccagggcagccatggcagagcccagccggcgtccagtggcctcactgatgagaccgctttcagctgctgctccgatccagaccctagcaccaaggattttctactgcagcaaacgatgctaagaattaaggatcctaagaagtccctggatttttatacgagggttcttggactgaccctcctgcagaagcttgacttccctgctatgaagttctcgctctacttcttagcttatgaggataagaacgatatccccaaggacaagtccgagaagacagcatggacgttttccagaaaagccacccttgagctcacgcacaactggggcactgaagatgacgagactcagagttaccacaacggcaactcggaccctcgtggatttggtcacattgggattgccgttcctgatgtctacagtgcctgtaagagatttgaagaactaggtgtcaagtttgtgaagaagcctgatgacgggaaaatgaaaggactgggcgttcattcaagaccctgacggctactggattgagattctgaatcctaacaaaatagcaacgattatttagtttcggnagaatgtgcctttgaggtattggnggacagcggnaaccatagcgcgtggaaaagaaacagcgtgattcaagatgct

SEQ ID NO: 159438 - DNA, 1101 bp, Zea mays
  Clone ID: MRT4577_76981C.1
cggccgcgtgggcgagacggagaggcagcgcgctctggggctgttccggcgggcggcgaggctgggctccgcggcggcgatggtggacgccgggctgatgtgctgggaggacgggcgccgggaggaagccgtcggttactaccggagcgctgcggacctgggacatcccattgggatgtgcaaccttggggtctcctacctcgaagtgctgctaaatgtttccgcagctgatccacccaaggccgaggaagctattagatggttttatccatcagcatctgcaggcaatgctcgtgctcaatacaacctaggcctttgcttgcagaacggcaagggtgtcaagcggaatcagaaggaagcggcaaaatggtatttgcgagctgcggagggagggaatgtacgggccatgtataacatttccttgtgttacagctatggtgaagggcttgcacaggatccagtgcgtgctaagaggtggcttcaactagctgctgattgtggtcacaagaaagctctttatgagtgtggtattaagctttgtgcggcaggagacaaggtcaagtgtctcatgtatctagagctggcgacacggcgtggagaagctgctgctgctcacatgagggatgtaatacttgaatcgctctctgttgtgaatgcgcagcgtgccatgtcggatgctgataaatggaagcctaggacactccatcctagacctagaaggtgaggaaatgacacacgccaaagtgcagaagaaccatatcatcaagatgtccataccctagtcgtctgtggccagaattgaagcacggaaggtcaaagcaaacatgtatgcttcctcggcgcccacatccacaggaatgtcagtagccatcctgtggctctctgtataaagccatccattggcagatgtaataccaggagaacttgtagtacagaaagttctgtagcaaatactacttcctcacttccaaattgctaccttaattctcgaatatttgtcaccactagttcatttttgaactaaaatgtgacaaatagaaataacggagcgagtataaaatactttggcttttctagatatgtattttttatacacttgcc

SEQ ID NO: 159439 - DNA, 466 bp, Zea mays
  Clone ID: MRT4577_76982C.1
gaactgcaactcattatattaagaagagaagaaacaaggtcaaagagacctgatacaaaggttccttaaggaggccaaaaacacaggaaactgaaaaaattcatcaaaacacacctaaggaacagccgctagtcttcaggaaggagggcagcaagatatgaaaggcctttagccccagccacttcccaaattgtctctcatccctagctaacctaagggacaaagccaaactaggagtacagccatcaaaaacacaaaagtttcagagtttccaaattgtccaagcccccaaggcaacaagggagttgatgccctttccaggtagaccagtgatcgctccggagatttgctcccaccaaatcatgaagggtgaaagccctggccgaggagccagtctttcaaatccaaaaggtttcaggaggttaaaccagaacactcttatgaacacacaagagacaaggatatg

SEQ ID NO: 159440 - DNA, 317 bp, Zea mays
  Clone ID: MRT4577_76983C.1
cggggagatgcgtgacgaatgcggcgcgtgacggagaagcggttagccgacgctgcggcggcagtccgtgtaaacaaggcctcgcgccgctgctggtcctgcgactgcttctcgctggctttgctttcaccaaacccaaggaggtgacaggaggagtccccatacaggacttaaggatgctgtgaccagaagatgggatcacggaatagtagcagcgcaggaactgggtctggagacccctccgagggcttgccccgaagaggggctggcctgcgtaggagtgaggaagaggaagaggaggatgaagatgtggatct

SEQ ID NO: 159441 - DNA, 265 bp, Zea mays
  Clone ID: MRT4577_76984C.1
tttcccacacgtcggtaggctgacgaccgacccgaatgagttgtccaccctcatccgacactcgcttacattactggttgtgtacagggtggccggagaccagctaaacctggcagacgtgttcaacacactaaggcacctggaacactgctgccatgtcgatgttgtcaagcgcgcgcgggatccgcggaacgttactgcctacccacacgctgtcaccagtggagaacatcctctcgtggagaaatctatacgtgccgcagat

SEQ ID NO: 159442 - DNA, 856 bp, Zea mays
  Clone ID: MRT4577_76985C.1
gccggccgggccggggccgcacccccaagacttccgtccgagtctgagctcatctccgcgcgctgccgccgccgccgccgccgctcgacgcccaccgcgcagccatggcggaacagaccgagaaggcttttctcaagcagcctaaggtgttcctcagctcaaagaaatctggcaagggtaagaagccaggcaagggtggcaatcgattttggaagagcattggccttggtttcaagactcccagggaagcaattgaagggacctacattgacaagaaatgtccattcactggaaccgtttctatcagaggcagaattattgctggaacatgccacagtgctaagatgaacagaaccatcattgttcgcaggaactacctccactttgttaagaaataccagaggtatgaaaagaggcactccaacattccagctcacatctccccatgcttccgtgtgaaggaaggtgaccatgtcatcattggccagtgcaggcccctatcaaaaactgtgaggttcaatgtcgttaaagtcattccagctggatctgctgctgctggcaagaaggctttcaccgcagcctgagtttaaaactatgttcgatgagtagtttatagagtgatgtcttttttgttaaaaaactgccttctaggcttgtgcctttcgaatatggtttggagattgttcccatcctaatgaagtccaatcatctgaacatgttactgtttattgtaccttgtcgtgcaaagttttgcaagatctgtattgtttcctccctgctgctgcagtggctgcatgtggtctggcagccatactttggtttctatcatacctgtccggctagcgagatcatttct

SEQ ID NO: 159443 - DNA, 600 bp, Zea mays
  Clone ID: MRT4577_76986C.1
aaaaatatcgacaactttattgctattgtcaagtacttaaccttgtcaaacagttatataagcatggcgaagcgcgcctatcttgtcaaacagttatagcatgctaccgaggaaggccgcaggtccatatgtggtcgtttgtcatcatgtttcatttgatttggtgcctccattgtctatgtatggatgtcatatttctcatgacatgatcattgctagcttagccatattgttcatttgaccatagtactcaacagttaagtccgtaatattttagttattatttgttactgcgcatgttatctttccttaccatattgttacttggtgatggagtaaatgatgcccctgcgccaaagaaagctgatattagtataccagttgttgatgccattgatgcagccaggattgcttctgattttgtcatgacaaaacctagcttcaatgtgataattagtgtcgttcttaccagccagacaatttcccaaatgatgaagaactacactgtatgtgagaaggaaacctactgaaatagatttccaaaaaaacagttactttctttgatccactttcctttgcagtctatgatatttccattac

SEQ ID NO: 159444 - DNA, 945 bp, Zea mays
  Clone ID: MRT4577_76987C.1
gctttgtcagatttgagggcacgtagtgtcagatttgagggcacgtagcaggataattcaggggctcttatgcaaagtttgagccaacccatctcgccctgctatataataagattggtccctagggttttcgccgccgcaccccacgacttccgtccgagtctgagctcatctccgcgcgcgcagccgccgccgccgctcgacgcccaccgcgcagccatggcggaacagactgagaaggctttcctcaagcagcctaaggtgttcctcagctcaaagaaatctggcaagggtaagaagccaggcaagggtggcaatcgattttggaagagcattggccttggtttcaagactcccagggaagcaattgaagggacctacattgacaagaaatgtccattcactggaaccgtttctatcagaggcagaattattgctggaacatgccacagtgctaagatgaacagaaccatcattgttcgcaggaactatctccactttgttaagaaataccagaggtatgaaaagaggcactccaacattccagctcacatctccccatgcttccgtgtgaaggaaggcgaccatgtcatcattggccagtgcaggcccctatcaaaaactgtgaggttcaatgtcgtcaaagtcattccagctggatctgctgctgccggcaagaaggctttcaccgcagcctgagtttaagactatgttccatgagtagtttatatagtgatgtctttttttgttaaaaaaactgccttctaggcttgtgcctttcgagtttcgactatggtttggagattgttcccatcttaatgaagtccaatcatctgaacatgttactgtttattgtaccttgtcgtgcaaagttttgcaagatctgtattgtttcctccctgcggtgaatgtggtctggcaagcatactttggtttctatcaaaa

SEQ ID NO: 159445 - DNA, 319 bp, Zea mays
  unsure (1)..(319): unsure at all n locations
  Clone ID: MRT4577_76988C.1
cggggggttacgcgnncgacacacatactaatctaattcttttccaaacacgccaaacataacgggctgtgtgtctaatatttctatgaccctaacccacgccaaccgacatataaagaaaaccctcatccaacgacagtatactactacaggataccaaacgttctattcatctaatgccgagactaacatatcccaccaccaacgttctaaataactttcttgccatgccaccgtcccaaacaccaaaaccacaacccaccacgaccacgcgactcctcctataatacactcataccgtgtttttcattaaatcaat

SEQ ID NO: 159446 - DNA, 118 bp, Zea mays
  Clone ID: MRT4577_76989C.1
aggaataaagagtggtagccgcatgcgcgtaccgcggccatggctctccgatcagagatccagctgtgtacgtgtgtacgtgatgttgttccatgcatgagctgtatacgtcttgcct

SEQ ID NO: 159447 - DNA, 722 bp, Zea mays
  Clone ID: MRT4577_7698C.1
gccgggactgatccagagcttactacatagtacaccaagaaagttgcgttgcaaaccatcgtgtcgtcgatcgtgtctccaagagcaagcgacgacgacgtctgggaacgacgaagccgaagccggagagctatactatacttgtcatccagccagccaagccatcatggtgaagacggcggcgagcagcagcagcgacgacgccgccgccgccaagaggaggacgtacaagggcgtgcggatgcggagctggggctcgtgggtgtcggaggtgcgggcgcccggccagaagacgcggatatggctcggctcccacgccaccgccgaggccgcggtgcgcgcgcacgacgccgcgctgctctgcctccggggctcggcggccgacctcaacttcccgctccgcctcccgttcgacctgccccccgcggccaccatgtcgcccaaggccatccagcgcgtggccgccgccgctgccgccgctgccagcggcagcgcctcctcctgcggcggcttgcgcgcgccgcccttcgcgccaccagacgagaacagcggcaccagtgcctgcagcgacggcgacgccaccccggcgtcgagcaccaccagctcgcccaccagcgacttcaccccggcctggagcaccaccagcttgcccaccagccacgccgacgacgtctgctccccggagtgcaccgtcagcagtgccggcgacgaggactactaca

SEQ ID NO: 159448 - DNA, 213 bp, Zea mays
  Clone ID: MRT4577_76990C.1
gagaagcccagcgacgattgcgctgaagctgaactcgatcctgcgtacagagaatccggcaagggcaagatattcttgggggtcacttcaaaccctgggtctttcggtggtcgggaaatcatccgggttcctggtcaacattgcatgggggatggtggtggtaccactggtggaaggattaaagaagaccctattaaatgccctgggcccacc

SEQ ID NO: 159449 - DNA, 518 bp, Zea mays
  Clone ID: MRT4577_76991C.1
ccggccgggaactattgtatcccctttctgctgtggtcctgtgtgtgatatgtcctccgacatcgcaggacaccattctatgtgttagtcgatcaccgtaaagttgggctttctggaatgcaagatgaacacatgtggatgagcgtagagtgaacccactgcagcacatttgactataatacccacacgcatcacattctcgaccatgtggatgctatcacatgattattacgctgaacgctactcctcaatgcggccaatgatgtgtttctccacacacactgcggagatgcgacttgccaatgctgacctatgacatcacaagaatcgtctaatgtgagagtgcaaaaatattctgagcaggaagcgcccgtcctgattcacgaacgtcctgcgaggctactaaattcacctactatcctaccagaatatgggctcgctgatacatctcctgcactgacgatgactaacatatggacctcctacgtgaacttactacgtgatatctgaacgcctga

SEQ ID NO: 159450 - DNA, 512 bp, Zea mays
  Clone ID: MRT4577_76992C.1
gttatatattgaggattctgtcgtttcttccctttgggatttttttttttttccaaaagcccaagtttttttttattacccgaaaaacaaaggggtccaataaagggggtggaatcccaggccccccaattgttggccggtttccccaaattgggaaaacaaacttggccccccccctgaaaacgcccttttccggtgggccaaactcttgactaacagattgtaaagaaaagtttcctgttacataaaacttaaagggctgggggtttggggggttggggcaataaatgggggcccctggggcccggaaatgggagggtttgttgtgggaatcctttttggaaaggatggcagggttttggaatttgggggctttggggggggggtacccgggcctgataaatatgttgggccgggggttggaacccccggttttgggagaaatggttttccccaacttttttgggggagggcttctttggtataaaatgccggttttggggttttttttt

SEQ ID NO: 159451 - DNA, 1085 bp, Zea mays
  Clone ID: MRT4577_76993C.1
gcacgatcggcacccggccatcccctccctcctcttcctcgcacgtcctcttccattccagtaatgggctctgcttcatcagatggtctccgggagcacttgctggacgtggacggcggcggagcggcggcggtgcccaagatacgggtgcgcgggctgcggcgccgcgcggacgcgaccggcgaggagatcctccgcggcgtccacctcgacgtgccgcgcggggccgtcatgggcgtcatcggccccagcggcagcggcaagtccacgctgctccgcgcgctcaaccgcctctgggagcccgcgcccggcgccgtgctcctcgacggcgccgacatctgcgccctcgacgtcctcgccctgcgccgcaaggtcggcatgctcttccagctccccgccatgttcgacggaaccgtggctgacaacgtacgatacgggccgcagttgcgcggcaagaagctaaccgaggccgaagtgaagagcctgctgcacctggccgacctggaccctgctctgtgctccaagccggcgtccgagctgtcggtcgggcaggcacagcgcgtcgccctggcccggaccctcgccaacgaccccgaggtgctcctgctggacgagccgaccagcgcgctggaccccatctcgacgcagaacatcgaggaggccatcgtgcggctgaagaagacgagggggctcaccacggtgatcgtctcccacagcgtgaagcagatccagcgcatcgccgacctggtgtgcctcgtcgtcgccggcgaggtcgtggaggtgctcgcgccgtccgacctgtccgacgccaagcacccgatggccaggcgtttcttggagctcagcggctgaaagcccgcctgctcgctgctgcttcgttggatttcgaaactcttctacctaatcggatgctttcgagctgttctggatggaaaggatcggacgtgtggttatctttccaatcgcctatcatgttctctacttttgttctcgtgtatacatacaatctgttaaagtagcttctcacagctagaaagtgtttgcaatacaaacaagttcttggcggattagctttgttttccccc

SEQ ID NO: 159452 - DNA, 443 bp, Zea mays
  unsure (1)..(443): unsure at all n locations
  Clone ID: MRT4577_76994C.1
aaaaagcgtcataaaaagaagagagatctgggggatggattcgcatgttggcaaaaaaatcgactcggggggctgggtctatctctgtagcgacgtcctgccctgccccgatcccgacatcatttcacatttttatagttatatttctaanncnggggttatgaaganggttgggtattnccnnnanaannctatcctnnacacttgtgcactctacacagcctgaagacgtcaaccggtgcatcggaatgcttgaagcttcattggacaggtctagcagcccataggaaacaagggagaagctctactagttagctgttggtcaatacagaactggggaggatacaagaatccgacatcttttggaaagatgcttaaagatccaaacatgactggagacaagccataacttcgcaaaggctcgttgaagaaaaaaccaaaat

SEQ ID NO: 159453 - DNA, 191 bp, Zea mays
  unsure (1)..(191): unsure at all n locations
  Clone ID: MRT4577_76995C.1
agtgactaagccttcaaaatggcgactaaatccagtattaaaccatgaaatgaattctatgcatcgaacaaaacataagtacataaccctagcccccatgttataaaaaaaactaaaaaaagagaagttatatngaaacagtgttcaaaaacttgacaggaaacttcgacaaacttgtagactctaagcag

SEQ ID NO: 159454 - DNA, 430 bp, Zea mays
  Clone ID: MRT4577_76996C.1
gaacctttgggctgatttatgtgcttgtggatgtgcggtggatgtgcgggtggatccccgggtcgatgtgcgggcgtcaataggcagcgatcgtccaaccaccgttccccggccatccactgcgggggtagctcccttttcattgcttgagcccccaccacgccacacccgtacacctctagacacataattcgacctcgctcgtaagaagtcgggcttaaagcatgtccacaccttagacgtcgagccaaaggactatttagaccctcacgaagactcctcgagggaaaacaccgatacgatcgccaggtcagcagcaagtcataacggctctagtaccggtatagcctgagacgtacccgagaagctctccggtccatggccgtaaaagacgaacttcaacatcgaccacggccgtccgaagataccc

SEQ ID NO: 159455 - DNA, 355 bp, Zea mays
  unsure (1)..(355): unsure at all n locations
  Clone ID: MRT4577_76997C.1
ggagcaggcgagcagaggcncccaccacncnccaaaacccacgcccgcngcgggcncgcgggcgagaggggaaagncngngccgccgggcgngggggggggggggnnanncgnngngccgcgaagccggagcggcaccagnggggggacgcgcagcngcggcngcnggcccccgggaaggncnncgaggangacaagcnngnngagnacgacgcccnccncgnngaccgcnnncnngacaaacnncaggaccgggagggnccccaccaacgcgaannngngcaggagngcaacgagcncncgggggagaacgagaacgaccgggaggaggcncggnnnggcgagcnngggagcaa

SEQ ID NO: 159456 - DNA, 134 bp, Zea mays
  unsure (1)..(134): unsure at all n locations
  Clone ID: MRT4577_76998C.1
gcggccgacctgttctgttttttttattgaaaacacanttgatatatgcgtcatatcacaatattcacacaaggtccaaatatatagagttcacaaattcacataacgtccagatgcataatgctcacaaattc

SEQ ID NO: 159457 - DNA, 422 bp, Zea mays
  unsure (1)..(422): unsure at all n locations
  Clone ID: MRT4577_76999C.1
ctagttttagatcgcgagcggccggggtttttgttttttttttttttttttttttttttttttttttttttttttttttttttttttttggggggttcaagccccattgatcgattttttttttttttttggggggggtgggcaatcaattgattttttgtttttttttttcctgggggggggggcttnaaaacaatttttccttttttttttataanaaacccagagaggggggggaatttccctcttcaaaacctttttttttttaatgttgccggggtagggcgagcaaaagggtggggaccttgttgtgtttgcccgnnggaattgcaaaaaaacccaaaccaagtccactggcccaaccaactttttcacatggggggtttaccaaaacattctacttttgttttggaaaagctggg

SEQ ID NO: 159458 - DNA, 293 bp, Zea mays
  Clone ID: MRT4577_7699C.1
ggcgctgttgcagatgtgctgagatagcccgagtaagcgagcgcttgttgtactcgagggcgccataccaccgatcgaggcgctatcgcaggctggctctgcccgtgccaagcacaaagctgagactttgcttggctaaatgtagtagcagggacaaggggatggctgcatagctggagcagtggaaactactaacttggataagtaaaaagggtagagctatgggcgaaatatgctccatttattctgtgagagaggtgttgagagcagatcagctactccaggggggcgca

SEQ ID NO: 159459 - DNA, 1697 bp, Zea mays
  Clone ID: MRT4577_769C.1
cattgggacctcgagcccggcggggacgcttccccgctcccggctcactaccgtcctgctccacgctcctcggttcccgtgctcgtgtcatcgaccgccggggcccactcaccagtctcccaacacgcagcgagcggcagctcctcctcgtctctcaaagtcgagccgccactcgattaagcgattccaaggcggagcggtgaggtggctatggagtacaggagggtgaaggatcaggagatttatgatgatttatctcagaaggatgtggaaagcctgagtgggaggacactatctagtgccaatactacagctattggtcccgcttctgcaggaggcgcaaaagccaactctagttggaagctaaagtctgttgttactcttgcattgacattgctaacaagttctcaggcaatattaattgtgtggtcaaaaagagctggaaaatatgaatatagtgtcacaacagctaatttttcggtggaggctttaaaatgccttctatcactagctgctctttttaggacgtggaactgccatggtgtcactgatgataatagattaaccacatcttttgatgaagttggtgtatatccgattcctgctgttctttacatggtaaagaacttattgcagtactatatctttgtctacgtggatgcaccagcttatcaaatcttgaagaacctaaatatcatcagcacaggtgttttgtaccgcatcattttgaagaaaaagctaagtgaaattcagtgggcagcatttgttcttctatgtgctggttgcacaacagctcaacttaatccttcgtctgaccatgtgcttcaaactcctattcaaggttggatgatggcaattgtgatggctcttttgagtggttttgctggggtgtatacagaagctatcattaaaaaacggccatcaagaaacatcaacgtgcagaacttttggctatacatatttggggtgatcttcaatctagttgcaatttgtgttcaggattatgatgcagtcatgaataaaggctttttccatgggtattcattcatcacagttttgatgattctgaaccacgcactgagtggaattgctgtttcaatggtgatgaaatatgctgataacatagtcaaggtctattcaacttcagttgcaatgcttctgacagcagttgtatctgtcttcttgttcaacttccatttatccctcgcattcttccttggatccacagttgtttccgtctcagtgtacctgcactcaattggaaaacttcaaccacagaaataaggtttgtttagtcactgattgctgactgctcctcgtctgttagtaatcactggataacacaggattggtgaagatggaatatgggattcattatcggtgtttggtgctttgaggctataagaaaagcttcagtggagatgagatttgattgcatagttgtgaaagttagtaggtggtcaaagtaagaaccagaaatgtatttttggaggggttctagctattatccggtctagtttttgttctattctatcaagtcgagttcgttgatcgctaaccgcatccgtgcctagtttttgatatatcaaacgcacatttattgtaatgctagtattttgaaatactaggtagtacccaattgttgtatggagctagttgtcttttcattctaatgtatagaattaccattctttttt

SEQ ID NO: 159460 - DNA, 2658 bp, Zea mays
  Clone ID: MRT4577_76C.1
aataaacaaacggcttggctcaacagaggctggtgtcatacggctctctaatatcagaaaaaaaatgtcagagatgtcaggtactcaggttacagaagacgagcacacaatttcatctacagtttcgcagctatcattaaagacaggaccaaccaccaagctacctatccgctgtcatattcacagacgacaaggatcccgacggcgatcatctacctccctacctcgggccggacagttcgacggccctgaggttgtaggtggagtcgacgatccagtcgttgtggcgcggggcgagctccgcctcctgccgcatcacctccaccttctgccactgctcccaccgctccgccagcccgtcgccctccagcatccgcgccacctccgacatcttgggccgctccatcggggagccctgcgtgcacagcagcgccacctggatcagcgactccacctcctggtccacgtaccggccctgcaggtccgggtccaccagctgctccagcttcttctccttcagcagcgccttcacccagtcaaggagcatgacgtcgtcatcgttcgcgagacgagcgaggtcgaacgccctctgcccggtgatgagttccaggagcatgatcccgtagccgaagacgtccgtcttctcggaggacttccccgtggagaggtactcgggggcgatgtggccgatcgtcccacggacggcggtcgtcacgtgggtgtccttgtagtccatgagcttggccaggccgaagtcacccacgacggcttcgaagtcctcgtccagcaggatgttggcggccttcacgtcgcggtggatgatcttgggatcgcagtggtcgtgcaggtaggacaggcctctggctgaccccagcgcgatccgagccctcgtttcccattcgagggggggctcatttggcgcgcgttctcgaaggcgcgatgcgacgctcccgttagccatgtatggatacactagcagccgctctgtaggggtcatgcagaatccacggagccggagaaggttcctgtgcaccgccatgctaatcagttcaacctccgtttggaactggagctctccgccgggggtgcgttcctccttcaatctcttcacggctaccagtgaaccgtccgttagtctccctttgtacacctttccaaaaccgcctcttcccaggacattcctgttgttaaaattgtccgtggcgacttgcagctctctcagcgagaacctcttgagctgtccaaggtgaacttcgggatcctcctcggcagggacatcgaagaattgctcttcgggttttcgcctccgccacaatgcgtacccaatagcaggcactgcgatcagcaacgctgtgccagctgcaacgcctccagctactgctccagtgctggacacgccttttgatgaagttggtgctgggggattgtatggagggggtggagaaaatggaggagccccaggacaaggctttgtagtaccagggccgcaaagatttgggttgttagcaaaacttataggtgtaaagagagaaaacgaaccgcttgatggcacccctcccgagagattgttgtttgatagatccagaacttggagagtgttgatattggtcaaggttttcggaatttgaccagaaagactgttgttattaagacggagaaaccgcaactttgatagttggcccaaggtgtcaggaataccgccagtgaagttgttgaggtacaggtccaaactgaccaggttagtcaagttccccagttcaggtggtattggcccacttatgttgttactgtaaagttccagatattgcatatttttcaattgcccaagctgtggcaccaatggacctgatagttgtgcatttccaagatcaagtctgatgacactgttatcagggttacaagtaacatggaaccatgtacatggattaaccagagttggatcccaactctgcagcacgttgttgttatctttcaggctttgtcgtaggctgtatagagcatcaccctccgtgttggcgacaaccgggatcacgccgaccaccaccgaaaataccaccgccgaccaccaccacctcagcgacgccgccatcccgccgacgcccgacccgcctctcggtagccaaaaccgcgcgcgcgcaggttgccacagcgccacccctgagctgacgacgccgccaggacctccctcagcttccgccgccgtcgggacacatcggtcaccgatactctccgacgggaggcgagagatttctctccctaatttttttaccttgtgttttttttttcagctcgggggttttaaaaacttggcgaggcttgcgtgtggaggccgacccaaaaatgttccactggtaaacgcgggacttgcgagggggaggagatcacagctacgccgcgttatccgggtaactttactgacaggtggggtcaaataggtaagtcccacatgtcggacggggaaacctatccgtccggtgcgggggttcgtttgcttgagtttgagtgcgatgcgactatgcgagggctgcgggaaggtgacggcgctgacgtgggcgtgatgggaggtggttggggattccgtggacgcggtcctcgtacactcgtctccagatcactcattcatcacttgatcgaggaagcttgtgtcttttttttctg

SEQ ID NO: 159461 - DNA, 257 bp, Zea mays
  Clone ID: MRT4577_77000C.1
ttctgggtcgtattctcgctcagggaaagctacactataggaagtcaggaagtcaaacaacggaagcaggtctggcgtatcggatcaatctgcgactggccttttattcataacattagtagttactcattgggtgccatcagatgaacgaactagttttccacagaagaggatttgaggtagggctgctagagaaactgacaaggagatcacaagaaatagagatgcttcacgcccagccaatcttgaaagcttgt

SEQ ID NO: 159462 - DNA, 155 bp, Zea mays
  Clone ID: MRT4577_77001C.1
gagcagatgtatgtggcataggcctaatgtacaaaaagaaaacagcagattagaaggcttatgaatttaatgtaattctttacctattcctatagctgcttatgtgcaacagttttatgctccatcaattatttcaaatagaaatatagtaaaaa

SEQ ID NO: 159463 - DNA, 818 bp, Zea mays
  unsure (1)..(818): unsure at all n locations
  Clone ID: MRT4577_77002C.1
cttgatcaattggctcgtaacttcacctttgcnaactgaagttatcagactcaaaaaggtggcgatggaatccctcttgtacacatctattggccccaagattaagtatgaaaggggagcagctgttgcttttaatgtgaagcaaaatgatggaacatttgtgaatgctgaagttgttcaaaagatcgctgagaaaaatggtatatctgttggcattggttttctcagtcatataaaagtagacatgaagcagaaacagttaaatggcacgctcgatatacccgaggcttcattttataagaatggacgcagagacaataaaaaggtgaccataagagttgaagtcgtgactgcttcacttggcttccttactaactttgaagatgtttacaagatgtgggcttttgttgccaagttccttgatccttcatttcttgaaagtgaacgccttaccattgctgctgaccactcagaagggcaaacttgagcatgacatgtagcatagcaacaaaaaatgagagggaggtgatttctcctgttgaagcatatgttgtcttttatgctttcaaggggtaatcagtagtggatttagcagatttgtttattctttgcctagttccttgatatgggtcatatgacttgtttttgttcatctagagtttgcgcaactcaactatgtaccagcagctcatcagtagagctctttcccacggaacaatgtgtgtaaagcagctcaatggaaatgaaatagtttgagtgattttgtccaaaaaaaaaaaaaaaaaaaaaaaacagccgatggggcccgggtacccaat

SEQ ID NO: 159464 - DNA, 736 bp, Zea mays
  Clone ID: MRT4577_77003C.1
ccggccgggaggccggggaatgggcaagaatatctcactgtcttcaaacttgttgtcgcggtgtcgccatgctcgtgtgcttctgtcgcggtgtcgcccgcgcccaaattctaccacactgtgcttccccgcagtgcgtgttcatctccgcgtccccgtggccaggcaaacccgaaaacgaagaagaagtggtagtcgaagaagaagctgccccgcaagctaaaattccacctgtcgagaacaacttctatttgatatctgtgggacaaaccctgagcctcctacaacacaagaaaacgaagaagaagtggtagtcgaagaagaagttgccccgcaagctgaaattccacctgtcgagaacaacttctactttgatatctgtggaacagaccctgagcctcctgcaacacaagataagccccgatgcatttacccctttccttgttgttttaaactctttatcacttgagatgatgcattaggtgataggagttgtgtgctaaacaattactgcattcacttccttggaaaaaaaaaaaaagctgattaccattccttgatacctgttttacttaaagttttctgatgcttagctttgctttagaaaacaaaatggtttggtttaaacaaaagatgatgcttcatatgggatgggaagttttcaaagaaaagacttgatggtgaatccatcttggtcatgatgggttcaacatctaaaaatatgtacctatgtctg

SEQ ID NO: 159465 - DNA, 229 bp, Zea mays
  Clone ID: MRT4577_77004C.1
ggacagcgcttggctttctacctatctcgctagtttactcatttagcggcgacgagtaacgtagtgtcacccatcaccatgggtggcagtgtgagcaatgactctgttgaaccattcacttggggggggggggggggggagtcttctctctcgcggcgagaggccggcccggggggggggcgctcttccgctttctcgctgccctgctcgttgcgctcggtcgctcggg

SEQ ID NO: 159466 - DNA, 467 bp, Zea mays
  unsure (1)..(467): unsure at all n locations
  Clone ID: MRT4577_77006C.1
cccacgcgtccgtcttgttttgcagtaccattttatgcagaccttcatactttgctttgtgggtaccttttttttgagtaattgacctagctacatcatcctgctttgcttaatagtcctactcgtatgtatctttaatgtaagcagaatttacttttggtgcgtgcgaataagaacaccgagctttggaaattttctcttaaaaaaatattcgcttgctcgtacttttactgggagtcattttctgggggtgctgctccgtcttcttctcgcgtcaccgtcctttttcctcctttaccaaagcctcatatttgcattgtcgattgcagataacagtctgatacccccccacccactgccttcactgactgctagagcccctccttgtcagtacagtgtttggtgctgaatcaaatccactgaagatgccaagttctgaaccagacagtgatgatgttntctttgac

SEQ ID NO: 159467 - DNA, 179 bp, Zea mays
  Clone ID: MRT4577_77007C.1
accgccgtcgccgcccaaccgcagtaaggaggaaggagcatgaagatgccggcggggcacgggctgcggtcgcggccccgcaacctgttcgcccggcccttccgaaagaaggggtccttccaattaaccaggtacctggccacctacaaaatcggggactacgtcgacgtaaaggttaa

SEQ ID NO: 159468 - DNA, 2211 bp, Zea mays
  unsure (1)..(2211): unsure at all n locations
  Clone ID: MRT4577_77008C.1
ccgggtaatctctaccccttatggtacgtcgtccgcctccttcgcactcgcgccagcggctagcccgatgacccgatccgcctctgctccgcctaatccacgcctctatgctctagccatcgcctagatctatcaggcagcagtcccgctcgtccagccggccatcggccatgacaaacgcccaggccactaggctagcaggcgctaaactgccgcaggccgctctgcccgcccaagcggccagtcgccgcccgcctgccaacgcttgagcacccacgcccagtgacaaattaataccgacgaggaggtatttgatagcgcaaggcagtcggctacctcctccaccaccagtcaaccttccgctctacctcaagacaataataacaggtcgagagaccatgacacggaagtcagcagtagcggattatgtttagtagcacaaggagcattcgtgtagctgaaaggatttgccttcaatggagcttgaagctgctcctgacgatgaagtattctgttcagatgatgagatgcagacgctgtggcctctgggacaagtagacccaaagagcgtgaggttcccttgctgcatcgtgtggactcctctcccagtagtttcatggctggctccctacatagggcacgtggggattgctcgggaggatggaaccgtcttggactttgcaggttcgaatttagtgagtgtggatgatctggcttatggttctgtcgccagatgcctgcagcttgacagggcaaagtgctgcttccctgccaacccggcggcgcacgtgtgctcgaggtcccacgagcactcggaggccgggacggcgatctcgtgggacgacgcgctgcggtcggggagccggcgcttcgagcacaagtgctacaacctcttcacctgcaacagccactcgttcgtggccgactgcctcaaccggctggcttacggcggctccgttgggtggaacgtgctgaacctggccgcgctcgtctggctgcgcggccggtggctggaccccatggccgccgtccggtccttcctcccgttcgccgtcgtctcctgcgtcggcgtcctgatggccggctggtccttcctcctgggcatgaccgcgttcacgctgctcttgctcggctggttcgtgctcggcgtctactgcatgaagggcctcgtcgtctgacgcacgctggctcggagccgaacgtgtgcccagcttcttcactgagcatcggggtcatgtagtagatgaatgaaggatcgaaatcttgaaaggggtgtgagtcggaggggagagacaacgggaaaacaaaatttgagcccgtttttaatagcggaaacccaaatccagatatttataaaatcgaagtttctatttgaaacaaagtagaagtacaagataaaaggaaggagggggaaatagcacaaaaacaaaattgggctagagtcttagaaccgttggaggccgaaactcacgccctccttgctgcgaagctgtcgatctgcagaatgcagctctgttaactgacagtctcctgttacgaggcaatcagaggctttttctagactggacctcgccatatccaccatatagatataggaggtaccagaagggggtgttctatatagcaagctgtagctgaactcattggattagacatatcagggcgatcaatccaatagcatctcagtgtcctgtcatttcataaaaaaacagcttcaacgatatacaattttacatttctatcaaaaaactataaagatatatcataaaatgatctaaatatacgtacacctgaataagagttggtatctaaattgttataacaaatttgataatttaaattagatatgtatgaacattgatcttttttatgttatcaagcacattattataaataaaaatatttttttgcgtccttcctcctgggcaagaaagngttcacactgctcttgctcgggtggttcgtgcccggcgtttactgcatgaagggcctcgtcgtctgacgcacgctggctcggagccgaacgtgtgcccagcttcttcaatgagcatcggggtcatgtagtagatgaataaaggatcgaaatcttgaaaaggggtgtaagtcggagcctcggaggggagaggcaacgggaaaacaaattttgagcctgttttaatagcgggaacgcaaatccgcttctttatcaacggaaggcgaaataaaaacatt

SEQ ID NO: 159469 - DNA, 451 bp, Zea mays
  Clone ID: MRT4577_77009C.1
ggccatctaggtatctagatatgatgagtaaagctaggtaaatggcgtgcctatcaatgacgaatatgatgagcgcatcttgtgctctcctatggacaattcatgagttgagacctatacagatgatgggtgacgtgatttctgatgagggtgctgaaagcgatgagggctaggaggattgagaggactatgatagtgaagatcctgctggagattacgatgatgacacttggatggattgggatgatgacacttcgcacatggatgatggtgctggagcacccactgcatatgaggataaatgtgctacatgatattattcattagagtatagagaatgatgagggcggattgaagttgtgcaggttatgtggtgtgtcaactatatataacgcgtgcagttctaaactgtgcgtatggttatggtcctatctttatacatttttaacta

SEQ ID NO: 159470 - DNA, 380 bp, Zea mays
  Clone ID: MRT4577_7700C.1
gtagtctactctccgctactcaccagcaaattcccatgccggcccttagcccatctatttggtgccccattggatcgattcctgatggcgcccacggccgagaagaagcccgcggagaagaagccggcggacgagaaggccgagaagcagcctggggcggatatgcgcgcgccgagcaaggagggcggtgagaagatgggccagaagaaggcgatgaagagcgtcgagacgtacaagatctacatctgctaggtgctcagtcatgtgcacccggacattggcatttccaccagggccatgtccatcatgaactccttgatgaacgagattttcgagaagctcggcgccgcggccgtcaatctcgtccggtccagcaggaa

SEQ ID NO: 159471 - DNA, 634 bp, Zea mays
  Clone ID: MRT4577_77010C.1
ccggccggaaaaaataagtccgaattccagaactccaattccctcgcaatagcaataccagtaaagtctccttcctctccgagcgtcgatgactgtccacggcaaggcttgtaagttcttgggcaaggattgcggcaatgggaaccgcaaagtgctccgcgacaacatccaagggatctggagaccgcatatcacgaaggcttgcatggatgtgtggcccgaatcgcatctcaacactcatctacgaaaaaacccgatgagtgatcaagatcttcctccagaacatcatccgggactccgctacctacactgattacgtcctgcaaaatagcgtcaccatcatggacgtattcaactacctcgaacaccactcccataacatctacaagatgtgacatttaagtacgccctctccatctgaaaatgggcctactactgccggcttttctcctttgagttgcctgttctgtgctttccattctgaagcaaggtaccagatgcctacagctatgaatcgatatggtgtcagatgttccatgagatgccatgcagtagtacaaagagttcaactcctagttgcataatgagttgattccctcgcataaatgtgatgataactaccagtacctattcc

SEQ ID NO: 159472 - DNA, 752 bp, Zea mays
  Clone ID: MRT4577_77011C.1
gccggccgggctgcgaggggggcagcagcgcaggcggcagtccggctgcagagcgagaaacccgcaagaggcgatcgctagccgcgagcgcgggcggccaccatggcggcgagcgcgagggggagcgtgtgggagatccagccgcgcgacgtggaggccgcggggctcgccgcagccgacgcggccgcgttccacgccgcgctccgctccgccgcgggctcggcagccgcctccggggacgccgtgtgggcggccgtggccgcggcgggggtgctgcggccggagcacccgcacgcgctccaccagctcgtctactactctgcctacgccgggtgggaccgcgccgcccggggcccgccgccgtactggttcccgtcaccaactgactgtaagcaaacgaacctggggagattgatggaagcaaatggaccaaagctgttaggatcatcatacagggatcctatatcaagttttaaccacttttacaggttttccgtagagaaccaagaggtctactggtcaatggtgctaaagcaactcgcagtcaagtttaaacaagaaccaatgtcaattctaagtacgtagatggatcaaagaaaggggggacatggcttcaaggtgcagtgctcaacatcgctgagtgctgtctgttgccttgtctttccttgaagaggacagatgacagtacagctatcatttgggaggatgaaggccttgatgatatccagtgaaccgaatgtcactgaaggagc

SEQ ID NO: 159473 - DNA, 246 bp, Zea mays
  Clone ID: MRT4577_77012C.1
gcgccgtgtggcactcggcggtcgaaaggggagttcaaggagacgggggcgacgcggctgagggcttctcgtcggggtcggggctgcagccgtcatgccggggatagtggagctgcccactctagaggagctgaaagtagatgaggtgaaaattagttctgctgtgcttaaagctgcggcccatcactatggagctcaatgtgataagcccaacaaggaatttatgctctgccgctgggaagagaa

SEQ ID NO: 159474 - DNA, 463 bp, Zea mays
  unsure (1)..(463): unsure at all n locations
  Clone ID: MRT4577_77013C.1
aaaccctagcgccatccacccagccacccactcgtggcgggcgcctccgccgcgcggacaagcagggggagacaggangccggctggccacggccngcgcncgcggacgcgcgaccncnncgcgcgccccnnccgcaagaagggcnacancccgcncaccaccnaccnccgcaccnacaagaacggcgannacgccgangncaaggggaacggggggggccacaagttccctcgtacaagnncnaccacggccgcaccgggcgcggcgggaacgggaccaagcgcgccccccgcgncgaggncaacaagcagggcaaggggcgcancaccaggaagcgnaaccaagaacgagaggagcaggagcagccgncccgcngnacagaagagnnccgcccgaggaaggcgaagaaggaccagcngaaggcggacgccaaaaagcgcggcnaggggancaggaccaaga

SEQ ID NO: 159475 - DNA, 974 bp, Zea mays
  Clone ID: MRT4577_77014C.1
ttttgggttggtttttttttaattagggagtgggcacgctttttattattgctctccggtttattacaggcgtcagccggaaaagcttccgctcccaactgccctcggaccctccttccccccactaccagaagtccagaactcctcacctcacttcagcctcaacgcctaccaaacttacgcagcctctccataactgcgagctgttgctcctcctcccgagctaccattctccgtcgatctcctccaggctgtagcgcgctgccacgcccgcccatggcctcgggctcgaaaccggacagcgtggagaccgaccatcctggcggcggcctctccatcgccgtcgagcacaacccgccggagtcgcgcctgcagcagctcggcgtcaggtcttggcccaagtggggttgcccgccggggaagttcccggtgaagttcgacgcgcggcagacgtgctacctgctcaagggcaaggtgcgggcgcacatcaaggggtcgtcggagtgcgtggagttcggcgccggcgacctcgtcgtcttccccaaggggctcagctgcacctgggacgtcgccgccgccgtcgacaagtactacaagttcgactcgtcctgacggctgacgcacatcgctcccggcccggctccgctgatttggtcccgattattggttcggctgctcgcttaattgtgatgattagcttaatttcctagctaatttggttacatatagcccatagccttctctgtcgtgtaaaaaaaactgggagggatgcagcgcatctagctcccgcgtagcgtagcgcgtaggccagtagatattcatccggcaactgaaaaaagaaacccggtcaatgcaggggctgttcaaagtaccccttgtttattcgtccgagtgcaatccatcttggatgcttctttgaccagcgcccttggcctgcgttgttttttttaataatacctctatcttaaaatagt

SEQ ID NO: 159476 - DNA, 353 bp, Zea mays
  unsure (1)..(353): unsure at all n locations
  Clone ID: MRT4577_77015C.1
aaaaaaaaccggagagagataagataagnaataataaatttaggagaagccttaggacaaaaaacaaccaccaagcgacggcgcctgcgcaagatgaaccagctctctctcctccaccacctacatcggctgtctcccggacgcggccatggcctcaccgccgtcgtccgagctgggctctcctcctgtgaaccaccaaccccgcaggaggggggggggggcctccttgccatagcgcctcacgaaagcatcggaggagctagggaggaggagagccacttgagagaagagctcggtgaagggggcaataataacgaggacgtaggaggagggaggacgtgtgctctgacgac

SEQ ID NO: 159477 - DNA, 101 bp, Zea mays
  Clone ID: MRT4577_77016C.1
gcactcccaccacatcatccgtcaactctatagttctgtcgcctctaacaccactatgtacctgtactcctcgtactaaagcagcatcatcgcctgctatg

SEQ ID NO: 159478 - DNA, 317 bp, Zea mays
  Clone ID: MRT4577_77017C.1
ttttccatcgtcgtactccctggtggttctacaaaaaaaaaagacagtatctcgtctaccagaaccagaacaaaactgaagggtcgcaaaatttggaagtgttagaaaaagagagagaggagcaaaatgaagctcagtggcaaaaaaaaaaacagagcactagagctctgctcagaagcggccgccgagtcaccctcacacctccctagggtccacgaagatggattgacccggggccgatctggcccagtcccagccgtccgcgtggccgccaccaccagcgccgagccgcttcatgcaccacaggtcctcggtgc

SEQ ID NO: 159479 - DNA, 333 bp, Zea mays
  Clone ID: MRT4577_77018C.1
ggcgtgaaggatgtcggtgggtttttctgctggaaccctgtggagatccccttgtgttccgttgatgctgcctatcttgttgagtatactggcgttttcactgaccagcataaggctgcacatcacttgactggtggtggcactaaggttgtcatctctgatcctagcaaggattcccacatgcttgtcgttggtgtccaccagagggtactcaagcatgacattcacattgtatcccatgctagctgttgaaacaactgtctttgtgctgtctgttaggtcaacaatgacaaactcgggatctctttgggcatgataaccactgttcatgcc

SEQ ID NO: 159480 - DNA, 249 bp, Zea mays
  Clone ID: MRT4577_77019C.1
aaaaaaaggctggaatattctttagtagtttgtcacataccgtgcggcccaaacactgccctttgaccagcagcccaaacggcgcccacgaagggcttttatgcaaaacctctcatatacgccactgagaggagggccccaaaaagggttgcaacccacgggtagacacaaatgaccaaaagcagtcccccacccattagagttaatggggaacatgcactaccctgggcggggactgttctactacac

SEQ ID NO: 159481 - DNA, 219 bp, Zea mays
  unsure (1)..(219): unsure at all n locations
  Clone ID: MRT4577_7701C.1
naaaggcgaccgccgnccggncgccagnccactcaaaccctttggtctcctgtcctctcttcgtccaccgcgtcgncgtctccctccctccgnccccgnacccaccgttatatacnanccccgncgggactacactcaccaccgcgnctcgaatgcatcgntcaantactcgaagccgagtcancggcgnctactcccgnctggntcccggnnccattc

SEQ ID NO: 159482 - DNA, 390 bp, Zea mays
  Clone ID: MRT4577_77020C.1
aaaccctaacacgccaggcgatcccgatgcgcaggtgtctgggcagcgaggcctgcttgcgccggcggcgcgggccggcgcggctttgggtgccagacgcggcgctgatggtcggccaccggtgcctattgtcctgctcttcggccggggcccggggactcctctgacaggggccaggatgtggatgtacataagttgtggagaactgcagacctcaaatggctgcagagcatgttctgcaccatgcacctcctggcctgccgcaccaactgcatctgatagcaatggctacttgcgcgtcctatgcaacggtgggttgagccaacaacggagtccagtacggaatcgctgttgctgctgcagggcccatgaaggctacactggggcctg

SEQ ID NO: 159483 - DNA, 593 bp, Zea mays
  Clone ID: MRT4577_77021C.1
gggaaaaaaaaaaaaacaaaaaaaaaaaaaaaaaaaaaaaaaaataaaaaaaaaaaaaaaaaaaaaaaaaaaaaaaaaaaaaaaaaaaaaaaggcttcctcggcctccaggtgcacaagggctttaggaacgggatcgacgcgctcggggtggtcgtcaaggtcgccgtcatcgtctttgaggtcgccgtctgggtcggggcccgattttggggttatgggcgcgctcgctgcgtaaggttcctcggttttaccagacccactggcttagtcctgcttggctgtagcaaatctgagccccaggttgcactattcgatccggttatagttgggatggatgctcaggggtgcaaattggaggagcgagggctctcaaaattgttcttttttgctgtgccagttccccaggccacaacattaatgagtatgagttagccttaccacatagctctttgaacatttgcttctatcaaatgattttttgatccactgcgtgcaactatattcttgtataatcgacaagtgtgggtgaacaaactgtacagcaattgaaggatccaaatgcattgacttaatcgataaaatcttgtctag

SEQ ID NO: 159484 - DNA, 1585 bp, Zea mays
  Clone ID: MRT4577_77022C.1
gtaagtataaactaatattcccattgagatcgcattatttgctcttcaatagttaattgcactatgtaccttgtactcagactcgctcagaaatagcaaaagaatgtcgttcaaaggtgggaaatcatcacacttcaggcagcaagagctttgcttgttctgcgcatgaactagctaataaactaaggcgttctccaagaagagatgaggtttatatcaagacacatacaagaaaaaatggagttccatcaagacatgcagaaccaattattaataaattgaaagccatagttgaagcccatccagagttgaagcaaagaacaattcaagagggcgatgcatttgctgctgcttgtggagaaaaggagccaagaggacgtgttcgtgctttgggtttaggaccaactccccaagatgttggtaccccagggttgaagtgttacacacccacaagactgcagatggaaggtttggcccgtaaaaaggctgaatgtgagaaagtagctcttcaacaacgcataactgaattggagcagcaaatgcaagaggaaagggcggcaagggaattgcaagatgtggaactcatttcaaataatggttcaaattcacgagataatgggagccgaaggtatgaagagcatgatgtggaggcatatcatgacgctaaatttgtagaagatgaagattgtgcagaaaatcacatcaatcatcattgtgatgatggtgagcaacaccatcaaaacagtcctgttggtgcagccccgacagtgcaacgccatcaaaatagtcctgttggtgcagccccgatagtgcaacgccatcaaaacaatcatgttagggcagccccaacaattcaacgccatcaaaatagtcctattggtgcagtcccaccaaagcagcctcgacggtgcatcactacaagtttagcccacccagtcccaccagggaatgaggccccctctcgcattcaacatgatgaacttgttggaaaggatgtaatattatatgccattattggacctgagcaacctgtggctaagggaacaattgtttcaactaatcctaacaccttgctgggaggtgtgcctcttgggaaagaatattgtgaagttattgtgaacactgtattgaaaagggatgccattttgccttgtccttatggttatgtagagacgatggctgatgctcatcaaatgtcagttgcttggctttataagaggatgaagattagcaaggcatcaggatcaccccaaggtattggaggtggctggcactagaggcaagctgcagggttggagaaacaagagaccgacagggcattttgtagacaatgagtcctaatttgtagttaaatatgtaatggcatgtcaagctatatgtgggattttttgtttgaaactcagagatgaatcattttgtagactgagtcctgattttggtgtagctaaaacatgtaatttctgctaccatgaatcctattttttggtgtagctaaacatatataatggctgctataatataatggctgctataatgtaatggctgctatgttgatatgttcaaagaaaactatgttgttcttcca

SEQ ID NO: 159485 - DNA, 348 bp, Zea mays
  Clone ID: MRT4577_77023C.1
gagccaatcagacagccagccagcgagcgagcgcaatccctagcgccgaggcccattcccccgtcgtccttccccgcccattccacgatccctcggccgcggtcgggtcgccatgggaatggggccgctcgagaacgccgccgccgtcgtcgagggcggcgtcgccgccccggtggtgccggtggtgaccgcggcggcggcgggaggggggtcgtacgcgctgctgcagtgcggggaggactcggcgtacgtgcgggacgcgtacgggggctacttcgaggtgttccgcgcgctgctggccgaagacggcgagcgctggcaggtgtaccgcgccgtgcgcggcgagct

SEQ ID NO: 159486 - DNA, 935 bp, Zea mays
  Clone ID: MRT4577_77024C.1
cggcgcccaaggccatgacggtgcggcctctcgtcggtgcgcttcggccaggcgtggcgtgtgggcgtcctctcctggcggacagggctcgaacccaaactccggctcaccgacgggcggcccggccaagcgggcgcggctcctgccccgacctcggcccgacgcgcgcgggtgcgggtcctccggcagcggccaggcggtcggcctcgaccccggtggtgcgcggtgcaggccccggcgcgcggccccccggtggcagcgcgggcagacggcccaagcgcgcggacgcgcggtctcccggcggtggcgcgggcagacccggcgctcgggggcgcgggcgtgcggccccccgtggcggcgcgggctaggcagggcgtgggcgcagccccacggcgggaccgcggcatggcagcgcgcgacacgcgggcactcggcctccagcgcgtgaccgcggcccggcggacgggcgggcccctcggcgcggcaccggatgggcgcacggccgcccccgcttgacgcgtctcccgggagcaccggtcacggacgaccacggcggatcgggcgtgcggctcctctagcacggtccgacggatgcggacctcggttagtgcgggtgcgcgtcggcccagcggtgcgagcacgcagccacgacggcgtgggcgtgccgctcctccgtcttaagggcgcggccaccagcgcggcacgggctcaggcgtggagcgcggccccggctaggcacaaactcgccgcgggtagcccctgcgcacctgcgcaggcctgtaatgaccctggcgggcacgacgtggcgtccctgcctcgcaagcgtgcagcgccaggccccggtggccatgatccggcatggaacacggccggtggccctgatgagccatggccgtgaacggcgaagcaaccatcaagaataagaacgattaaac

SEQ ID NO: 159487 - DNA, 239 bp, Zea mays
  Clone ID: MRT4577_77025C.1
caggcaaacatgcagaacagattcttgcaattggttgtttggctggtaaagttcccggtttacttaagggttggctcattcgagtggtcagtgtatttgaaggaagttaccctggagtctagactgggctagggctggtctaatattaacgacctggtacccgattcgacgtcctgagctcagtttcttggagtgataagcttggttatgcatgtgttctgggaaagttcgtacattcc

SEQ ID NO: 159488 - DNA, 717 bp, Zea mays
  Clone ID: MRT4577_77026C.1
atggatacccataggccaccacacttcgacgacactaacttcgcatattatagtgctagaatggattgttacctacagtccgttgatctaggtgtttggagagtcactcatgacgggatgaaaccacctaaaaatcccgagaagctcaccacgagtgaggaaaaaattcatttgaatgctagagccaaaaaatgctcgtatgaatctcttagcgtggaaattttcaatcaagtttttacattaaaaactgctaatgatatttggctaaaattgcatgagctccatgacggcacatccaatgtctataatgagcttgttagagacatgtattctcgtttgaatatgatcatcaatgagcttaattctattggaattaataagctaggtgatgtggacattgtgaggaagattatctccctactgctgcaacaaagatatgggagcaccatcaccattcttcatgacatggatgacttgagtacaatgaccccaacaattgtgatcagaaagattgcgacatttgaaatgacacaaaagatgggtcaagaggagccaacttcgtcgaggccatattcttttgcatgcgatgaaaagaaaggcaataagaaggctcccactccaagctcctcaagtgaagaagagaaagaagaagaatatgatgatgatgaagatggtcaaccctcaacatcatcctccgaggacgaagaaacaatctga

SEQ ID NO: 159489 - DNA, 287 bp, Zea mays
  unsure (1)..(287): unsure at all n locations
  Clone ID: MRT4577_77027C.1
cccaacggacggcagcccnnncgggagggccnnagggaccganncacncngcgnaganggacngaacgcagaaagccnnccacnggcaggcgancgggggggggacaggannncncgnnacncaagncagcanncncacnncnganancnccaggncnngncaccaaaaaccnnccccganggacagaacgncccgcnaccgacacnngaaaaagcagcnnncaagggcncggcgcnncggggaaacacnngagcccngagacannnncggngccanggagcnagac

SEQ ID NO: 159490 - DNA, 689 bp, Zea mays
  Clone ID: MRT4577_77028C.1
cggacgcgtgggcggacgcgtgggcggacgcgtgggcggacgcgtgggcggacgcgacctcgcagatcgagtccaagcattcaccggaggatcccaaatcacactctccagtaaccgtccgcttctccagccgcatctctagccgagtctatctcctcctcctccgccgccgccgcaactatcctaatggctcgcttcgccgtggtcgccgccatcgtcgccctcctcgccgtcgtcgcggcggcgcaggccccgaccacagctcccaaggccgcgcccaggatggccccgctgccgcctccccctgcgcggtccccggccacagccccggcgccggccgccaagccgccggccgccaagccgccgaccgccgcggcgccgtcaccgctggcctctcctccggccccgcccaccgagggccccgccgcctctgcgccgtccgcgaaggctccgacctcgtccgtctccaccaccccggccggcgcccccaccgtcgcgccctccggcagcgccgccgcctcgcgcgcctccgccctcggcttcgtcgccgtcgccggcgcggtcgcagccgccgtcatgttctagacgcctccccggggcgtcgtggtgggcggtgctgtttatactatcgtgttttacttttgtgtgtgtgtgtgtgtgtgtgtgtgggtcgtgggtgaatctttctt

SEQ ID NO: 159491 - DNA, 285 bp, Zea mays
  unsure (1)..(285): unsure at all n locations
  Clone ID: MRT4577_77029C.1
nacacacgtccgnacacgcgtccgcggacgcgtggcgacgggntnttttctccggcgacgaacacatatttcttggcacttttattcactgggcttgacatcaaatacagacgagcataggggctacatataggccacagactgccaggagcacgcctccacgtcttgccttcttgccatgatccgcatgacacacatgtacatacacgagctggactanaacactctacgcgctacgaactcacgtacatcacacacatgacgtgtttattttccacatagatc

SEQ ID NO: 159492 - DNA, 463 bp, Zea mays
  Clone ID: MRT4577_7702C.1
tggacctttgggctgcattatgtgcttgtttatgtgcttggttctgctgatcgcagcggttcagtgatcgtcgcggcgtctaggagtagcttctgcgatgtgaagtaggcctcttcttatgtgggtttcctcaagacagtgcgtgttatggtcgtcgtgccgcgtgagaggggtgcttaggctgctacgaatttaaataaggaacacgatacgtctaagctatagaccgtagacagtaaagtaagtcaccgggaatgatgtcttgataattattatatgttctaggcccggtcagcagatagtactgatgatgaggaatagaagacggtattgaaaggagttgcacctgctctaactctatagccttttactaagaaaacttgtaaggaccgtattcattcgagtatcttagtaacgaagactttcgaaattacgtaaaacacttacgttcgtgagaatcggt

SEQ ID NO: 159493 - DNA, 2446 bp, Zea mays
  Clone ID: MRT4577_77030C.1
actcgtggaggccgggtaaaaacagagctcaaagaagcggcagcataggaagattactgatacgaaaagaaaatgaaggaagtagaagaggtggagggccacggttatggcgccgccactcccatgacgccgccgccgtcgtcgctcggtcttccttccccctcggtctcgacattgacctccgccgctgccgctagggttttggcgcggccaatgcccgcctcggtcccaagcttgcgggcgccttcccccttcgtgcgggccatgcgcacccgcgttgatccgccgccgccacagccgctcacggcccctcctcttcttcgtcctcgtccggtgctaccgccgccgccgataccagagaagcagcggcgggggcgcccgcgcaactgcgaccgactcctcccgccgccgccgggcttccacctcgctccgtccgcacgggcaccgctgcctgcccgcggccaaccttcatctagggggcttccctttcgcggtcaattgggtgggctccagttgcacgtgctcaaaatacatgtgggagaggatatcgtatcaaagattgtgcaggtctcgaaaataactgggaaggctgtctgtgttctctcagtgtttggggccgttcaggattgctatctgctccactctgctgtcatcttaaatcacaagggtcctttagaaatcattcatgtgtttggatccattttgacatctgatagtcctggatttgggtgcttatctgcgactcttgcttgtggtgattgttctcttgtcggtggcattgcagttggacctctcatagctgcaacaccggtgcaggcaattgttgggagcttccacaatgatgctttccaagcaaacaagaaacctaagctcgttgcatgttaccccagttctcatgttaccgctggcactgggggcatgtgttgcgtcaattctaagattaccattggcagtttgagaaaacatgataccagttcttggtttcccattggcaatggaagcacaaatcaccccaattctcatgttactgtcggcagtggaaacacacatcatcctaattcacaggtgaccattgacagtaggagcatgtgttgcctcagttttgaggatggcattggtagttggagtaaagatgatccaagttcttggtttcccattggcactgggagcacagatcactccaattttcaagttactgttggcactgggagcacacaataccccagctcccaggttcccactggcattgggagcgcatatcaatctgattttcatgtcacattgggtgacagaagcgcaagtatccccgattctcaggctactgttcactatgggattaaacatcaacccaattcctgtgtcagtgttggcaacgggagcacaggtagcgtcaattctcaggatattgttggacacggaagcacatataaccctgaatctctgcctgccattggcgacaggagcatgcataacaccaattttgaggtcgtggtaggagttgggagcacagacaagggcaattcacaggacacccttgttgatgggaacctgaatcgccccagttctatggtttctgttgacaacggaagctcctgttaccccaattgtaaggatgctgttggcgatacgtgtgctccatcctctgaaggctctaatccagaatatgcatcctgcactgtagtagtggaacagagtagattgagcagagacagatgtgaatctctcgcaagtgatggcttcttaacgtagcaacactttaggtgattgtttatgttttttctctgaagacagtagccaattacatgtccttggacagcgagggtgactccagcagttcatccaaagtttatccataagcactgttatgcactgaagactgcactgtcgcagagtggagtttgaatatagctatgtgtatgggtaagctgttggagatagtgttatgcttttgtggatgaccgccaaagtatccttttgggatggtaggaagttttgaagtccagcagtagttgcgttctttgcagggacatggcagtgttgagaattgtggtgcagtctgttgtagctttagttgctaacagtgttggatttgtgctgaggtctgtcagatgagaaatcctaacatagcagaagggttcgttgagctttcaatatatatgatactgatgagattttatgaggcaagttgtcgggtatatctcgtgcagtaaagcagaatcaaggctccactgcaacagaaactgatcatgtgagtgtatgatagatgtcatggcgttagaccaacgatttgaaattgaaatgttgctaccatgtagaaagatgtgatatgtttagctagatggtctccagcagctcttctattacattatctattctacctcctatttcaaacttcaatctatctgcagttgcacgaccataaatacgatctgtcaaacttcgctct

SEQ ID NO: 159494 - DNA, 885 bp, Zea mays
  unsure (1)..(885): unsure at all n locations
  Clone ID: MRT4577_77031C.1
cggacgcgtgggcggacgcgtgggcggacgcattgggtacctcgaggccggccgggacaactcgcagatcgagtccaagcattcaccggagaatcccaaatcacactctccagtaaccgcccgcttctccagccgcatctctagccgagtctatctcctcctcctcctccgccgccgcaactatcctaatggctcgcttcgccgtggtcgccgccatcgtcgccctcctcgccgtcgtcgcggcggcgcaggccccggccgccaccccgaccacagctcccaaggccgcgcccaggatggccccgctgccgccacgcccctgtgcggtcccccggcccaccgccccggcgccggcccgccaagccgccgacccgccgcggcgccgtccccgctggcctctcctccggccccgcccaccgagggccccgccgcctctgcgccgtccgcgaaggccccgacctcgtccgtctccaccaccccggccggcgcccccaccgtcgcgccttccggcagcggcgccgcctcgcgcgcctccgccctcggcttcgtcgccgtcgccggcgcggtcgcagccgccgtcatgttctagacgcctccccgcggcgtcgggcggtgctgtttatactatcgtgttttacttttgtgcgtgtgtgtgtgggtgggtcgtgggtgattctttcttagatactgagagagcagaggttatgtgagagattctagtgggggtagcgatgggctgttacatatgaatatcatgattcatgatccagaggattattaatggaattctttcatttgtttctagtaaaaaaaaaaaaaaaaaaaaaagcaaaaaaaaaaaaaaaaaagcggcctcnnnnnnnnnnnnnnnnnnnnnnnnaaaaa

SEQ ID NO: 159495 - DNA, 337 bp, Zea mays
  Clone ID: MRT4577_77032C.1
gcgggctcgtcctgctggtgcttggcgcccgcgttgttctctggccctgctctccccgctgccatcgccttcctcgtcgcgggcgtgctcgtcgcgctcgccttcggctcggtggcgggctgccggggcggcttgcccaccttttttacgctgctcggccagtacgctgtgggcctccgtgcctctcgccctggcgctcacagcgtggtgctctgcggcgggtgcctgtccatccgttacgcttgtcccgatgcgggccttctgcgcattgaggcttttcctccggcgtgggggtcgggatacgcgccgcgctgccctgcttcctggactgccgcct

SEQ ID NO: 159496 - DNA, 522 bp, Zea mays
  Clone ID: MRT4577_77033C.1
gcggactacccgctgagttaagcatatcaataagcggaggaaatttactaattggattcccttagtaacggcgggcgaacggggaagagcccagcttgaaaatcggacgtcttcggcgttcgaattgtagtctggagaagcgtcctcagcgacggaccgggcctaagttccctggaaaggggcgccagagagggtgagagccccgtcgtgcccggaccctgtcgcaccacgaggcgctgtctacgagtcgggttgtttgggaatgcagccccaatcgggcggtaaattccgtccaaggctaaatacgggcgagagaccgatagcgaacaagtaccgcgaggtaaagatgaaaaggactctgaaaagagagtcaaagagtgcttgaaattgtctggagggaagcggatgggggccggcgatgcgttctgatcggatgcggaacggagcaatccggtccgccgatcgattcggtgcgtggaccgacgcggattacagtggctgcctaagcccgggcttttgata

SEQ ID NO: 159497 - DNA, 177 bp, Zea mays
  Clone ID: MRT4577_77034C.1
ggggggatacaagatgtaataccatttgctgccattttttcaaaggggggaattttgcacacctaaagaaaaaactgaagtgtttttttattacaaggacaagttttttcctttaggatagcttatgaccaaactgaaaataagagccaagcccacgcgttcgcggacccgtgggtg

SEQ ID NO: 159498 - DNA, 189 bp, Zea mays
  unsure (1)..(189): unsure at all n locations
  Clone ID: MRT4577_77035C.1
agagagtcgatcgtcgtataaacaatccagtagctcagtgactgtgtcatatatgtcaatctgcgactctatgatcacaaggtgagcgatctatgctctacagcaggaaatgatctgagcnactctctgaagagtgagtgatcacagctaggattattacagcgagacatgacttctcatcactgcaaa

SEQ ID NO: 159499 - DNA, 296 bp, Zea mays
  Clone ID: MRT4577_77036C.1
ggggaaaaaaatccgggtttgggttttgggccccctccccccttaattttagggggggggggcccatttaagcttccgggcatagggggggagccccaagccccccggcatttttttgttttgccctaaaaaagggaccgggaaagggccaagaaatttattggggatttgggggccatctccaaaaaaccattcggggccctttgtctgggggttagtggacgacccttcttgtgctaacatgttcttcccctcacgggttttttgggggtggggggggtcctcaaagggcccaa

SEQ ID NO: 159500 - DNA, 282 bp, Zea mays
  Clone ID: MRT4577_77037C.1
ttttgttttttttttaatcgtggccatgtgattgatgaaacgtacaaatttacaatttaataacaaaaaaagtaccttcaccaccggaacaaaatggaatgatcaagggcgcacatatcaacttatgggctcagcttatttagcgactgacaaaatggagaagagccgtactgcttattatccctgcaggagcatcactctcactggacggcaattgtacaccaatgggctaatcctgaatggcacattaatgacgggggagggcaggcggccacctttact

SEQ ID NO: 159501 - DNA, 652 bp, Zea mays
  unsure (1)..(652): unsure at all n locations
  Clone ID: MRT4577_77038C.1
aattcggcacgaggcgaagcttcccgtccttctccttgcggcggccgctggcggcgcggcaagtcggcggccacccgcccctatcttctacttacttgagcctcccaacctcattgccgctgcacacctcatccccctccgcaccgtagatcttcttctcggcgctcaggaggaccactgcgtccaccttcacttcaccgggcgggatctggtcgcaatcggatccacaccgccgccgcggccgcctcctcgggtggagtcccgggctcgacgagacggaggccagggtagacgacggaggcgacgaggacgacgaggctgaggaggggaagcccatgccggccgccggggcccgccgctccactcgcgtcttcatgcccaaggcggctaagccgccgcaatcccaggagcacgtcgatcccgccacccgggtcctccgctccggcaagcgcctcgccgccgaccggatccgctgggacgccaaggaggcggcagccttccacgtcgacatcaatcacggccacgaccagcagcccaaaaggaagattaccccanaccgggattgccagctctgacaaagtccttcnggctcgtgtacagaaggaaacgccgtcgccggcggaggcaccccgccgatgaggtcgtcgccgag

SEQ ID NO: 159502 - DNA, 562 bp, Zea mays
  Clone ID: MRT4577_77039C.1
cggccgcgtgggcgattatagggtcagtgagcttcgggttgtggaacttctggatggcctatgcgataagatgcaagattataccttaaagaattggaatcaggcgaaagggatgggttaaagtaacagactggaatagctttcaatactgaaaataaggcagcagcgcaaacactgcggatccacaagtaagagcgcactccaaaaaactgtccaccttctgtggaaggctactggaggaaacggaggatgagctctctgagtggatcaaaacaagctccacagaatcagaaaatgtaagcaaggccctttgtgaagatattagctaccatccatattgatgatgagctatgacatgccgggggcaggtcgttgtttcgcaaaaagcaaaacaggcgacaggttggaaaatgttaaagaacacagctctagtagtccctgacaccatttagagagacatgcagctgccaattctgattgtttgtgttgcactcatatttcctgtaaacaaaagcttagactgatctgtagagaaagcaactggacattaatttttgcatac

SEQ ID NO: 159503 - DNA, 167 bp, Zea mays
  Clone ID: MRT4577_7703C.1
aaccccgggttgacccacgctttttacaccacatgcgaaacccgaaccccaagaagggtattaaagagcgacttctttctacgacaccaaagcagccctgcggacagctcgggaatacaaaccaatcaaaaagtttggtgggccactgagccagaaggccaactagc

SEQ ID NO: 159504 - DNA, 637 bp, Zea mays
  Clone ID: MRT4577_77040C.1
ccggccgggctcggccgctatctgatcgttgtgttagggattcctctcgtgcatcacgtgctcggagctcgcagatcctttcctctctcgcggtcgaggctagagaaccgacaccatgagccgctcggcgcagcctccggatgctgatcaactacatggacgagaaccttcagattaacatgacatcgtccaccgccgagatatcgacacactgtgcgactaccaccagtacatgaatctggtggtggacaacactgtgccaggccaatggaaatgaccaagcacatcttggaatgctgctaattaggggaaacacagttgtaatgatacaagcactggagccaggtgctaggtcacagtgaatcagtgctctttaccactagcaccgagagaactgacgcagaagatatcagtggaccctgttgtatttgactaacgcttttgcacaggagcataacttcctacgaggaatgcctatgcctttttctcaacggggacgacaccaacctggtgaacgcatggaacacgtgccccaggaccttcagctccaggttttgctacctctacggaccatcaattgcccacttcgcgtacacatggtactacctcccccctgcgctgaattgtaatccgatct

SEQ ID NO: 159505 - DNA, 1347 bp, Zea mays
  Clone ID: MRT4577_77041C.1
caggggtcggcccaggggaggaggaggattgtcgaacgatcggcggcgacaaagatggctgtgtagatcgtgccgccaaagatggctgtgtagatcactgatctgatcagcactagggaaaggcggcgatgccttctgtattcagcgacgcggtgagtatatctagaagtccatcggtcataagccgaccttcgagacgaacgacggaacgagccgcaaggagaaaagtcttccgattcctgctaggtgggcctgcgcgttgcgagtgtgtgaggggctccacggatctcgaggccacatctgtaaaacgaccacccctcacgcggaagcggagactggaaatcgggagggagaccggagacgagaccgccggagatggagccgagatctgcaatctacagatccggcgccctccttctcctcgccgccatccttgcggaggtcgtcatccccgcatccgccatcggagacaagtgcgccgcctgcaaggccgttgctgcggagctagagattggaatttcgagtgagaagccgagaaatcacttggacttgcgcaaccgcttaaattctaaaggccagagggaggggaaggtcattgattatagggtcagtgagcttcgggttgtggaacttctggatggcctatgcgataagatgcaagattataccttaaagaagttggaatcaggcgaaaagggatgggttaaagtaacagactggaatagctttcaaactgaaaataaggcagcagcaagagctcactccaaaaaattgtccaccttctgtggaagcttcacttgctacacaggctactggaggaaacggaggatgagctctctgagtggatcaaaacaacctccacagaatcagaatatgtaagcaaggccctttgtgaagatattagcaaacactgccgatctacaagtgctaccatccagattgatgatgagctatgacatgccgggggcaggtcgttgtttcgcaaaaagcaaaacaggcgacaggttggaaaatgttaaagaacacagctctagtagtccctgacaccatttagagagacatgcagctgccaattctgattgtttgtgttgcactcatatttcctgtaaacaaaagcttagactgatctgtagagaaagcaactggacatcaatttttgcataccgatgaactacagtttaaaacggccggttgaattatcatgtcaggggctataggaaatttgaatgcttctattctaaggtcttgttgttgagtactgagtatagtttgatgactgcatgttggtcaatgacagcatcaaagattacatgcatttttttgggaaaaaaaaaaaaaaaagcggcc

SEQ ID NO: 159506 - DNA, 245 bp, Zea mays
  Clone ID: MRT4577_77042C.1
gtagcacacctgctgaaggggtttcctcctgtgcactatttttcttcgaattgtttttgtttggtgtcttccaccatctagcacttcgcttccaatatgttagtaccatcttctttggtgatcccctcatctccaccacctttggcagcaaggacaaagccctcctgagtgagccagctaacgacgtcagctgcttccatcgagatattgagcagcagtaccagtctagctggggagtgacaccg

SEQ ID NO: 159507 - DNA, 511 bp, Zea mays
  Clone ID: MRT4577_77043C.1
ggtaccctcggagccggccggggcttggcctcgacaaacctccctgggctgcgccagccccacttccccacgcgactgaacatgccccagcggctccaaaaatacaaagacgctcttcccaaccctatctttgatccctggggccgcggtcgggaccactgacgaccggatccaacggccacggaggccgcgcggtggtcctgcgacccgcagcgccgcccgcactacggttacggaggtggcgcccgactccttacgcgggtggtgctgctggctctacctgctgatcaccttcctggtgctactcgatctggccgtcatgctcgtcctcgggctggtggagaaccccttcaaacggaggatccaccttatccaggtggacgagctgcacctgctggtggtgaaaacctacaggtccccggccgactgtgccctggctgacgccatcatctacctgaacatcacagtgctctataccgacatgaaccccatctaggaggggcatacgcgc

SEQ ID NO: 159508 - DNA, 696 bp, Zea mays
  unsure (1)..(696): unsure at all n locations
  Clone ID: MRT4577_77044C.1
cattgggtacctcgaggccggccgggactcgagctcgagcgatcccactcccgatcagcagctgatcgctcactcttgcagctcggtcattctttagctgctctagctctagccctagctagtagctagccactcggtcgtgtagtcatcagccttctgatcgtcacccatggccactgccgaggtccagaccccgaccgccgtggcgaccgaggaagcgacggtggtggagaccccggctccgcccgccgtcgtgccctaggaggctgcccccgccgccgaggccaaggtggacgagacagctgccccgtaggagaccgaggaacttgcacgctgctgtacacgaggaggaccccccgccgcgggcggaatagaccaccaaggccgcatatagctgacactagattcactcggaaacctagacgctgttgaatggaactctgcagaccgaactggttgcagaactggtcttcacggacagcacttcggttttcacgactgacgagctgttgcgtgcaccaacgcaagttcttggaaggagcagccatggaacaccttaataaagctgttcctaccaagcggggcatggtccctgacagtgaattggcctgcgtgtttggcccttgtgaaggcattaaaaaggaattcacaaaggagattaaagaggatcgggcacttatcangcatcccaaatat

SEQ ID NO: 159509 - DNA, 2743 bp, Zea mays
  Clone ID: MRT4577_77045C.1
aaaaagattcgatgtagtcactgactgtttggatcatcattttgtgaaggaaaatggccatgaaagtgttacaagaggttggctgaagaaggtgcgactggaatggaacatcctgcaaaatgacctaccagatggtattcatgtgagagtttatgaggaaaggatggatcttctgagggcttgcatcgttggggcacctggaacaccttaccatgacaatctttttttcttcgatattttctttcctcctgattacccccatgaaccaccttctgttcactatcattctggtggtctccgcctgaatccaaatctgtatgaatcgggaaaagtgtgcctcagcctcctgaagacatggacaggcactggtaacgaagtgtggaatgctgagagctcaactgttcttcagctgctgttatcgcttcaggcccttgttctggacgcgtgagcttacttcaacgaggcgggagtcgataaatttgtgggcaaggctgatggagagaagaactccatcacgtacaatgagaatgccttccttctgtcatgcaaatccatgatgtatgttttacgcaagcctccaaagcattttgacacgttggtcaaggagcatttcacctgccgtgccccgcacatcctggatgcctgcgaggcttatcttggggccgatcttcttagatcgccaccggccccccgcaatcttgaaactctcatgcacacatgtattttgaaagttatggttcagattgttctcaaacatttgttgttgccaagacaaagagcactgttgatgttctgtggcagaatggaactgtatctcttggtctagaaccccaggcattactccctgtgagtacccttggtgaccatgatttttggccaggtcaatttgtcctagaaaaactgactgtagaagatgctgcaagatgtccgcgaacggcaatagtgagtgatgtggatgcactggagcgaacagtaaatgtaaaatggattggtccagcacatagtgacattgtcagctatggaagtgaccctgcagtggagactgtaagtgtttatgagctagtagagcacccagatttctccttctgcactggcgaggtcgttatcaggtcagctatgaacatagacaagtctgaagcagatcccacaaatgggtcattggcaagcaaagaatcattggttacctcctctggcttcttatcatgcaccggaaatgtacttgggtacaaggacaatggaattgaagtgcaatgggctaatggtgttatatccaaggtgcaacattttgagataattggattggacaagcttcttgataatagttctgtagaatcaatgaatgaggaacatacaattggtgattcattagacgaggctgagcaggaggaattgaaccatgagattgctctggagtctactgaagactgcactggctccttgtgcaaagccactgcttttctatttcccaagacagcttttgacttcctgacaaatgtggctgctagtttgtttggtattcatggttctccatctccaagctcagttttggtagatcctcgatatgaaattgtgaagatggcagaaatgcagccatgtgcagaagaaacaccaaaagaagaacagatagtgaagtttgtggcgcagattgacaagccaattctctcttcagaggatgccgtctcaaaaagattcgatgtagtcactgactgtttggatcatcattttgtgaaggaaaatggccatgaaagtgttacaagaggttggctgaagaaggtgcgactggaatggaacatcctgcaaaatgacctaccagatggtattcatgtgagagtttatgaggaaaggatggatcttctgagggcttgcatcgttggggcacctggaacaccttaccatgacaatctttttttttcttcgatattttctttcctcctgattaccctcatgaaccacctgtaagctcttccattccagtctctattgttcttgtagacaaaatcacgtgtttggagacggatttgatagcctaccaaccacgtcaccgtgcgtgcaggattaattattcagccttgcactgcaccactgtcaatctgtcaggccacgccacagcgtgattttgtctacatacagtacggttaatctctttttttctgattgatctctgtgatccagtgactggagcggcaagtgactcgcggcgggcggcggggactcgcggatggcgcccgcgaatcgcggcgttgggcgggcgggcgggcggcggttgtttgcggctgcgggatcctcagcggttgtgcgcgcgggagccacgcgagctggcggcggcggctgcgagatcctcggcggttgtgcgcgcgggagccacgggagcgaggggagagcgggcggttgtgcgcgcgggagccacgcgagctggcggcggttgtttgcggctgcgggatcctcggcggttgtgcgcgcgggagccacgggagtgaggggagagcgggggcagtctacatgtgagtcttaatagttgtagaagactttggaaagtagtggaatgtcacattctaaaaaaatagcctattctaatagtaagattctaattcctcaaaatgaaaagaaacaaacggggcctaagtgttttggtgattaagtatccaacacaaatgttttgaactctttatgtgttaaacaggcaaaaagtatgtttctagacttggtaaattgttttatgtactaacatggttatcaaagtgtt

SEQ ID NO: 159510 - DNA, 346 bp, Zea mays
  Clone ID: MRT4577_77046C.1
gtccacgagtgcatattccaatgccagtccgatcgtgagctcagctcatctccggtcgtcctctccccgcacgcaccaccaccagcagcagtccatcaccatgtgcggcgccctgctcatcacgctgatcctcgcggccgtgcccctctccttgagcggcagccgcggtgcgcacccgggctactcggactacgactagagcgcgtagcacagtggacgcgtgcgcggagctgatgcgacgaatggaggagcgcggtcccagctggcgcatcatcatcgacatcacgcacgcaatcgtgccggacctgccagcgttcgccacgatggctgtcgcggcgcccatgct

SEQ ID NO: 159511 - DNA, 378 bp, Zea mays
  Clone ID: MRT4577_77047C.1
cccacgcgtccgatcacaggctaccccagtgatggggttgctgctccagcagatccctgaatgggagaaactagctaaaggcatttcacacatgcaattgtgatactgactgtgaaacttacgcaccttcactatatgtgttagcaccttctagacgaatctgtcctgagaatgaatccactaatcatggattaaagacaaggaccatctgcctgttttacgatcacggtggtcctaaatattgatatgccaccattctgttgtatgttgatgatgccttattaacttacctacgaagcttcgtttagacgattttgcacctgatctacatatgctgctgcgtttctggtactgatcgcattgttttcataactttgc

SEQ ID NO: 159512 - DNA, 132 bp, Zea mays
  Clone ID: MRT4577_77048C.1
gccgggtcggggtatgttatttacatgtaaatttcagaaattaaacgaatgccttttgacaccgccaccgatgcccgtgcctaggaggccactgccaagtgcgagcactgcctcatcatccaggctccctcc

SEQ ID NO: 159513 - DNA, 2247 bp, Zea mays
  Clone ID: MRT4577_77049C.1
agtacacctcgagcccggccgggccgggctcttggcacttttccatctcgctataaacccttcacgccccggcgtccgcggctcgctcctgttcgcgccgccgactcgcctcgcgtcgcctcactagggtttgcagttcccgtcgcgggcgaaggcggcgtcgtctcgtggcggcgccgtctccgtgtgccttcccgctcccaagcaatggccttggaagatgggagcccagctacttttactccacaagtgattgctaatgcatttgtcaaacaatactatcaaactcttcgatatgccagagaggatgcctataaattctataatgacaaaagtattcttggtcgaacagattctaatgggaaaatgatttgtgtaaccacaattgatgatatcaaggagcaacttgtgtctacagattgtgctgactgtttgatagagatcgagactgttgatgcacagccatcccatgtggatggtgtgatcattttggttgctggatattttacaacggctgttgtgaaacagaagtttatacaatcattttttctcgctccacaggaaaatagtggctattatgttttgaatgatacattcagacttactgggatttcatttgaggtgaaggtagttgcagctaaccatgataacaaaagcacacagattaccaccctgcccaatgagccagaaatagattcatttaaggagagtgaagtgccaggtgtaccacctgcaggaaacattctcgtcaatgatggagttatcagcacctctgcaaatgttgtttctccagttaagaatgaccctgttgttgagacatatgtgaaagtggttaacgaggatgttgtgaagatacctgtagccgctccagcttcaactcctgttacagctgaggaagttgttaacaaggattttgtgaagattcctgagtctgctccggctctcccttcatcagttgagaaggctgctccagcacctcccgcatcagttgagaaggctgctgcagcacctcccgcatcagttgagaaaggtgctccagctcctcgcgcaccagttgagaaggctgatccagctcctagtgcacctgttgagaaaggtgctccagctcttcgcgcaccagttgagaaggctgatccagctcctcgtgcaccagttgagaaggaagtaactaggaagacttatgcatcagttgttaaaatcccgagggaggacacacagcctgccccagctgccagaccctccaagcccaacctaaatataaagatggttcaaaatacggagaaaaatgtgtcctcaccatcgaaacctgctcatgctactgttaatgccctaccgggcgataagggtgttcctaaaaacaaatcacctgatgagccagggtactcaatttttgttaagaatttaccttttgaagcaactgttgaaatggtcgaacaagagttcagcaagtttggtgctattaaatctggtggtgtacaagtcaaatgccagcctgatcagttttgctttggctttgtcgaatttgagtctcagcaatccatgctagcagcaatcgaggcttctagggtttatttcggcacaagagaatcatatgttgaggagaaaagaaccaaaacacgagttgttgatggtgttatcacccgtggggatgacaatggcaatggcggtggcggtcggttccattctggcagaggtggtggttactatggggacggctacaagcggcagtggggcggtcagaacaacggctactacaacggcggggataacatgaggaacgactactcaggtcgtgtccgtggaccgcaagggaacggccaccctcagaacggccacggctaccatcagaacggccacggctactactctgggaatggctaccaacagcgacgccccaacagcaatgggaacggactgagggtcgagcgcaacaatggcttcaggcagcaaggccctgcatctgcctagaccttgtcatttttgcagtccatccttgatacgaaagcagtggggatattttgatgtctataggtagatactttgtcatggctgaattttgttgtcgcggttgataagagcaatcgtgcgtcctttgactggaactgtaatgaggagtggagtcagtcgtgtcgcaaaggggaaaaaaacatctatcgaaatccctgctactcttttgtcgtgctgtcctcttcaagctgtctgcgtgtacatcggtttttctgcttagcaattggactgggcggagac

SEQ ID NO: 159514 - DNA, 628 bp, Zea mays
  Clone ID: MRT4577_7704C.1
ggttgtttccaaaagctcccggggccgggaccaggcggaattcagcgcacaatgccatgccgccgggtaggttcgttcgtagtcgtactacacgcgcggccggccaccactagcaaagccactccctctctctccaagtagatcgagcaactacacgtgcgaaagggaagttgaaagcgccatagccacgctctacttttgcaattgactgttttctaacaagtcgaaattgacccttaaaccccgcaaatcgaaagcaaatttttttcgacttctcttcttttttttgacaaaagacgtcaagtattgttcttgtttcaatcaagaaaacagaatattttttttgggtggagcatgccatagtaatctaatcctacaggagacacagacgaattctcgcgtttctctgatctctatctatggtctgtgtacgatgctgctctttaccagggcttcatactgctgtccctgcaagcgcacctgccgcagctgaagcccgcgccgtgcgacatggcgtccacggacggcggctgcgagaaggcgagcggcttcaagtcgaccgtgttcttcctggcgctgtacctggtggcgctgggcagcggctgcctcaagcccaacatgatcgcgc

SEQ ID NO: 159515 - DNA, 374 bp, Zea mays
  Clone ID: MRT4577_77050C.1
atcccaaaacccggagaaagggggggtggttaccaggcccggggcagggaaaataaccccaatgctttgcagcttttttttaaaaaaaacccaggggtttgtttttgccttttggggccggggggatttgtttcctcaaaacgctaaaaaggaactccagggacggggtacccattggaaagggggggaccctcaccccattggccatgtcccggggggaggaaaacccccccgggtgggggggtgaaccttttgaccggggaaggaaaatcatccccctgggggatcccctggccaaaaaaagggaatcggggggggccttgctaaaaatttttttggttgccaggtttaactgttttgaagaaaattccatt

SEQ ID NO: 159516 - DNA, 1175 bp, Zea mays
  Clone ID: MRT4577_77051C.1
ccggccggggctcctagcgacagggcctgtctgttctccttccgccgcaccacaaaacctccatggatgagccgtctcccctagagttggccgacggagatgcagtcctatggctcccagagccggccgccgtagatctagctccgcagctcccagatgaggtggatgtggaaccagacggagtggatccggcatccccgctgctcgtcgttagccccagcctcgtcgtggatcctgccccaccactccctctcgattgcaaggtggatcgacacagagatgaccccttccagcccgccgtggagacgacgcttgccttccagtctgacacggagaggatcctgctactgcgttctctgtccatccccaggacacaggtgacagcgatgacagatcggcatacttgtacttcaagtgccaggagaaggaccaccactcccactagctcgtgggttgctggactagctcttccaatcttgatgaagaaaccaaacatgggtgccaaagagttacaaaaagagttgcaagacaaatggaaatgtaccatttcctatgacaccgtttggaagggaagagaaaaggcctttcttgatttgcatggtgcttgggaggacagctttcgactattatttagttggaaggaggcggttttggaaaaaatgccagatagtgttattgagattgatgttcaagaagaggatggaaaggtgtttttcagtaggtttttctgtgcttttggaccatgcataaaagggtttcttcaaggatgcagaccatatctgagtgttgattcgacagctttgaacggtaacagacaccactcgccttgtctcatgcattggaagacgccggttcatcgcagccttctgcaagggtagctgagtcccctccaaggcaaactaggatagctgtacgcaaaatgacaccgaagaagaagaaaatttcgtccatgatttaaattgtagttgtatgatttggaatgtagttgtacggtttgaattattgttctatggtcactttgaatactgtgtgatttcaatatccaaactgcagccagacaaaactgcaattgtggacagaaatgttcttcttcttgctcactgtttggacaaaactgctatgttttttctaataatctagattcattcatggttgggcaaaaaaaaaaaaaaaaa

SEQ ID NO: 159517 - DNA, 293 bp, Zea mays
  Clone ID: MRT4577_77052C.1
tcacagctaccggagccgaggaccgaaaaagccttgcttccgccggccctgatggtgcttggtgcgggaccatttatcccctaagggaggggacagaaactgcggaatagcgtcttgatgcagccacgtgacagcactgaaatcttaaaatcctaccacagccttttctatgacaaacgagagagttctgggggcagcaataaacgatctgaacttgcgccgcaaaaatgggacgaaggcaatagagaaaagggccgtaggggacgaggacgctgcaaaactaagggagcacc

SEQ ID NO: 159518 - DNA, 233 bp, Zea mays
  Clone ID: MRT4577_77053C.1
gctgatccttagcgcgctttttttttttagcgagggtattaacagttgatggaccatatttatgtgttacgttcgctattaacacagcataaaatattagccgtccatcaaatgatggtcgtgtgtctcctgtgacgccaatcaaatcactgttctacaaagtacagcggcaacgtacgtatcagatctgtgcgccacgggaggccccctgcttcatgttgatcatcttgcta

SEQ ID NO: 159519 - DNA, 460 bp, Zea mays
  Clone ID: MRT4577_77054C.1
gtctttgcctttttccgacggcctcctaccctacaccactctctctatcactaatatcactgggacgtcccctgaacgacaaaccaccatgatcatccccatagaagaaccgcaatgagatctgcaagaacctcttctaagaggcactgttggatggcaagaacgactacaacctgtgcaagcacgcacacgattgatgcgactaacctccagcgtgatcaagctcgtgcagaggttcaagtaccaaggtagtatgtacagagagaccttctcatggcagaactactactggaacctcaccaaccatggcaatgagcagctaccaaactacctgaacctcccgactaacatggtgcctggcacgctcaagaactctgacacgccactggaggcgtccagtttggctctggacctcctggtgaccgcccaaggtgccctggtcaatttgaaaacagaccat

SEQ ID NO: 159520 - DNA, 269 bp, Zea mays
  Clone ID: MRT4577_77055C.1
cagcaaactaacaaggcaacatcgttcgatcgaggagaggagctgcgttcttggcgtggtggcggaatcggcgatctaccggctgccggaggagtgcgtggcatacgccatctcgctgacgacgcccggcgacgcgtgccactcgtctgcggtgtcgccggccttcagggccgccgcggactccgacgccgtctgggcgcggttactgctgccggtccacgccgacatcctggcgcgcgcctactacccgggtgctgtttccgtcggtt

SEQ ID NO: 159521 - DNA, 432 bp, Zea mays
  Clone ID: MRT4577_77056C.1
aaaaaattccctagcccccaaattggggatttttaaaaggaattgggcaaaaaaacacttacagctccccctccaccaaacagggttttgtttcaggtcccggttgttccaacctttttgggggggcggggggttccccgggtccccaaagcccgctaaggttcaagcccccttttttacaattttaaaaaggggccgaattttaagggaagccgttcgcaagccccactttatttgatcccagaggcgtttaaaaaaagctaaaccccccatgcgaatttagcgcaaaggaaaccggtctttaaaagattcgaagcccaagctcaaaccattttttgaacaaacccccccagtcctcctaaatttggcaggcagggggaaacattaaatattttttggggcgcctgctgccccccctggagggggaaccct

SEQ ID NO: 159522 - DNA, 618 bp, Zea mays
  Clone ID: MRT4577_77057C.1
cattgggtacctcgaggccggccacacgcgactgcctcttctccgacacgtggcgtgacggcgcgagattgctcaacatctggaacctgaacaactgcggtggcgtgatgtgagtgatcaactgccagggagccgggtggagccgcatgaccaaacggacgagagtgtacgacccgtcatctcgcacgctgacagccaccgcgcatgccgattacgtcgacaccataacgcgcttctctattgacagctgctcctgacaccgccagaccgcgccgcatgcgcactcgcacccggcatctagtgcgacttctgcgactcgtcgcgctgcccgtgacggtacgcccgctccagcatgatgcgttacatgtgagtccgctcctatccgtcctgccgcccgtctcgttcgcgcccgtcgggctgctgcacatgttcaactgccgcttcacgccgttgaggagtgtgacgtgatcaccgatgctgatggcaagggcatggttctcaggtgtcgcgtgtgcggtcggttcctctcttactgctcgcgttatgcgccgaggagactattgaactacttcggaacgtagttcctatactatattcacactgtactatcgtccgtct

SEQ ID NO: 159523 - DNA, 1131 bp, Zea mays
  Clone ID: MRT4577_77058C.1
atcaaactctggagaacaacaaaaaccagtcacctagaaagcaattcgtacggactgtgattgccacaagtgaacagggggcatctttaaatctgaaggagggccaaaacttggtgacctttagcttctccaccagagttcttgggaagcaacaggtctgacgtgctgggtcaggtcatgcctttggttggacgtgattggagtcactcaagtgttgctcgcctcttatacgtccctacatacccttgtcaatgacatgtttccaccaacaactctggttgagcaggtcagttttttcatatctgctgaatagagtggtattttgcttgtcttaggcatggactggaattatgtcctaatggaacaattgcatcggttagatctaacggcttctaacattccatcatttcgtttttagctacattttgtctccaatacccatgatttgctagctacataatatttttaatttttctaatcattagataataagttcatagtacatgaatactgcaatcagtccccgatccttgtggcatctatgtcaaacactcaactactcaaaacatacattggacaaatgcgtgctcatataatttccttgtgctgaatgttgtgcaggaagactacaacaactggaattactggaaggtgccattaccagatgttgatttgtagtgtagttttgacagaaacagccgtagataccagtagatcctgcaaaagcctagcagtagagcttcctgtaccctaattttcagccaccacgacggttttaggtccaatttgtgaaggtctcaagaattccgggatgtatggttttctgaaagccaatggcccaaggaaacgttgccactttatttccttcgacggagctttcacgtgatcatacggcttttgggtagtcatctgattgtcttcgtcgaacttgttgtacccagaggtctgagccctagaccctcgattcattagagaactcgtgatctggtcattgtccaagctactttgttctgattgcaggaaatctttaggtgccaaaagcagctgtacattttttttttcgtgatccaaaaacagctgtacatcgtatatcagcgcatagaagagaattgctaagcatatctgcatctg

SEQ ID NO: 159524 - DNA, 1682 bp, Zea mays
  Clone ID: MRT4577_77059C.1
cggctccgtggggtgtttcaacagaatcttgcatatgaggaggatttcaaatcatctggatcaacaatgataaaaaatgcaaaccttattgtcaaagttgacaataattatttcccctggaataaagtttctcatgttattcttgggaaggctgtatatggctcaaagtttcccttagaacccactgatgctgttccggttgaacaacaggaaacacccaaatcaagagaggactctcttagaatgtctccctcaagccggagatggaggctttggctcaatccctttcggataacaagatcccttcaacgtagtaacagtgattcttccgaagacattttccttgactcagagtctgttttgagtccaatggatgatcaaactctggagaacaacaaaaaccagtcacctagaaagcaattcgtacggactttgattcccacaagtgaacaggtagcatctttaaatctgaaggagggccaaaacttggtgacctttagcttctccaccagagttcttgggaagcaacaggttgatgcacatatttacttgtggaaatggaatgctaaaattgtgatatctgatgtggatggcaccataacaaggtctgacgtgctgggtcaggtcatgcctttggttggacgtgattggagtcactcaggtgttgctcgccttttttctgcaattaaggaaaacggttatcaactactattccttagtgctagagcaattgtccaggcatatctcacgaagaacttcctctttaatctcaaacaggatgggaaagcactacccaatgggcctgttgtaatttcacctgatggcttgtttccttcactctaccgagaagttatacggagagccccacatgaattcaagattgcttgcctggaggacattaaggcactctttccttctgattacaatccattttatgctgggtttggtaacagagatactgatgagctcagttacaagaagatgggaatacctaaaggcaagatttttatcatcaacccaaagggtgaagtggctgtcaacagttctgttgatgtgaagtcttatacgtccctacatacccttgtcaatgacatgtttccaccaacaactctggttgagcaggaagactacaacaactggaattactggaaggtgccattaccagatgttgatttgtagtgtagttttgacagaaacagccgtagataccagtagatcctgcaaaagcctagcagtagagcttcctgtaccctaattttcagccaccacgacggttttaggtccaatttgtgaaggtctcaagaattcccggatgtatggttttctgaaagccaatggcccaaggaaacgttgccactttatttccttcgacggagctttcacgtgatcatacggcttttgggtagtcatctgattgtcttcgtcgaacttgttgtacccagaggtctgagccctagaccctcgattcattagagaactcgtgatctggtcattgtccaagctactttgttctgattgcaggaaatctttaggtgccaaaagcagctgtacatttttttttcgtgatccaaaaacagctgtacatcgtatatcagcgcatagaagagaattgctaagcatatctgcatcttgaaacccttctttcttgtgctctaaaagttggatttgataattgttgggcc

SEQ ID NO: 159525 - DNA, 561 bp, Zea mays
  Clone ID: MRT4577_7705C.1
cacgcgtgcgcccacgcgatcgatacagctatcactgtgtactcgaacagcaagaatggccaaggttctgcaggccgctgttgctctcctgctggtggaagcgctgctgctgctagccaattgcgacggcagggagctgaaagcgagcggcgcggcggcgtcgggcggtgccgccgccaacggtggtggtagtagcgggggcgacgagaaggccacgggcttgccgctgatcccgccactgccgcccgtgctcggccccgtggtgccgctcccgcccgtcgttcctgggatccctccggctcgtgagtccgacaagtttccgtgagtacgtgaccgtgtgcgagctaggtctgtaggccaagcatgggtgcctctcggggtggctcctgctcctgaaccgaacaagttgccgcgttcgcgtctttgtcatgtacctttatagctaccttgcattttctgttgtgtggtgatgtatctacgcgtcgcagatcgacttcgtgcttttgagataaaaaccagaatttgcagctcgtaaacacgaagtcgctctgctctcaaaaa

SEQ ID NO: 159526 - DNA, 181 bp, Zea mays
  Clone ID: MRT4577_77060C.1
tgttcactcgagggcaggtacacagagggggggggattgtaaattgacatcgagtgtctccaacctggaggagggtatcaagacagcaggtaccaaggggaacgcatacaattagataagaagtatgtggggaagagaccaaatcaacatcaaatgaactggggatgactgaccccgcggc

SEQ ID NO: 159527 - DNA, 453 bp, Zea mays
  Clone ID: MRT4577_77061C.1
aatcttgctaaaaagatgctaaaaccatttaactccgtttaaacacatttaaacactaaacaaagctttaccggttacgttacccttggtcaattggaatcagaagccgcccagtgaagcacacaagttggtcgaaccctttggggtttattggttattgggacttcccccccctccccaattggagaaacccgcccttccccccttaaagtagcccaacttccggttccagtgaggggttctggtgagttacaagggaactttttttttcaaatttttacagccccgacaaacaaagccaagatgggtgataatgggttcatcaatcatcaattcaattggggtaattttccaaggatgcgtgcgggttggggggccttggggggggggtgggctccaccgtgggcgaaagcgggaaaggcgttcaaaaaaagtcccttggcaagtcccgga

SEQ ID NO: 159528 - DNA, 519 bp, Zea mays
  unsure (1)..(519): unsure at all n locations
  Clone ID: MRT4577_77062C.1
tcctcgcgtccggccaaacccgagcgtcctgagttcctgaccaaacaatcccagtactgcgattcgctcgggatcgtctgcaggtcccaccggccgatccatccccccgtaaaccgtaaccttccgccgatcgcttcaatggccgtggcctcggccgcgcggacggcaacaccggcgtcgccggcgcgactggggtcgctgtggtcgacgctggaggaccagcgcggggcggcggtgccgctgctctcctcggcctggaccctgccgacgacctcccagggcggcatcgccggggacggggagcagctgcccaaggagggcctgctccggcgggccggcggcgttgtggcccgctggtggggggcggcgtgcggccgcggtggcggagctgtgggccttcgcgcgggccgatccgcggagcccgtgttccggngaaggttgcgctcgcgctcgccctatctcgtggtcgtcttctccggaagccggcgacattgtcaccactccgttgggcaatctacc

SEQ ID NO: 159529 - DNA, 864 bp, Zea mays
  Clone ID: MRT4577_77063C.1
atacccgctcggttcggcgcctctgcctccttggccgctccccgttcccgtcaccgcgccgccggccgccaggatcgcccgccccaccatcctggctcatcagtcctcgccgcgagccccgtgcctggaacgccgcttgcgctaccacgccgcggtcccacgcccgctcccgttccagcgacagggggttactgagacgagatcaaccgtaacctgactgactcgctgacggccttgcactctcagcaaacccgtggcacaagtgggcaccggggaatcagctaaaagcttgagccttcgctccaaacctccatggaggcggaggccaggaacatccttgaacgcgccgcggagtcttccttcccaccgctgcacgccgtccaccacctcctttccgtcggggtctgtgtgcgttgcatccttcgcctgcttggagcctatagcagtgcctgctcatatgcatgtcttacggcatcagttttgcattcgttccttgaagaacacgatgagtccataaaaggagggtcctgtccatgtctatcgatgaatgatgcatattgctctgtctgcttgggagtattgctcccaaccttccatcgaaatgaaggtctggagacacctaatggcatttctcatattgacaacatgtcttcagtgatatctcaagcagtgcacggggagagttaccaagttgatgagttttctctagaaatttcactaccgccggttatagccgccaatgagcgtgcagttagattatatatgaaacaaaaatatggcaatgagaattggttcaaggacaaaatgtttgcacaacaaacaatgtcagtgaaggaagccttgcgacttttgatagcaccagca

SEQ ID NO: 159530 - DNA, 862 bp, Zea mays
  unsure (1)..(862): unsure at all n locations
  Clone ID: MRT4577_77064C.1
cggccggggccggggaaaccaaaccaaaccaaagcaaagccaaggagaaatcggttgctcgaaccctatcctctcctctcctccccgcagccgcccaaaaccctagcgccggatctttctcccccctaccgaccgtcaatccatccatgatgggagaggccaaggagaacgacgtgtacgaggaggagctgctcgactacgaggaggacgacgacaaggccctcgacgcctcctccaacgccaacgccaagcccgccgccgacgcctcccagcccaagaagggctacgtcggcatccacagctccggattccgcgacttcctcctcaagcccgagctgctccgggccatccaggactgcggattcgagcacccctccgaagtgcaacatgagtgcatccctcaagcaatcctcggaatggatgtcatctgccaagcaaaatctgggatggggaagactgctgtctttgtcctgtcgtctctccagcagatcgatcctactgctggtcaggtggcagcgctcgtattgtgccacaccagagagctggcttaccagatttgcaacgagttcgagaggttcagcaaatttctgcctgaattaaaggttgctgattcttatggaggtgttcacatcaagaaacatcaggatttgctcaagaacgactgcnccccacattgttgtgggcacancctgggaggattctagctctagctagagacaaggacctctctttgaagaatgtgaggcatttcattcttgacgagtgtgacaagatgcttgagtcactggacatgccggagggatgtccaggnagattttcagatgacacctcatgataagcaggtcatgatgtttttcgcact

SEQ ID NO: 159531 - DNA, 193 bp, Zea mays
  Clone ID: MRT4577_77065C.1
gttcgtttagcgggccgtcgaacgtgacggcgatcctggagaaggggggtcagttgaccatgttcatgccgctgatgaacgagacgcaaaatgacacgctgctgaacagccagctgaacatttcgtactccagcagcggcggcgtgtacacggaggttgagcccaccgacaacgcctagaacaacctcaagcc

SEQ ID NO: 159532 - DNA, 658 bp, Zea mays
  unsure (1)..(658): unsure at all n locations
  Clone ID: MRT4577_77066C.1
tcttcacatcctctcgccaatctagcttcctatgtccaaatcctgtcattaaaccatttaggggcttctcaaggttcctagggtttttgttaattagcttatgtgtggcgacttattattaatcgagttctctccagtgtgatttctagggtacatgttttctgtcagtagtagttctattgattacgcttaggattaaggaattttggtcagtaggtgtgtgcatggttttttttctcgaaaaacgcaggagaactgcgcctcattttattaggtaggaagaaaaagggtcagaaaggacccgaatacaagacctccttatggaggccagaaacaagcataaaggaaacaatccatacacaactaaaaggtactacttatctcagacattggtactgggagcagctaaaaaggaaagacccttagctcctgcaaccatccatttctccctttcctcagcagtggcctctaagattgtagtgatatatgggggggngggggcgtcaaacaccactctgtttctgaacttccagatcatccaggctctcagaatcaaagtgaatttacccccttcttggtcatgtctgacacaatatcagcaatacgtttccaccactgcaggaagtttgtgtcatcctggagagggcaagatgtggag

SEQ ID NO: 159533 - DNA, 362 bp, Zea mays
  Clone ID: MRT4577_77067C.1
gggccggcaaaccaatttagccctttttgggaaacaggggaatacattgtacttcccccccacaacaaatgtcccttccagcgggggattaaaacacagggggtgatttgctaagcacaacatttcaaagttttgacctaggccttggtagcatacttcctcatgggggaggacttttaacgctttttttccctttcgggcttcaaaaaaaggtggtgcttggtcaaaccggggggggtgggccgggtttttttagggggggggtcgagggggagcaattttttttttttgttcgcctcccgcaacgccgatttttttttttgggaggacccttggggccccccccccatagaggggccccc

SEQ ID NO: 159534 - DNA, 223 bp, Zea mays
  unsure (1)..(223): unsure at all n locations
  Clone ID: MRT4577_77068C.1
taccctccnggaccggccgggnaccctaaccttatcggtgctgccagggtagaacacagccaccggcgattattggtcgtactcgcagtgccggcgcgccatatcggtaccaaggcgacggaggcggtgatggctggagttgatggcatcctgcacctcaggcagacgcacgttcatgagagcttggcgatgtcggacctccctggcagtcgatctagcagca

SEQ ID NO: 159535 - DNA, 396 bp, Zea mays
  Clone ID: MRT4577_77069C.1
aggacgcgtgaggtcgaccttcggttaagactcttccaagcgcaacccactcccgtgcgccgtcgtcttcaaccttgagtccgtgcttgctgcccaccgccctttctttgtcgaagtcaacaccgccgccgcagccgtcgaggttgaagcctcggctccagaggatgccccctctggagatggtgcccccgctgaggcccatcctgctgctgacctgtgccggggggatccggtccgtgggtctcgcggctctcgtcaacaccctcgttacctgcccccgctgcgacgttcacgtgtgtgctacctaatcggacaagccaacctgtggccactcaattaccatccgtgaaaccatcacttggacatcagtggatttcacaagtgctaaagcttttt

SEQ ID NO: 159536 - DNA, 164 bp, Zea mays
  Clone ID: MRT4577_7706C.1
gctccggcggacaagatatcctacgacaaacccaatcacacgtacctttttaatcttcttactgtaccctaacctccatggggagaggggtgtcaatagcggtttttaacccgtccctcatgctgatggcggagctatttacccctgaaaattcatgccactgc

SEQ ID NO: 159537 - DNA, 1881 bp, Zea mays
  Clone ID: MRT4577_77070C.1
actaagttgaagttatggtaccagcagcacttagcttgtctggcctcaactctctctggacttgctcatgggacacctgtacgcaacaatgtggacagccttcttaatcagatgttcagaaaagctaataaaggaggcacatcgataggttctttatctggaagtagcagcataagtaattcttccggtcctggtggggatgattcacatctttggcctcagttgccagcttgggagatactggaggctgttccatttgtggttgatgctgctcttactgcttgttcccatggaagactatttccacgtgaactggccacaggcctgaaggatctggctgatttcctccctgcatctcttgctacaatagtaagctacttttccgctgaggtgacgcggggtgtctggaagcctgcatccatgaatggatcagattggcctagcccctctgtgaacctatccatggttgatgagcacatcaagaaaatcgtagctgctaccggtgttgatgttccaaagctagttacaggaggaagctcttcaggtacacttccgttaccattggctgctttcgtgagcctcacaatcacatacaagcttgacaaggcatcagagtgtttcctcaaccttgctggtccagctctagagaacctggctgcaagctgcccttggccaagcatggcaatcgttgcagcactgtggacccagaaggtgaagcgatggagcgatttcctaatattttcagcttcgcgcactgtgttccaccacaacaacgatgcagtcgtccagctcctccgaagttgcttcgccgctacccttggcatgtcttcgacatcagtatgcagctgtggaggtgtcgccagccttctgggccacgggtactgccctggtggtttctcgccagttgcgccaggaatcctctacctccggatattccggtgcatcaaggactgctccatactcgccgaggacatactctcccttctgatgctctcagtgaaggatatcgcagaaacaactgtgcccagacaaaggccagacaagctaaagaagaccaagtacgggatgaggcatggccaggtatctctttccgctgcaatgacgcaggtgaaggtggcggcatctctgggggcgacactcgtctggctatccggcggcacggctctcgtccagtccctgatccaggagatgctgccgtcttggttcctgtccgcgcagaacctggatcagggcggggctagcggaggcgtggtgtacaagctaggcgggcacgcgttggcctacttcgcggtgtactcggggatgttggcctggggcatcgaccagacgcccgtgtcccggcgccgcgagagggtcatgcggtcgcacctggggttcctggcgagcgcgctggccgggaagatcttcctcggctgcgacctctccctgtggcgagcctacgtctctgggttcctaggactggtggttgaatgcaccccgtgctgggtgcaggaggtggacctgagggtgctcaagcgcctgagcagcggcctccggcactggggcgaggatgagctcgcggtggcgctcctccgccgcgccggtcccgaggctatgggcacagccgcggagatgatcttgggcagggagttgtgacgccgatgcgcgcgcgcgccgcgcggcgtatgctgttcgtcagcgatgatgcagtttttgtatataatcggttaaaatctggccatgtgtatgctcacgggtaatatttgaatgattttatctgtaaaactgttaagacgttttgatctctctaatactaaccttcatctacccgtttgcaaaaaaaagaaatgatgtcccagaatgtaaaacctaggtttatgaacggacatgtttggcacagtt

SEQ ID NO: 159538 - DNA, 171 bp, Zea mays
  Clone ID: MRT4577_77071C.1
atataaaaatgacactttcagaatacattgactggcaggttacattaatcacgcacacaggggtcacagaacaacaacagctattgattacatgactcctcctagcacatagaaaacacgctcaggtcaagagacatttttccaacaaagatgatacatacatgccacaag

SEQ ID NO: 159539 - DNA, 308 bp, Zea mays
  Clone ID: MRT4577_77072C.1
taattgcccaatttcaacattttttttaggcacaactaaacctacaaacggtgggatcgtatcagcaacaacaggtcttgccatcactgagccacctagccgtggtgaaccctgtctcctacttgcaacagcagcttacttgcatccaacccacttgctctggcgaacgtagctgcataccatcaacatcaacttttgcaacagtttatgccagcgctcattcaactagccatggtgatccctgtcgcctacctacatcagcaacaattgctttcatctagcccgctcgcttgtgggcattgcaccta

SEQ ID NO: 159540 - DNA, 1116 bp, Zea mays
  unsure (1)..(1116): unsure at all n locations
  Clone ID: MRT4577_77073C.1
atgtgccatgccagttaagtnnnnnnnnnnnnnnnnnnnnnnnnnnnnnnnnnnnnnnnnnnnnnnnnnnnnnnnnnnnnnnnnnnnnnnnnnnnnnccgggctcgagttttttttttttttttttcaagcaaatatcaaccaatatatagttgttcattccaaataactcaactaataaagaagaataagtggcaccctagtcagtgggcatctattagactgtacacagaccacactctgaatctattgctaaccctgttcactttacagaccgcacaccaacacttctgactttaaacttgtactgtggcagctcatcttcctcatcgtcctcgtcttcacttgaatcctcttcaattttgtcccattttgagtagtcaaggcctgaatgactcttcggttttgggatggcttcccaaccctggggttttgaaggcgaagtggacggaaccacagcctttagaggttcagttgcaggttttctatggagaattggtccagctgaaggtttgttctcgaggaccagtttggttgctggttggtcaggcttagcgatagaagaagtgtcggtcttctgaactcgtggaggaagttcttcctcttcctcttcacgacaaagggactcctcttcacactcaggaattggggccagtgacttcaaaacagtacggcctccaggcggattccgatacacttcagacgacgggtttatctcaatgagcctgttgacatcaaacagagctgactgataatccttcagagtgacgagagtctgggcacgtaacatcagagctccagcatgctccgtatccaactcgaggacagatgtacactcttgtgctgccttgtggaagtcgtggagctttaggtagcaggcggcgcggttgctgtggagcgcgatgcgctgcgcggggctacgcgccgcagccagcgcggcggagtagagctccagcgcctcccggtggcggccgccgcggtagagcccgtgcgccctctccaccgcctccgcgccggcgccctcggcagcccccgccatcgtccgcgcgaagaacccggcggcggctcgggggccgagtgaatcgaagatgggattggaatccgcgcagataggaac

SEQ ID NO: 159541 - DNA, 306 bp, Zea mays
  Clone ID: MRT4577_77074C.1
ttgttttcttcgttccgcatcatttccaggggacggccctgatcaagatctggatctatgttttctaaaaatatcggactgccagtatccaaaaaacaactgcccagcgaccattgtccactcgctgccgagtatgatcacgaaaacaataacaactacattatcgacctaagcatgaacgacactgtgcactgaccgtgaaagcactttgaattttactactacgactgaatgactcccaacttctgaggcaagggatttgctcccgtaagtctgacgcatccctaggccatccaattgcggacc

SEQ ID NO: 159542 - DNA, 1950 bp, Zea mays
  Clone ID: MRT4577_77075C.1
accaaccaaaatctaaaacgcttgaatgaagatgtcatcgattttgatctattggaagacttgatatgctatattgatgagaactgtcctcagggtgctattcttgtttttcttcctggagttgcagagattgacttgttgattgatagattatctgctttagttagatttggaggggcatcatctgattggatccttcctttacattcactgcttggaccctctgatcaaaggaaagtgttccagtctccaccagataacttccgcaaggttattattgccacagacatagcagagaccagcattacaattgatgatgtagtatatgtagttgatactggaaagcacaaggagaaccgttataatccacacaagaaaatgtcaagcatagtagaagattggatttctcgtgcaaatgcaaaacagagacggggtagggctggtcgtgtgaagcctggtttatgtttctgtctgtatacaaggcatcggtttgaaaacgtcatgcgtccatttcaggtgcctgagatgttacggatgcctttgactgagctgtgcctgcaaataaaatcacttcatcttgatgacatcaaatccttcctgctaaaggcagtagagccccctaatgaagaagctatttcctctgcagttgacttgttatacaaggttggagcttttgaaggacatgaagagttgtcacctcttgggtatcatctggcgaaactgcctgttgatgttttgattggaaagatgatgctttatggtgctatctttggttgtttatcaccaattctgtccgttgctgctttcctgagttataaatctccatttctctctccaaaagatgagaagcaaaatgtggagaaagcaaaagccacattattgaatgagaaccttgatggatctagttctgtaacagataataaacaatcagatcacctgctaatggtaattgcatacgacaaatggtcccgcatactgctacagaatggtgataaatctgctcgtcagttttgccattcattctacttgaatagtactgtgatgcacatgatcagggacatgcgtcttcagtttgctaccttgttagcagacattggacttatagatcttcctaaagatactctgaggcacaaggtgggcagtagaaaaaataatctcgagagctggttttctaatatgtctcttccattcaatgcctatgctcgctgcacctcggttattaagtcggtgatgtgtgcaggtctataccctaatgtggcagcatctctagagggtgttgatcctggagctctaggtggaagaaagccatctgatgttctgttcagtaaggaccgtcctcgatggtatgatggaaggcgagaagttcatatacatccatcatctgttaatcacagcttgaaagctgttcaatatccatttttggtgtttcttgaaaaggttgagacaaccaaggtgttcttacgtgatactagcgtcgtttccccctactcacttcttttgtttggtggttccatggtaatccaacatcagacaggagtggttgttatagatggatggttgaggctgtctgctgctgcacagactgctgttttattcaagcaacttcggatgactcttgatgctgttctaaaagaactgacaagaaaaccagagatggcaacttttgttgacaacgaagtggtcaggtccatcattcatttattgttagaagaagacaaggctcgataagcatgaattcatggcaatcctatcgatactaattttttagtaaaaacactatcggtccctaaaattttttagtaaaaacactgtcggtccctaaacttttaagtgtatcatccggttcctacactcctaaaatgcacatcgagctttctttggtagggaaacttgtatgattgctcgtttgaatcattctactgcatatcactaataaaatatattttttct

SEQ ID NO: 159543 - DNA, 432 bp, Zea mays
  Clone ID: MRT4577_77076C.1
cggacgcgtgggcggacgcgtgggtgcattctttgcgatctcctttttcccccctcatcagatatgtgtacagtggcctgttgaatgcttcatagaagcatataggctgatgtctttttcatcactgtgcaacttgccaccaatattccatctctgtcgagtccaacacatatagaattgtactgtcttttttcaaagaggtgcagagatcatgcacaccaaagcagcagcagcatcctattgaagaccaggattttgaagaatctataactaatcaagaagcagaccattatgattgttggtacgagagcaggagatcaggtggcacgacaaaaagtatgctgagagcgcaaatgtattgttaagtaaccaggtgacattgtgctgcataacaaatgaatgaagtcaaatgaactgaataatttgtaaaaa

SEQ ID NO: 159544 - DNA, 645 bp, Zea mays
  Clone ID: MRT4577_77077C.1
gccggccgggccgggaatctgcggaggaggatcgtgcctcgtgccccacccctctctctaccttcacagctcctccctctttatctctctctctccttcatacagcttcgccctccacctccatcctcttctttactttaaatgctactcccactagcccccctctgaatacctgatgattatcgactgatgaccctctgtacccattgctgaactgattgatgaccttaaaaatgacgacatccagttgcgcctaaactccattagaagactcttcgacaattgcacggcactcttgagagaagaaagaaccaggaatgagctgattccctttcttagtgaaaacaatgactatgaagatgaggcgcttcttgcaatgattgaggaactgctcgagctcattccttatgcagggggtgaagaacatgctcatgatgtgcttcgcccctttgcaaacttgtgtactgaagaataagcttgcgtccgagatacagaatgtgaatctctgagacgtattggagaactgctgcaggtaactgacatagtccactggatcattccagtagtaaagagctagcagatgcctgacggtgtacatctcgggtatcatcctgcgatattttccacatactctatccaagtgta

SEQ ID NO: 159545 - DNA, 2138 bp, Zea mays
  Clone ID: MRT4577_77078C.1
ccggccggggggtccctcggaccgcagacgacgactacctcagccgccttccatggcgcccctctcctgccgcgaccttcccgcccggctaccgactcttccccaccatgctagcactcacccacacctctccttcctatcgggcggcccagcccctcgccgatggcgatcactcaccacctcaaacactctgcgtcttcgcttggcggccactaaggacgacgcggtcgcctccctcgtcggaaggctcgagcacgacgtggcgaacgcccagtaccgcgacgacgttctggaagaagaagacgaagagcagcgggaggaggaagaagaggagcagcagttccttgacgacgacaacgctcggcgccgcggcgcggggaagcatcgggacgagctgcgcagtcggtggcgcgagatccacgggtgcgacgactgggcggggctcctggaccccatggacccgctgctgcggtcggagctgatccggtacggcgagctggcgcaggcctgctacgacgccttcgactacgacccgtcgtcccgctactgcggcagctgcaagtactcgcggcgcgacttgttcgagcggctgggcatggcggacgcggcgcgcggctacgtggtgtcccggtacctgttcgcgacgtccaacatccggttccccaacttgttcccgcagtcccgggcgggcgccaggatctggagccagagcgcgagctggatcgggtacgtggccgtgtccacggacgaggagagcgcgcggctggggcggcgcgacatcgccatcgcgtggcgcggcacggtgacgcggctggaatgggtgtcggacctcatggacttcctccggcccgtggcggaggagggcatcccgtgcccggaccgggaggtgaaggtgctggccgggttcgtggacctgtacacggaccgggaccccagctgccggttctgcaagtactcggcgcgcgagcaggtcctgacggaggtccgccggctggtgggccgctacacggcggcgggggaggacgtgagcgtgacggtgaccgggcacagcctcggcagcgcgctggccatgctgagcgcctacgacatcgcggagaccggcgcgaacatggaggccgcgcccgtgtgcgtgttctcgttcgggggcccgcgggtgggcaacacggcgttcaagcggcgcttcgaggaggagctcggggtgagggcgctgcgggtggtgaacgtgcacgacaacgtgacgcggatgccggggatcctgctgaacgagggggcgcccgaggtggtgcggcgcgtggcggaaggcctgctgcgtgtgccctggtgctacgcccacgtcggcgtggagctgccgctcgaccacaagcgctcgccgttcctcaaggacacgctggaccccgcgtgctaccacgacctggaggcgcacctccacctcatcgacgggtaccacgggcgcggtgagcggttcgtgctggcgagcgggcgcgacccggcgctggtgaacaaggcgtgcgacttcctcaaggaccaccacggcgtgcccccgtgctggcgccaggacgagaacaagggcatggtccgcgcccgcgacggccgatgggtccagcccgaccgccacggctggcacctggacgaccacgaccacgaccacggtgaccaccgtcaccaccaccaccaccaccaccacgacggtcaccaccaccgtcatcacaagaagcacagcaccgagggcgcccggcaccaccaccgtcacggtcacggccaggacatgcagtctcatgcataggccaaagcatgaactatatatagctctgaccgttcccgtcccgcgggacaccagttgtccgcgtgttgatgccgtgccgcacggagatgcaaacctagccgtggagaggagctgaaatattgggatcttatctctcgatcgatggtcatgtgcgatgtgagcgtgtattattattattatattggtgttatcctgattgtacagtgaatcaacacatggctttactggctacggagctcattgcaatttggtaggctcgtgtatcgaaaaaaaaaaaaaaaatagtttccaagtacaatgcaaatacaaacccgctggatccaatggacgggtttgtctattgtcatttaactat

SEQ ID NO: 159546 - DNA, 422 bp, Zea mays
  unsure (1)..(422): unsure at all n locations
  Clone ID: MRT4577_77079C.1
ctgacgcctggtacatgaaacacggaacgagattgtgggcagacatagacaaagagagaatggacggtcaacaggagactgatcggctgttgcggcctgagtatgcgtgcctgagccaaaaagatccatggcgtgcccgagacgactgtaacgtgggagcgctcgtatatccacaccaggcagcacctgctagagaggtacatgacgttcgggatcaacatgcaggactagctgaacgcgctaactaagcgcgccgacgaggatgcccgggcgacgtgcacagtgtcgaaggaactcgacaacgacaacaacgagttcagcgacaagtaccagcagtggataatgcagaagcgaagcgcangcacgtgctagcgccagagcactgaactagctgctggctgtgcttagattagccatgatgc

SEQ ID NO: 159547 - DNA, 2674 bp, Zea mays
  Clone ID: MRT4577_7707C.1
gggaccctcgaggccggccgggccgggttatcaataaaaaatcatcaagtgctcactgtaatctaggttccaagtcttttggaaattcttccatgcctgggaatgattctcatggtattgatgagtctatactaaaagttcatcattagttcaaccgtgtggttcggaaaatttgttggattttctcacaggtgattttgacatgtcggagtcccatataactcaaaatacttttggcgctggagaacaaacaaacttcttagatgatggatttgatgttaatcctttcgcccctgcattggaagtgcctgttcctgttgctaaagtaaacaaggaggttgaagaatgtggcagcacccagctttatattaaattttttgaatccctttctggctataataagggaaagggtcttgactttgagcaaacgatgaagcttgaaataaaacgtccccgtcttggtctttcagccgctgaaagggaccaggcgttgttatcaattggtgtaattcctgccacattagatccaaaccgtttaattgattattcttacctattgaagttatccagcttagctgataatctagcactgctgggccatacagtccttgaggatcgcgctaatgcttcaatagggcttgaaaagggcagtgaacatgctatagacttttggaacatcagtgaaaatgatgaattctgctatggtggggcatgtgaagtccatgctctgtcttcattacaagctttagcatctagagaaaatcaatcggtattcatggaatgtttccagtgtgaaaagacagtttgcaaagcttgctgtgctgggaaaggggccttccttttgcttaacacctacagggagttgaagatatatggtgggagtcaaagtggtggctactcagcactcacagatagttttgtgtgcaaatcgtgctgcagtgaaattatcaaacgtgcattgtatgtggattatgtccgggttcttcatagtttgcgcagaaaagatcgttcagagaaagcagcactgagtgctgtgaatcaggtctgccaactggagtacaagaaagcatctgatttatctcaaagtattcaatttggtcagagacaattgaagcagatccttgatggtgaagaatcccttgcagaatttccatatgcaaactttttacaaatggttgaaactgccaatgactctgaaccactgctttcattactggcgccttttggtactggagagtacacgtcttactggaaagctccacaaggtatcacttcagtggaattctcaattgttcttggtggtttatcagatattgcaggagtttccataattgtcagttcttgcggttactcagcatctgactgcccaattgtagagatatgggcgagtaataaaatacaccgagaagatcgtacatttataggaaagtgggatgtacaggatataatatcttcatctccacagcttcgtggacctgaaaaatctagtagattgagtgaagaaccaagacacattaaatttcacttcccaaatcctatccgttgtcgtataatttcaataaaaatgacactttcccatagaggttctcattcaaccaagtttagtgaggagtttgatcttctatcattgaatgatagctcatcttatgaatcgaagccaaccaatttacataattcatttatccatgcaaaaagaattgtagtttttggcagtttgttgagaaaggagatggagcctgacacatcaggggggataatgagaatgaaaagttatttagacagatcaccggccttggggagatttaggatcccagttgaagctgagaggctgagagataatgatcttgttcttgagcaatatctcttagctaattcacctggaatagctggattccggcttgattctttcagtgttataagacctcgtgtgacccattcaccttcttcatcagagttggacatgagggagttttcattgacacgaatggaagatagatttataaacccagcaattctgtatatacaggtcacagttgttaaggagtccggcaagttggttgtagaggaataccgtttaccagaagtaaaagcaaacacgccactatattttgatttcccagatctacaacaggatgcgcgctgtgttatctttagattgcttggtgacgtcactgcctttgtcgacgacatttctgagcttgagaacttaaacttgcggaatcttcctttggcgtcgggattgtctttgtcaaataagatcaagttgtactactatgctgatacatatgagatgggaaagatcggcagtctctcagctgtataatgtatgtgaggtcgtcgtacatgccaacctgggatggtaacccgtccctagaagattgttgtaacctactgtttctacgtgttgttgtggaagtaagagctgctgctacagatacatgatgctttttttttactgcttctgtattcttgcttctttttgcttttgattagatgaccccagtttgagggatgtagggattttgcctgtagaatttctggaaattcatctctttttttaatgtagaatagccggaaattcaattcgatcgcagtccacgaaactgccagctacgtttgtcgatacctgtattgggacctggattattgtatagagccaagaacttgcattgat

SEQ ID NO: 159548 - DNA, 1596 bp, Zea mays
  Clone ID: MRT4577_77080C.1
ctagtatctctctgctccttccaggccttgcgactccactgtccggctccctcccacagatcttggcttccgtctcctaaccgcagcacaagcacttgcagctcaaagcatccagcccgaagcctacgtcttggagtccgacggacgcattcagccggcgccgcgcctggcggtcgggagagtgcgctttaagcggcttcactccagtccagtccactcccgccaagacgcaaaacctgaaacagatagtccgtttccgtctcttttaaagctcaatttttattatttttttgcactgaacaaccactctgtgttacagacatcctgaaagatcctggcgaggccagcgaaacatcgcagtctgctgtccgtgactgtagaatcagctcagctggtccggacccagatgctagtcactcaccgacgcacagagccccgacaagggaagctgaaataaaagacgagatcggcttgcttctcctcagtgacaaaccgttccttagcagagcagctgagctcataggcgttgatgtgtatggggatctgagtaaccagtgtgacaggatctccaaggctagaacgagaaaccgtcggctctatctggacgcggcaggagagcaactggagctgaaacaccgccagcagaacatcctgtggccttacgctaggccgctgggccggagatggaggtcatcgtcatcggcgtacctgtcgctggaggagctgctgagagatgtcagcgacggggttaggaatctggaggatgggtattgcagtggagatgcccgccgtggcagcaaggatagcctggacgtgaagctggagagggatctcacctcctccgcagatgcgttgatcagtagtgtttgggacatgggctggcaaggtttggcttgtgtggaggcggaatgcttcgtcagagatgccggggaggagatcctgtccttgctcgtcgaggaagctgctctagacatgtgtctgcactgccatagtgccatgtgatgatatgaacatacagcgataagttgctgccatcgggacgatctataacaacttgcagcttcagttcttgtagttgtttttctttttttaggtttgaagtagatttcgtccgtgtaatcaccaggattgtagtagtataggaaccagtgaagtgatgtgttcatgagttcatcaagacatgactgaacaaaacaaggccatgaaaggaaggaaaaaaaaacagaaaaggtcacatacctgtcgtgttttgttgagtggcgacttgcgagcaccaacaaagccgagtcacgggccgagcccacgggagattcctattggcatctccatccgtcctcgtcggcatcccagccacacacacacacacacccctagccacctaccctgctgtcccccgtgccgtcgccgatggagtccttgggcgtgctgctgctccttcaacgcgtacctggagcaggagctggaccccgctatgcacctgtacagtttcaggtcggtggtagatcccccgcgaggagcctgcccccaaggagcaaagatggcagttgttccgaaacagtccagtgcactgttccctgtatcgtcacgctgcagcct

SEQ ID NO: 159549 - DNA, 541 bp, Zea mays
  Clone ID: MRT4577_77081C.1
gccggccggtccgggatctagtatctctctgctccttccattccttgcgactccactgtcctcctccctcccacagatcttggcttccgtctcctacccccagcacaagcacttgcagctcaaagcagccagccagaagcctcggtctcggagtcggagggacgcagccagccggcgccgcgcctggcgggcgggagagtgcgcttcaggcggcttcagtccagtccagtccactcccgccaagacgcaaaaggcttacgagatagaaaaagagattctccatgccctggaccaaactgacggtccatccacagaacatagcgcgacaccgagcgacgaagcctgcccgagcgctgactgggacgaagcatcttctgtgggcgacatcctgaaagatcctggcgaggccagcgaaacatcgcagtctgctgtccgtgactgtagaatcagctcagctggtgcggatgcagatgctattcactcaccgacgcacagagccccgacaagggaagcttaaaaaaaaaaaaaaaaaaggccccta

SEQ ID NO: 159550 - DNA, 504 bp, Zea mays
  Clone ID: MRT4577_77082C.1
gatatctgcaaaattcgtccttttaatacacactcactatagggctagagcggacggccgaccaggatacgttggttatttctgggaagtgccaatcatgatacaaaaactttattattgaacgtgtaactcatgataaatctaaaagagggcaccaccaatgatggcatggtgctagaatactgctgcgtctgtgaaagcatgatgaatgaatggcagctcacgccgcatatgtgagagggtgccagcgttaggcgctgctggctgaaagaacgacaacaactggctgtgagtcaagaaagtggaagaaatcacaccaggtaggtagctgattggtagctgaatgggctgctgtgaataagcaagataagatcaatgctgtaatgcagctgaatggaagaaattaataaactgatgcagctgatagctggctgaatggtatgctatcgcaggtcaaagtagaagcagagctcattgcatctagtgccaatgaatgcaacaaac

SEQ ID NO: 159551 - DNA, 654 bp, Zea mays
  unsure (1)..(654): unsure at all n locations
  Clone ID: MRT4577_77083C.1
aattcggcacgaggcattcccgccgtttattcttagggctcttcctcaactctcgcactgccgccgccgctgctacgcctacgcaaccgtcaccgtcatccccatggcttccacggcgaccacgcgccgccggccgcggcggggttccaagggccccaacgccgacctctcgcgcaccctaaccgactgcacccgccgcggggacgcggccgccgccatggccgctttcgacgccgccgtcgacgctgacgccgacgccgttccccgcctctccgctcaccagtacaaccaactcctccacctcctcgccgccgccgaccgctcctccttccccagcccccccgccgccgccgcgcgccgtgtcttcgcccacatgctccaggccgcggcgccgccctccgaggccaccataacctccctcgcgcgcgtcatcgccgccgacccggcgtcggccgccgatgaggcgttcgagctcgtggccaccatgaaggacaagtacagcctctccccgcgcctccgctcctacggncccgtcctcgcggcgttccggcgtgccggggaggccgctaaggcctacgctgtcgaggcgcacatgacggnctncggcgtctcgcctgaagagcccgagcttgccgcgctcctggatgtcagctc

SEQ ID NO: 159552 - DNA, 480 bp, Zea mays
  Clone ID: MRT4577_77084C.1
ggggggtttttttttttttttttttttttttttggtttttttttttttttttttttttttggggggaacctttaaaacattggcctaatacaggggggaactcacatgggggaaaaacaaactggaaaacataacaacaatttttagcgatcttgggggaagaggccgggggggggggggggggggggggggggtttcccaaatgggttcggggggctaacgggtttttggaccttcagggccctggcgcagggcctgggtgggcgggggggggggagctcccggcccttaatgggaaaatttaaaatttttttattgggggggggccttaggatcatttgggcctgggtccggggcactggggttgggccctggggggttattggtgactttccggacgggggaccggggttttgggggtttgtccatccaaacttttgggcttgggggggggcttggggccaccggatgcggtggggg

SEQ ID NO: 159553 - DNA, 659 bp, Zea mays
  Clone ID: MRT4577_77085C.1
gttcggtcctttatgttttctggattcattaaatctttaccttcccttctcaagtattgccttgtccgagttctgattcttcatgtttggagtgatgatcaaggcaagactgtggttctagacctttctccagttggtaatatgcttcatgtaaggtacctgaaggtggtaagcaacatgatagtcaaactcccactcattattcgaggcctgcgacacttagagacactcgaggtggatgcagaagaagtcgctgttccactggatgttttcatcttgaagagcctgttgcatctccgacttccgagcaaggcttatcagcctgattcagatattcaaaggattgatttaacaaatacatttcctttaagatttctgcccttcgtcagagcgttgtcaatgctagggcggtttctcctctcccatggccatcggattcgccatttgacatcacttcaaagtcttggctactttgacctaagcacttgctccagatatactgtgtggcaacttggcaagctgaccaatttgagggatcttcatctaacctgctctgcagttcgttccaggcatcgaattagcaacatccaatgccttgcctctgttctggggaaatgcaccagcctcgaatctctaactatccgtggcgaagcatcttc

SEQ ID NO: 159554 - DNA, 118 bp, Zea mays
  Clone ID: MRT4577_77086C.1
cgcctccaactggatgtcgctgacatcgctatatacccgggccctgacctcttaccagagatcgtgtcctacccggctcatctttcatgtgcgtgatctgctcagttgcactagcaag

SEQ ID NO: 159555 - DNA, 1807 bp, Zea mays
  Clone ID: MRT4577_77087C.1
atcagtagagacgtaactatacttggacatagtccactgtccaccgcagctccgtcgaccgtcgtacagacgctgccggcgacgcgcgaagaagaggccgcgaagatggccgactcgcccgtcaccatggatgatgcgttccgcgtcctccaggacggcgcggtcgccgtcgccggcgaccgcatcgccgctgtgggcccctccgctgatgtcctcgccgccttcccctgcgccgtgcagaccctcgacctgggtggccgcattgtccttccagggctcgtaaacacacacgtgcacacatcgcagcagctggcgcgagggatcgccgacgacgttgatctgatgacgtggctgcacgggaggatctggccctatgagtcacacatgacggaggaagactcctatgcctccaccctcctctgcggcattgaactcatccggtctggggtgacatgctttgcagaagcaggtgggcagtttgtttcagaaatggcacgtgcagtggagttattaggctttagagcgtgtttgacaaagtcaacaatggattgtggtgacggtttgcctccaaattggagttgctgctccactgatgattgcattcagtcacagaaggaactatatgaaaagcatcataatacagctgatgggcgtatcaggatatggtttgggttgagacagataatgaatgcaactgatcgtttactgcttgaaacaagagatattgcccagaagctaaatactggaatccatatgcatattgcagaaataccatatgaaaatcaacttatacttcggaccaaaggaattgatcatggcacagtgacatatttagacaaaattgatttcctgaggagtaatttactggctgcccattctgtttggttgaatgtacctgagataggctttttttcaaaggctggtgttaaggtttctcactgtcctgcatctgccatgcgtatgttggggtttgctcctattagagaaatgctggattctggtgtttgtgtctcccttggtacagatggagcaccgagcaataatagaatgagcattgtggatgagatgtacttagcgtccctaattaacaaaggtcgtgaggcatatatcagtggaacaacaaacccaactgctcttcccgctgagacggtgctgaagatggctactattaatggtgcaaaagcagttctgtgggacaatgaaataggttcgctggaggttggcaaaaaggcggacttggtggtggtgaatccatttacatggtccatggtccccttacatgacagcattgccaacattgtctactgcatgcggacagagaatattgagtctgttatgtgcaatggtcggtggatcatgaaggatcataaaatcatgaatctcaatgaggaggaggtaatttcttcagctgtgaaaagagcgaacgacctccttgcacgagctggcatcaatctccccagacggatgaactacgtatagtttttctcttgctattttgtcatgtattgccaattgccaccatgccgcgctaatcctagagctgcaagcttgcatgttggcccggagacatgtttgcaggatcgtagtcatcgcttgcagtttctaccagtgttgaatagaaaataatgtgcagttgtacatgtggcttcagtaataaaagcaccatggaagtatcaaattgtaccaacagtaaaaaaggattataataatggatggtttttaatgtgatgttgaaaaaaaaaaaaaaaaaaaaaaaaaaaaaaaaaaaaaaaaaaaaaaaaaaaaaaaaaaaaaaaaaaaaaaaaaa

SEQ ID NO: 159556 - DNA, 397 bp, Zea mays
  Clone ID: MRT4577_77088C.1
ttgggtacctcgaggccggccgggcacgagctggcatcaatctccccagacggatgaactacgtatagtttttctcttgctattttgtcatgtattgccaattgccaccatgccgcgctaatcctagagctgcaagcttgcatgttggcccggagacatgtttgcaggatcgtagtcatcgcttgcagtttctaccagtgttgaatagaaaataatgtgcagttgtacatgtggcttcagtaataaaagcaccatggaagtatcaaattgtaccaacagtaaaaaaggattataataatggatggtttttaatgtgatgttgaaattttaccatttggtgcctctgtcttcttaacatgtctatgccgtgtccaaaaaaaaaaaaaaaaaagcggcc

SEQ ID NO: 159557 - DNA, 826 bp, Zea mays
  unsure (1)..(826): unsure at all n locations
  Clone ID: MRT4577_77089C.1
ccggccgggaacgtaagcagacttggccatagtccactgtccaccgcagctccgtcgaccgtcgtacagacgctgccggcgacgcgcgaagaagaggccgcgaagatggccgactcgccaacgatcgatgccgtctttcacaacgcggtcatcgtcaccatggatgatgcgttccgcgtcctccaggacggcgcggtcgccgtcgccggcgaccgcatcgccgctgtgggcccctccgctgatgtcctcgccgccttcccctgcgccgtgcagaccctcgacctgggtggccgcattgtccttccagggctcgtaaacacacacgtgcacacatcgcagcagctggcgcgagggatcgccgacgacgttgatctgatgacgtggctgcacgggaggatctggccctatgagtcacacatgacggaggaagactcctatgcctccaccctcctctgcggcattgaactcatccggtctggggtgacatgctttgcagaagcaggtgggcagtttgtttcagaaatggcacgtgcagtggagttattaggctttagagcgtgtttgacaaagtcaacaatggattgtggtgacggtttgcctccaaattggagttgctgctccactgatgattgcattcagtcacagaaggaactatatgaaaagcatcataatacagctgatgggcgtatcaggatatggtttgggttgagacagataatgaatgcaactgatcgtttactgcttgagancagagatattgcccagaagctaaatactgggatccatatgcatattgcagaaataccatatgaaaaatcacttatac

SEQ ID NO: 159558 - DNA, 273 bp, Zea mays
  Clone ID: MRT4577_7708C.1
cgaacacctgaaactcaccgcccgccgatcacgaagcggcggcggcacagcaagatgctatcccgcgcgcagcgcctccaccccgccgttcgccgattcctcctcccaaacacgcctgcaccctcccgtcatcctccgctccctcctcaacacagcgcttccgccaaaacctctaaacccttctcgattctcttccgccgccacctctgctcctcaccaccggcaacgccaccgccaacatcaccgcctccagcggtggtatcttctgacctt

SEQ ID NO: 159559 - DNA, 847 bp, Zea mays
  Clone ID: MRT4577_77090C.1
ggttcccccatccctcaggtctgaaccctctcgcgccgccgccgccgccgtccccgtcctccctctcgtcgcgcctccgccggcctttcagtttagggtgggatcatgtcttctgcaatggagtcatcgtaccttcctgctactactgagtcaattgaaaaagctcaggaggctaaggatgcttcagagtcaatttcgatcctttaccgcgtgatccaagacccgtcttcatctgcagatgcactgagaacaaaagagcttgcgattaccaaccttacaaactccctcactaaagagaaccgtgccgaggatctgcgaaatctcttgacccagctgaggccgtttttctcactgattcccaaggccaagactgcaaaaattgtccgtggaatcattgatgctgtcgccaagattcctggaacatctgatcttcagatctcgctctgcaaggagatggtggaatggacgcgtgcagagaaacgtacgttcctcaggcagcgtgtggaggcaaggttagcggcccttcttttggagaatcaggagtacactgaagccctgaccctccttactggacttatcaaggaagtcaggagacttgatgacaagttgcttcttgtggacattgaccttttggaaagcaaactccacttctctctgaggaacctgcctaaggccaaagcttcactgaccgctgcaagaacagcggcgaatgccatttatgtcccaccagctcagcagggcactattgatctgcagagtggaatccttcatgcggaagagaggactacaaaactgcttacagctacttcttttgagcattcgaggctttcaacgcactggacgaccc

SEQ ID NO: 159560 - DNA, 362 bp, Zea mays
  Clone ID: MRT4577_77091C.1
gggccaacccatccttccccctcgccctctggtctgagcggtctacctcgtccgctggttggtgccatagctggcccgactctcctgccgatgctctctctccctttccgggtttcccccgtggcccgagcgcaaattaccgggcctcagcccacagcaccggatgcttatgatgaaagacgggaggcggttgtcacccgagataatcgactcctactgactcgactggaagaagcatacggaagtggcgatcgaccattccgccgaggacaccgtgtgcacacgagtgcaggctcatgctcgaggcgcactcctgtgactagacctacgagtggcgtgccttcttcaacgagggcaacgac

SEQ ID NO: 159561 - DNA, 359 bp, Zea mays
  unsure (1)..(359): unsure at all n locations
  Clone ID: MRT4577_77092C.1
atctactttttattaatttttcgcttggccaactcttaacttttgtgcggccgcatacacacntcatattaccaccatataaggctacatcctcaacaagctcaatgccccctctgtcacactcccaccccatanacataaaaaaccctcgcaccgcagcatacaaattacctctaacgccaaagtgccttataactaactatcttctcaggagtttcgaccctccccttgccaaccagtcccgagccgacaactccccaccctcatcattcgcacccccaaactcgatcatacataagttcccccccttctgtctgaacacaaccaaccctttgttcttatcaagaccccacaccatc

SEQ ID NO: 159562 - DNA, 594 bp, Zea mays
  unsure (1)..(594): unsure at all n locations
  Clone ID: MRT4577_77093C.1
tttttttttttttttccagagacctagcntgattttgcccccatgatcatttggcggtggtntttccagngttccagagagagagagagagagagagagagagngagagagagagaggacagagggtggcanattggngctgctgggagggggggggggggaggacccagggcacatattctctctttcactcgctncccttcgcgtntttttnccctncggnggnctnaccaaccccgtttcatcatttcatcttccatgtgaggtgtggcnnnancnanncgnggacgacgggggggtgatgctcctctgagagggtagaagcgcgctctttttctctcggggcttctgnngtcgngcttggcggtcctgtgcccgnggaagctgctgctgctgctcttgcngtccgcggtcctggggagcccctggctgcngccgttgcagagcccggcctcccgctttattgtcggtctcactctcatcggagcctccttcctcttctcctcctcctggcgcgggggggtggtgccgtggtccaggttggggtcggggcacttgtgcgggctttgccctggccccctccccggcggagag

SEQ ID NO: 159563 - DNA, 807 bp, Zea mays
  Clone ID: MRT4577_77094C.1
gatcgcctgaagatgtatgacagccgcaacgccaacaaagttctccaccagccgatgggaagcttcccctctaatgttgctgatgaatatgaggaagaaggttactcaacgttgatggagtctttaactcatcctgaggtgactcacaaagtgaaaaccttggtccgtgttgtggcattttatccttttgaagcttatgagctccatttgcttttacgttcgaattatgactattctattcggttgactcttgaggatcctacagcgagaattgatgcgtacgtccacaagcagaatttggtccaattcttcggtgattctctgacagaagtggtggtcatgaaaaagctgaacaagctactcggcatcccagagtcagaggacggtgatgaagttgtcccaatgtcctggaattcaccttggatatggtgtgtcatgtcatcatactattgcgaaaaaaccgatccctggggcagtagaaggtaccgaatcgttgacacaacgatcagggattgagtgtagtattttgtatgtgttgctagcctacttatatagtaagtattttggagaggaggggggaggtgttggcattatagccttacgaacatcttgtaaggatgcagggcgacatgctatagttgtagcctactactgcagtgttattgcctcatgtaatgttgcagtgccgtcgttccgtggccatatgcttttgtacagtcagtgaattattctatccagaacactggtggcaccgtggcattctgtatgtgccaactgtgaacatgcactctagattatcttaatctc

SEQ ID NO: 159564 - DNA, 200 bp, Zea mays
  Clone ID: MRT4577_77095C.1
agagcggacgcccatagcggtttcccttttttttacaaaacaattctttagcccccacaggcaggcagaccgacagggggattacatgcatacatacaaatgaggcggaaatatatttgaagaagaaggagcaaaatacacgcgagttcccattgcattgggatgatgatgctgaggtaatacctctactttgatttaat

SEQ ID NO: 159565 - DNA, 879 bp, Zea mays
  Clone ID: MRT4577_77096C.1
atcgttttgtctcagatggacgggggcgatatgataaccgtcgaggatttggagacaagggtagggatcgtagctacagccgcagcccagacagaggccggtcacggggttatgacagaagaagtgatggcaggagcattagtaggagcaggagtcgcagcaggagctggtcacgcagcagaagccgcagcaggagctggagccgtagtcggagccgaagcagcagccggagtcacagcaggagcaggagccgtgaccatggggcagcaccggagcgcaggccccgagcaagatccggcttcgatgtgctgcctcctgcaactggagctgctggacctgcatctgttcccgtacctggaccagcagcaccgcctgttcctgctccggcacctgaacaatcactggctaatacatcttcaatgtcaccgatgtctcctggtggcctagtccagccagctgctgcacctgctggtggccaaccttcccaagggactggcgctgcattccccagttctcctgcaggcgaaacgtttccaggcgcagcagctcagcatcccgcgcctgatgtataatgagtcggacgacatccagtgccctgctccttttgtccctaaatatgtaatccggtgtacaataggagaaatgagtttccgggtagtagtttatatggcaaaaaaatcggcttttccgcaattttcgatgatctcgtggtgaattgacgtatggatgttgtgtgtttttgtgctgaattcaagaaaaagttatgttgtgcaactatattttgttttgtgtgttttctcgttttacaattttgtgtttctttgaattcttttgttgttgctatttttgcctacaattgcgcgacctgattttgcgtac

SEQ ID NO: 159566 - DNA, 719 bp, Zea mays
  Clone ID: MRT4577_77097C.1
tggatctctccatggatgagaacagtccctgttatcttttttacttgaatattcaggccaatctagaggatgtttggacccagaaagagttccagaatcaatgtacaagtatctgcaacccttggtttatatcatgttgcattcacagattaagaacatccgtgatcaagcatatattttagttaaagctgctatggcaagttcgggtgcttttgatcataacttcacagagattgatgcatggttggttttcttgcctggttatgaggccaaatggtgtgtaagagagaacctaagaattggagcacctaataaattatcacacattgtgatcccttttctgtgtgatgctatttcggtagttggtaataacctgtataaataccaagagcacacacacaagcttatctctaaatcaggccagttggaaggccgttctccagatttcagccctctgattatttgtgttcttcagaaatgccttaggctactcgacacagcatctggaagtacaaagttacacgagaagtctacaatttcattgtatgtgtgcaacactgtccaccttattcttcagtctcaggtactgttctaaaagaaagatttgataaattttcatcccaagaactgaactctaggatttatctggcctgagtggaggccgttaacaaatatgctgcatttcttgaggaaaatttctgaccaccaaattatagcct

SEQ ID NO: 159567 - DNA, 1518 bp, Zea mays
  Clone ID: MRT4577_77098C.1
tgggtacccgcggccctccctcgagtttttttttttttttttttttttttttttttttaggacaagcaaaataaaaaactgataaagcaacataattaacaaaaaacaggacacattttaatcattggtattttttttttgcatagttctgcacagccctcctggccacgtgaaccgttcgtccttcttgttgtctgtcgtcattaagcttccgaagtcctccagcttctttcgtcatggctcattcttacatcgccaatattgttgtcaactgcaagtttctggattattgtcaaagttgccaatttccagttaccgttttaatatcaaggactgcttgaacaatgaatccttttcttgccagttcatggacacactctttccaaatcctcccgactctatgcactgccattttctccacaaatccataaggtcactatagttcgttaaattcaaactaaacaatgtggaaacaaatcgcacagtctcaaatgacaagtatggaacaaaagaaggcagactcctgtaggacaatccaccaacatattgccaaaccgggttaacagaattataaacacaaaatccctgatcaatacctcttgcgtaatttacagctccaatgctatgcgacatgcaaaaaagaggaagactggagtgcgctttaagagctagtgcagatttaagttcaattcttctttttcgagtgcttcaccagccattcaatgacagaatcaatgttggtagagttcttgcaagatgtcatgaaacatgccacttctcggtcagtgattgtctttaggcccattagttctgtgaaggtttgcttggggaaagcttcaggtttgtcaattttattgccaatgactagtaacggaatcccggtcaaagatggcttgctcaagaggtcatggagttccccctttgcaatggccatgttttctcgatctgccgcgtcaacaacatacacaattgcagaaaccgcacggcagtatctctcccacatgctgcggaatcttggttggcctccaagatcccacaactttatcgtcacatttcctttcgtaacttttctcatattgaatcctacagtagggatcatatcctcactaaagcctccagtagcaatagagttcacaagtgacgttttcccagcattttggagccctatcaaggaaagctccatctcttgcttgaagaagaggctgcggagccagttaagaaaagcctcccagaaccccatggcgccgggtccttgtcggctccggggagctgcgcggtccggaggccggcggcgaagaaggcggaggggatcgtgcggggcggcgacgggttgaagggcgcagggggattcggtggaggcctcctgtcacccgcgtttactttatttggaggcggagggcgacgcggcgtggatggggcgggggacgagggagtgacagggaggcgagggcgccgcgaccgcgagcgagcagcggcgaccggcgatgcgcccggcccgcctcgaggtcgacaatcgcc

SEQ ID NO: 159568 - DNA, 1074 bp, Zea mays
  Clone ID: MRT4577_77099C.1
aaattaatttattattttttttttttttgaacaaatcgcacagctaaaattgagtggaacacaggaggcagcctcagagcacgggcgtgcacaataccagacgctgtccaccaacatactgctaaaccaggttaacaaaattatgaacacaacatccctgattaatacctcttgcataatttacagctccaatgctatgcgacatgcaaaaatagagagattggcgtgcgctttaatagctagtacagatttaagttcaattcttctttttcgagttcttcaccagccagtcaatgacagaatcaatgttggtcgagttcttgcatgatgtcatgaagcatgccacttctcggtcagtgatcgtctttaggcccattatttctgtgaaggtttgtttagggaaagcttcaggcttgtcaattttgttgccaattactagtaatggtattccggtcaaagatggcttgctcaagagatcatggagctccccttttgcaatggccatgttttcacgatctgccgcgtcaacaacatacacaattgcagaaaccgcacggcagtatctcttccacatgctccggaatctaggttggcctccaatatcccacaattttatcgtcacattccctttggtaacctttctcatattgaatcctacagtagggatcatatcctcactaaaacctccagtagcaatggagttcacaagtgatgttttcccagcattttggagccctaccaatgaaagctccatctcttgcttgaagaagaggctgcggagccagttaagaaaaaactcccaaaaccccatggcgccgggtccttttaggctccggggagcttcgcagtccgggggccggcggcgaagaaggcggaggggatcgagcggggcggcgacgggttaagggcgcaggtggatttggtggtggcctcctgtcacccgcgtttactttattttttttttttttttttttttttttttttttttttgcagcaccaagaagcaccatttttttcttaggattaacttagaacaaatcctgacaggagtacacccggccaggccggcctcga

SEQ ID NO: 159569 - DNA, 205 bp, Zea mays
  Clone ID: MRT4577_7709C.1
acaaatggaaagcaggtacccgggcagggaccgggccccagaaaaaacccggggggacacgagtcttctaggcggggggcgccctaaaaaaaagggggcctttaaaaagaatggcggtcagacccacaaatggaaagacggaaatgactcatggacgggatcaaccacaaaagcgcaaacgagaaaaactaagcatgatgcaaga

SEQ ID NO: 159570 - DNA, 435 bp, Zea mays
  Clone ID: MRT4577_770C.1
atgacggattcgaagcctgatccagtgatcccagatacaaattccaaatcatcgttcacttttaaaagaaagttatacacgggtcaggggaagagtcagtctgccacaagaaaagatgatgattctctagcgcatgatgtgcatcctggcttttacccaataatgattctcactgatgggttagaaagttggtatgcacaagtagaaaaaagaggtggtgttgattcaggtaatactgacgtgataaagggaaacagggaaacgatcggtgtacgttcatatgaaaaggctgaaaaggtggagccgccagggaaaggtaaagctgtgcatccttcaagcaagaaagccactcagacaggtgtatgcaaattgctacgctcgagttcatcacacctgtggctgttggtgacagattggcgagaatctgaattctga

SEQ ID NO: 159571 - DNA, 1620 bp, Zea mays
  Clone ID: MRT4577_77100C.1
cctcgaggccggccgggccgggcaactaaatgggccacaaaatattgaaagttcgaacgaatgcaaccaagttgaattgcttaaagaggatgattgcatctcattaggtcatgttgataatgtccatgatatgaagaacagatattcctcagaagtgagggatgaaacttctatctgtgcgccagctggagattatgagcaagttccgacgaattcagagaagaagacttcacatggcagagagcttgcaagcgaagcaactacgtcgaacaaccatggaggaaggagtcagggtgtaaagtctggtttgatgggggaggacttcgtacctagctggcaagaatttcttcctgatgggcttgaaggtaaagaagcaatactactagctgattgtacttcagttctgcggaactacaaagaaacaaagaggaggcttagcgaactggaaaggagaaaccaggagcatcttgaagaaacaaaggcagttatacgggagttaaggaatgcaaattccatgaagtatgttgagattcggtcactaagggatctcctggattcctcagaggtgcctccaagtaaagcaggtggtaactcaaacggattcttaagtttgaaatcttttagagaaattgacagatcaattgccactttgggtagagatatttctgccgtggaggaaaacagttctagtaacatcgagacacctaacaacacgtcacttcataaaatgacgaggttcagaaacgacattgacgctttggtggaggaaaatttgcagttcctggtaaggtatagcatggcttgctatcgcatgcaggagtttgacagaaggtaccaggaggcacaggacgaaatggaagataataagtctagagaaccagatactccagcagagcccggacctgctgagaagaagttgagagagctccgaactgaactgatgtatggtttgagcagagcgcgcttctcgatcaagaagtgcagcttaaatctgcgtctctttgcagaatgcaagaggagatagcggaagccctgcgcggtagcctggagatggacagagccaggtttacaccatatgaagctgccaagtttcaaggcgaggtcctaaacatgcagcaatctaccagcaagattgagggcgagatgcaggcagcatcagaacacatgagggggcttcaagccaaagttagccatgctctggaggggctacgtgagagttttgagatttcatcccaacgcttgtcgcggccagagaccgaaagtagccacgagaaacaattcaagcattttccaagtcggacaagggtaccgttgcgaaacttcctgtttggaacaaagcgaaagaaaaaatcaatatttgcgtgcatcaatcccacattccagaaacaattcagcgatctgtgaggtgcgtgagcgtgggtaccatgaccatagttttccttattttgaaagaaaagacaaagtgagcctggggtagttttgttccccagagtacatgcaagcgcaggttttgtttgaatttagcttgtgtttgtttgtaatggtaatttgttcatttgattgaaataaacagggtaaattatttgataccgttgaaatgtactgtgtgttgccccaaaa

SEQ ID NO: 159572 - DNA, 166 bp, Zea mays
  Clone ID: MRT4577_77101C.1
ctcattcaccgcttgcctatggactcaccccgttgtaactttttacgacgggcgccctactttcaaaacaaaatgttccttgacatcgacaccataaaccttattcttcctatctgaagctcgcaagcacgaatcactaatatactcctcctcaaggctactaaca

SEQ ID NO: 159573 - DNA, 1195 bp, Zea mays
  Clone ID: MRT4577_77102C.1
gaacaaatcgcacagctaaaattgagtggaacacaggaggcagcctcagagcacgggcgtgcacaataccagacgctgtccaccaacatactgctaaaccaggttaacaaaattatgaacacaacatccctgattaatacctcttgcataatttacagctccaatgctatgcgacatgcaaaaatagagagattggcgtgcgctttaatagctagtacagatttaagttcaattctttttcgagttcttcaccagccagtcaatgacagaatcaatgttggtcgagttcttgcatgatgtcatgaagcatgccacttctcggtcagtgatcgtctttaggcccattatttctgtgaaggtttgtttagggaaagcttcaggcttgccatctttgaccggaataccattactagtaattggcaacaaaattgacaagcctgaagctttccctaaacaaaccttcacagaaataatgtaagtgcatactaagctactacactccattataatttaggtgccgtttggttcacaaaatataacgtaaatggtaacgttaatgattcacactcgattaccagtggtaacaagtttgaataggatggtattactttctagtgtggtatctgattacgattgaatttaaacaaacatttaaacaaacatggtttaatgttattggttactgtttactttacaaatatgtgaatcaagcagcaccttaatgtaagtgcatgccaagctactacgctctgttatgactttttctgaaaatatcagttcgatacacacactctgctatgattgaactcatctactacatggtgaatgttattgcaggggcctaaagacgatcactgaccgagaagtggcatgcttcatgacatcatgcaagaactcgaccaacattgattctgtcattgactggctggtgaagaactcgaaaaagaagaattgaacttaaatctgtactagctattaaagcgcacgccaatctctctatttttgcatgtcgcatagcattggagctgtaaattatgcaagaggtattaatcagggatgttgtgttcataattttgttaacctggtttagcagtatgttggtggacagcgtctggtattgtgcacgcccgtgctctgaggctgcctcctgtgttccactcaattttagctgtgcgatttgttctcttgtgttccc

SEQ ID NO: 159574 - DNA, 679 bp, Zea mays
  Clone ID: MRT4577_77103C.1
acgtcatcgcgaactctcgtgccgagacctcccgatctcctgcgatggacgcgcggtgcctcggataccccgcctctaggtggatgcgcccgtccgcgctgctcctcctggtggcttccgctctcatctcggtcccgtcgccggtccgcgcgctgcggttcgacctctagtccggacacaccaagtgcatctctcgacgagatcaaggataacgccatgggcgtcgaaaatgtaccacatcgtcaggccctaccccaagttccccgatgcgcacgtccccgaatcgtgccggatctccctcaggccgatgacgacgcaggtgaacatgatgcacgtacgcgcagaacgtgcagacggcgcacttccacttcacggcgagggtcgccgtcgactacctgagcctgcttctgttcgcccgatcataagccatgcgtcctccatcggcatctagttcaactggaggagagacgtctccgccagggactatgccagagccgccaagaagggctaggccgatatgatgtaattggagctgaagaagatatagggaactataatatgtatacctgcagagatgctgtatctgcgtgaaaggaaagaggaaatgcacgacctgaacaggcaaactaaactctaggatggcttgggtagggctgctctcccttgacgactgcttatc

SEQ ID NO: 159575 - DNA, 462 bp, Zea mays
  Clone ID: MRT4577_77104C.1
ccggccgggaactacgacccgttcctgtacccggaacccatggttttcaacccatggagatggatggtaaggaataggacaagcacatgcatgtcctagattaaaatattgaatagccaccaagatcctgtcacaaaatttctaattaaccagacaatgcttgctgacgataggagacgaacctggaatcacatccgcacttcatgctgttcggaggaggtgcccgcatgtgcccagggaaggaggtaggaacagttgaaatcgcaacgttccttcactatttcgtgacgcgttacaggtctgttcctctcacaagtttttggtattataatttatataataatctccatagctcttttttgatatattattttttgtcttttttattttattattttattatattttttattttttttttttattttttttttattttctttttttatttttttttttttt

SEQ ID NO: 159576 - DNA, 317 bp, Zea mays
  Clone ID: MRT4577_77105C.1
cctttttattatgggggaggagcccggcccgcgaaatctgggttattgatgggagccgaggcgatagaacacacgggtgcttgttttaccgcccacacccttcttactatataaataccagccgagacaggtttatttggggggggggtttattaacccgcgatcgaagccacctttttttttttcatactcttgcctctaggggggaaatattgggggggggggggccctgtcttttcacgtatttaaaaagggtggccctctacaccccccgcatgggcctcccccaaaggaaccccctcgagttcctcgccaaa

SEQ ID NO: 159577 - DNA, 949 bp, Zea mays
  Clone ID: MRT4577_77106C.1
cgttgctgtcggcttgacgctttgcagcagcgatctcgatctgtggaggattgcaacaacctgaaaatctctcgagttcttcaccccctctctcccaacggcatccattcagcccttggatgaccaggcatggccgtgggaggcccctcctggcccaatttgcagtgcctggtgcggcggaagccggcgaccgctggctgggccgaagacgctgacaggggaggtgtccagcgcctcgccaagacgctatctattccccacctcgtcgccatcggtacctttttttgtggcatgcagtctctggagctggagaggggttttgtgctttcactgaatctacatctactactgctctgtcagatttagacaatgcaatacgtgcctcacttgaacatgcatgatcctcaggtgtcggctcgacgattggcgccggcatctatgtcctggttggaacccgggctcgtgagcacaccgggccgggcctgacgctctcctttctgatagcgggcgtcgccgcgactctttcagcattgtgctatgccgagctctcctgccgtttcccttcggcagggagtgcctatcactactcctacatctgcattggggagagtgttgcttggctgattgggtgggccttgatccttgagtacaccattgggggatcatcagtggcacgtggcatgtcaccaaacttggctctatttttcggtggccaagataagttgccattctttctagcacaggtgcatgtcaaaggcctcgacaccccagttgatccatgtgctgctattcttgtcctgatagttactgcattactctgtctgggaattaaagagagctcatctgtggaaggcatcatcaccactgcaaatatcatagtgatgctctttgtcatctgcgctggtggatggctaggattcaggaatggctgggttggttataaagtgcc

SEQ ID NO: 159578 - DNA, 321 bp, Zea mays
  Clone ID: MRT4577_77108C.1
cccccccctctttaaaccctccacaaaaaacgaagggaaaataaacccgttggaagaagggttaattacctacagggcacaacttacaacccaccccacaaccgggattaccattaaaaggggccaaaccccccattggggggggaaaaaaaaaaaagaaaaaagcacccctttactactaaccccttcaaaacaatacacccttctttgggccaggccccacaaaattccttgtttagccgggggacctgtacaaaacccacccctgcgggcaaggggcggaaaaaaaaacaaagacccccccccccggccccaaagcaa

SEQ ID NO: 159579 - DNA, 293 bp, Zea mays
  Clone ID: MRT4577_77109C.1
aaaccccaattttccagagggggtttcatttttttaaaaaaaaaagttcgttttcccttaggaaaggaaaaggcccaaaaaaaaaagggggggaaaactagccctaaatacatgagctaatccctaacccctacttattttacattaccggtccgaagtttaaaaaaagggtcgaaacaggaggggaagcagcatcaaaaaaccgacccatcaagcaaggatgccttgagctggggccaaaaacatttccggggaaccatttgccctgattaaaccttttcaaaaaaccttgc

SEQ ID NO: 159580 - DNA, 734 bp, Zea mays
  Clone ID: MRT4577_77110C.1
tttcaccttctctgactggatgtgcttgcatttgtattcagaaactccaggacatcaattatgagcacatgtttgatttggcgagggaggtcgcaacgaagctaaatgggaatgacacacaaagtcccgagaatctgtcgatagtatcaagttcattaagtctgtcaactaaccttgaattatacatggaagctgtttccctcgagaatctgagaacaagggcaatgcgaagtgagaaccgtaaagaactcgagcttgctgaggagatgattccaatggtcaactatatgcacgagcgccttctcagggaaacacagttgcttaacatcaacggggtacccattcctgctgatttctgttgcccactatccctggagctgatgtctgatcctgttattttagcatctggtcagacctatgagcgggtttatatcaagttgtggctcgatgaaggttttactatctgcccgaagacacgccaaagacttgctcattctaatttaattcctaactatactgtgaaagctttgatatccaactggtgtgagtcccatgatattaagctacctgatcctgtgaaatccttgaagttgaactttccgtcagcagcctcctcccttcaggatttgagcgccacaggcaacagccctctacatcctagtgctggtaggggtaatattcctgggtcaccagaagctgacctgtatatgaaaagcctgaatagagcatctcct

SEQ ID NO: 159581 - DNA, 387 bp, Zea mays
  Clone ID: MRT4577_77111C.1
tttttgggggttttttaaaattatttggggttttttaaacctaacaccccacctgtacaaaatcttaagatagccacccactccattgcccgaaaaacaaaccagtttcaaacaaccaaaacccatcctcccagcatatatctaccattttaaaatccattaacaatctccaaagcttacaaatacaccgaccacgctctcacggtgttaaagtctaataacctaattaagcctgaaccccataaccttcccctccccccaagcgtctccctcagctaaaagcccaccacattctccctccagtggctcaggactcataccccataaactctgtttgacacgcacagaaaaacaatcttaatcacacaaaaaccctgctcccttaat

SEQ ID NO: 159582 - DNA, 296 bp, Zea mays
  Clone ID: MRT4577_77112C.1
aagtactcgttcgaccgacgcgtacgcccactcattcgcttgtgcaatagtcattaatattgcgtttgagtcagcgaagcttagggggtaaaaagcttattcatgttcggactttaactttgatttatgttctaaagtacttgaaagacttttcctgtggtaattctaagcgtaagttgctgagctggttgaggtttactggtgaaccaaagtttctctattccactatgaatacgttacctcaagttacctgcatattcactgttatgacgattaaaaagaagaaaaaagacttg

SEQ ID NO: 159583 - DNA, 301 bp, Zea mays
  Clone ID: MRT4577_77113C.1
aggtcaaatgaccacatctattcaggtcaattaccaacatcagcatcagacatgctgaacagcaattcaccatagcccgctacatgaagagtctggtacaacgagcatttagcatattattcttccaaaacggtgtcaaccggcaatcgccacatatgaacaaaagcaagacgccataatggcgcccaggggtgacgaaatgcctggtctattctacaatctagagtctacacttacaacctggtaccaaaataaccacgtcaaggttgggtcggtacagcccttacgccttccattttcc

SEQ ID NO: 159584 - DNA, 906 bp, Zea mays
  Clone ID: MRT4577_77114C.1
gcacgaaccgccgtccacgtttgctacattaattccttggcccttgcaaagagtccagctcccccggatatcctgacgaattacctcgagccgatggggtgctgtggaagcagtgccgtagatgatgaggaacatctggactacagctccggaaaagtcactatcatacccgatctgaagtgttgggagcagaaattggaggaagcgaatgaacttgggcaaacagttgtggtaaagttcagtgcaacttggtgtggaccatgcaggaatgcagctccagtatacgccgagctttctttgaagcattctgatcttcttttcttctccattgacgtcgacgaactgccggaattggtcacacaattcgatgtacgcgcaactccaacgttcatcttcatgagagataagaaggagatcgacaagctggttgggggcaaccatgaagatctccagaagaagttcgacccatactgccagtgccagtagatgtgatccatggccaattcggctgtcagtataggatcagaacgagcagagccaaacatctgattggctgaaaaccgcgacagatcagaattttgcagccagttgatgagctctctctgggagtgtctgcatctgcataggttcgaggaactgaccaaaggaagtaggatttctgtctagaataatgtaaggttagctagtgtctgaaaattctgcaccacattgttcaagcaagtcccatacagaacaacaagttgtaacatcagttgccagatgactccctcttgatgcctctcacgattggctttacagcgaaaaatgacagtgccattgctgaccactgccccactggtatgctaaggattcaacaatgcgcaatgtacaccatcaccgatgatgaattgttgggaggattccagt

SEQ ID NO: 159585 - DNA, 847 bp, Zea mays
  Clone ID: MRT4577_77115C.1
ggccgggcccgggcatacaaaaaaaaaaaaaaaaaaaaaaaaaaaacactccaactcagtggcaacagcatctcccctgttctgcccgcccgctcgctcgcctctgtttcttttctttctttccacggcggctctgctccgctcctcacctccctcgatcgcacataccatatattggccatggtggttctcgccggctcgcccgccgtcgatcacatcccgctcctcaggtcgcccgaccccggggacaacttctccggcatgccggtcgtcgacctctccagccctggcgcgccgcgggccatcgccgacgcgtgcgagcgcttcggcttcttcaagctcgtcaaccacggggtgcccgcggacacgatggacaggctcgagtcggaggccgtcaggttcttctcgctgccgcaggccgacaaggaccgctccggcccggcctacccgttcggctacggcagcaagcgcatcgggctcaatggcgacatggggtggctcgagtacctgctcctcgccgtcgacgccgcgtcgctctccgccgcctgcgccgtcccgtcctgcgcgctcttccgggcggcgctgaacgagtacatcgcggcggtgcggaaggtggcggtgcgggtgatggaggcgatggcggaggggctgggcattgcgcccgtcgacgcgctgagcgcgatggtgacggcggagggcagcgaccaggtgttccgggtgaaccactacccgccgtgccacgcgctgcaggggctgggctgcagcgccaccggcttcggcgagcacacggacccgcagctcatctcggtgctgcgctccaaacggcacgtccggcctgcagatcgcg

SEQ ID NO: 159586 - DNA, 683 bp, Zea mays
  Clone ID: MRT4577_77116C.1
acgtatccatcttcacgagacaccgaaagcgaggccctccttcgccgccgccgcctctgacatccccgccaggccgaaaacatgtctacctccgctccaacgacacgacccccgactacgatacaatgatgtccttcgcaaagaagacatcctgtggatcggcgcactacaccacagacggatcgcgggctgatcagggtgaacggagtgccgattgtactcatagggtcgtagatggtccgcctcattgtcttccagcccatcctgttggcggcacgctccaggttccaggatatcgacatgatgatccgtatccgaaggggaggaaagacgtctgacatctacagcgttcgacagtgctccgacaaggggctcgtctgctactacctaaagtactgcgacgatgccgccctgaaggatgtcaaggacatcttcgctcgtgactaacgaagccttctcgtctgcgaccccattcgctgctagccgataaagatccgtggtccatgcttccgcaccagtgtcctaaattcctagcgatgagatgtcagatgcccgagcttgccgtaccgatgtctgtgctgtgccaacttgccatttcgatgcctgtaaccgcgagtttattgtctatcatgtgagctacctatgtggatctattcctcgatgctgttttaccttcggcttgt

SEQ ID NO: 159587 - DNA, 828 bp, Zea mays
  unsure (1)..(828): unsure at all n locations
  Clone ID: MRT4577_77117C.1
ggaccctcgaggccggccgggattcttgtttcaacttcagaaatatcctcatcatcaacttcgaggacgacgcatacgaccgttataaattgaatgttaatacgataaaacaagacacatggcgaacaacgacgatagacaacatccgcaactcgaaccatttttgggagtgaaaacaccctctcctgtcttcgacgatgacaccagtaagagtcgcctggtgaagcattttgagggaatgggattgtctcccgagctggttgcaaagcgacaaggagaaacgagaacgaagtggaagagcgaatttattgtcggggagaaggttctgaatcacgaacaatacatgaagaagagagctgaacacagctacacacgcgagacgatgctacaattcggcaccactgccgcacttctatctaaaccagttttaccagtcctctcatgcacagtcccagaggaatatcagcgcccgcaagaggatgagttacgtaggagtggaaatctccgcattagctcgtccgggagacgcaatttgaaatcgagcagctctggaatcggcaatggagtgattccattatccatgctcccccccaatccaaacgtacccgcttctgccattccacccgctcagctagagaacaatttggtacccactggattcatctcccctcgattggtcaacagagctgctgagctcacttcaagccgctctgccctcacaggaagcagaggagagattgtcagcagtgggagggacatccccccctcagttgntcagccccttcgcagctctggtgcaccacccggtttcgagncacagtccctgct

SEQ ID NO: 159588 - DNA, 1501 bp, Zea mays
  Clone ID: MRT4577_77118C.1
gctccatccggcttcccttgccgcaaccgcaagccccggccccgcaaggcgataggaagccggcagttcagccgcggcttcggttccgccgttccggagatggggtccggcatgagcagcgcccggcggcgccgcttcggcctggaggcgtcgcgggggatgctgcccctgctggctctgcaggtgctcatcgagtacggccgcgcgggggcctcccgcccgcccgtcacggccgcgctgctcgccgccaactcactcgtctacctccgccccggcgcgctcgacggggtcctgccctcgctcgcgcgcgtctccttcaaccctcagctcatcatcgagtatggcgacttgacgcgctttttcctgtcacccttctaccacttgagtgaaagtcacctcttctacaacatgacgtcgctgctgtggaagggcattcatctcgagacatcaatgggtagtgccgagtttgcttccatggtcgcggtgctgcttggcctgtcgcagggtatcacgctgctcctgtctagaggcttactcttgctcggtgacgataccatgtactatgatcagcatgccgttggattctctggtgttctgtttgccatgaaggttgtgctgaacgcctggtcagacgatttcgtgtatctgcacgggatggttattccagcgaaatacgctgcctgggcggagttgatcctcatccaggtttttattcctgggacatcctttcttggccatcttggtgggatacttgctggactggtttacctttggctgaagcgtgcatccaatgggcaagatccgatcactcttttgatctcaagcgttgcaaatgttgaaacctggccagtgaggttcgctcagaatcttctacggtctgcccgttcacagggccgcgtaacaggtcggggcagggttgggcgccgcatatcagcaagagatagccctcgaggtttttggagatgcccaacctgcacctatgataattcagtttccacagatatctgtgagatgtgcagcactgcacgagataaccatgcttttttgcggagacagcatcatcaagccgtaggtaacacggtggaactccctgttgatgagatgcgccgtaggaggctgcaaaggtttgacagatgatgtaaatcattgttgtcagtacacacattgtgcgctgctgaacacagttgaagtatggcaggtccattcctctgcttgatggttttggcacatttgtctcttctcatgatgatgaatgctttactttacacaattgaaattttcatcattatgtgaaggagactcctactgatttagcattatcctttacaagtttagattgtttcaaagccttggaaacaattagttattgcctaattttgtataaattatgccagggcatgttgaaatcaaagtacttgagcatatctatcttctgtttatggcaaccattgagatttaaccttcagaatatttgattattggaaatccgctattgattgtc

SEQ ID NO: 159589 - DNA, 1629 bp, Zea mays
  Clone ID: MRT4577_77119C.1
cttggagagagagagagagagagacggccccgcagcggcggaggcggagatgggggcgtcggcacgagaccggcagatcgagcagctgaagcggtgcgagccgctcacggaggcggaggtcaaggcactgtgcctcaaggccatggagatcctcatcgaggagagtaacgtgcagcgcgtcgacgcccccgtcaccatttgtggagacatacatggacagttctatgacatgaaggagctgttcaaagttggaggtgtgttgttgctttttattgttggacttcatttggcattagggtgtcttctcgaaagaacatattcagagcatggttgttttggaacttctgtcctggagaagccaatctagtctgtctggcggcaagcgcttattgatacttaacttccactacataacagtggatcacactaaccgtgaactgatttttctgaatggtatatgtataacactggagcatagaagtgataaaatgttaggtatccagaccgtattaccttaatacgaggaaaccatgagagcagacagatcacacaggtttatggattctatgatgagtgccttcgcaaatatggctcagtcaatgtctggagatattgcactgatatattcgactatttaagtttgtctgcacttattgagaacaaaatatttagtgtccatggaggcctttctcctgctatcacgacactggatcagataagagtaatagaccgcaagcaagaagtacctcatgatggggctatgtgtgaccttctatggtctgatccagaggacactgtagatggttggggactaagtcctcggggtgcaggattcctctttggtggaaatgtggtctcatcatttaaccattcaaacaacatagattacatttgtcgtgcacatcaacttgtcatggaagggtataaatggatgttcaatagcaagattgtaactgtatggtctgctcctaattactgctacaggtgtggcaatattgctgcaatcctagagctggatgagaacctgaataagcagttccgcgtatttgaagctgctccacatgaatcaagaggtgttcctgctaagaggccagcaccagattactttctgtgatgctacacagcgaacgcttgagcttactgtgctttcaagcgctggacctcatgttgcaagaagagctcaggccctacagctttccagccaggaggtggttttcaggatgtgtaaattgagtgtcatcttctcccttcaggtccatgatttgtaagagagttggattttggcatccagttttttcacagaacatcacccatttgagctggagaaatacgcccttgcgaaggggtttcatgtgatgtgctaaaagtacacgttgtaagatttttttttgcgattgcataccccctagaaaaaccgttcctggaatatgtggcaatcaggaaatgtgtcgatgctctggaaagtgtaggagatttttgtagtagtcatttgcgcgtgctgttagggactagggagcatgtggtcaggggacactagcactagcttgtcggcatgcaatggtgtattgtaactgtctttatgcagcatctctaattcaaatagctaactacatttgatgtcttcttctg

SEQ ID NO: 159590 - DNA, 230 bp, Zea mays
  unsure (1)..(230): unsure at all n locations
  Clone ID: MRT4577_7711C.1
atccctgacacgaaacggatgccctttccggtccggcgatccctgtgtgggggggtgtgcnctaacagccccaatctgtgggcatcctgtcaaccatggntggngtnagaaggtcggaggntctggttcgctgcgctagttctagaaggagtaggaaatacagatggtgtttgtggggttacgtaaacctttgcaccaataactgtgggttgtagagggagcggcatgta

SEQ ID NO: 159591 - DNA, 1695 bp, Zea mays
  Clone ID: MRT4577_77120C.1
cggccccccccccgcccgccccccccccccccccgccgcccgcgcccccccccggccggccgggactcggctcccctacggcccacgccacgtcaccgcggtccgcacgcgccccacggcttccgccgcctcctaaccctagaatcttcgagaagcacccggcgaagagcgcgctgccacggcgctttccggaaacttcttggagagagagagagagagagagacggccccgcagcggcggaggcggagatgggggcgtcggatctagaccggcagatcgagcagctgaagcggtgcgagccgctcacggaggcggaggtcaaggcactgtgcctcaaggccatggagatcctcatcgaggagagtaacgtgcagcgcgtcgacgcccccgtcaccatttgtggagacatacatggacagttctatgacatgaaggagctgttcaaagttggaggtgactgcccaaagacaaactatttgttccttggggattttgttgaccgaggattttattctgttgaaacttttttgcttcttttggctttaaaggttaggtatccagaccgtattaccttaatacgaggaaaccatgagagcagacagatcacacaggtttatggattctatgatgagtgccttcgcaaatatggctcagtcaatgtctggagatattgcactgatatattcgactatttaagtttgtctgcacttattgagaacaaaatatttagtgtccatggaggcctttctcctgctatcacgacactggatcagataagagtaatagaccgcaagcaagaagtacctcatgatggggctatgtgtgaccttctatggtctgatccagaggacactgtagatggttggggactaagtcctcggggtgcaggattcctctttggtggaaatgtggtctcatcatttaaccattcaaacaacatagattacatttgtcgtgcacatcaacttgtcatggaagggtataaatggatgttcaatagcaagattgtaactgtatggtctgctcctaattactgctacaggtgtggcaatattgctgcaatcctagagctggatgagaacctgaataagcagttccgcgtatttgaagctgctccacatgaatcaagaggtgttcctgctaagaggccagcaccagattactttctgtgatgctacacagcgaacgcttgagcttactgtgctttcaagcgctggacctcatgttgcaagaagagctcaggccctacagctttccagccaggaggtggttttcaggatgtgtaaattgagtgtcatcttctcccttcaggtccatgatttgtaagagagttggattttggcatccagttttttcacagaacatcacccatttgagctggagaaatacgcccttgcgaaggggtttcatgtgatgtgctaaaagtacacgttgtaagatttttttttgcgattgcataccccctagaaaaaccgttcctggaatatgtggcaatcaggaaatgtgtcgatgctctggaaagtgtaggagatttttgtagtagtcatttgcgcgtgctgttagggactagggagcatgtggtcaggggacactagcactagcttgtcggcatgcaatggtgtattgtaactgtctttatgcagcatctctaattcaaatagctaactacataaaaaaaaaaaaaaaactcgagg

SEQ ID NO: 159592 - DNA, 780 bp, Zea mays
  Clone ID: MRT4577_77121C.1
ggcctggcgtccccagcgagggtgagggcgacgtcggggaccaacagccgtgtgtcctctctcctcgtgtgctccgtctgtctccacagttggtacaggccctctcgcccggccgtctcgtcgctttgttccatcgaggcctgttttgctcttcctgctctttcttgctcgatctggtcgctgaagcacttcgaacatgaaccatcttcaatactaaagttacaaattatttcccacgcgtgcaaggcgcgcgaacgttactagggatacataatcaaggaccagattgcaacaactgacctcactctttgtctctatcatgctctaactggcagcacaaaaatttgctacatctaattggataaagtggcttggccaattcggtgagccacgactcggcggcggcgacgacgcttggggcggcctcctcgatggtgggggaggcggtgctcgggcgcgaggtggtactggacggagagctgtgagcgtggctgcaacgaagaaggacaagcagtgtagaaggaggagtctgcatgcgccagctatgagatgaagcgagaaaggaaaccaaatacaaaatacattgggccaacatgggtcgtgtaatagtggattgtagttccacaaatcacaggggtgcgtttggatgcgtgtatcaagccagccagactctcgtaacgcagccaagccctatgtggccagactctatgcatgcaactggttactgtttggatgtctgtatgcgtagcatccggtccagcgtaaaaaaaaaaaaaaaaa

SEQ ID NO: 159593 - DNA, 272 bp, Zea mays
  Clone ID: MRT4577_77122C.1
tgtgaatgcacgcctgtgactgagtgtaggcggcctgttgtaaataaaacgatgcctgttgcccaaaaaaaaaaaaaaataaaaataaaatataaaaaaaaaaacaaaaaaaaataacaaaaatttaaaaaaaaataataaaaaaaaaaaaataaaaaaaaacaaaaaaacaaaataaaaacagggggtcttgttgcttattatatttgtatagaaaatgctactgtaattgtgttttttcaagattagatattagttgactttgagatata

SEQ ID NO: 159594 - DNA, 144 bp, Zea mays
  Clone ID: MRT4577_77123C.1
cccatcccatctcaccatactctgcaccgccgcggagaacgcgcccccgctgctacctagaacactgcttcaggccgggctgatccaaaaagcttctatgtccgggcgcaaactcctggaaatgctcagctgctaacttttcct

SEQ ID NO: 159595 - DNA, 829 bp, Zea mays
  Clone ID: MRT4577_77124C.1
ccccgcgtccggcgagggtgagggcgacgtcggggaccaacagccgtgtgtcctctctcctcgtgtgctccgtctgtctccacagttggtacaggccctctcgccaggtcgtttcgttgctttgaaccatcgaggatatatttttacatcctgctttttctatcaagatcaggtcgctgaagcacttggaacaatcgtagcttgcttttgaaacgttacatcccctaaaggaccaggttcaaacagggacagcaacgcatcaaagaaaaaaaacagacaccaaatctttcaagaactgaagattttaatttctcagatcgtcgacaaccttttaacacaaaaatttgctacatctaattggataaagtggcttggccaattcggtgagccacgactcggcggcggcgacgacgcttggggcggcctcctcgatggtgggggaggcggtgctcgggcgcgaggtggtactggacggagagctgtgagcgtggctgcaacgaagaaggacaagcagtgtagaaggaggagtctgcatgcgccagctatgagatgaagcgagaaaggaaaccaaatacaaaatacattgggccaacatgggtcgtgtaatagtggattgtagttccacaaatcacaggggtgcgtttggatgcgtgtatcaagccagccagactctcgtaacgcagccaagccctatgtggccagactctatgcatgcaactggttactgtttggatgtcaaaaaaaaaaaaaaaaaaaaaaaaaaaaaaaaaaaaaaaaaaaaaaaaaaaaaaaaaaaaaaaaaaaaaaaaaaaaaaaaaaaaaaaaatat

SEQ ID NO: 159596 - DNA, 599 bp, Zea mays
  Clone ID: MRT4577_77125C.1
cacgcctgcggaaccgggccccaataccacggtcgacctcagcgttcggtaataagctcaaagactccagattggcgaactatgaaccctgaacgtgctaatggttgacctagctctcctggcacattgtgccagcgccgactggaggacaagccgcggctgagggtgccaaacaccaccaactaatgtgccgggtacgtagtatatgcctccttcacattatctgtccacgaaatagcagcctcagccatggacacaccccactgaaccaccgcaaggaaacccgccccagctgctgcagatcctggggcgacagcagcgtcagcagcccggctctgggccagcgcgtcaaggtcctgaggcaccactgcagcccgggggggacgcacgactgctcgacacaacgccatgcgctgcagcaccagtgctgccaccacatcatgcatgaggagccgctgcacctgtaccaggagacacacggactggtgctagcctccttgctgcagcagcaggctgaagtggagccttaggaactgatcgcagtccaccaagaacaggatgtcaccgctatctgcggcctggaactccaacagccagga

SEQ ID NO: 159597 - DNA, 171 bp, Zea mays
  Clone ID: MRT4577_77126C.1
tcccggggcgggccagccgtccggcaccttaaaaggcccattagggttcttctatgggagcccaaatattttggcccgcggatgccccctgaggcttctggaaaagccgcttccgggaccattttcccgaaatgcccgcaagctcccataggtttccttttttccccggtc

SEQ ID NO: 159598 - DNA, 527 bp, Zea mays
  Clone ID: MRT4577_77127C.1
acattcttcccctgacacgacagtaccatacccagacttccgtcgcatttatcatctagaggttcgactagtccccgacgtttcctcacaagacccacaaaacccggaactagtacatcattggaatgtacctggacgtctacctctatcgacctctggagaggctatcacgacggcgccatacataattgcccgacacacggcacggacccactcagacgttcacgacactctagctcattctatatcacctcctcacccaccgtcaaaagacagagatctataacccgaattcgcaggcatgattcaaggcggcaatgccaaccgcggcggctacgtgtgtataccatttagacacattccactgattctctggcgctgcaagcccttctgcacctggcaacagtatgggcagaactcacaccatggagagatgatgtcgcgtctttcgtctgcaaggattctcagggaatagttcgactatgagaaattcaagaacttctctctgtgccgcaatgtgctctgct

SEQ ID NO: 159599 - DNA, 1506 bp, Zea mays
  Clone ID: MRT4577_77128C.1
aaaaaaaaaaataacaccgtaaacacccgggagaaaaatagtttttttaaaaagggcccccccttaaaaattttttttaaaaataattaattatttatattaaataaaataaaaaaaaaatttaaaaaatttttaaaaaaaatttttaatttattaaatatttctttttaatttttttttttttttttttttttttttttttttttttttttttttttttttcttaaaaacaaacagtattacatactgatatatttatagactcctgaactcgcggaggcggttacagtaacactagggttactattttactaagcctaatggatatgcctcacactttcaccctactgaacctacaaccacttgacaacggaaacagagaacaccctgcaggtgttaaccccagattattatcgcacacacagattaatacgcgccttcacgagttcacgtagcacactctctagctccaccgcacgcgcagaagcgtcccatccagatcatcaccgtccatggctcgctcagtcgacctcctcaatcttgggcccggcgccgctgccacctccgttgccggcgccaccgccgggcacgtcctcgtccatgcccgcagcgcccgcgccgccctggtacatctgcgagatgatggggttgcagatgctctccagctccttcatcttgtcctcgaactcctcggcctccgcgagctggttgccgtcgagccacttgatggcgtcctcgatcgtgtcctcgatcttcttcttgtcatcggcgggcagcttcgacgcgatcttctcgtcccgcaccgtgttgcgcatgttatacgcgtagttctccagcgcgttgcgggcctccaccttgcgcttcacctcctcgtcctcggtcttgtacttctccgcctcctgcaccatgcgctcgatctcttccttgctcagccggcccttgtcgttggtgatggtgatcttgttcttcttccccgtcgtcttgtcctccgccgacacgttcaggatgccgttcgcgtcgatgtcgaaggtcacgttgatctggggcacgccccgtggcgccggcgggatgccggtcagctcgaacttgccgagcaggttgttgtccttggtcctcgtcctctcaccctcgtacacctggatcagcacgccgggctggttgtcggagtaggtggagaacacctgctccttcttggtggggatggtggtgttcctcgggatcagcacggtcatgacaccgcctgcagtctccagcccgagcgagagcggcgtgacatcgagaaggagcaggtcctgcaccttctggttgccctcgccgctgaggatggcggcctggacagcggcgccgtacgcgacggcctcgtcagggttgatgctcttgcacaactccttgccgttgaagaagtcctggagcagctgctgcaccttggggatacgggtggaacctccgacgagcacgacgtcgtggatctgtgacttgtccatcttggcgtcgcggaggcacttc

SEQ ID NO: 159600 - DNA, 274 bp, Zea mays
  Clone ID: MRT4577_77129C.1
ggggcgcgccacgcgtacgcctacctacttacttacttacccgtcactgttcaacgcgagtgcggcgacaggggggggcacacttccactggcttgaccgctctcggccctcggccccgcacgcgtggccgcaaggcgaggaggcaaaggcggcggacgggaatggagccagcagggacaccaaggaggcctttgcgcggatctacaagacgctcaacgaggagctgctcaccgacccgagctttgagttcaccgcggagtgacgccacaggat

SEQ ID NO: 159601 - DNA, 152 bp, Zea mays
  Clone ID: MRT4577_7712C.1
aaaaaaagggggctttcccatttttttgatgctttgctctcaacaaagaattagatcatccaggtttatccccaacgggtcaacggggattttttttggttagctaatggctgggcgaactgggagggaaaaaatccaggggaaagcgggcc

SEQ ID NO: 159602 - DNA, 171 bp, Zea mays
  Clone ID: MRT4577_77130C.1
atcttggtgggaggagcaaatattcaaatgagaactttgaatgccgaacatgtaaaaggttccatgtgaactgcactttcacatgggttagccgatcctaatggtcggtggaaacccttcaaatatcgctatcacgcacatcacccgaaagggaatctgtttaagattttc

SEQ ID NO: 159603 - DNA, 751 bp, Zea mays
  Clone ID: MRT4577_77131C.1
ggccgcttttttttttttttttttgtattactaaaacattggtatctttaatttatatcttgtgcgtgttaagcatgttgtgaacgttatctatggtaggcgccctttcttttaaagtgcaaggatcttctcgactgcacgctccgcgatcaccatagtaccgaaaaccgggttggtggtcagaggagcgctaatcgaagcatcaacaacgtgtacgttgtcggtaccaacgacctttgtatccacatccacgcaagcatcgaacctacagctgcttgaccaatgctgcacattgcccagcgtataagcagatggtgtgctaatccaagtggtaatctcctcaagagtcgagttaccagcaatattcaaaggcttcaaattcgagggcagagcttggaagatattgtagacgaattgggcaacagcttctgcatcgcgcttgtccgagtagaagaagcctcctgatggtgttgcaatgcccttctcgtcaagtccaacgcgaccgaacgatcgcagacccgacgttccgtatacgttcagggtgattgtgccgttctccaggaagtcgttcgcaccggaagagtcgatggtaccttgacaaccgatggtctcgttgccttgcttgatgaagtcccagaaagcactggtctgcgaggcaaacgaataaggtccggagcgtgacttcaggtatagatcccggtcagcggagatagggtccgtgtagctgtgagtataagaggtgatagcatcg

SEQ ID NO: 159604 - DNA, 483 bp, Zea mays
  Clone ID: MRT4577_77132C.1
gaacacagaacacagaaatcactagaatctaacatttcccaagctgacattgtaacaaagcttacaccgttgacggctgcccatagggaacgagggcttgtaagaactaagccggcagccatatgatacggtggcgggggtcgtccactcgcatagcacgccagaaccaggggaccgaaccgccccagcagtggcagccaacgaggagacgctgctcctggtataactgcggcaaaggtgaaaaaaaaacatggaactgtgcgtgtgaaacaccaatatatataggacatggctataagctccttttgggtgatcgccacagggccttgaacagccgctccattgtttgatgaatcaccgtccattgagtcaagcgagctttggattactcgaaatcaattgcatacttgtcgatagcctcttcctcatcctcggcattggcctgcgactcggacttgggaaacttcaatttgttttacaact

SEQ ID NO: 159605 - DNA, 485 bp, Zea mays
  Clone ID: MRT4577_77133C.1
tatgacagacgcacgacgatcttctcgccgaagggaagtatctaccaagtgagagtacggtcatcggacgccgatctggtaatcgtcggcgtcagctcgtcagggatccatggatggccgacgagcgacattccgtgattcggctgagaagaatggtgaccctacgagtatactccacgacctccctctccgccgagaagatgtacaacatcgactcccacctggtgtgcgctgtggaagggatcatgacccatgacaacatcctcataaatagacggtcgcttccacgcctagctatacgggctctcctaccaggactccatgcccgtagagcaactcggccagtccctctgcgacacaaagcatggatacacccaggactgtgggcgccgaccctttgtagtctccttgctattcgccgtgtgcgacaagtgaccacggattccagctctacatgagcgacccatctggcaactatgtccctt

SEQ ID NO: 159606 - DNA, 614 bp, Zea mays
  Clone ID: MRT4577_77134C.1
gtcgagggcgtctcgtggttaggcgcacagcttggggttctgtatggtgaaagcaatgggaaactatttatgcttgcatctgtgaaggaggctgtgctacagatggcatattgcttggctctctgtgcaggagatggtgctgcaagtgtaggagggagtgatgctggagatgttgtggcaggccctgtttttctttctcaggttgctgcttccattgtggcattgcatgagaggttctacttggagaagaccaaggcgttgcaagctcaacgcccgtcaaaatatcagctattacttgagtattcacaagcactggaacgagggattttggagcgatcaaacagaccaaactacagggctgttctggagtatgatgggattctgtcacggcgagtagagaacaaggaatctgctagagccaagacaaaggaggaacttttagctgaagaacgtgattacaaacggagaagaacatcttaccgtggcaagaaagtgaatagaaaccctacagagatactaagagacataattgatgaacatatggaggaaatcagacaggcaggtggcattggttggcttgtggaagctcctgctgatattgcttggaatgagct

SEQ ID NO: 159607 - DNA, 453 bp, Zea mays
  Clone ID: MRT4577_77135C.1
atgagacgacctcgtcacaggtcttcgtccggcgacgtgtgggacgaaggatataccattaaccacatgaccactggacaccacatgccattgggtccatgtgaggttgccgggagcgggcctgataggttgctgaagactgaagtactggatatcccattgttctcccaacttctggaagcagtaagggtaccagtaatcacaaaaacaactaacaggagatgtcgactcttcctaaattctcaaaccacaacaaagaagaatgaaccagatcacactctagaaaagagaaaacaacaagctgccaaaattctaaatgtttccataggtcacagaaatcaaagcaccaaaaaatcttgcaaaagaccatatgcaattattacagaaaatcttgcactgaagattaggaccatgaccagcacgcaacatttaagccacatattaggaccatga

SEQ ID NO: 159608 - DNA, 579 bp, Zea mays
  Clone ID: MRT4577_77136C.1
cgggaaatgacttcccgggccgccgggaactgcagcaaactctcctcgctgcactgcacacttgactctccttcgtgtctccccccaaccccaattccccaacacaagccatgcgagcatctcaggaccatgcgccgcagccaccgcctctgcctctgcctccacctccgctatctctcccgtcgcctcccgccccgcctcggcgcgggcgccaccgcagctcctactcatcatcatcatcctcctccatctccagcgcgtcgtcgaccttctgcccgtcgccgtcgctgtccccgcgcgccagtaccgccacctcgctcgtgccattttcgtgggagcgccagccgggcgtgcccaagaactcgtcccgcgtcgggctggcctcgcccactggcactggcacccctctgccgccgccgccgctccgcccggaccctcgacgccggcgcgccagggccccagccgcgccgtcctgcgacgccagggacgacgaccccttcgtggccgccttcgccgagtgcacaagggacgacgacgacgacagcatcataaagctctggccagtgacggcaaagccag

SEQ ID NO: 159609 - DNA, 419 bp, Zea mays
  unsure (1)..(419): unsure at all n locations
  Clone ID: MRT4577_77137C.1
ctcttctcttctccccggccggaccggagtcaggcagccgaagcaagaaaagcagcggctttggaagttgggatccatggcgtccacctcgtgcttcctccaccagtccaccgcccgcgtggccgcgccgtcgccgcgcctcgccgccccgccgcgcagagcgcaactgctcgaatgaaatgcacggcagcctcaaacaaacgaggggggggggagaagcctanaaggacgagcttcgcgacgagaagcagaaactgaaactggagaaggagagtctagagcaccagatgaagctgatggcatcggctccagcctacatgccccatccgaccctgatgccggcgcctttcgcccaggcgcccctagctacattccatgcccaagggccaaagctgcagggcagcaagctgatgatgccc

SEQ ID NO: 159610 - DNA, 582 bp, Zea mays
  Clone ID: MRT4577_77138C.1
cgggcgttctgtttgttgtttttcttctcccgtccgcagtccgcttggcgtgcgcgacggctagggcgaccgccgccgccctacgccctacgtccagctgcccatgtcttcttcgggccccttgccggcgggaactcaccagaccaggaatcgtgctggcaaccggcgcaagtctggagatagggctgataaagctaattactcctacaataatgatggagagaagagcaatgttccttcattaaagaaccttcctccaattgttcatcatgaaacattcttcagcaatgttcagaatgactacaatcaaacaggattagtgcctttggagggatgttctgccagtgaggcttcacagcttctcagtgatcgctggactgctgcaatcaacatgtacaatgaccaaacaattgacccctcagctcatcatggggtcacctgaagcttcctcatcagatgaacttcctcgaggagttgcgccgtgcagtggacgctcatacagaatttgcgtcgcctgtcgtcacctggaactaatcgaagtcagcatctgcatcattatgcgttatgactaatttatggaag

SEQ ID NO: 159611 - DNA, 667 bp, Zea mays
  Clone ID: MRT4577_77139C.1
ccggccggggttctgtttgttgtttttcttctcccgtccgcagtccgcttggcgtgcgcgacggctagggcgaccgccgccgccctacgccctacgtccagctgcccatgtcttcttcgggccccttgccggcgggaactcaccagaccaggaatcgtgctggcaaccggcgcaagtctggaggctggactgctgcaatcaacatgtacaatgaccaaacaattgacccctcagagaaaccggtaatgtattctggatctagcagctcatcatggggtcacctgaagcttcctcatcagatgaacttcctcgaggagttgcgccgtgcagtggacgctcatacagaatttgcgtcgcctgtcgtcacctggaactaatcgaagctgttcgccaggtctatgtatgatgtatcccatacacggatgatgtgccaaaaggctttcgtctgacctgcagctgcttctggaatctgcatctgtacaattgtaccattgttacccctggccttgtagctgcaaagcagtttgttgtaacaattaaatgaggcgccggatcctcacgccatcgaaagtttgaaacagcttggttgttgtatggtagttccaagacttggtgattataatgtgcgcattttctcgagcaaaaaaaaaaaaaaaaacccgcggcc

SEQ ID NO: 159612 - DNA, 270 bp, Zea mays
  Clone ID: MRT4577_7713C.1
acggcgggggccccagcagaacagcgcgcggaatgcccaaaagggacaggctatacagaacacagacggagcgggcaggccacacaacggcaacggcgaggggacctgggagaaaggcatcgttgactacaaggacctaccactgcaggccctcgaggatactaatgaccaaaccaccggccccaggtactgtgacaacccacagacgagaaagcacgtgacgcatgatacccctcacgccgccagagacaaggctggccacagcgagca

SEQ ID NO: 159613 - DNA, 720 bp, Zea mays
  Clone ID: MRT4577_77140C.1
ccggccgggccggggctccgtttgatgtttttcttctcccgtccgtagtccgcttggcgtgcgcgacggctagggcgaccgccgccgccctacgccctacgtccagctgcccatgtcttcttcgggccccttgccggcgggaactcaccacaccaggaatcgtgctggcaaccggcgcaagtctggaggctggactgctgcaatcaacatgtacaatgaccaaacaattgacccctcagagaaaccggtaatgtactctggatctagcagctcatcatggggtcacctgaggcttcctcatcagatgaacttcctcgaggagttgcgccgtgcagtggacgctcatacagaacttgtgtcgcctgtcgacacctggaactaatcgaagtcagcatctgcatcattatgcgttatgactaatttatggaagacaggctttcgtcaggtctatgtatgatgtatcccatacacggatgatgtgccaaaaggctttcgtctgacctgcagctgcttctggaaccagcatctgtacaattgtaccattgttacccctggccttgtagctgcaaagcagcttgttgtaacagttaaatgaggcgccggatcctcacgccatcgaaagtttgaaacagcttggttgttgtatggtagttccaagacttggtgattataatgtgcgcattttctcggaaaaaaaaaaaaaaaaaggcccctagggcc

SEQ ID NO: 159614 - DNA, 1140 bp, Zea mays
  Clone ID: MRT4577_77141C.1
gtgcggcgctcgaggccggccgggttcgagcttcgttggatcgtaagtaacgctagagcaatgggcccgggccgggctcccgggcgtactgtttgttgtttttcttctcccgtccgcagtccgcttggcgtgcgcgacggctagggcgaccgccgccgccctacgccctacgtccagctgcccatgtcttcttcgggccccttgccggcgggaactcaccagaccaggaatcgtgctggcaaccggcgcaagtctggagatagggctgataaagctaattactcctacaataatgatggagagaagagcaatgttccttcattaaagaaccttcctccaattgttcatcatgaaacattcttcagcaatgttcagaatgactacaatcaaacaggattagtgcctttggagggatgttctgccagtgaggcttcacagcttctcagtgatcgctggactgctgcaatcaacatgtacaatgaccaaacaattgacccctcagagaaaccggtaatgtattctggatctagcagctcatcatggggtcacctgaagcttcctcatcagatgaacttcctcgaggagttgcgccgtgcagtggacgctcatacagaatttgcgtcgcctgtcgtcacctggaactaatcgaagtcagcatctgcatcattatgcgttatgactaattttcgaagtcagcatctgcatcattatgcgttatgactaatttatggaaggcaggctgttcgccaggtctatgtatgatgtatcccatacacggatgatgtgccaaaaggctttcgtctgacctgcagctgcttctggaatctgcatctgtacaattgtaccattgttacccctggccttgtagctgcaaagcagtttgttgtaacaattaaatgaggcgccggatcctcacgccatcgaaagtttgaaacagcttggttgttgtatggtagttccaagacttggtgattataatatgcgcattttctcgacctggagttttagaatatgtagaaggtaatgcttattgaaaacctcagcttttaacttcaacggtatttctcgctgcgcctggagttttagaatatgtaaaaggaggtgaaggtttgtcgttgtgaccagatttttggttgggaa

SEQ ID NO: 159615 - DNA, 1251 bp, Zea mays
  Clone ID: MRT4577_77142C.1
atcggacccttctgaagagtttcttatgagctgcgctccgaacattgctgcaattgtgcaggctaactctaaagttgatgacgaagtgtctaaataccttcacattactccagtgggttctgatgactttgatttcgataatcttgagccagaggagaaagaatttgaaaatcagaatatctcagagaagggcctatcagatgcttaccaaaatgtcttaaataggcttgcccagctacagaaacttgggaaggttggtaaaggtactgacaggaggaagcgattgaaaggaggactggagctggagccatgcatggacacagtgaataatggttggagaaaggacatgctgcttgaggatgtggtggatattgacgttggctatgatgcacctccaccatcgtttactgctggtttggagttgcagaagcagaggagagcacgtattgaagctgctaagcagcgaattgatgcaactaggaaggctcctgctgctccagctgcaaaagcaaataactcagaagacgttgtaagaaaaaaattgaccatgaagaatcgagggggaaagaagaaggatgatatcgatcatatccttcccagtgacaatatgacaggttgttcaggtgctaggaaaaagagacgaagaggttcctgtgacagtattgattgggaagattgcattattgagctcctgctactgcatggtgcaaatgaagctgagattgaacaaggccagtacagaagattgttggagttgcatgtattcagtgcagtaagtggggagaattgaaaaatggtatgtcaaagatggaaggcccttttggcaatgtgagttcttctactggtggctcacaatactttgcggaactgtaccagtacttacaaagatgatatacaaaagaacatatcctatgtaatcaatcatattagtgcaaccgtgcaatcaagtgatctggtgtatccgatcaaaatccaacggtagcagcaaaaaagccaaaccctgcaatattcttgacggtctatgagatgttaggagcgaaactgaaacctgaagaatatgtgcatattggtgaggacagtaggaaccacttattgggagctagggatgctggttgcgataccttgtttttgagactgatgtttctccttcgaggaggtttattatttgaggcaattccatatttgacactaaaaaagtttatgattattttcttggcctttgaaatataaaccttttttatttgacactgt

SEQ ID NO: 159616 - DNA, 429 bp, Zea mays
  Clone ID: MRT4577_77143C.1
gggtcaaccaacatgcggggggacacaccttccttccttagcccaaaaactggccccaaacatgccgggagggattgcaaactgaaaaactttgttttttttttttttacaccccccacaaaatacctttttttgggaaccaacttggcctctttttttttttttcaaccccccccccaagctggatagataataatcatttccatgggcggcgatcgatttgatcaacaattgcaggggtcccactttcattttcccccccaatttcaaccgtgggggggcttcccggacttcccccggggcttgacaaaattgggcgcgggcttttttttcggggccccccccaggaccaacggggccctcccgggggggctttttttctccagggcaaggtactttttgccccactttcagttttagccccaaccc

SEQ ID NO: 159617 - DNA, 369 bp, Zea mays
  Clone ID: MRT4577_77144C.1
caaagcaacaaaactttcttttacccaaaagtcgaccaaccccccaaaacaaaggccaggcttggaaattggaaaacatagaagggccggctttcatggctacataaacatggaaattgggcaacatgtttttataacagtagtagaaaacccacagtttcaactaaacaaccaaacggggggacaaaaacctaaaaaaaaaaatgggcccttgccctttttgtctccaccaatctaaaaaggctggcatcttttgagggcgggctgggagaagggcttgcagctttggcactgcagtttaaaaacaatctttttgggggtcttggcctttttggggaaaacaggcttggtctgaccaccatatcctga

SEQ ID NO: 159618 - DNA, 368 bp, Zea mays
  Clone ID: MRT4577_77145C.1
ataataagtggggttttagtatatatatatagtttcaaatcatatcattgtggaccaattatatatggcaacaacaaacgcaggcggatcaaccaacatgcatgtaaacggcggtcatgaccacaaagactgacaccaaacatgcggggtgagatagcaatctgaaaaactatgtgtctctctttctcacacaacacactatacaaatcctatgtatgggagtctgctaagccccgctcattattgttcaaccaccaacacaagctagatcgatattattcatatccatggccggggatcgatgcaatcaccacaaatatgggtttcacttgcagccgctaccgcatttgcacacagggggggacttt

SEQ ID NO: 159619 - DNA, 628 bp, Zea mays
  Clone ID: MRT4577_77146C.1
ccctcgattttttctttttttttttttttttttttttttttttttttttttttttttttttttttttttttttttttttttttttttttttgaaaaaaaaccggggggcgttgggcccttggcaccccagcaaaaaagggcatacaggggaaggggtttttaaattttccccaaaaaccaccccaatttttccccaaaaacaaaaaaacccaccacaaaaatttgccttggaaattacccccagaatttttttttgttttccattcaaacccccccccattaaagggggcccttttttttttttttttttggaggggttttaggcaagcttgaactccccttttttcccaaccaagccttaccggggggaaaaaattgttccccccgtttttttaaacagttattttttttttgtttttaaagaacgggaccccccccccctttttaaaaggtctttaaaaatggggggtttccacccgccccacaaaatgggccgggggccaaacctgatctccaaaagccttttttttttaaccgaccttttcttggcgcgtttgtccccagggccagtttaaaaggccgacccgggttagtccaaaagggggggttggggggggccggccccccc

SEQ ID NO: 159620 - DNA, 367 bp, Zea mays
  Clone ID: MRT4577_77147C.1
ggaggacgggcgcccgtctatctcatcctgcatacctgtcggcagttggaaaaccgccactgacgtgctctaagaggagctgtgtcttcagggatcgagcctgatcctctttttcagagtactcatgctcagacatctgctgcaatcggaagttgcagaggagcccacagcacaagcatgccaactccatgcgcgtcaaatgaggcgatcatgcgcattgctctgataatggtccatgtcatgagaggacaccgtaaaaagtgttgtgacaaaccccctggaaccgagtaaacccgaggctattgacctggacaatatcattcctatgccggccgagtttgtatctggtaggcctgcaagcgaagat

SEQ ID NO: 159621 - DNA, 395 bp, Zea mays
  Clone ID: MRT4577_77148C.1
aaaaccaaaaacaacagcgaaccttgtaacattactacttctgtactttatatattattattatttatttatatttgttgttatttatactctactacctacttcgctcctcctaatttattatattatctattactcaagcaacacactctgtaactctattcgaacaaatatttgaagaaaaaaccaaacaatgaagtccctgtctatcctgcttctgttgtgctgcttcgttgccgtagcttacggctggccccagttccaaaaggccactgttgacctcgaaggcctcgtcagaataagatgctccctcaacgaaaccgatgaaattcttttcgctttcaatggctccgtctacgcttaccccaccgcttccgagcaattccccaagcaac

SEQ ID NO: 159622 - DNA, 282 bp, Zea mays
  Clone ID: MRT4577_77149C.1
aacgacgcgtgtaaagacaggtgctgtttctggtgggagaagtccaagaggtacgggtatgattgcaggagcgaggagttctaccgtcttccttataagcttgagcaggtacttcccctcgctatatgacgccggtaggaagacaaccgacccaagttctatgtagctgctccagcgtagaatctgtacatcagttgaacgcaacaaaaccatatactattttcatatatcaatcattagggagggagcttgattttttgaatataccttttaaaacaattt

SEQ ID NO: 159623 - DNA, 725 bp, Zea mays
  Clone ID: MRT4577_7714C.1
actccatagggcgattgggtctctcgaggccggccaggcttccgcctccgccgcacacgcgctcgctggctcgctgctccgcaacgccgtggggaatggtcgcagctaccgccatggccaccgctgcgtctgcggcctcaccgctactcaatgggagccgaaggctgcgcggctccgccatcgcggactcaggctacagcgtacgctgcgccgctgtggcgggcggctaggccgaggcaccggcctccaccggcgcgcagctgtacgcggactgcgtcgtggtgggcggcggcatcagtggcctctgcaccgcgcaggcgctgtccaggcggcacggcgtcggggacgtgcttgtcacggaggcccgcgcccgctccggcggcaacatcaccccggtcgagcgacccgaggaagggtacctttgagacttgggagggagaaatttgtgattgtgtcactctcaagtctcaattttgttaggaataattggatctataccattaaaagatccaaactttagatatataccatggaccacacatgtcatttactcatgtggacccacatgtaagtgagatagtaatgatatagatctaaagtggtgatcttttaatggtatggatccaaatttcccattttgttattatgttatttcatgtttatgactgttggaaccatttatgtctattatttggtgaatagatgggatagcggtgaagtctggc

SEQ ID NO: 159624 - DNA, 235 bp, Zea mays
  unsure (1)..(235): unsure at all n locations
  Clone ID: MRT4577_77150C.1
gcatggacgaggcagaggagatgcaggtggtatgtaggctgcacgaggtaggccgatgcggtgggagccatcacatgacaagcatcagntaccatatattcttgatcctacgagagcaagtgcctgctagtatttacgcgaatgtacgtgctcaaacgtgactagtctctggtgcttcatattttaacgtctcatataggctttattagcgtgatgtcgctgtcagacttaatct

SEQ ID NO: 159625 - DNA, 183 bp, Zea mays
  Clone ID: MRT4577_77151C.1
gtgaggaacattgttgaacacgctgaccgaatagatgtgcacgaagcctgcctacatgatggatatcttctacccaaatcgtatgcaaagcttcatcactgtgtctgatgcgcaatccatgcgcacattggacgagtacgctctcgtgagaacaagaggaaccgagagctaccacagtgcttc

SEQ ID NO: 159626 - DNA, 265 bp, Zea mays
  Clone ID: MRT4577_77152C.1
attgataaaatctactcgtggcactgacaaatgtaaaagaggcgagacgcagtaaacgattcacaggacttgtgcagacatagaggcgcggggattccgcccgtttagtagggctcgactggtgcaccgaatttggcatctgcttataagcaatagcgccaagctcttcttcattcctaagaagctggtcatatttggcaagacgctctgatctagaaggttctacagtcttaatttgacccatggccaataccaactgccatat

SEQ ID NO: 159627 - DNA, 376 bp, Zea mays
  unsure (1)..(376): unsure at all n locations
  Clone ID: MRT4577_77153C.1
atccatacccaacaaacctggactgtgagtctgtggttgatcttctggttacatttatgcgtgtgatagcagatcggtaagcaattgtgctcatgttcggaattacctctgaaccgatgtctcgaagacccgaaacacgaatcccccaccatcagcacaaatcctcaactaattcttccacaagacagcagaatataccacactccacgtctgagctcatcggctcacggtcatcttctccgaaacacctccaccgtcccagccgctcgatctcctcctccacctccgcctcttgatccnnccnnatcagcggcaacgtcgcccatccagccacgccttggcagtctccagcaacgacgtctcgagctctggatcg

SEQ ID NO: 159628 - DNA, 413 bp, Zea mays
  Clone ID: MRT4577_77154C.1
acggcaggctttagaagcgcctcgatggaggcggcgagcaacggaacgctgctgtaccgcgaggcgcaagaggtgaagctatgctccgtgcactgcgtcaacaccactatgaagggccccttattcttcaagttcgacctcgtctcgctcgccgccgacctctaccagctcgagcgcctgatgatgctcgacgactcactaagcctctgcgcacacatcgctaccgtaggggacttattcaacgtgtacgagggctccaacaacgtctccctctacatagatttcagcatacacgctctgcagaacgctctgtatgtacgacacctccacgatatgcaccttgattacccagctgcaagtgtcacgccaatttgaccctgagcacgaggttgctttcatttgccaacttcatg

SEQ ID NO: 159629 - DNA, 535 bp, Zea mays
  Clone ID: MRT4577_77155C.1
agcaccagaaaacttcttatcggttcctttcggccaaccatccgtccctaaaaagatgatggtaattatgacaggtatgtcaacgtgacggataaaaagtgcttcaaatggttacctaacggactgcctacattatgtccaagagcaatgacttcatcaaccccattcaggacgaaataaagagtggggggcgggggaagcactaacaccacccatgggaagaacgaagacgaacccacaagtctcctcaccactggtagaatgaaacagcctgctgcgggggcgaacacgaaggaactggcaacccccacggtgcccgttttgtgcgcggcgctggtcgagtcaaccttgccgcccttcagcccctcggccttgcaggcctgcgggccgggggcgttctacgctccccgatccggcgcgggcgctgtcacctggtccagcggggggtcctttcttaagagctgcatgggcaggagcaccttgctgagagcgtaaactgcgaccggcctggcggcctgcactctgctgtggatct

SEQ ID NO: 159630 - DNA, 171 bp, Zea mays
  Clone ID: MRT4577_77156C.1
atgtctggacattggatgggcatcggctcctctgacgaagaggacgatgatgatgagaacgacgacggcagcaatgacgatgacagtggcgacgaggacaacgatgatcatgatatgcctcctagcaagcatcgtcggctccatggtagcttattctggaagagaaagtag

SEQ ID NO: 159631 - DNA, 359 bp, Zea mays
  unsure (1)..(359): unsure at all n locations
  Clone ID: MRT4577_77157C.1
tggggtttaactccttctatatccttttctttgaacctaaaaatcacaaatacttttatttataaacagcgcacccaaaaaaaaaaccaacaacactttactcccaagacgcttaccacaagcactaaaaacactttacgacgactcgggcccttttcantaacccaaaactccaaaactaaaaaatcaatccacttactcccccnaccccttattcacaaccatccnaaaataactcctctttatccctaccctttactaccatnctcctcatactccttcccaacacaagaccncttaatcatgncctcccggtgcccacccacacncttactaaacttcttttcgcaaacaccaaa

SEQ ID NO: 159632 - DNA, 1185 bp, Zea mays
  Clone ID: MRT4577_77158C.1
aaatagtgcatgttcttcatcaggccaaccatctttattacaacatcacatccaggcatctcggcgataagatcaaccttcggtgcttgttgacttgacgacggtgacagggcaggttgcattgttcacaacatagtcgctgacacttcccaagagcaccctcttcgccgtccgaacccccgcggtacaatctgtgacaagtgtcctttggcttggcatccataggccaccgccatcagcagtccaatacagtgacctgacctccacgcgaagccaccaccacaactccacaagatctagaacctaagaacctgcagaggagaggaagaggagcttggggaggagatggccggcgccgagggcgagaggtgggtggggctagcaacggacttctcggaggggagccgggcggcgctgcggtgggcggcggccaacctgctgcgagccggcgaccacctgctgctgctgcacgtcatcaaggagcccgactacgagcagagcgaggccatcctctgggaatccaccggctccccgttgattcccctctcggaattctctgaccctatcattgcgaagaaatatggagcaaagccggacatagaaaccttggacatcctgaacactacagctacccagaaggatatcgtggtggttgtgaaagtcctgtggggtgatccgcgtgagaagctctgtcaagttatccatgataccccgctgagctgcttggttataggaagcaggggccttggcaagctcaagagggtgctcttgggaagtgtcagcgactatgttgtgaacaatgcaacctgccctgtcaccgtcgtcaagtcaacaagcaccgaaggttgatcttatcgccgagatgcctggatgtgatgttgtaataaagatggttggcctgatgaagaacatgcactagtttctagctatttgaaacatgttgaacgaggcaattctaatgtaataataatagacaaagtgccttatgaaggacatggttgacatgcctttgttgctgtatgagtgatgtttatagttttgagggtttgaagatgtggatcatttgcctattattcttccgctgtgctgtatgagcgatgtttatcaatatgcaatgcaaataaagaaacactacagatgcaaaaaaaaaaaaaaaaaaaaaaactcgagaagggcgccggtacc

SEQ ID NO: 159633 - DNA, 315 bp, Zea mays
  unsure (1)..(315): unsure at all n locations
  Clone ID: MRT4577_77159C.1
atcaagtgccagcgccctctcgcagatcgtcgttttttagagcgggggcggcatgatcaagcctgacggccttcacaggggcctcattggagagatcatcacccgtttcgagaagaagggcttctacctcaatgcctttaaactttgaaacctggagagggngattgcttgaattctctacgccagatcacgcctccaagccgcgactgcagggcctcgtggactacatcatctcaggccctgtggtggccatggtccgggaggacaagagcgttggcacaactgacctaaagatcatcggcgccaccaacccgc

SEQ ID NO: 159634 - DNA, 390 bp, Zea mays
  Clone ID: MRT4577_7715C.1
cattaccccaccaactatttaaaggggacatgaccctgtgcacaaacctaacctaaacaaatatttttgggggctctgcctcaacataagctgcataaacaactttcacatgcatgctttacccaacatgaaggctgagattccacgagaacattatcgagacacgaaaccatctaacggtagaaaactcacggtgctacaagggcattcttatatcttggcaaaaacactctttttggatctcatactgtaattgtttgatttttcagggatcacattatattgaacctgctgctcaacaggaactaccacctattattggatcctaagccagaattatgtgcttccaactgagcttcctctaaccgctgggcctggtctttgcctgcg

SEQ ID NO: 159635 - DNA, 293 bp, Zea mays
  Clone ID: MRT4577_77160C.1
ctggctcaggaacctcagtctcctctcatatctttctgctggaggcgtgatcgcgacgatcacggtcatcgtctgcctatgctgggttggcatcggagaaggaattgggtttcgcttttccggtgctgtagtgaacgtgacccaccttccagtggcactcggcctgtatgggtactgctactcaggacactcggtgttcccaaacatctactcgtccatgaaggagcgctcgcagtttccattcgggctcatgttctgcttcacggtggtaaccttgtgtacgccggagttgc

SEQ ID NO: 159636 - DNA, 1486 bp, Zea mays
  unsure (1)..(1486): unsure at all n locations
  Clone ID: MRT4577_77161C.1
tgaccactagctacttgtctgcatctagttgtagacatcgtagcatgtcatgtcaagcaagttggatgatgctccaagttgacccgttcttctgagacgcgagaaagatggtctaccaaattctgtatcaaacctcagtttaattataggccncaagtttcgaggtcgaagtctcgaacgcaagcttgcttcacctaacagacaaaggaaccgggggggtggcatgaacgcataacaaacatcaccagaatttgcccacacgaaggtacccgtcgtcgtcgtgggtcgtgcgtgttgctctgctttcggagcccgtgcgcgagcggaaccaaagtaccagaccatggagggcctgctgccgtccctgtacccctccatcccccaccgcgccagccggggccagtcgaccatccggcacgccttcttaaaagacgacgctgcccccgccaccttgcgcggttcccacacccaaataagcctcccggccggcgccgacgctcctgcattcttcatctccgcgccgcgcggctactacgaccgtgagtgcgcgcctcgaggcgggccgagcccggacaggcacattatccaactcctcttccagttgacgcggcatcctctccttgaccatttccctttcctcccagcctcctctagcagccgtatcactaatccagttgttccccactaccgcctctggtcgaattgattagtcaaagtccagaggccagagcacatctctgtctcgctaatcgccttcataaacccctgccgcagccgcgctcgccgcccagaccaaccaaacacacacaactgtagccgtcgtcgtcgttggcgtgcgtgttgctctgctttcggagcccgtgcgcgagcggaaccaaagtagcagaccatggagggcctgctgccgttcctgtaccgggccatcctccacctcgccagcggcggccagtcgcccaccggcaaccccttcttccgcaacgactcgccgccggagtcgccgctggcggcgcactactacgtccgcctcgccgccggcgccgacgtgccggccttcctctcctccgcggcgcgcggctactacgaccgcgggtgagagccctgccgaaccaggaacgacgctgggcgtgcgagcaggaagaatcctcgtgagctccttcagttgcgtgttcagagtgctggttctcctccctcttcttgtggcttcttggagattctcctccccctcctttgctccttggaataaaggcatggatggatgaggtccagccatccaagggggcctttgtgaagtaggctgctccgcgtcgttttcttccattgtatataggccatatatgacgtgatcagtcgggtgctcgcctaattgcaggttctcagacacgggcgaatatgataccgatttgcaatatatcgccgaaaaaaaatgccaaggctttgagaggttcttgtcctcctgtgcatgaaaaaaaaaaaaaaaaaagcggcc

SEQ ID NO: 159637 - DNA, 389 bp, Zea mays
  unsure (1)..(389): unsure at all n locations
  Clone ID: MRT4577_77162C.1
cgtgagactgtacactggtggcggggggcatgctagtggtggagaggtttaggacagattgctgaccttattagtagaaaactacagtgatgaagatctcgttgcgtgtgttgtcgctgacgatatgggtgttgatgactggacaattgtgcattcgggttgagaaaagtaagtaccttagaggggggacgtatagtggaagaagttggaggttagtatgaattatagggcgaggttaggaatgaattgattgttatggagcatggtgatttgatgatgagctgtcgattnaagagattgngggtaagaagggngntgtaggnnagggggagtgaaatatggtgttnaggatggggtgggtgtgtggtgttgtggaggggtttgatgtg

SEQ ID NO: 159638 - DNA, 358 bp, Zea mays
  Clone ID: MRT4577_77163C.1
caggaaatggaaaccattgaccatctcctcgtgagctatgtgtttgcaagaaattactggttcaagctgctgacaaaggttaacctccagaatttcactccttatgtctatgaagagaataccatgctctggtggaaaagatgtagtgatcagttgcatggaattgccagaaaaggactaaactcgcttatcagtcttgacctctggatattgtggaaacaccgaaacgcctgtgtttttgacggcctttctccctgccttaatgaagccatcaagagaaccgaggaggaaagggacctgtgggtgttaggaggggccacaaacttagatctcttaacagccccaatcccaggtcttt

SEQ ID NO: 159639 - DNA, 1836 bp, Zea mays
  Clone ID: MRT4577_77164C.1
ttttctcgaacgcgcaagagacatgtgcatcttttcattaagaaggaagagaaaaaggatccaaaatggatcagtacaggaagacccccattacggtggtcgaaaacaaagaaacaaaaatacatccataaataaaaggaaccagaaactactatgacctaaagacctgggattggggctgttaagagatctaagtttgtagcccctcctaacacccacaggtccctttcctcgtcagttctcttgatggcttcattaaggcagggagcaaggccgtcaaaaacacagacgtttcagtgtttccacaatatccagaggctgagactgataagcgagtttagtccttttctggcaattccatgcaactgatcactacatcttttccaccagagcatggtattctcttcatagacatgaggagtgaaattctctttaaacaatcagctacatgggcatcttgcttcttttcctcgtcttctactatcttgcacgtgtagcatgcccaatcatccgtaatcgtcccagtccatggtggtgatagacaatgagggtgaacatgccgagaacaaccagaacaatgaagcaacaggctctgctcctcctctgtgttgcaaatttgacacatgtggaactcctcatcagattctgttgattcatgatctgactcagatggagaataatcatcggtgtcgtcatcgctcacatctaccactttcgctactttcctaactcgccctttaaatgatacatccagtgcacgtttacgctgaatctctgtgactgtttcttcaccttgctgaaaagaatcaggttttggaggtaaagggtagttttcttctaccaacttaagaagaagctcccgagggccagaaacaaagtcttccatttcaactccatattttgtgacagcttcttcagttctagcttctccagtgctctgaaggccaatcaccacacatttgttctctgccaaggcctctttagctaacctcacaacagcaggtacctttgcagacatgcacatgtgcctgaagaaacgctgatggctggcccaatacaatcgccatatttgatttgaattgccatcagcaaataattcacttgctgataaaagttcaaggcgcagttcagcccagaattcagctgctcttctgtacatgttctgctttacaagaatgaggttaaactttgtcagcagcttgaaccagtaatttcttgcaaacacccagctcacgaggagatggtcaatggtttccatttcctggtcacaaagggggcactgatcagggtgatcaagccccctcctttgaagtctgtcagctgtccaacacctctgcagcgctacaagccataggaaaaatttgcatttggggggggggggaccaggagtgccaaaccctgtcacaatgctcaaagtatgttgacccaataaataaactctcgtaggctactttggcagagtatttgccattatgggcaaacctaaaaatgtgcgtcaacaaacgcagatgtctggccctatacaatcgccatatttgatttgaattgccatcagcaaataattcacttgctcataaaagttcaaggcgcagtccagcccaaaattcagatgctcttctgtacatgttcatcattcattcctcaagtggagcctccactatataaaaatcagcccctttgtaacttaatgtacggcatacatacatacccctagctttcatgtccatggcaacaagttcaagtgctaccacaccacctctctcaagagcacctaacaatcgtgggaaagttgcatattatgttccttcaccaccaagtgcagtacgaaccatagag

SEQ ID NO: 159640 - DNA, 382 bp, Zea mays
  Clone ID: MRT4577_77165C.1
gcccagcaatgacaagagcaggttgccttactgcatcacaaatggcgacttacgatgaggccaaacaggccttaatgaagtggacaccacttgaagaaggttttcagttacatctcatctcgagtttcatagctggaacagctggtactcttgtgaccgcacctgtagacatgatcaaaacacggttaatgctgcaacaggagtccaaaggcgccagagtatacaggaacggattccattgtgcttcccaggttgtggtgacagagggtgtgaagtcactttataaaggtggatttgccacattcgcgagagtaggccctcagacaacgattacctttgtcgtgtgcgagaaactgcgcgaacttgcaggaatgactgctat

SEQ ID NO: 159641 - DNA, 425 bp, Zea mays
  unsure (1)..(425): unsure at all n locations
  Clone ID: MRT4577_77166C.1
gccggccggttcaggnacacacacgactacgattatctcaactgatggccctaagccctcgcctggcgacacgcatctcgccgcgatcgacggctgtttcccatcgccgctgccatcacaccagatgctcccctgccgacacatctatgcaccagagcccgcgggctctcgtcactgaacccgttacccgtctgtcccgtcgccccatggcatgcacttacgtgacggcatatgaaccagctgccacctctcggtgctgatcgacatacctcgcaacctgacctctcaaaaagacaatgcacctcacgagcccagactccagatctttgacacatacaaccgaggcgaggaaacgaaacaggctcagagacccaaagcgagcgaggaagccagaccaaaagccgtggcggtcagggagatagaag

SEQ ID NO: 159642 - DNA, 182 bp, Zea mays
  Clone ID: MRT4577_77167C.1
tcgtcgggaactacatgttcctgcaggtggcgccgtcgacgatgacgatcacgggcggctgcaccgtggtgccttcgcgcatcacactacggctgtatggcaggcgtgcattgaccgctacctatgagcggacctacgagactgcgacgtgcactaactccgtgtcagcaacgaggtgactt

SEQ ID NO: 159643 - DNA, 2101 bp, Zea mays
  Clone ID: MRT4577_77168C.1
atctgatcatgggcggcacgggcctcggtccagccccccgccggcgggtcctggtcgcctcgctccatcgcttctggagccttacccgcacctcctcctcgccgtctttcccgcgccacccctcgaacagtcattccaggaatcttcccgagattcgcttgcccccccttttcttttcaagtggatctgaacttgggagggaaccccgatgcagccgcggtacggagaagcacgacagccgctgccggggcggtcccgtgggcggacccttggggtttggtaagttactctttatataggcctaccactattttcgtcctgcagatgttatcaaagtcaggcttcaaatgcagcttgctgggcaaagaggaaacttagttggaatggtacttaaagtcacagcacctacaggtttcatatttcacacttcttctgatgttaaattcatttcctagttatatgtgtattgtgaaatatgttagggaacaatatttacacaaatggttgaaagggaagggactcggtcactctacctgggacttgcaccagcgttggcgagagctgttgtctatggtggccttcggtttggactgtatgagccctgcaagcatgtctgcagttatgcatttggttcaacaaactttgcttttaaatttgcatctggagtcattgctgggggccttgcaactgctttaacaaatcccatggaagttttgaaggtgaggctgcagatgagtaaaagcagtaccagtacaataagagagatgagaaaagttatagcgcacgaagggtttaaagcactttggaaaggagtcggcccagcaatgacaagagcaggttgccttactgcatcacaaatggcgacttacgatgaggccaaacaggccttaatgaagtggacaccacttgaagaaggttttcagttacatctcatgtacagtgaattctctatttctctattatgatgtgtatcctttaatgagatgaatggatggctaatctttatctgcttggaagctcgagtttcatagctggaacagctggtactcttgtgacctcacctgtagacatgatcaaaacacggttaatgctgcaacaggagtccaaaggcgccagagtatacaggaacggattccattgtgcttcccaggttgtggtgacagagggtgtgaaatcactttataaaggtggatttgccacattcgcgagagtaggccctcagacaacgattacctttatcgtgtgcgagaaactgcgcgaacttgcaggaatgactgccatctagtgcgaccccaaattgcataatgtgtggggtccaacggttgaacagcatactctacccgagttttcacaccattctttattcaccattcatgatgagaagggagaagataagcacccactgggatgtctaaggattgggaagcccagagctccttcagatttatcatacctcatttgaaatttcgaaatagcgtgattgttgttatgtttgctctaagacttactcatcatatctccaatctcatcttgtatttcaaactacactctacaaacaatacagtctgtagtgtaaaaacattaaaaaaaaaaaaaaaaaaaaaaaaaaaaaaaaaaaaaaaaaaaaaaaaaaaaaaaaaaaaaaaaaaaaaaaaaaaaaaaaaaaaaaaaaaaaaaaaaaaaaaaaaggggggggccgttttaaaggaccctaagtttacttcccgcgggctggcaaggtaaaagtttttttttggggcccccaaatttaaatcccctgggttgggccgcggtttaacaacgtggggacgggaaaacccctggggttccccaattaaatggctttgaagaaaatccccttttccccagttggggtaataccaaaaaggcccgccccgatcccctttccaaacatttgcccaccctaattggaaaagggcccccccttttaccggccctttaagcccggggggtgggggggttccccccagggggccctttacttttgccaggcccttagcccccgcccttttggtttttttcccttcttttttcgccaggttggcgggttttccccggaaagttttaaatggggggctcc

SEQ ID NO: 159644 - DNA, 674 bp, Zea mays
  unsure (1)..(674): unsure at all n locations
  Clone ID: MRT4577_77169C.1
gcatttcttgctctttggtctctccagaatcatcctccggccagcggttcttggtctactcgttcgattgcttcaccattctttcctgctcctgctctttggcattttttttcactcctcccatcgaattgtcaatccaggaatcttcccgagattcgcttgcccacccttttcttttcaagtggatctgaacttgggagggaaccccgatgcagccgcggtacggagaagcacgacagccgctgccggggcggtacgcgctgtaccacttcggcaccagcggcgccgccgtcgccgccgccaccgccgtgacccatccgttcgatgttatcaaagtcaggcttcaaatgcagcttgctgggcaaagaggaaacttagttggaatggtacttaaagtcacagcacctacaggtttcatatttcacacttcttctgatgttaaattcatttcctagtatatgtgtattgtgaaatatgttagggaacaatatttacacaaatggttgaaagggaagggactcggtcactctacctgngacttgcaccagcgttggcgagagctgttgtctatggtggcccncggtttggactgtatgagccctgcagcatgtctgcagttatgcatttggttcaacaaactttgcttttaaatttgcatctggagtcattgctgg

SEQ ID NO: 159645 - DNA, 1239 bp, Zea mays
  Clone ID: MRT4577_7716C.1
agtgagtttttttttttttttttgacaagacagcgaagagtacgtaaaaaaaaacaaaaataataaaaatcaaaataatgttttcacatgtcgacctataccctagctacaccgtcacacattgacacatatgtatatgttatgtatacgccgtatacattgtgtatactaattttacttcctcttattcttgctgccaacgagcaagacgacgtagaagagtgccctgaagaagaacccccaggccacagtaaccagcaggcatttccatttgccaatgtccgtgacggcctgctgcgccagcacgtcggcgccggtggtgacgcaggttgtggccgtcatgttggaccccagcgtcctgctgatggcctgcagcaccttgagcttgacgggctccgtcatgtgccctatgggcgtgccctcgaacatctcgacgccgcgcgagaagcagcgcgaggcgtccctgaactcgttctgcagcaccgcctggtacgggtacttgaccagcgacaggtagtggaaccagatccagtagtccgggatcctgtcgcggttgatgaagaagcccgagaagaggaggaagtaggcgaggatggcgacgaccaccgtgtagcccagcatgacgtgcggcaccacagcggagaggaaggtgacgaagccgctgcccgcccagaaggaggcgaggatgatgagcacgaagaagaggaacgagggggcgccgcccgcgagccccaccgcccagaacgtggtgaccgcgaacgccagcgacaggaacaccagcggcgggaacgcgaccacggcgttggccagcacgtaggagatgcggcggtaggcgttgtgcgcggtctcgcggaggtagatgtggcgctcctgcacgaacaccggcagcgcgtcggcgcacacgtagaacatggtggacatggccatggcgaagaagcccaggcgctcctgcacgcccttgggcgtgtcgtcgaggcgccagaagatggtggccaggatgaagccggtgaccatgatggtgccgaggcgcatgacgaagagctccggcatgcggcccgtgttggtgaaggagcgcttgatgagcacccacacctcggtccacggcgggttggcgaacgttggcaccgacgacgcggtgaccgcgctcccggccaccagcttcccgcgggacacgctctcggcgatggcgagctccagcggcatgagcttgctgctgctatcgttgtcgtcgtcgttccc

SEQ ID NO: 159646 - DNA, 965 bp, Zea mays
  Clone ID: MRT4577_77170C.1
gctctttggtctctccgaatcatcctccggccagcggttcttggtctactcgttcgattgcttaccattctttcctgctcctgctctttggcatttttttcactcctcccatcgaattgtcaatccaggaatcctcccgagattcgcttgcccgcccttttcttttcaagtggatctgaacttggtatggaaccccgatgcagccgcggtacggagaagcacgacaaccgctgccggggcggtacgcgctgtaccacttcggcaccagcggcgccgccgtcgccgccgccaccgccgtgacccatccgttcgatgttatcaaagtcaggcttcaaatgcagcttgctgggcaaagaggaaacttagttggaatgggaacaatatttacacaaatggttgaaagggaagggactcggtcactctacctgggacttgcaccagcgttggcgagagcctgttgtctatggtggccttcggtttggactgtatgagccctgcaagcatgtctgcagttatgcatttggttcaacaaactttgcttttaaatttgcatctggagtcattgctgggggccttgcaactgctttaacaaatcccatggaagttttgaaggtgatctatcttgatatgaactcacttcagaagcgtgacttgttttatgtactggatctgaactgaacaacatactgtaggtgaggctgcagatgagtaaaagcagtaccagtacaataagagagatgagaaaagttatagcgcacgaagggtttaaagcactttggaaaggagtcggcccagcaatgacaagagcaggttgccttactgcatcacaaatggcgacttacgatgaggccaaacaggccttaatgaagtggacaccacttgaagaaggttttcagttacatctcatgtacagtgaattctctatttctctattatgatgtgtatcctttaatgagatgaatgga

SEQ ID NO: 159647 - DNA, 128 bp, Zea mays
  Clone ID: MRT4577_77171C.1
aaaaaggctaatctaaatggagccgaagaactcccggttagacagcgcggtcaccagcccgtacgccactgcgccgtccagcccgcgcggctggcgccttgtagactccgagggatcggcgggtagtc

SEQ ID NO: 159648 - DNA, 306 bp, Zea mays
  Clone ID: MRT4577_77172C.1
gacactcagatcgagcctggattatcgttcctatctatgaaaaacatctgcaacttagctgaaatgcaaaaggccggcttttgtgacagagaatacactaacaatacaatgcgctccactgctatctaattcatgtggtccgatcagctgattcacatatttaacgcgtatgggaatgacagtactagcattgtggtgcctggtatttatgtcacattacagaaggtacgacaaacataaaagctcttttacacgtgtgaagaagatgtcagaatattattgatggtaaatgctcataaaatggat

SEQ ID NO: 159649 - DNA, 585 bp, Zea mays
  Clone ID: MRT4577_77173C.1
agcgccaaaatcagaagacgatcctctatggggtcttatagctgctgcaccacccaaaagcgcagcaaaacctgcagacatcaagccatcaacatcacataacgatgaggatgacctgtggggttcaatagcggcacctcctccaaaatcatctggaaagcctttgaagccagctgcagcgaatagtgacgacctatggggtgccattgcagcacctcccccaggaaccaaagccaggcccttagcctcatcaggtaagggccgaggaacaaagcctgcgcaaccaaaacttggtgctcaaagaataggaagaacatcctcaactggaatgtgatggcttatgatatcaaatgttgtacaagagtgcgaagttttcctttttgtcccccatgctttgagtctgaccaggatgtcattctttgtaaactagcaaaaggtcgtcactaatatatggacccaattttgacaaatgtattaatattgtttccccattgtgtattaaaatagacacatacgttttttttgtattttttgtacatcccagctgtttcgagtaaatattattaatatatttgcccccgcctt

SEQ ID NO: 159650 - DNA, 700 bp, Zea mays
  Clone ID: MRT4577_77174C.1
acaagatgccaagttctccgtcaccagcttttccttctttttaattctcccagcgattcgtctcctctgctcttatctccgctgtgcctgacttttcctcctcttcgtcccctcccacccgcaaccgcacagagaaaggggaggaggctctctctacccagcgcagcccgagcacccctccaccccggatcgggacccctgctctgcgcaatccacccatggcggatgattcaggccgccccttgccaaagtttggcgattgggatgttaatgatccagcttctgcagacggattcactgtcatattcaacaaagccagagacgagaagaagggtgggaacggacaagacactgagtcaccttccaaggacaccaggactgagagggtggaatcttatgctgcaaagccaagcacgaagaaatggttttgttgtgtgacagccagccctacgcaatcctgaggaagacaatcgcatgcgctttggaaatactgtccctttaattttctatacatactatccataagacaatgtaggggtacccagggctctccgggctatctcgtaaaactcttgcgtgcgtgtatgtatggtgtgagagaattcgcaaagtggacttctggttgtaattcttagtcgtctctctctttttgggttggtcaaggttctatgatccagcaatccactgaactgtttggtac

SEQ ID NO: 159651 - DNA, 1492 bp, Zea mays
  unsure (1)..(1492): unsure at all n locations
  Clone ID: MRT4577_77175C.1
ccgccccttttcctttccgttccactccacatcgattcgcctcctcctctcttttactcttcgtcgtcctcgtctcctcccacccgcaacccgcacggcagagaaagggcaagcccgccgccgccccggcccccagcgaccagcagatggggaacccgccgccgtccgcgaccccaccatcccggaggtcggggcccgtccctcgccggagtccggccaaggcggtgtcatcaatccgtcccttgccaaaggttttacagtcgtattgtccaaaatcagagttgagaagaagggttaaaattccaattcaacaaagccagagttgagacgaactaggcaaaggctgaagacgcaaagtcccctggcacgaaacacaagactctgaggctgcagtcttatacaccaagacagagaatgcggaaatggatacttgcatgcccagcacgcactacaccgttattgttctgtcaaaaccatccgtacgaaattctggggatgccaattgctctctagactctaaaaaggtcgctttagatatctctgatgcacacttggcataagaaggtgttgggggttgccagcatgcctgtatgtagtggaggtcgggagagttgtctacgttcattttcgcttttttttttaactaaaaataagaaatctaaatgaaaaaaaataaaatgactcactcccgtcactagctttccttttccttttcaattctccacagcgattcgtctcctctgctcttatctccgctgtgcctgtgcctgacttttcctcctcttcgtccctcccacccgcaaccgcacagagaaaggggaggaggctctctacccagcgcagcccgagcacccctcagccccggatcgggacccctgctctgcgcaatccacccatggcggaggaatcaggccgccccttgccaaagtttggcgattgggatgttaatgatccagcttctgcagacggattcactgtcatattcaacaaagccagagacgagaagaagggtgggaacggccaagacactgagtcaccttccaaggacaccaggactgagagggtggaatcttatgctgcaaagccaagcacgaagaaatggttttgttgtgtgacagccagccctacgcaatcctgaggaagacaactgcatgcgttttggaaatactgtccctttaattttctatacatactatccataagacaatgtaggggtacccagggctccaggatgggctatctcgtaaaactcttgcgtgcgtgtatgtatggtgtgagagaattcgcaaagtggacttctggttgtaattcttagtcgtctctctctctctctttttgggttggtcacggttctatgatccagcaatccactgaactgtttggtactgctaaaaaaaaaaaaaaaaaagagaaaaaatttcgagggtatatatatacctaaaaccggnnacttcttatnntataataaaaaaaanaaaaaaagagggcggnn

SEQ ID NO: 159652 - DNA, 789 bp, Zea mays
  Clone ID: MRT4577_77176C.1
gggcgattgggttcctcgaggccggccgggagtacagttgtcaagttctccgtcacggccgttccttttcttttggaattctccacagcgattcgtctcctctgctcttatctccgctgtgcctgacttttcctcctcttcgtcccctcccacccgcaaccgcacagagaaaggggaggaggctctctctacccagcgcagcccgagcacccctccaccccggatcgggacccctgctctgcgcaatccacccatggcggaggaatcaggccgccccttgccaaagtttggtgattgggatgttaatgatccagcttctgcagacggattcactgtcatattcaacaaagccagagacgagaagaagggtgggaacggacaagacactgagtcaccttccaaggacaccaggactgagagggtggaatcttatgctgcaaagccaagcacgaagaaatggttttgttgtgtgacagccagccctacgcaatcctgaggaagacaactgcatgcgctttggaaatactgtccctttaattttctatacatactatccataagacaatgtaggggtacccaggcctctccgggctccaggatgggctatctcgtaaaactcttgcgtgcgtgtatgtatggtgtgagagaattcgcaaagtggacttttggttgtaattcttagtcgtctctctctctctctctttgggttggtcacggttctatgatccagcaatccactgaactgtttggtactgcgtaaaaaaaaaaaaaaaaaaggcccctagggcc

SEQ ID NO: 159653 - DNA, 315 bp, Zea mays
  Clone ID: MRT4577_77177C.1
aaacaaaggggcctttttttcccgccccgaattacctgaaacaacccattggttagcccccaagcggggggccccccctgggaatccggtaaacaagggcgtttttaaaacccccccccggggttggaaccccccttttccccccctgttattttccccccccccacattatccccccgggttggccgctggcaaattttaaaaaggccagcccccctggctgtaactgggaggggaccatcccccctaaagaggaaattttaaaccccgtttatggggccctttgcccagggcgggcccccgattttttttttt

SEQ ID NO: 159654 - DNA, 692 bp, Zea mays
  Clone ID: MRT4577_77178C.1
gaatcttcctgccttttccacttcggcagattccgccttcaaatctccgcccatctcacttgcaaggtctacgagattctgcccgcctcctccatcagatccctccccgcgccagattcctgcatctcctcgtccgaaccttctttcagttccgtggttcctcttgctttctgcggcctgatgggaagcagagatgatgatggccaaagcgcagaaggtcagggttacgccgcggatatcaattccatcagggaggcgcaggcccgcatcgcaccatacgtgcacaagacacccatcctgtcatcaacttctattgatgccatagcagggaagcagttgttcttcaagtgtgaatgcttccagaaggcaggggctttcaagatccgaggggcatccaattcaatatttgccctcgatgacaaccaggcggcaaagggcgttgtgacgcatagcagtggaaatcatgctgctgctgtggcactggctgcaaagttgcgtggcatacctgcttacattgtcatacccaaaaacgcgccagcatgtaaggttgagaatgttaagcgttatggtggtcaggttatctggagcgatgtcaccatggaatcaagagaatctacagctaaaaaagtccaggatgagactggtgctattcttattcatccattcaatgataagtatactatcagtggtca

SEQ ID NO: 159655 - DNA, 789 bp, Zea mays
  unsure (1)..(789): unsure at all n locations
  Clone ID: MRT4577_77179C.1
tggagatctccgacgaagacgacgacgacggtgacggggaggcggacgacgacgacgacgatgacggggatgacgacgacgacgacgacgaggactcagacgacgaggaagaggtcgacggtgaagacgtcaggaggtataactttttagtatccgtctgtgctgccagatccgtgtttactagtccttctggaacagtttcttcccagagaaattggatctgcttagattattacttatgtttccacgcaagggttcgtgcgtttctggtctcttctatggtaaaaaatcacctgcaaaaattctaaagagaacaagtcatgtttaagaacaaaatcacctgcaaagaagatcaaatcttgatattttttctgtaatttttttctacaaaatttaagttctctgtgcttttggagatgatgattctcatcagaggctgtttctgaggggagccaagagctttttccctgtgctgcaagaaaactgattgccgttctgatccaaagcatatgttgccaacttgttcatggatcgatttgtgctgactgtttctcacaggaaccatccagtgacctttttatatctttattactgttgcttgtttttgataaatctaaacaactgagacagcaaatcagttgggaaacgagacaactgatttgtcgtcctctctctttntttgtttaataaaaaaacgagacatcaaatcaggacctagtggtcaaatgcaaaaaagtagcgtcagttgggaaatgatgataacctattncactgagggtagataaatgt

SEQ ID NO: 159656 - DNA, 215 bp, Zea mays
  Clone ID: MRT4577_7717C.1
atggtcttggacccgtgcaacgcggcgtttttgtgactgatgggggggataaaccaagaggcgttttgcttcgggggttaccttgggtgcctgaatgtgattgccacatggggtgaacggttagaaaagcccttggatcttccgattcatttatgggaggggtgatagtactgagtgagggctgcaaatgatttgggtgcttcgttcaaacctaa

SEQ ID NO: 159657 - DNA, 622 bp, Zea mays
  Clone ID: MRT4577_77180C.1
ggaaaaaaagggaacagttttttgggttgcagggaaccacaaccacccgattgttttggccgggcaaagccagccaccacggaaaacaaaaagagccatccaatgtttacgggacagggaaaagggacagatctgacaaaagctacatcgttccctttttatttttttttttggcgggtgggggagcacccaatcctgccgtccggggtaacggggccaccccatggagcccggaaaactgcaggaggacggacttgatttttttttttggcaggaggaggagcgctgggccgtccttgcacagttaaaccttgaaaatgtccaaggaaaacccgttgaagcaactggcaacagtttgttggacgtcaaccccaacccctttaattgcccttatggtagcgagcaaaaccccaggcctgcgagcgcaaagcatgtggatgttcacctcccgcccttcccttggggtcctaacctaaacccttggttgcttggaagtagggctaggaaacccgctcgggcacagtttttccttcacgcaaaatggtagggcgggcaccgtgggaatcaaagggcggaagctcgtgggcgtcggaggcagcaaggccgtggaaactggggatgc

SEQ ID NO: 159658 - DNA, 668 bp, Zea mays
  unsure (1)..(668): unsure at all n locations
  Clone ID: MRT4577_77181C.1
cgccatctctcttcagagtttcagactgacagatangctcccccggcatggccatgtctgccgcctcctcctccttccgaggctccggcctatgtccaccagcgccaccacggccttcccacctaccgactccgctcccttcttctccgccgcccccggctccttcctcgacccgaccgcgctcgcccccgacgacgccatcgcgttgctcccggggggcgcggactcctagggctccgcggcggcgctggcgctcttccgccgcctgtcgtcccgcccggacatgcgccgcctcatgcggctctacgccacggccgccaccgccttcgtcgcgcgcgggaacctgcccatggcgcacgaggccgcgcgcgcaatggtcgccgccttcgcggaggccgggcgcctgcgggaggccgcggacatgctgctagagctgcggagccacgggctcccgctcgtcgtcgagacggccaactgggtgctccgcgtcgggctgcggcacccgggctgcttcacccacgcgcgcgaggcgttcgacggaatggcacgcgccggcggcggcgtgcgccccgaccaccgcagcttacgggcgctcgtcctccgggtgctgccgggaggggcggttcgaggaagggcgacgcgctggtggcgggcgatgtgggcgcagg

SEQ ID NO: 159659 - DNA, 616 bp, Zea mays
  Clone ID: MRT4577_77182C.1
ggcggcgctcaggcggcggccgcgacgaatccgcacacgcttgcgcccatctcaccaactatgaccgcgtgacccgcccgcctatatagccaacccgacctcgccgctcttgcctcaatccataccgcgagaaggtctcgggagcgataccgagggagaagagagacccgccgccgccttatttactcggcatcaccggagcacgaccattgggttgccaggggtgctaactaagactggtggaaccgattggtggggtttcgaggctcggtgaccgaccgtggaatacccaattgctcaccggagtgctctactcgcagcaaagccgctatttgccatgggcagctctctgggcatcaaatccatcacaggagaagaacatgtggtctaggaggagccttacaacgatgagtacgagcttatctaggtggcgtctcccagtcagcttgatggcgccgaggaataatacttagttcgttttattgttcttattcatttttgtaagacttctgctatataataatgatatttgtgacatttatctctatacactttgtaattatatgcgatggacttgtttggcgcacatatgagaacgcacccgtctatatccctt

SEQ ID NO: 159660 - DNA, 806 bp, Zea mays
  Clone ID: MRT4577_77183C.1
tctgtgatggtgatgaacaatccttgttgatttcttatcaatgaccctggtcaacctgaaaaccacgaaagcagcggtctgttgcctggtttgatgacactggcaaaaaaaaaaaaaaaaaaaaaatctttgatgaggaaagtgatgaaatgcccaaacaggattctggcaatgttaataacactgcacaaggaataatgttagataaggtcacgagttctccacctgaagtggtcaagcaagttgttcttgaatctagtccaccagtccctcaaaaaccttcaactgtggatgtcttgcgcaagaagatcacatctgtggaaagaggtagcgaagggtttctatttgtccaggacctttttctctctggtatgaacccgtttgcaacaccaaataacatacttcatgtccaccgctactctccaaacgatatcaccgcacaatgtagatttgaagcttttgaaagacagatgaagtcaactaaagaagcacgtggtgatgcaaatgttaagtatggctggctaggatctaggaagagtgacatagttaggattctcattaatggtttgggtactactgcaaatcctgttgagaaagctggtttgagtgctggtgtatatctttcacctgaaaatcgagcctttaccagtgtcggtctttgtgatgttgacgaaaaaggagtgcagtatatgttgctgtgccgtatgatatcgggcaatgtagaagctgttgaacctggatcccaagggtcttttccaagcagtgagatatatgattctggtgttgatgattgttcaaaccccaag

SEQ ID NO: 159661 - DNA, 806 bp, Zea mays
  unsure (1)..(806): unsure at all n locations
  Clone ID: MRT4577_77184C.1
ccggccgggacgtcattcttaccttcgttcctggcttacaacatgaagctatcatccatcctcagcgtctgggtcttcaccctcgtcagcaccgtcttcggtgccgaacttgtcccccgatccaccctcaaggaagtcaccggctatggcaacaaccccacaggaactcgcatgttcctctacgtccccaagaacctgaaggcgaaccctgctgtggtcgtcggtcttcactattgtaccggtactgctcaggcttactaccagagcaacaagtgggcttccaatgctgagaagtacggcttcattgtcatctaccctcagactccttacactcctggtaactgctgggatgtctcctccaagatgaccttgacccacgagggtggtggttgcagcacctctgttgccaacatggtcaagcatgttctcaagaactacagtggtgactccaagagagtctttgtcactggtgactcttccggtgctatgatgactaacgtcatggccgctacctaccccgacatcttcgccgctgccattgtctacgctggtgtccccgctggctgcttcatgagccaggctaaccaagccgctgcttggaactcgacctgctctcagggccagtcccgctacactcagcagcagtggggccaacgttgtcaagaacatgtaccctgnctacaacggccctcgccccaagatgcagatctaccacgggactgccgaccccactctcaaacgtcagaactactacgaggaaaatcagcaagtggaccgggtgtctttggctactctgctacccccaa

SEQ ID NO: 159662 - DNA, 445 bp, Zea mays
  Clone ID: MRT4577_77185C.1
ccccgcccgggggggcgcccgaagggggggatccccccccccgggggggcggccctgggggggcccggcccggcccccagcgggggggaatcaggggcaaagccggtccccgggggaaaaggggtcccccccccaattccccccaacatacggcccggggggaaaaaggggaaaccccggggggcccaaggggggggcccccccccattaaggggggggggcccccgggcccgtttccaggcggaaaacccggggggcccccgggtttaaagaatcggcccacccccgggggggggggggttgggtattgggcgcccttccccttcccggctaaaggactcggtgggcccgggccttcgggtggggggggggggttcaccctccccaaagggggggatcccggtttccccaaaaccgggggataacccaggaaaaaacctggggc

SEQ ID NO: 159663 - DNA, 829 bp, Zea mays
  unsure (1)..(829): unsure at all n locations
  Clone ID: MRT4577_77186C.1
acagaatacgcaaacaccttcttcctttccaagtcttcttcgttcttccttgttcttccaatctccttcctatccctctgttagggtagccagtagctaacaagtggtatcagaggcagcgatccttggcggtggagtcctggagtcttcgattcaccacactcatctgactcgtttccgccgacgccaaatcctcatgaatccggatactcaggtgatttttggaagaaatggcgcggcgattcgcggagagtgacgcgaagtgggatcggcgtatggcagagcaagaagcccgctgggatgcgtcgttcgctgaatcttccaaaagtcgcgctcaagcaccggagaagaacgctggccagatcgaggactggcatgcttccatggaaggggtggtggatgatcttcgtttggaagtgggcaagatctccaaaaattgggaacgtgtcgtggtggacaattcgactaccatgacgggcgttctcgcaccttctccaccggctgtcgcacgcccatctgccggagtcacagccgatctgccccacgggcaccgcgtcgagcttatcaccggggaggatgggattttgggtcggtcaccacccttctccatcccccggtcaagggtacgtactctactgcatcccagcatcagttgtgtgcgggttctaaattccatttgccgggtgctgctcatgtcaagggtgattttactcgggttgatggttctggaggagagattagaggtcgnttgcctaaagtaacttncctacgtttgatggagaaacccaagctgtggattaacgcagtagagatattttgacatgtatgc

SEQ ID NO: 159664 - DNA, 243 bp, Zea mays
  Clone ID: MRT4577_77187C.1
cttgatcgcctcctcaagctacgctgagtttggggggcaaatacgaaccgcccaccaagcgtgtgagctgatgggcatcgacttcactaccgcctggtgctgtccaagcgacagcatcttcggactgttcgtcaagaacgtcacgaagttcagacaggtcgtcttcatggaagtagagatccagcaattgaaggatgtcactgggtcctacgaggtcgatgcgatgccgaacttcgacatcgt

SEQ ID NO: 159665 - DNA, 255 bp, Zea mays
  unsure (1)..(255): unsure at all n locations
  Clone ID: MRT4577_77188C.1
ggaaccattcaatcagaggatcaatttactgggcgccggttcagcaagcatctcgcgcgcatgttctcgcgttcttcggaccttgggggggtgtgtttccngggttaacatcaccccggggggggggggggggtnntccccnntnnctcnttcccttnntcccctgcttcttcctcncctccccctntccccntnncctccgggcggcggccctnggggctcgtggcggctgctcgcgggcctgcgtcgtcttgg

SEQ ID NO: 159666 - DNA, 292 bp, Zea mays
  Clone ID: MRT4577_77189C.1
ggcagagaggggccgtgggccccgccagacttaccgtggaggtgggcgacttggtgggtgcagcgatagacacgctggaaatgagttaagacctactcaccgggcatatgagcgacacagcggtacaggccgtggctactggatgaactgtgaacggtgtgcgcgtagaaatcgaggtacctgacctgataaatgccttgcaaataacactgggagagctgttaattctgaggagactactagacgttcggcaagacacaagaaatcctggtgatccactcactctggggca

SEQ ID NO: 159667 - DNA, 121 bp, Zea mays
  Clone ID: MRT4577_7718C.1
tctccccctgcttgaggatggcagggaggcactgctctccgtccgcatcccctgccactccatcaaaaactcgaacgcctcccaggctgtgccacaaatgccgttgatctcccacaacact

SEQ ID NO: 159668 - DNA, 450 bp, Zea mays
  unsure (1)..(450): unsure at all n locations
  Clone ID: MRT4577_77190C.1
gaactgaacagtacccaaaaattcacattcgaatctctctgtgtcgtgattcttcnttcagtgcttccacgcctcatacatctcatnnctcatctcatnnctcatctatttctattttattagacaggggtaccccatgggaaccgcgttcctgcgggctgggggctccatccttgcgtaccgagtcgtgctcctggcctcagatgtccccgtgcatatctcgtgagcggcaccccctcctccatagtggtgtcgtgttattgcctgcgtcatcggcgaacccctgcaccccgccctgtgatggcgcctccttagaggggggccgcgtcattactttccgcattcccgcctttcggcgtcccctcgggtgcccgggcgggcccctccgtgatcctnnccttggnacgtgcacccgcacatnnngtgctggnnngccatgctnnngcgcga

SEQ ID NO: 159669 - DNA, 425 bp, Zea mays
  Clone ID: MRT4577_77191C.1
gaaaaaaaaaaaaaaaaaaaaaaaaaaaaaaaaaaaaaaaaaaaaaaaaaaaaaaaaaaaaaaaaaaaaaaaaaaaaaaaaaaaaaaaaaaaggggggccaaatataaaggtggcgcgagttttttttcgcgggccctgctttcctttcccttttttgcgccggcactctattttctatggcctggcctgaattaaacaccgtgggggctggtaaaccccggggggtctggaaatatcctggcgggccccacctccccttttggccagctgaccccctctcggaggggtcgtgacttatcgactttgccaacacaaccccccccacaaaggggagggggacccgccctggaccggcccctcccccccggcgcgtgcctctaaccccgccggctttaccctttccccccagcgcggccctatcccc

SEQ ID NO: 159670 - DNA, 400 bp, Zea mays
  unsure (1)..(400): unsure at all n locations
  Clone ID: MRT4577_77192C.1
gaaccacaaacaaaaggggaagggagggactaaaagagcacagagtatacacccctttaatgaaaaaaacatttacaagaacccccaatattttgtatactgaacaagaatgctgccttccggcgccaaaataacctcaggtacatattctgcagaatgcacaatggaaaaggaagcatttaagtaaaccaaacacaaaactccgtgccgaacaggttttgggaggacggggccatgaaaaaacacattatgctcccccctttcaatgccgaacccancaaatggcatggggaaaaaacaaccataaacacaccttcggaagcactgtaataacatccgggcacaatggcttgccagggagaaatcttgcacacacactttacgtgctgcggggaaaacc

SEQ ID NO: 159671 - DNA, 633 bp, Zea mays
  Clone ID: MRT4577_77193C.1
gaaaaaagaaaaaatttatattattaccattattaacacatgagcgcagaagagttggcgttgccgttgcggcagaaaatccaagcggattgttacaaaatattgtcatgtgatcaaccctctcccctgacagttttctcccaagggacacaccccttgggagacactgtatccacatgtatataaaccagattctctgcaataaagatctacaactgtcatttgcactattctctcgaatcttgttttcactaagttacaacacgttatcagcactgctcacgagatcaaagaagaatttgtcgctcgcaagagaagaaggagcgatttgattgcccagaaacacacgttgctctccaacgaaggccataccaagcgcctgcggcctgcagtctgctcatcacggtcttcaccgacaacgaccacccatcagggaagaagagagacactagcctccaaggaatggaggtacgatgcctatcattttttttttcgtcgacacgctcacggcaggggccactccatgccatggagtgcacgccagttgctggcttgggccgcttgccccgttttgcgccgtggtagaggccgcgccggggctgcgcgctcgcgctggctttggccacacctggc

SEQ ID NO: 159672 - DNA, 828 bp, Zea mays
  Clone ID: MRT4577_77194C.1
atgcgggtacttgcatatgggttaccttctgatgcagtagacgagtacattcaaattggcgagtccacagctagggaatgccttcatcatttttgtcgaggaatcattgcatactttattgggtggtatctacgaactcctaatgaagctgacataacacgcatcatgcaccatagcgaatcaaggggtttccctgggatgttgggttctatagattgcatgcattgggagtggcggaactgtcctacggcctggcgtgctcagttttgtggcagaaatgggacaaacaacgacgtcaacgtgctccaccgatcaccagtattcgaccccatgacatccggtcgaatgccacctgtccattatacaattaatggtaatgcttataacttcggttattacctagttgatggtatttaccccaactggccaacttttgtaaaagctatcaggcacccatatgagcaaaagaaagtctatttcacacaaatgcatgaaagttgtcgaaaaaatattgagcgtgcatttggagttcttcaagcacggtgggcggtgctgcgaggtccagtgtatggttgggatcgtaatcgtttaactgagataatcacagcttgcatcatcatgcacaacatgattgtagaagacgaaggggcgtttgctgctaatattgattttggagagaacgcttcaaccattgaaccaccgcaacttattgcagaaggaagggcggaatgggtcataaaccacttcgatcttcgtcgccaagaaagatcgtgctccctccaaaatgatcttgtcgagcatttgtgggctcgacgtggaagcatgtaa

SEQ ID NO: 159673 - DNA, 1404 bp, Zea mays
  Clone ID: MRT4577_77195C.1
gaatcttgcaacgtcatcaatcccaggatcacagtatgtctcacagccatagcgatgctggctcttactcgagtgatagtgaggagggaaacacttatgcttgtaaatcttcttgtcctaaacatagtggcgagacgccacctgcaacgacggtcccgtttgcctcggcgggttattcatagagatcattttcgtggcgaggaatcttatccatcatcactacttcgccgcgaaccctgtgtatccaccccacgtctttcgtagaaggttccgcatgagtaggcctctcttcctgagaatcttgcaaggacttcaacaacaggattcgtactttacacaacgggttgacgcaactggtatgccaggtctaggtccactccaaaaagtatgtgcggcaatgcgggtacttgcatatgggttaccttctgatgcagtagacgagtacattcaaattggcgagtccacagctagggaatgccttcagcatttttgtcgaggaatcattgcatactttagtgggtggtatctacgaactcctaatgaagcggacataacacgcatcatgcaccatagcgaatcaaggggtttcccagggatgttgggttctatagattgcatgcattgggagtggcggaactgtcctaccgcatggcgtggtcagttttgtggcagaaatggtcgagcgtccatgatactagaagctgtagcaacgtatgatctttggatttggcatgcttttttggcatgccagggacaaacaacgacgtgaacgtgctccaccgatcaccagttttcgaccccatgacatccagtcgaatgccacatgtccattatacaattaatggtaatgcatataacttcggttattacctagctgatggtatttaccccaactggccaacttttgtaaaagctatcaggcacccatatgagcaaaagaaagtctatttcacacaaatgcaggaaagttgtcgaaaggatattgagcgtgcatttggagttcttcaagcaaggtgggcggtgctgcgaggtccagcgtatggttgggatcgtaatcgtttaactgaaataatcacagcttgcatcatcatgcacaacatgattgttgaagacgaaggggcgtttgctgctaatatcgattttggggataacagttcaaccattgaaccatcgcaactaattgctgaaggaagggcggaatgggtcataaaccacttggatcttcgtcgccaagaaagatcgtgctccctccaaaatgatcttgtcgagcatttgtgggcatggcgtggaagcatgtaaacttcataatttgttgctactttattttcaagttcattgaactatgtttaatttgcattgtaatgtctaacctatcggttatgaaataaagtttatgatcattgg

SEQ ID NO: 159674 - DNA, 278 bp, Zea mays
  Clone ID: MRT4577_77196C.1
caaaaaaatggggggggttttaaccaaacaccaagaaaaaaaaacaaatctagatacagccctaacatactaacaataaaaccgggggggtgctcatttaaactggaccggaaaccaaataaccccccaaaaatggagagaaccgatctgtctttaaactttcagacaaccacaggaccaccccgttaaccaggtggcacaactcgacgggccaccctttaactaaccaaaatatgctccccaagggctgtacaaaagttggacacaaccctgcccaa

SEQ ID NO: 159675 - DNA, 644 bp, Zea mays
  Clone ID: MRT4577_77197C.1
ccccgcgtccgagtccctctctctcgctctcggcgacgactgggcgaccgccgccgccgctgccgctgccgctgcgccgcccttgtccaggtgcccaggtcttcgcaggcacttcgataaatatggcagggtcgcaaatgtaagaatcaaaaagaactttgcctttatccagtttgaggtacaggaggatgctacaagagcattggagggtactaatggaagccatttcatggacagggtgatctctgttgagtatgcacttcgtgatgacgatgaaaaaggtgaaagagggaacgggtacagcccagacaggagaggtcgtgaaagatccccaggtagaaggcgttctcctagtccctacggtagaggacgggagagaggtagcccagattacgggagaagcaaggagagggggagcccagactatggcaggggaggacgcagccctgataatggcaggggagtaagcccagctggtggtggcagaggcgatcatgccaggggtggagggcgcagtcctgactatgatcgccagcgccgggaagctagtcctccaggttatgacaggtcccccagccgctcacctgggagggaggccagagagtagaagcagcgttccatttccatgcctgtgttcaagcatc

SEQ ID NO: 159676 - DNA, 1116 bp, Zea mays
  Clone ID: MRT4577_77198C.1
attctttgtatgtgccacgaaatgtttggattgttgtactctactactctgtacatcatttagttcaacataaacaagggtttgcatttgtctacatggtaagatgaacgcgatgctgaagatgctatcagtagacttgatggaaattgattttggcagaaaaggaaggaggatcagggttgagtggacaaaggaggatcgcactgttggccgaaaaagcagctcaaggaggtctccaaccaatacaaaaccgaccaaaaccttgtttgtgatcaactttgacccgatcaacacaagaatccgagatctggagaggcacttcgataaatatggcagggtcgcaaatgtaagaatcaaaaagaactttgcctttatccagtttgaggtacaggaggatgctacaagagcattggagggtactaatggaagccatttcatggacagggtgatctctgttgagtatgcacttcgtgatgacgatgaaaaaggtgaaagagggaacgggtacagcccagacaggagaggtcgtgaaagatccccaggtagaaggcgttctcctagtccctacggtagaggacgggagagaggtagcccagattacgggagaagcaaggagagggggagcccagactatggcaggggaggacgcagccctgataatggcaggggagtaagcccagctggtggtggcagaggcgatcatgccaggggtggagggcgcagtcctgactatgatcgccagcgccgggaagctagtcctccaggttatgacaggtcccccagccgctcacctgggagggaggcgagagagtagaagcagcgttccattccatgcctgtgttcaagcatcagatgaatgtgcaagttggtaatgttagccagcaggaaacttgtctactatgcgcgttagctcgtgtttgactttccacccatttcagtatgaagcgacctcagaatgtaactcatgtagtagtattttttcaatggtagctttcagcactggtttgaacctgttgttggctttattttctgagtaaaatgcaccactcgaactttacgcattgtgtcacttgggtactgaactcagaaaaccagttaaacggatcatgaaaaaaa

SEQ ID NO: 159677 - DNA, 253 bp, Zea mays
  Clone ID: MRT4577_77199C.1
tgtttgtcagctaggttgtcatgtttgacttcctttctctagctcctcttagactgtgtataattttgatctcatacactgtgatttgtggatctctcctgttcttagtgttttcaggttataagtattacctggtggttcttgatgagtgctctcattattcatgacttttcctttgcgtttgaagcctgatacgtttctgactctcttgcacttctttgcttggggtttcactcagtttggtcgcacatta

SEQ ID NO: 159678 - DNA, 333 bp, Zea mays
  Clone ID: MRT4577_7719C.1
ctattttaattcttcatacctgtaccaatatgcaggcaaagcaatactgtcgttgacagaaatgagcgtgataccgacgactatgatgtgtatgatattttagtttgactcttgagttatgcatgaatttaaccccaagctatctagaaaagttttttttccctttgaaattcttctttgctctccttcctactggatcaaattactttttatgacaacaaactgcagctttctctttccttttcttttcctgcttcaccgcgacgataattgtgaaaatattttagctacgtggacatcaattatccacaacatctttgatatttataatat

SEQ ID NO: 159679 - DNA, 640 bp, Zea mays
  unsure (1)..(640): unsure at all n locations
  Clone ID: MRT4577_771C.1
gaacctgttattgttggatgccgttaatttaatctactgcttacagatggtttaattttccaatttaattgggctacaattgttcaatactatggccctagcatgcatgcataacaacttatgacatagttgaatacaataagtgttttttatatctaagaaatgtatgcttatttctgtattctctatttcaaatcgagtctagcccacacacacactcacatacacagtctaacaatcaaggctgatttctacaagttatgttaggacttctttgactgttctgtcaaccttgaagggctaaacacttcgttgattactatgatccccaaggtcagcaacccagttaccattagtgactacagaccatttccctcctcaaaatagccatcaagctgatcaccaaactcctggccaacagaatacagcgaaagatgccgagtcttattcacagaaatcagtatgggttcatctaacacatatctattcaagattgtttggcttggacttacgagtacattcatcaatgtcagcagtccaaaaaagagaagtggttttaaagctggattttgctaaagcctttgatacaatagagcacaatgttatcttggctatgcacnatgcagcttggtttccctga

SEQ ID NO: 159680 - DNA, 3079 bp, Zea mays
  Clone ID: MRT4577_77200C.1
cattgggaccctcgaggccggccggggcgtgccttcctccctccctcagcccccctctctctctcgctctcggcgacgactgggcgaccgccgccgccgctgccgccgccgctgcgccgcccttgtccaggtgcccaggtcttcgcaggcgccttcgccaggtcttcgaaggtaacgagcaccaaccgggtatgtgcaccccttctcctcccttcatgctgcgcgaaaccgagcgcccgaaccctaacttggatctgatccagttgcaagcgcgggcctcatgtattatgcctactatcttccaattttctgcaaaacattactgggtttacacgtgcatgcccttttctgggtccgcccgtgtctgaaccataacctaagctgtttggatctgatttagttacaagtttatacgtgtattggcaccaattcggatctccgaactcttttcgccaaaaattactgggtgaacatgtgtacactgtgcaccctatctttcagtgttcattggtttttgtgtttccttctcacttgtgttgctactatgggtactgggtatagaaggtttcgctcagtttccttcgcttccatttgaaatggtctgtttctaaaacccccgcagaatgtgtgaaaattttgagttgtaagagcaactccagtagttctctaaaagacttcctaaatcaataatttaggtagttaacatcaaaactattctccaacagttctctaaatgaactttctaaatttaacaacttgtcatctaacctcattttctctctacatttggcaaccatttaacaactccctaaacaaaaatgttgactgcattatatagtttttgtgacttattttttatgtggataaatacaaaacaaaattacaacctatatttaaagaactattggagaactcaaatttttttactctaaaagccatttagcaacttcttaaatctgtgatttagagagctaaaatttacataactattggagttgctctaattggttcgtgcgctcaaaacaaactgcaagtattagtgtctgtttgttcagagaggtatatactgtgtactagcgttgaccagtctgctagttgaatgatctatcccgttggacaccttactagtgtttagacaggcagcatatcttgtatcctataaaggaagcgagattgtgctgatcattagtaaaaatggaagcgatgtgtttatttatgttctttattttggattttgaggttggaggggacggtgtgtgtgaacgcaagcatgtgatgttatatattcttttggtggaattcctgaactgacgtttttttattactgctgtccagattcagggaatataagtaaaatgaggccagttttttgtgggaaccttgactatgatgttcgcatctcagaggttgagcgcctttttgggaagtatggaagggtggaacgagtggatctaaagacagggatatcatggagcatatgtgctcttcctggttgatggactggctctacctttactgcctctgcctgtgccccatctcatgccttgtccatctccaggagttcacaagtccaccgtggcatctgttcacatggaaacgaccacctcgtgactgatgtcttacttttacgatcaacattgcatcctcctcccccgcctcatcaccatttcctcgccaatccaaccatgccaatctcatggccggctggagagtggagagaagtggaggttgcaccaccaattctttgatgtgccacgaatgtttggattgttgtactctactactctgacatcatttagttcaacataaacaaggtctgttcctgtttattatagtgtatcggactgtagatttgtgaggtgatcttagaaaagattaaaggagagactgcatcatggtttatcttgttgccttttctgtttatgttattggaccatactgtaatttctttgaacaagtcacttattctaccttgttcaacatgaagggtttgcatttgtctacatggaagatgaacgcgatgctgaagatgctatcagtagacttgatggaattgattttggcagaaaaggaaggaggatcagggttgagtggacaaaggaggatcgcactgttggccgaaaaagcagctcaaggaggtctccaaccaatacaaaaccgaccaaaaccttgtttgtgatcaactttgacccgatcaacacaagaatccgagatctggagaggcacttcgataaatatggcagggtcgcaaatgtaagaatcaaaaagaactttgcctttatccagtttgagatacaggaggatgctacaagagcattggagggtactaatggaagccatttcatggacagggtgatctctgttgagtatgcacttcgtgatgacgatgaaaaaggtgaaagagggaacgggtacagcccagacaggagaggtcgtgaaagatccccaggtagaaggcgttctcctagtccctacggtagaggacgggagagaggtagcccagattacgggagaagcaaggagagggggagcccagactatggcaggggaggacgcagccctgataatggcaggggagtaagcccagctggtggtggcagaggcgatcatgccaggggtggagggcgcagtcctgactatgatcgccagcgccgggaagctagtcctccaggttatgacaggtcccccagccgctcacctgggagggaggccagagagtagaagcagcgttccattccatgcctgtgttcaagcatcagatgaatgtgcaagttggtaatgttagccggcaggaaacttgtctactatgcgcgttagctcgtgtttgactttccacccatttcagtatgaagcgacctcagaatgtaactcgtgtagtagtattttttagtggtagctttcagtactggtttgaacctgttgttggctttattttctgagtaaaatgcaccactcgaactttactcattgtgtcacttgggttctgaactcagaaaaccaggtaaacggatcatgaaactttgttggcccatgtaaaaccattcaaagtcagttatataaaccggaagccacttttgtc

SEQ ID NO: 159681 - DNA, 600 bp, Zea mays
  Clone ID: MRT4577_77201C.1
cggacatcgacgaaagctatagccagctagtaacaagagcaaaaacaccatcatctcatccgcccgtctcaacgccaccccaatggcccagagcacgaggatggtggcgctggccctggtggtcctcctggtggcggcgacggcgtcggtgcccacggccaccgcgtacggctgctacgacgactgctacgagcggtgcgccaacggcaagaaggacgaccccgcctgcaccaagatgtgcaaccaggcgtgcggcagcaccgacaagggcgccgccgccggcgcgccggcttgatcgacccgggcttcatcggcgcgcgggctcagctcgatatcagcatcatatacaatcgctgctccgtcgctcacgtcagcccatgcatgatctctcgacccggcccattgaatcttctccttctactatagtatatctttgttgcaggtcttcgttctcatacatcgatccactcatccttttttgtaattcctactaccattaagtgagatgacctctctatatatgcatgattcagttttttttaaaaaaattgttattgtgttgtgcctcaaaacaaaaaaaaaaaaaaaaaatttgcggcc

SEQ ID NO: 159682 - DNA, 253 bp, Zea mays
  unsure (1)..(253): unsure at all n locations
  Clone ID: MRT4577_77202C.1
cgacgagaatcatgccatcgtttcgtcctcggtggggcccgagtactatgttggtattttgtctttcgttgataaggatcagctcgaacctggatgcgctattttgatgcataacaaggttctctctgttgttgggcttcttcaagatgcagttgatccaatggtctcttgtatgaaggtcgaaaaggcccctttggaatcatatgctgatattggtggtttagatgctcanatacaggaaattaaagaagca

SEQ ID NO: 159683 - DNA, 720 bp, Zea mays
  Clone ID: MRT4577_77203C.1
gggcccggaccgcgtatcgcactcctaagggcgattggggtcctcgaggccggccgggaagccaggacggacatcgacgaaagctagccagctagtaacaagaacaaaaaacaccatcatctcatccgcccgtctcaacgccaccctagccctgtgatatacaatggcggcccagagcacgaggatggtggcgctggccctggtggtcctcctggtggcggcgacggcgttggtgcccacggccaccgcgtacggctgctacgacgactgctacgagcggtgcgccaacggcaagaaggacgaccccgcctgcaccaagatgtgcaaccaggcgtgcggcagcaccgacaagggcgccgccgccggcgcgccggcttgatcgacccgggctttatcggcgcgcgggctcagctcgatatcatcatatacaatcgcttgctccgtcgctcacgtcagcccatgcatgatctctcgacccggcccattgaatcttctccttctactacattatctctttgttgcaggtcttcgttctcatacatcgatccactcatccttttttgtaattcctactaccattaagtgagatgacctctctatatatatatgcatgattcagttttttttaaaaaaaaaaaaaaaaaaaggggccagagacgagtccctctacaagcacaggccgcacgaggcggtttcgtcggcagacgagctcttcagcat

SEQ ID NO: 159684 - DNA, 165 bp, Zea mays
  Clone ID: MRT4577_77204C.1
atttcctttccttaattcccggggggggccatcatacttactatctttagatctatatctatatctcaagcggcctctctataacatccgggctggggttcacatgcatgcggggtaatatctctcctatagttacacctataatcaattcattaaccaattttt

SEQ ID NO: 159685 - DNA, 720 bp, Zea mays
  Clone ID: MRT4577_77205C.1
ggcgattgggactttcgcccggccgggaagccaggacggacacaacgacgaaagctagccagctagtaacaagaacaaaaaacaccatcatcccatccgcccgtgtcaacgccaccctagccctgtgatatacaatggcggcccagagcacgaggatggtggcgctggccctggtggtcctcctggtggcggcgacggcgttggtgcccacggccaccgcgtacggctgctacgacgactgctacgagcggtgcgccaacggcaagaaggacgaccccgcctgcaccaagatgtgcaaccaggcgtgcggcagcaccgacaagggcgccgccgccggcgcgccggcttgatcgacccgggcttcatcggcgcgcgggctcagctcgatatcatcatatacaatcgctgctccgtcgctcacgtcagcccatgcataatctctcgacccggcccattgaatcttctccttctactatagtatctctttgttgcaggtcttcgttctcatacatcgatccactcatccttttttgtaattcctactaccattaagtgagatgacctctctatatatgcatgattcagttttttttaaaaaaattgttattgtgttgtgcctcgatctgattttcatttttctggatgtattgtatataactatatattattaccacaaaaaaactaaaaaaatttcggcaaaaaaaaaaaaaatttgcggtc

SEQ ID NO: 159686 - DNA, 284 bp, Zea mays
  Clone ID: MRT4577_77206C.1
cccacgcgtccgaaaaaaaaaaaaaaatttaaaaaaaattaaaaaaggacggaccttccggggtatccgggccaacctaccgttccctgcaatgcaatagctttcctatagtgtaacgtaacctaaattcactgccctggccttaacaccacaacgactggaaaaaccatgccctgccccaactcaacttaattgcattacatcccattttcctcacctgagctatcgccaaagaggccaggcccgttcggattgcccatcacttcagcagcccaaacggaaat

SEQ ID NO: 159687 - DNA, 268 bp, Zea mays
  unsure (1)..(268): unsure at all n locations
  Clone ID: MRT4577_77207C.1
ggatatgcgacctgccgcgcctcaacacttcacatttgcctacaacttcttcacgggcgagccgccggcgtgcgcgcgcgtcgtgccgcgggacagcgaccgcagcaactgnctgcccaaccgccccgcccagcggacgccgcagctgtgcgccgtgttntacgcccgtgcacctgtcaactgcgctgttttcctctgcaagccgttcgtggggggggtgcggggncgtgttttttttttccgtgggtggtgtttgtttcttttttgt

SEQ ID NO: 159688 - DNA, 1362 bp, Zea mays
  unsure (1)..(1362): unsure at all n locations
  Clone ID: MRT4577_77208C.1
gttggtcgacgatgcgttccaggagatggcgaaccccatgacgaagaatgtaacggcgtgcgccaccccggtggacgggtcattgggcaacgccagcagcaggatggcgccgagtgggagcgcggacgctgagcttatctgcgccagggcgatcctaccagtgttggggaaccgtctggcgacagggtctccgacgaggcccccaaagagcgcgccgagagcggtggcgaacaggtacagccccgtgatgacgctggtctgccaattcgtgaacccgacgagctccagccacatggcggagaagttgagcgcggaccacgggatggagccggcgatcccctgcgccacgatgatctggaacgtggtcaccccgaggacgcgcctggcgtgctggagcagctctttggcttcctcccccgcggaggccgcggtcttgcacttggcggccgggctcgggtccgcggcgaagagccacatgagcacgcccagcgcgacgctgatcacggccacggagtggaaggcgagccgccaccctgcgacgccgaggaaggtgactggcgcgagcagcacgccgaaagagccccccaggatggagccgaggttgcaggtcatctgcagccacccgaaggccgcgccacgggtgtggtcatcggtgtagtcggcgacgagcgagctgatcgccgggaggaccagcgcgagaccgatgccgttgaggccccgcgagatcgccatctggaggaagctgccggagacggcgacgaggaaggtggcggcggcccagaggaaggctcccacggcgacgacacgggcccgatcgtggcgcgcggaggcgtaggcggcgagcgggtagcaggcggcctggacgagcgcgcggcagagggtgagggagcccagcgcggtcggagaagcgcccagcgccgtgcccacctccttgtacacggcgggcagcaacacctcgtctgccttctccagcaccgacgccatgttcaccagcaccagcgtccaccgccggcgcgacgccgcctccgcatccctcatttcccgccgcggctcctagttagtagtagcaggctcagcgcctcacctgtctgccagattgccaaggattgcgcgtcgactagcaggaggcaggagcgtccagggcgaatcgaagtggatttctagatgggagcagagacaggcagacagccttgcgtgttttatcaagctcgagcggggatttgaccaattgacctaggactcaggattgtcccacctcacggcatgtacacccgggtcgtgggttttaaggaaaaaaattcccggccggttttttttttttttttttttttttttttttttttttttttttttttncccggc

SEQ ID NO: 159689 - DNA, 342 bp, Zea mays
  Clone ID: MRT4577_77209C.1
agtttctgaacttgctgtgttccaaaacttcggatcggagcttgcggtccgcttcggtctgtatcattgatggtttgctggtggtaccctgtagtgttacagaaccatgtggacgtgatgcagtttggagtcgacttccagaaatcttttctccgatctcctgcaagtgacaacctgacattgtggctttgattgcccgggttggaggttgctttccagtcgcagcgagtgggttgggcgtgctggtgccgctgaaagcgtggagcagctggtgagtctggacgggagagctacttgttgtattcatgcatcaggctgatcagaagtcgtccagctgggaag

SEQ ID NO: 159690 - DNA, 219 bp, Zea mays
  Clone ID: MRT4577_7720C.1
tcccagctccgaatgctgctcaaggagatttgtatgttaccaacacatataaagggcccaggtgccttccaatgcttcgggcccacaacttcaattgaatcgagtcacttgactctttcaagtccatcgtttttaacattaacaacttcaaacgtgacccgttcaccgaagttgttatcttccctccacccatttatctttgtcttaccccacaacttg

SEQ ID NO: 159691 - DNA, 817 bp, Zea mays
  Clone ID: MRT4577_77210C.1
ctcgaggggccggccgggaaaaaaaaagctcccatctagaaatccacttcgattcgccctggacgctcctgcctcctgctagtcgacgcgcaatccttggcaatctggcagacaggtgaggcgctgagcctgctactactaactaggagccgcggcgggaaatgagggatgcggaggcggcgtcgcgccggcggtggacgctggtgctggtgaacatggcgtcggtgctggagaaggcagacgaggtgttgctgcccgccgtgtacaaggaggtgggcacggcgctgggcgcttctccgaccgcgctgggctccctcaccctctgccgcgcgctcgtccaggccgcctgctacccgctcgccgcctacgcctccgcgcgccacgatcgggcccgtgtcgtcgccgtgggagccttcctctgggccgccgccaccttcctcgtcgccgtctccggcagcttcctccaggtccgtccgtctccccgatttcctcccaactctttccctcttcctcctgtcgctgacgtggcggacccactgctccacgtttctcccgcagcacgtggttggcattgcactggcacctacctaccaccaaacgtagcggttatccgaatattctatttcaatttcgcaacacaaaataaaagatggtcggtgatattttggtgcatctctgacacgtgggcccatccactgactagcaacctgtggctcgcgcgctcgcatacgcatacgcatacgcactgcgcagatggcgatctcgcggggcctcaacggcatcggtctcgcgctggtcctccccgcgatcagctcgc

SEQ ID NO: 159692 - DNA, 189 bp, Zea mays
  Clone ID: MRT4577_77211C.1
tctagattcggtcatcctgtcgttgttgtcaggtcacaagcggcgagctttttacaagatgcctggacagctgagggactacgagatgatccaccctctcccgaagacggtgcctccagaagccccgcaaggccaccagcgcccgtcctctcggcgacaacaagacgcggagcctgacagctatcaagc

SEQ ID NO: 159693 - DNA, 327 bp, Zea mays
  Clone ID: MRT4577_77212C.1
ggaattcgctgttttttttttcaccttgccttctaaccttcccttaagagatcgccggatagaaatttcagagagggccgcctgatccgagttaaggaagccacgcaacacaacgaggctggttgccactcccccgagggacccatcctgtgaatcaataagctgagattgttgctcagcgcaggaaccatgaacatgtgctccacgcgccactacgagacgatctcaaagctggatcaggccaagctgtctgcctcctctatcgactgcataatgaacagaccccacgccgctatggagccggctgttgttggcatcaacaccgta

SEQ ID NO: 159694 - DNA, 339 bp, Zea mays
  Clone ID: MRT4577_77213C.1
aacattcatggagtttttttgacagaaaaaaaaaaagcggctcaaccgggggcaaaaggcgctctgcccggggcgttctgcaaaaaaaaaaggggggaaacaggttcctgggcatgaaggtaaaacacaggcccatccggaggcactttttttgaaaagccaacacaactaccaggggggactggggggctggagctgtccaccccaaaagaggtggcaaaaagatcccttggaagacagagaacaggccccgagggctgtcgaagaacccactttcgaaaatctttgggaagaccgctgacctccggggatcgggcagtgggaacaacattgcaaaaa

SEQ ID NO: 159695 - DNA, 256 bp, Zea mays
  Clone ID: MRT4577_77214C.1
aaaaaaaaaggatactgcctttgtagcattcaaaaactggctcacagggaccgcagtactacaattggttttgggaaaacattgcaattgcttttgttgatatttacaaaaagggaaccaatattgtgcacgcaggttttaggtgcaagcgtgcaaacaagcatttttaacttttaaacggggaacccacccctgccctcttgaaccaaaagatgctgaaagaaaaattgacatttgcactaaattcaaactcatt

SEQ ID NO: 159696 - DNA, 853 bp, Zea mays
  Clone ID: MRT4577_77215C.1
aggagctaccggaggtggtggaggaacaaccagcagggcccggccggccgccaagctcgcacgcccacgcccacgcgccagcgcctcagccccaccatcggacgtaccagcaccagcatccgcaccccggccacgggcaccaccgccgcaccgggagcagcagcagcaacgcggcgtcggaggccagtagccgcggcagcaagttctcgccgcccaggccgtaccagcccaggtacaccagcaacagtaccagcgaccgaagcttcccgccgcagccacaaggcggcagccacggccacggcgcccaataccaccacggtgcgccgaggccggcgtccgcctcgccgtcgccgtcgccgccgcgccaccagcagcccccgctgccgccgcgccccaacaagccgtcggccgtgccgaggttcggcgtgtgggacgagcagaacgccgcgatggcggcgcagggattcacggtgcagttcgagaaggtgaagcgccaccgggaggaggccaggaccgcccccgcgccgcccgtgcagccgccgaagctgctgtcgtcgcccgaccacgcagcgccgccacgcgcgcggcgacacgggaaggggaaggccaagaggtccttcatgtccaggatctacaggtgcctgttcccaagggtcagagagtgagtgatccgacgatggttatacacaaccgctcagccgtatacggtgtactacgtgttcttcgacagagacggtactgtacttcagaatttgtttgttctttgttcattatataatgctgtataatctccatgcattagaagaatcactcggtcacacagaagaatatcgtgctgggggtacatgattcc

SEQ ID NO: 159697 - DNA, 282 bp, Zea mays
  Clone ID: MRT4577_77216C.1
ctagtcgctgccacatggccttggctactgcttctgcacccgaacccctccttcagagtcagccacaaggaaaggggcgtgcgccacgcacatttctcatgcctacacaactcctctactagccttaactttgccaggcaaacctgtgatcacttccattcactcgtcgctttccagacatctgctctatgaagcaatcttggcgtcttcatgctaagaatggcacaagcaacactaaatgtggctactaatgggtttggtacgattctcaagaatttctta

SEQ ID NO: 159698 - DNA, 191 bp, Zea mays
  Clone ID: MRT4577_77217C.1
attcggctcgagcgaggatgggccggctctgactggttatgggcgagggcatgggttgcgtccgggctgattctggcgagagcagggggagggtatgaagatgactaaccctgacagcgaattcctgggaggtggggcagaaaaggatgcatcacggtggcggccgtgcttgagacacggatacccactat

SEQ ID NO: 159699 - DNA, 271 bp, Zea mays
  Clone ID: MRT4577_77218C.1
tcacatgtagaaaacgaacgcaacacatctaactggcttaccggagaccaaccgaccagaaagccgacgtgaagagaaagggagaggcaagcgcacaaaaacaaaagctgctagaagcgtgccgccccaacgccgtctaacgatcacaagtatgcaacgcgcccagcacaactcggcacataggttccatccctccgaaggcggtggcttactgacttccctgatctatctagataatggcgaccacgacgtcagcgaccaccgccgtttt

SEQ ID NO: 159700 - DNA, 373 bp, Zea mays
  Clone ID: MRT4577_77219C.1
gtcgatccacgcgttcggacgacttggatattgattcttgaagagatcttgcttcttttgtaccacaaagtctatgatgtggtgcaactgctgatcaagctgcggttgtagctcatgcctcaagcgctgcttgaactaccctgacctggacgaaatgttcactgccgctctagtctaccgttgtccttggtgtggccctggataagaacgccgtgccccagttttacgtggccttggcggaatccggtgaggccgcccacagctgatgctgctgcggccactgcaagtcaatccttgaactgctgatcacatctatcgattaccaaggacatattattatctattcaacttgtggtggtggttgaacaataaa

SEQ ID NO: 159701 - DNA, 3473 bp, Zea mays
  unsure (1)..(3473): unsure at all n locations
  Clone ID: MRT4577_7721C.1
agatatttgttaacgtcggggtcactgttcgcatcagcaccaacatcattcaccaatgtcacattcgtttggcagtagtgtgtgttgcagacgctttaccctcctgatcatgacagtgcacggtgccaccatatgtttgtcttctgcactcactccgtttaattttgtgtatctgtcaacagctcccaatatgtttaggagctgtctagtgtacgcaggtatgcccttactccgtatatcaacaaggctagtgtggatacaatcgtaacacctgtcgcatccaacccatgtttggccaggcgctccttgcaagctaccttgacggttgcccactcaccatggagcttttggtgtctgaaatttgcgaagtccagtgagcagatcaagatcgttgctccagtgatctgactttacgggtaaaatatctgcgcttctgcatttttccaaaaagcttcatggtctcgcccaatttatcggatccatcgccctcgtcacgtgacccctaccgccacctagaaaaagctcccccggccttccacagcttctcggattccactcggtgctttgcccgaggcccggagaagccttatcgcctcctcctcgcacgccgaccgatcgccacaatcccccaccgctcgcctgcctggtgcccgccatgccggagatcaagtgcggcgcggccgagaaggtgaagccggcggcgagcccggaggcggagaagcccgcggacatcgctggcaacatctcctaccacgcgcagtacagcccccacttctcaccgttcgcgttcgggccggagcaggccttctacgccaccgccgagagcgtccgcgaccacctcatccagagatggaacgagacgtacttgcatttccacaagacggatccgaagcagacgtactacctgtccatggagtacctgcagggccgcgcgctcaccaacgccgtcggcaacctcggcatcaccggggcatatgcggaggccgtgaagaagttcggctacgagctcgaggccctcgcggggcaggaaaaagatgcagctctagggaatggcggcttgggtaggcttgcatcttgctttttggattcaatggcaacattgaatttgcctgcttggggctatggcctgcgttaccgatatggactgttcaaacaacacattgccaaggagggccaggaagaagttgcagaagattggcttgataaattcagcccttgggagattcccaggcatgatgtggtgttccctgtcagattttttggccatgttgagattttgcctgatggctctcggaaattggtcggaggagaagtcctgaaggctttagcatatgatgtgccaatccctggatacaagacaaaaaatgcaatcagtcttcgtctttgggaagcaaaagctactgctgaagatttcaacttatttcaattcaatgatggtcaatatgagtcagctgcccaacttcatgctagggctcaacagatatgtgccgttctttatcccggtgatgctacagaagaaggaaagcttctaaggctgaagcagcagtttttcctttgcagcgcatcacttcaggatatgattgccagatttaaagaaaggaaatctgatagagtttcagggaagtggagtgagttccctactaaagttgctgttcaactgaatgacactcaccctactcttgccatccctgagtaagggaggataatgatggatgaggagggacttggttgggatgaagcttgggacattacatataggacaatttcctacaccaatcatacagttctccccgaagctcttgaaaaatggtcacaaatcgtgatgaggaaattacttccccggcacatggaaattattgaggaaattgacaagcggttcaaagaattggtaatctccaaacataaggaaatggagggaaaaatcgattcaatgaaagttttagataattcgaatccccagaagccggtagtgcgcatggcaaatttgtgtgtggtgtcttctcatacggtgaatggagtggctgagttgcatagcaacattttgaagcaagaactatttgcagattatgtctctatatggcctaccaaattccaaaataaaactaatggaatcacgcctcgaagatggctccggttttgtaaccctgagttgagtgaaatagtcacaaaatggctaaagtcagatcagtggacaagtaatcttgatctgctcactggacttcgcaaatttgcagatgatgaaaagcttcatgctgagtgggcagcagccaagttatcttgcaagaagcgcctggccaaacatgtgttggatgtgacaggtgttacgattgatccaactagccttttcgatatacagattaagcgcatacatgagtacaagagacagctcctaaacatattgggagctgtttacagatacaaaaaattaaagggaatgagtgcagaagagaagcagaaggtcacaccgcgcactgtcatgataggagggaaagcgtttgcaacatacactaatgccaaaagaatagtgaaattggtgaatgatgttggtgctgttgtgaacaatgatcccgaagttaacaaatatctgaaggttgtctttatcccaaattacaatgtatcagtggctgaagtgcttattcctggtagcgaattgtcacagcatattagtactgctggtatggaagcaagtggaacaagcaacatgaaattctctctgaatggttgtgttatcattggcacccttgatggagctaatgttgaaataagagaggaggttggagaagataatttcttccttttcggtgccaaagccgatgaagttgctgggctgaggaaggacagagaaaatggtctgttcaaaccagacccacgttttgaagaagccaagcagtttataaggagtggcgcttttggcagctatgactatgaacctctcttggattcccttgaagggaattctggatttgggcgtggtgattatttccttgttggctatgacttcccaagctacatcgatgcacaggaccgggtggatgcagcctacaaggataagaagaagtggaccaagatgtccatcttgaacacagctgggagtggcaaattcagtagcgatcggaccatcgcccagtatgccaaggagatatgggacatcaaggctagccctgtcgtgtgaacgagggggttgcgattcaacaccaaacgtagtttcttggggtgctataatagtaaggaagaataatgacccacggtgcttgacgcccacttgcgttgtaggcatggaacgggggcacctagcttgttctacagcgctgtctattttgaattggtgcgactttgttgctcttttttcctcccccttatatcttatgaaacaagatccttttgatctgtgctctgaaataaaataattcagttatgataaaaatcaccaaaaaaaaaaaggcccctagggccaccgctcgcgtnctagaact

SEQ ID NO: 159702 - DNA, 702 bp, Zea mays
  unsure (1)..(702): unsure at all n locations
  Clone ID: MRT4577_77220C.1
gtgycgcgccgtggtcaccggacggacacacagaacgacgatggcygcctcggcsctgcaccagaccaccagcttcctcgggcaggcyctggtctcccgccccgccggctcgatscygcgccgcatcacyatgytcygcayygtyaagagyyttyyttagaktatattgtatggttttgattgttttaagtatyttggyttgttyttygagyagaygyygtygtaytttattkgygagtgbwtttttttttaytgkttgyayayktttggttttttggttgatttggagatawttgtktttwatttggagttggaggtgatttatwtttggagggtgatgtwgggtgtkttgggtagtgtgnttttggagaattaggttaagaatggtgttaagtttggtgaggtggagaggattaaggtwggtgtgtagatttttttggagggtgggtwggattattargtgaatttaattdggrgtatgtatagagtawttwggttawtwkggtgtgttatgtggggtrtatgggtkttgktgagggtgattgttttggtggtggtttgtttggtgaagggtrtgataaggtgnatttkggtggtgttnttkatttgtdgggttwtgttgatgatttggatataktgttgaatttaaggtgaaggakttaagaatgktgtttgttaagttttttawgtttggttttttgt

SEQ ID NO: 159703 - DNA, 428 bp, Zea mays
  Clone ID: MRT4577_77221C.1
cagttcccaatctatcatgcttttcttataaccagttcccaatcaagccacaacatattcggtgccccgaaacagtatacagcggaaaaccaaatgccgctccctaggttttaagggaaaacagcacgtgtggggtatcatctggtcagttttacaaacaggcctatatagagaatgagtacacctcgtcaccaaaaatgtggaggttcaagaatgaatatgtgcaagcgcactaacgcaaagacaacaacaaatatacagatcccgagcattctcagcagttcctgctatagcatgcatgtcattctgtaaccgctgctaatcttcgcaaaatgggaattctgatccgatggagtgcttgacagtgtagttagcctgactgttcaatcaagatgagaattcaacggacgcgtgggcggacgcgtggg

SEQ ID NO: 159704 - DNA, 574 bp, Zea mays
  Clone ID: MRT4577_77222C.1
gccggccggtccgggcatcctatacagactctactcgatcatgacggacggacagaatgaagcgcacagatgcagctggtgtccatactgcatgactctgtacctcatcgtcgctctccccacggtcatgggcgcccgctcgccccgcgcagccccggcggatgactccctcgacacgacccccaagacgacgatgctgcccgccacgctgcgctactaccaccaccacctgctaaaactttggctgccgctgtcctgcttgctcctgccactatagagatcgcctatgctacatcatatgtactcctgttgcttgaggccattccgcgaagccacaactcttacaatatgcatgcgccggccgacgacgacgcgcgctgcctctcgtgagcttctgctcaagtgatgcatgtttcaaggcatccatggatgctttacgaatatgcgtattagttagacgtgtcagggaaccgcacagaagggggtgttgttttatatttacgtcttctggtgatcaaataaaggggaaatatatgttggatgtgtacaaaaaaaaaaaaaaaaaaggccccta

SEQ ID NO: 159705 - DNA, 379 bp, Zea mays
  Clone ID: MRT4577_77223C.1
aggtctgagtctgactgacctgacctcgccgttttcttctcttctcgcctctgccgatccctcctcccctgcttgcttgcttgcattgcaacctctgtctctccatggcagccgtgagcagccaggacaaggagggggctctccagctgaagcaagcaggagagagcaaggtgttctccaagctgttcaccagggagagctcggcagcggcgccgtccttccgggtgactacggcgtcgcctcggcgggctccgtgcccttcctgtgggagtcgcagccgggcacgcccaagaacgacgccgtctccacggccaccctgccgccgctcacgccgcccccgtcctactacaccgccaggcggcagcagcagcagcacggc

SEQ ID NO: 159706 - DNA, 1048 bp, Zea mays
  Clone ID: MRT4577_77224C.1
ccacgcgtccggcgggacctcatgcgaggtctccgtgggcgtcctgtacgccggcgaggccaagcatttcgtggtccacctccacgtgccagctattactgcgacggcctcggcgtcaacggagggcggttactactgcgacggcctcggcgtgtgtgaccactaccgccaccaccgccaccaccgccacgggcagcacctgctcgccgtcggctactcgtaccgcagccatccgagcgcccgggcgatcacggtagaagcgcacggcgtgttcgtgcagcggtcaccggcggtgttagacttagacggcgggcggcacgctcctgttattccctccccctcccccgtggtcctgcagcacatcgtccggttcgagctgctggaagtggtggcaaacagcctcgtccgcggcgagctgatcagcaacgacgacagagcgcgtgccgcggacgtgctgcaggtcaagtgggaggagttcagggcgtgccaccagttctggggcggcgggctcctcgacctgatgagcggcctggagaaggaggtggacggcatggtgggcagcctcagggcgggggtggcggcgtacgtctacgcctgggtatcgagccaccagatgcagcgggccaccagcatcggctcgccggacaaggcggccgtcgagttcctgacgccggcgatgcggctcctgttggaggaggcgcgaaagctgccgcgctggcagcaggctgcaacgacgacggcggcgcccacgaacgtccagtacgcgggctgcgtcggcggcggcggcttcgagatggtggaccggaggctggagctgtggtccaagatgaagcgcgacgtgcagctcctcgtgtcggtccaggagcaggcggtggcggacgaagaggagcagcacctcgccgccgtcttccaggaagcatcgctggcggccatcgaccgcgcgatgcaccgcgacatttacctgatgagcaagcgaacaaggaacccgaagcccagtgggagctcgcagttgaagagcgatgatcgtatggaagctcatccttgctat

SEQ ID NO: 159707 - DNA, 293 bp, Zea mays
  Clone ID: MRT4577_77225C.1
caggacctcacacgcacaggtccgatttcttaccgttaacgagacctaaccacaccaacggagcactggccatggtaatacgtacttaccagtatcaatgcccctgcgaaacatacttcattatgccaccgaagcatacaaaccaggagctgccgctttaccactctgactagtccagagtcctgctgacataggtgggccaacattaagtttgcctttcttgtcgacattattgttttgaccataacaacccacactactgtaacatgcgggcacgaaccttaaacttttgt

SEQ ID NO: 159708 - DNA, 300 bp, Zea mays
  Clone ID: MRT4577_77226C.1
ggcgagagaaaacggaggtgacatttattccagggacccaacaaaaacctagcattcatcacgtactttaagatcgtggggggatccttctttttccatctatttggcttttttgaccggtttttttttattcacatacatatacacacaggtgttgtaaaaagcttatgagccatgcttgcatgcgcgcggtatatcggggggcgttttcaatttactacaaccagagggcgccggctttcctgagcatggccacagactctccggagaggggcaaaaccattaccctgttggtcccgc

SEQ ID NO: 159709 - DNA, 384 bp, Zea mays
  Clone ID: MRT4577_77227C.1
ggatggaaattgaatgggaattgaatgaaggatgctacgtataatgctacactggatcctacactcaagctattctgctgctgggtgttttaatatacatctacacataataacactccgtgctacaacgactcttttttccactgtgttttactacatctcttatctcttttttttggaggtttttttttatgacctaagagatgacataacaccatcactcacaccataccccgctgaagctgcgtctactggaggccttaatccagcacgaactgctccacagatatgtgcaaccttatagtccaagagccattgctagagccgcctgttccaacgcataccataacttacatcctgtctcgtggtgtcctcgctgctctc

SEQ ID NO: 159710 - DNA, 894 bp, Zea mays
  Clone ID: MRT4577_77228C.1
cattgggtacctcgaggccggccgggtgaggggattgaggggatttcaacactttgcgtaccctgctccctgctcttcctgtcttccccagtttcatgcaagctcgcgacatgctccttcttgaggagcgttcttagtctgtgtcggaccggcgcgcggcggacactgctctcgtcgccacagcgacccgaccatcctctgcgccggcttctcagctcgtcgctcccaccaacaatgctggcggtgtcactgataatcgcccgcgcagtggctacggtcgtggccgcggccgtggtcgtggccgcggtttccgctacaacggtggtggctacaacggtggtggccgtagcaccggcttcctcccgccatgggttagcccatggcctgctgcctggcgcgcgccctggactggagcttctggtcccggcgttcttggagcacgcccccaggctcaggcgttcccgatgcttcagcaacctcacactacttttgcgccacttcagcaaccgtcatgggacatctcaggccttgtccaggcgctacaggctgcttctgtacaacagcaagcaagcgccggcgaatggtttatggacaccggagccagctctcacatgaccaacaattctggatctggccaccaagaaaataatcatgaggtccaatagtttcggcgacctctatcccttctttggaaccagctctgcttccccgacggctcttctggcacacaccacatctgttgatgtttggcatcgtcgtctcggtcatcctaataaatattccttagctcggcttcttgatcaatttccctttttatgtaataagtctttagctgcttttcctacgtgtgaagcctgtcagaagggcaaacatgttcggctaccctttccacat

SEQ ID NO: 159711 - DNA, 467 bp, Zea mays
  Clone ID: MRT4577_77229C.1
ccatgcttttttttttttacaacgagaaacgcgctttgatctattgctgtgagagaacggatggagacatatacaggcactgctggaggtgtacgattgctcatatgcacatggatcagaagaacatgatgcgaccgattgtacagacaggcccatcttgatgtggacagcaagtgattgcacttacgggcacagtgcgaactagactctgcactgaggtgacagcgatcggtacttggacatgaagaatgaagaatgttcgactcacaagaccatgtaagctgggaccatacatggaacatgatcgaacaagtcatgggcgctcaaaaacgggcttaaaacttggaggagactcggctagttattgtgtcagaatctgatttagggctatccatccgtgcagcgagcttctctatattacatcgatgtacctattattgttggacgcttgccgctccacacttttt

SEQ ID NO: 159712 - DNA, 279 bp, Zea mays
  Clone ID: MRT4577_7722C.1
gttagtactgtttgtttctgctgtaagccataagatgtcatcaatgataaactgcaataaacgtgggctatcatactaggtggtttgcaagttggaggtgggataaatttggagaatgcaatgtcttaccttaatgaaggggccagtcatgtgatagtgacctctgtacgtgctcatgctctaaatctgtgtaaactttactattttttttcttcgatatgtggcgtattgtataaacattttttgctactctgtacttctgtatgaagatatatttag

SEQ ID NO: 159713 - DNA, 372 bp, Zea mays
  Clone ID: MRT4577_77230C.1
ggactaatagggttggatggtcgactctgggaaaaactccgtgcaggcattcattaaacctcgggcacatgagcctgacccctcgaggaccttgtacgatgctgttaagtccatcaaacctactgatatgattgagatctctggagtcgcaagaacattcacgaacgaagttgtggaggccatggcttccttcattgagaggcctatcatctcgttactggcaaatccaacctctgattctgaatgcactgctgaagaagcatataactggactgagggtcgtataaatatctgccaggggcaggccatttgaacctgtggagtacaagggtaaggatttagcacctggacaatcgaaccacgcctacattt

SEQ ID NO: 159714 - DNA, 281 bp, Zea mays
  unsure (1)..(281): unsure at all n locations
  Clone ID: MRT4577_77231C.1
gggaggggcgggggggctaacaaacactcgccngnagggagccccggacggagnnaaccgcccgannngggctgcanncccaaacaacccgacncgnngacggcgccccgnggngcgacagggnccgggccggacggggcncncaccctcccaagcgggccgggcgagagaacattttttttttccgncgcngaggacnccncnccagacnacaanncgggcggcgaggccgccccacccccaagcngggcngcncccggnncgcccgccgnnaccagggg

SEQ ID NO: 159715 - DNA, 185 bp, Zea mays
  Clone ID: MRT4577_77232C.1
acgctgacgcttcgggaatgacaggacgggactgatcttcgtgctggatttccatctaagccaccatattaggacacaccccatgcacgagcattgtattatcacgtattatatgacgtacatgttaaaggtcgacactatgtactggccgtggaggaacaatgaagacaaggtgaaggactaat

SEQ ID NO: 159716 - DNA, 823 bp, Zea mays
  Clone ID: MRT4577_77233C.1
gggtacctcgaggccggccgggccggggttctccggcgtatccggattatgctggctaggacctaggagcgtgcggggccaccaaccgatgcgtccgtcccgtccacaccagtacaccaccatcccccaccggccaccacttctgctccgcgtccgcttttcagctctccaccgctatctcgcacgtcgctccccaaatcatcccatcctacgcccgcggccgtggcaccgaatccagaagcgtctagaagggggaggtggtcgcccatgaccgtctgaccggccgtcgccatgggatgcgctggatccactccaaagactgacgataatggtaagaatttgaagaaaccaaagccttggaagcacacccaagcaataacgccggcacaactcagacagatgcgtgatgaattttgggacactgctcctcactatggtggacagaaagagatttgggacgcacttagagccgctgcagactctgacctagcgcttgcgcaaaccatagtggatagtgctggcatcatcgtatcgaattctgacatgacactttgctacgatgaaagaggtgccaaatatgagcttccaaagtacgttctaagcgagccaacaaacttgatcagggacggttgaattgataaaataaacgtggggtccaatgtaaattatgtggatcacattattatactgacatcacgttggcatgattttggaacttcaataatattatgatgtgctagattctgattttaaaaaaaaaaaaaaaaaaaaaaaaaaggcgcgaggacccgggccctccgagctcccagcttttggttcccct

SEQ ID NO: 159717 - DNA, 625 bp, Zea mays
  Clone ID: MRT4577_77234C.1
tgggtacctcgaggccggccggaaattgctttctgcctcctcccttctctagttgctgatccgcaccacttagcatcaagcttagaacaccggtcagatggtctccacgtccaccttactgcaccaccctcgccagacagatgcgcggcagacgatagcctgcacagaggcgtgccgtccttcgacaaaatgcttaggttcttgccggcgcacgagcacatcaagcgcaagcacaacacgaaggcgctgaacacgccaaggaatgcgctggcggccaccgagaacgcgacgacaagaaagcaccagctggtcgacatggcgtacagcaaccattacttccacgacccgctcaaagccgtcaagaaacgcgtgtcggagaggtagttcgcggccagcgacagcgtagacatgaaacagatctactcgatcatgccgcagctcaggcgaacctgcattgacatagacttcctgctggtcctgcgcgacgacgagtgggacctcaccaatgagctgatccgccgagagggcgtcacgaaggtgacccacttcaacgtctacaagtgcgccaatcaatggtgagcagaggagagcatctaacgcgagcgcctcgcggaagacgaaatct

SEQ ID NO: 159718 - DNA, 695 bp, Zea mays
  Clone ID: MRT4577_77235C.1
attccccgctactgttagagtgctttccggagccattaattgtgctccgtctccaccaatcgcatggcgctcacgctcttcctcactccgatagaatctgtgcccgccgactccacatgacaactgcataaccctaagcttcttccatgcggacgacttagatgtagacgacgcggcagggatggagtctgagagcatgccgatgatcaacctggtaggactacttggacgagcgcatcccctttcctaacgacatctacagcatgctatccaaggaagtgctgtactgcgagaacaccctacatgacatcctcatccccaccctctcctcgatactccctcgtcgagactaccggtgcagccccaccggcaaccgctctccctccaccacggacgacacgctccatactgaaaggcgtacttcggaaggtcgacctctccaacgctttatcgaccacaatctatggtgccaactatctgaacatcaactgtaaggtgcgaccatgacatgtgcactgatgatgtcatgatcaagatcaacgacgcacaacagattgccaaaaacttcccaatgaacatggacttcaaccctgacgaccaagagaagatccagatctacaaccactgcgccttcgagtacagactcgctggatctattgacgtctaagtcgtcaggagactactactatgactac

SEQ ID NO: 159719 - DNA, 311 bp, Zea mays
  Clone ID: MRT4577_77236C.1
ggcatcatggagaatgggctagccctcggctcggcacacaattcgacgcggaccgaaaaactggactctgaatctaatgtcattctcattgacaactatgataccttcactcgctatatctatcaatacctggccctcgaaggtgctctagtaacggactatcggactgaccagatcacgctcaagggactgattgccgacaaacccacccagttagcgatcagtcctggccccggtcattcggacaccgatggggggattagcacagcagcaattctggaatccagtgcgaaaatacctactttccgggt

SEQ ID NO: 159720 - DNA, 650 bp, Zea mays
  unsure (1)..(650): unsure at all n locations
  Clone ID: MRT4577_77237C.1
cgcctgcggtttcggtccggaattcccgggtcgacccacgcgtccgcgtggtcttgggttctcctaccatggttcccggagtgccgctcccgccggagatccagctggcgcagcgcctggcgggcaatgaacaggtgacgcgggaccgcgcgttgcggaagctgcggaagtacatcgaggccaggtcgcagcgggcgacaggtggtttcactccagatgaactgctaaaagtatggaaaggactgttttactgcatgtggatgcaggacaagcccctccagcaggaagaactaggaaggaccattgcccagcttgtccatgcttttcacacgacggaggcacagcaccagttcctgaaggccttctggcagaccatgatccgggagtgggtgggcattgacagactgcgcctggataagttctacatgctcatgaggatggtcctaagtgagtcactgaaggctgtgaaagcccggngatgggacgagagacagattgagcagctgctagagctgctaaccaccgagatcctgaaccccgacagccaggcccgcagtggggtgaagagccacttcctagagatctttctggangagctggccaaagtgggcgctgcagagctcaccgcagaccagaatctgcagttcatc

SEQ ID NO: 159721 - DNA, 463 bp, Zea mays
  unsure (1)..(463): unsure at all n locations
  Clone ID: MRT4577_77238C.1
acaagawgccagtacatatcgtagtagcacaacacacagtacattaaccattcacccgcccgccccgnaagaacgaagctatagcagctagcagcagcyccccttcttcctctctsatctagcactttgtgccccacattccsagaaaggtttccgttcaccttaactttttttttcccsagtagraggcsttcaccgccaccacscacttctttcagacwgkstctcastcctttttyacstcctcgcaggtytagagccccsagaagragaagtttcagtttgttcagcactttatctdccccctttttatttcbatttcctttctctcaaccagnkcattttctttagccaaawctgcgaaaaccccattaccaragcygccttgagacacagaatcarcaccaggttttggctgctcttcatggtctcscaccarctgttcttcctctctatatcctcc

SEQ ID NO: 159722 - DNA, 294 bp, Zea mays
  Clone ID: MRT4577_77239C.1
gaggtgtgaatcaaagtaccatcgactgtccttggggagttaacaacagagtacgatgacagccataatcaagaacaaaagatgtccacgcttcgtacaaggatcgtggacatcttttgttcttgattatggctgtcatcgtactctgttgttaactccacaaggacagtcgatggtactttgattcacatctcagcccgattccgttgtcggattgcctagtgcctacacttgtttttttttattttaccgtttcggcttcatctctgtgggcaattaagctgatactcgtgt

SEQ ID NO: 159723 - DNA, 922 bp, Zea mays
  Clone ID: MRT4577_7723C.1
attgggtacctcgaggccggccgggttgagatctcgcaagctggaaataattcatcttgtcattcaataatataaagggtgaaattccatcatggctagggaattgcaggagcttgcaacaacttggatttgtcaataatagtctgtctggcaaaattccaaattttataggcttattcagcaacctcacatatcttttactttcacagaactccctgactgggctgatcccacctgagattggtaactgtcgattgctgcagtggctagagctagatgcaaaccagctggagggcactgttcctgaagaatttgcaaatttacggaatttgtcaaagctctttcttttcgagaatcacctcatgggagacttccctgagagtatttggagtatccaaaccctcgagagtgtccttatttatcgcaacaaattgacagggaggctaccttcagtgttagctgagctgaagtctctaaagaacatcacactgtttgataatttcttcactggagtcataccacaggagctgggtgttaatagccccttggtccagatagatttcacaaataacagttttgttggtggtatcccaccaaacatttgttcaggaaaagcattgagaattttggacttggggtttaatcatctcaacggtagcatcccatccagtgttctggactgcccaagtttggaacggttaattctcagagataacaatcttagtggatcaattatgtaatccataagatttggaaatgcatctacaggttacctttttatgaaacgggagaggtctagttgttttgtttggccaggcatctataggttgggccatgcataaaaaagactcaaattagtggacaagttgttttgtttcctgtacatcagtttattatcaagagctcgttttgttttcttgtc

SEQ ID NO: 159724 - DNA, 265 bp, Zea mays
  Clone ID: MRT4577_77240C.1
catcactggtccaggtcttgagtttccgaatctttttcccttcgcctgtggtctattgtcgctatgtgacttgcgcttaatccaatattttgcctattctctatatcaaaaaacctttacagttagcagggatgttccttaccacggatttgtagccccaaatctctcatattcgctagtgtttaaaaggctaagaatagtggggcccagccgatgtggtaggtgatatagaggcatcttttctagagacacatggaccagatga

SEQ ID NO: 159725 - DNA, 231 bp, Zea mays
  Clone ID: MRT4577_77241C.1
ataaaattcactttccacctccccacagagcaagtccaacctatacttttctggccatcccccacccttacagccaaatagctcccccagataatataactccatccgctactaagaccctaccacactagtctccaccccactcacaaaaaagcaacgttccaaacgcaaatctctacacaccaactgacaatgatctagcacaacattcactattctgcacaaatcaaa

SEQ ID NO: 159726 - DNA, 683 bp, Zea mays
  unsure (1)..(683): unsure at all n locations
  Clone ID: MRT4577_77242C.1
gcatatataagattcctctctccttgcttaatttggattagtttgcacaggtaattaatcagttgacacttgaagctatgatgagcagcagatcagaccatcagacaaggaagaagaggtagcaatctcctagcatctagctagctatctctctctaatcaagtgatgaaaagaagatcctccaagaaatgaacaaaagaaagatcatctcgtgacaagaaaaaagaagaagtaaaaagaaaccgacgtgcgtggaaattaaaaaggccgagaaatgcccatgtctgcaccaaaaaccgtcgctgccacttaccccgcccgcgcccatattgcatgcatattcctccacacagctacttgatctgatccccgtcccgccaggcgccagctctcgatcacgcgtcttttttattcctgtggcgctccccgccgtacggccatgcaccgccgctgggcgacgacgctgtggtcgtggacgacggcgtggacggcgccgcagcggccgacggcgacggattgcccgcggcccngcgcggcgacggcgacggcgggccggcccgatgagctgctgcgggnagaagtccagtatctgcggcgccgatgcggacgacgacggcgagaacgtggagggcagggtgacttccgggcgacggccatcatcgtcatgagctgctgctgctgct

SEQ ID NO: 159727 - DNA, 256 bp, Zea mays
  Clone ID: MRT4577_77243C.1
cggaagctagtcacggtcactactcaggtgaacgggcagatgttccccaatcctctcatcgacgtctcgccgacgtcgttgacctcctaccacagtgacgccgtcgactccagcacggcttactcgatccgcaagctgctgagcgacatgatgctcagcgtcacgcaggtcgtcgtcccgcagcatgtctcgcacgggcgacatgggacctctgttcatcgtcatctgcgtcgagatgcgtaacattcgcaatatc

SEQ ID NO: 159728 - DNA, 224 bp, Zea mays
  Clone ID: MRT4577_77244C.1
aggtcgactacttgtcggggggcaggcctacggcggcaagaccgactccaggcggttgagaccgacccgggccaccgcatgtgctggagagctccacccccggggacggaagcatactacagatacgtctgtccaggacggggcggcacaagtcgcacgcaccactataccgacaccgtctacgacgactaggatctacatctgaaggcgcaggccgtctacaa

SEQ ID NO: 159729 - DNA, 5370 bp, Zea mays
  Clone ID: MRT4577_77245C.1
atggccggttcaagggatagctctgatatttctccaagcaacatcatagagccgacttgggaaaccttgccggctgacgagcagctccagttcgaggagcacaaggagtggatgatccaggaggcgaaagcaaagttcttggccaacttcaaagtggacaggaacaacaaagtcgtccggcatcgggcgacggatccggcttcgctccaacccacgcagatatccccaataaattatgtagaagatcagcgtgaacaaatgcagaacatcatagggggtatgcaaagcgatcttaagagactagtacgtgcatttgataaatctagtatcacaaattttccttcgcacgaggttgagttaggaggtaacacgcgtaacacatcggctacaggttgtcacgaccagtcacaacccctttatgggatgccgatggatacataccctgagcaaccgcaaatcggcagcaaatcagtcgatctgcgcatgcccggaccgtccgcacgatccagagcccaggaaagctttccggccccacctagaaggccggaaagaaacgatcaaacctatgagccatatagggcaaatggaaatgcaccacgtagttcaaaccaatggggggaacgacaacatgctaacatgcaaccaaccccacctatgtttgaccagagagccggtggtcttgcaccggctgccattgatatagtaagggaagaaatagccggggcgttccgagataagctcggagtaagcatgatccctggggggcaatcatatcggaaaccttatgacagccgatttgatcaccacccgtacccacagggaactagaatacccgaattcgcaaaattttcgggtgatcaagggaaaaacacgcgtgaacatataggccagttcttagcacaattgggagagttggccgacacagaggcatttcgcgtgcgcttattttcattatctctaacaggaaccgcgtttgcatggtatgccactttacctcctaattccatttcatcatggggggatctggaacaaaaatttcataatcattttttctccggtgactatgagttggatttggacgaatcggttaatgattacatccggagattccgcgatacaagaaaccgatgctttcaaattcatttagcagaaaaacagctagtaggattagcctttaatggtctgcgatattatttaaaagaaagattagaaggcatccaattctttacaccagcacagttacaccagagggctttggcttgcgaaagccggagcaaagaaactgctaaaacaatgcgtcacaacgtacacatagtagaatgcgaccaaagtagctcagatgacgaatcagtagaagtgtacgctgctgaaatggtttggccaaagcaggccaaatcttcggcttgtgcttccttacagccggttcaaaagaaacggcaagaggagattcaatcggtcattaacgaaggacgattgaaatttcaggaaatgcaggtggatacagagccctttccgatgaacatgattgacttcgagggcaagaaagtcctggttcggtcaaatacagccgataaaggcaaaggcaaggaaacaatcatcggcaatgctaaaaaggccgatgaggattgtaaagtttcttgcaggaaagtggtggccaagaagactcccgatggaggggagaccctgaaggtgaccatcacagcctctagcactggggggcaagcgcagacagggagacagttgcgggaacccgtgctgcgcatcacggacagtccgccgtcccgacgcggacggtccgacgcttctccggacggtccggaggattctggcggacggtccggccatgctcaggactcacagcgaccacgtaccttcaaaccacgacgaccagagataggtacgtggaaaacaaatacatttaaagcagctggtcggctgatcaagcctggcccgactttcgatcaattgttgtctaaatatgtgaaaaagaaggccggccccagtgaccggccaccgaagcaaccccgctcacccattcatgagcaacgtcaggttaggccgattggaccacctcaccaatcggaagaaatgaaaggtcctattgtacaattgagacctaacatgccgacatggacccctccacctccttatccatctatgtcatatccatacacatacttacctccaccatatgtcccaaatcaaatgtggggcatgccaccatatccatttgggatgccacagtaccccgcctggggggcaccccaaacatccgtttttgataggttggcgacgccagtacaagaccgattgagcgctgctgaatccggtcaccaggcacaggcccaacaagattgtcggactactcggcctcctaggccgaccaatccagcaggggggcatatgcctgtagcaactcaaagaacaacaaaaaaggacatcatcaaaataggcaccgcagatgttgtcatacagggagacaataaagggccgatgattttcggtgaatcggccaacacaaccgaaaaggatacggctaccatcaaaacagccgatccaaaatactccatgcctcgatggtgcccatcgagattgacacgatcccaaaagagaaaattacagtgcctaagagcaaaggagagccaggagaaggaggcggaaaagacatttaatgacacacatccactatacccgccaccgcaaaagaaatggagaccgaaggccgttgagaaaaaacaaacggccaaagaaatagaaagtcaacctacaccacgtgcggaccgtccggcctccgcgcacggaccgtccgccgttcaccaggaagcctctggacatcctgcaccaggcgcggaccgtccggcccccgcgtgcggaccgtccgccgttcaccaggaggcctccaacgacacgacaacatcaatggaagaggacgacctactgggagaagacctggtcgactacgaggcttctccagaacgctcaggtatggatgtaaatattattacattttctgccgattgtactatcatcggcgacgatgaacctgttgttgcccagtttgattttggtcctaaagaagccgcctttactaaaccaaaggaatcggtaaatcatttaaagccgctctttgtgcgcggtcacattgatgggatactgattgctaagatattggtagacggaggggcggctgtaaatctaatgccttattcattatacagaaaattaggtaaacaagatgacgaacttgtcaagaccaacatgaccctcagcggtgttggaactgatagttcgatcaaagctaggggagtcacgtccgttgaattaaccatcgggactaagacccttgctgctgcattcttcgtcgctgctgtagaaggaaattacagtttaattctaggcagagattggattcacgccaatcaatacagttcggcttccaaggccggatggtctggtctttcacaaaagagttcggactttaagaccgaacatatatcacagcaaaaggacagtattacggatgatccggttcccgggaccggagagtccgccgtcacacaaagatcttctaattcctctgtgggaaacataatagaggaattcagagatcttgataaactaggacaggggtttacatcggccgatcctttggaggagattgacataggagatggtaaaactccaaggccgacttttgtaaacaagaccctggagaccgatcctagagatgagatgatcggtctattgaaggaatattcagattgctttgcttggaattatactgaaatgcctggattaagccgagagatcgtagagcatcggctgcctattaaatctggtttcagacctttcaagaaaagagctagaacatttcgtccagatcttctcccacgtatcaaggacgaaatccaccgactgctagaagctgattttatcagaccttgcagatacgcagagtgggtctccaatattgtgccggtggagaagaaggagtcaggtaaacttagagtatgcattgattttcgcaatttaaatagagcaactcctaaagaagaatatcccatgcccatagccgacacattaatcaataatgcatcaggaaatagaattattagcttccttgatggtaatgccggatataatcagattttcatggccgaagaagatgcgtctaaaacggcctttatatgtccaggcttcattggtttatttgagtgggttgtcatgacttttggtctgaaaaatgctggtgctacttatcagagggctatgaatttgatcttccatgaattgttaggaaacactgtggaagtttacattgatgatattgtagtcaaatcggctgagtttagttctcatatagttgatttgcgcaaagcctttaataaaatgcgtcagtatggtttgaaaatgaacccacgtaaatgtgcttttggagtgtcggctgctgaggataaggtcattggggctgttctgacacaagagactgaggggaaggagcatgtggtgacatatctaagccgaaggttggtggatgctgaaacaagatgttatttactgtctagtcattgcactgtttctggtcaagccgatgtgatcaaatacatgttgcatagcccaattatgagtggtagaattggtaagtgggcttatgcactcatagaatatgacttggcctatgaaccattgaaatctatgaaaggccaagtcatagcggatttcattgtagaacatctggttaatgatattcatgaactagacctgtcatacctcactattactccttggactttatattttgatggatcggtttgcaatgaagggcaaggaatgggcattgtgcttgtttcaccaagtaatgtctcctttgacttctctagccaattgaaaacttattgcactaataatcaagtcgaatatgaggccctcttattcggtttggaactcttaaattgtatgggagtaaaacatgtgaaggcatttggtgattctcatctggtcgtccaacaggtgttagaagaatatcagtgttttgatggtactttaaatagttaccttgaaaaatgttggagcataatccattcttttgacgaattcagtattcggcatatctctagagttgagaatcatagagccaacaatttggcacaagatgcatcaggttatcggataaagcgagggagatttcacagcactgaaaatctgataaccagtgcagggccaaatcaacaggccgcggaccgtccgcgtgaaggcgccggaccgtccgaggttgcctggaaggttctcctagtcgatttggctgacaatgaagccgatgcaagtgattggagaacgcccataacaaattatttacgaaatcccaattga

SEQ ID NO: 159730 - DNA, 789 bp, Zea mays
  Clone ID: MRT4577_77246C.1
atggccggttcaagggatagctctgatatttccccaagcaacatcatagagccgacttgggacacattgtcggctgacgaacagctccaattcgaggagcacaaggagcagatgatccaggaggcaaaagcgaggttcttggccaacttcaaagtggacaggaacaacaaagtcgtccgacatcgggcgacagatccggcttcactgcgacccacgccagacatccccaatattcaatcggccattaacgaaggacgattgaaatttcaggaaatgcaggtggatacagagccatttccgatgaacatggtcgacttcgagggcaagaaagtcctggttcggccaaatacagccgataaaggcaaaggcaaagaaacaatcatcggcaatgctaaaaaggccgatggggattgtaaagtttcttgcaggaaagtggtggccgagaagactcccgatggaggggagaccctaaaggtatggcagatagcccggccagcaaggctggacaatctacaccaggcgcggaccgtccggcctctgcgcgcggaccgtccgtccttcatcaggaggcctctggacaacctgcaccaggcgcggaccgtccggcccccgcgcgcggaccgtccgccgttcaccaggaagcctccaacgacacgacaacatcaatggaagaggacgacctactgggagaagacctggtcgactacgaggcttctccagaacgcccagtttgattttggtcttaaagaagccgcctttactaaaccaaaagaatcgaaaattaggtaa

SEQ ID NO: 159731 - DNA, 250 bp, Zea mays
  Clone ID: MRT4577_77247C.1
gttgttctcctcttgttttccttttctgttcggctaaatgttgttttctactttttttcccttggcgttgctgcgtggaagggggggggctaccttttttctaaatctgcatccacgggctctgctcgaatggctcggctcatgggtttcgaattgtcgaccccgtgccttattgttcttccgacattcatttacctatcttcggggaacaccatcactctgcctcgtgcggacacagtgcttcatttgt

SEQ ID NO: 159732 - DNA, 912 bp, Zea mays
  Clone ID: MRT4577_77248C.1
atggccagttcaagggatagttgtgaagtctctccaagcaacatcatagagccgacttgggaaaccttgtcggctgacgaacagctccagtttgaggagcataaggagcagatgatccaggaggcaaaagcaaggttcttggccaacttcaaagtggacaggaacaacaaagtcgttcgacatggggcgacggatccagcttcactgcgacccacgtcagatatccccaatagagccggtagtcttgcaccggctgccattgatatagtgagggaagaaatagccggggcattccaagataagctcggagtaagcatggtccctggggggcaatcatattggaaaccttatgacagccgatttgatcaccacccatacccacagggaactaggatacacgaattcgcaaaatttttgggtgatcaagggaaaaacacgcgcgaacatataggccagttcttagcaaaattgggagaatatgccgacacagaggcatttcgtgaaatgcaggtggatacaaagcccttttcgatgaacatgatcgacttcgagggcaagaaagtcctggttcggccagacacagccgataaaggcaaaggcaaagaaacaatcatcggcaatgctaaaaaagccgatggggattgtaaagtttcttgtaggaaagtggtggccgagaagactcccgatggaggggagaccctgaaggtgaccatcacaacctctagcactgggggcaagcgtagacagggagacagttgcgggaacccatgctgcgcatcgcggacagtccgccatctagacgcggacggtctgacgcttctccggacggtccggagaactccagcggacggtccggccatgctcaggactcgcagcggccatgtaccttcaaaccacgacgaccagagatag

SEQ ID NO: 159733 - DNA, 870 bp, Zea mays
  Clone ID: MRT4577_77249C.1
ggccgcttttttttttttttttttattacaactttcgcataaccgcatatctgtttacgttttacttcctctgtatgtacatgcgtaccaacattgcgggctataatagtcaccgccgaagatcctaagataacacacatagtgtatctcttatcaacatacgcaatttcggcggagaacaaagtctttactttttctccgtcaaacacgttgttcttggctttcaagatagatttgccgacgccggttactggtgacggtaacgctttggctatagacgatcgtacacgattgactaaagtttcgtcttcatcggaattgtatccggccttaatgtcatcgaatatatccgaagaattgagctccttcaaagcagtgcgaaatttctcaaacatctccttaaggatagagacgtcgacgactactccgaaagtttcgttaacgacactcacggtactaggcataacttcttcgcttatgttcttgaatttgctttgcggcttcataatttcgtctaaatctttgagatgagtgatgcacgaaacgtagaatataagaagcacgcagacgccgaatacaccggcacgatcgggttcggacagctctttcaacgtaggagtctcgggcttcaattttccgtaaatccaattgctaggctcagccatgaaatctgcctcgtgtaatttctccaaggtccttttgaacgacctgtcaggcgtgaatccgatagaaccagcgatgaagagaagggcgtcgagtggcttagacgttgacattatgctgggggctttaatgtaaggtgtggtatttttactttgggtaaagtagggtagtgtaggctatggtaagtgataataaatatcccggccg

SEQ ID NO: 159734 - DNA, 674 bp, Zea mays
  Clone ID: MRT4577_7724C.1
gccggccgggtacgaacatgacgtccgttcgattcactactatactgaattctacgatctcatcgttaccggaagactaacatgcacctgccgtgccacgatggactactagctcacatgcgacacccagggtatcctcgacaggcacatgaccgaagtcaaagacgccggcccggtggtgatcatggagcttaactgcgcgagctggagcggctcatcgcctggagcaatcggcgccgatgataccaacgaacatcgccgagcaagtgtcacgtcatgggcgtctttcgctgaagcgggacttctgacgtagtactcccaagtgaaccatgccctagcaggacaaggctatcgcgctcttccacttcgttatgaactcgaagacgttcacgatcatcgtgcacggcgagaacgaccacctcctgtgccacatcgacaaggatggcaagactatggctgataacgccgatctctactggtaatctctgatgcccgaggatattgaccatgacgtataactgtacctgctgtggagatcacatgctggctatgacgaatatgaggaactgtgaacgactactagggggggttccttccaaaactgatgatagacttatccccgaatacttgtcctcctgtacgaatctactgactagtgactcttgaatttaatc

SEQ ID NO: 159735 - DNA, 587 bp, Zea mays
  Clone ID: MRT4577_77250C.1
ttgggtacctcgaggccggccgggagttggttgtcttcagggagggagagagggaaagatggagcgcaaggcggtggtggtgtgcgcggtggtcggcttcctcggcgtcctctcggcggcgctcggcttcgcggcggaggccacccgcgtcaaggtgcgtctcgctcgccgactctcccccttctcctgcgctcggtatgcggctggcgtcgtaccgtaccgtacggcgtacgtctatggccttgcctgccgccgccgactccgagaggtagatctcggccgctcctgggcgcgagagatagatctagtactgcactactaatgcccggtgatcttcacgcttgcgcgttgaggacggtaatgatcccgactcccgagtgtacctagccggtgtataaatacaatgctgagaggtgaacgaaatctgtggccttgtcatagaagtagacatggtgcggttgccatcgtgtgagaggtccagtgcttcgttggtttcatcttcgttgtaactgatccatcatccattccaagtgattcggatcaatcgggatcttctgtgaccgaaaaaaaaaaaaaaaaaagcggcc

SEQ ID NO: 159736 - DNA, 5901 bp, Zea mays
  Clone ID: MRT4577_77251C.1
atggccggttcaagggatagctctgatacttctccaagcaacaccatagagccgactggggaaaccttgccggctcgcgagcagctccggttcgaggaccacaaggagcttatgatccaggaggcgctcgcgagatccctctcctacctcaaagtggacaggaacaacaagctcgtccctcactgggcgatgcgtccggcttcgttccaacccacgcctcacgcccccaatgtatctagtaccgactagctacaatctctcagaaactctcttttagcccagcgtgcactattccagaacttcattgggggtttgcataccgatgtgaccagactcttacctgcattctattaatctttcatcgtaaaccttccttcacacgcggtcaagttaggagataacacgcttaacacctcgtctacaggtcttcacgaccagctacaacccttctatggcatgcctacggagacagatcttgaatcaccgcaaaccggcagctaatcagcggttgtgcccatgcccggaccgtccgcacgtgagcgcggaccgtccgggccaacaacagtcgggcctatttttaatgagttacctagatatgcgcccgaaccaccacacacgacacgaaatctaaactacccagtcggaccatccgcgtacaacgacggacggccaaatcttcggcttgtgcctccttacagccggttcaaaagaaacgacaagaggaggttaagtttacatctaatgttgattcaatcggccattaatgaaggacgattgaaatttcaggaaatgcaggtggacacggagccctttccaatgaacatgatcgactttgagggcaagaaagtcctgactcggccaaacacagccgataaaggcaaaggcaaagaaatagtcatcggcgatgtaagagaggccggtgggaatcataaaacttcttgcagaaaagtggtggccgagaagactcctgatggaggggagaccttgaaggtgaccatcacagcccctggcactggggggcaaacacagacagggagacaggcatttcgaccgttaccggtgtattttccgcaccgaactttcgtttccgatgtttccgaaataccgatatcgtttccggttccggagttaccattttcgattttgtttctgataaaaaatatgaaaacggtaatggttttggtgtttaccgactgttttcatcccgcgcaagaacccattctgcgcatcacggacggtccgccatccagacgcggactgtccgacgcttctccggacggtccggcgaactccagcggacggtccggccgtgctcaggacccgcagcaaccacgaacctttaaaccacgacgacccgagataggtacgtggaaaacaaatacatttaaagcagctggtcggctgatcaagcctagcccgactttcgatcaattgttgtctaaatacgtgaaaaagaaggccggccccagtgaccggccaccaaagcgaccccgctcacccattcatgagcaacgtcaggtcaggccgattggaccacctcaccaatcagaagaaatgaaaggtcctattgtacaattgaaacctaacataccgacatggacccctccacccccttatccatctatgccatatccatacacatacttacctccaccatatgtcccaaatcaaatgtggggcatgccaccatatccatttgggatgccacagtaccccgcctggggggcaccccaaacatccatttttgataggttggcgccgccagtgcaagaccgattgagcgctgctgaatctggtcaccaggcacaggcccaacaagattgccggactactcggcctcctaggccgaccaatccggcaggggggcatatgcctgtagcaactcaaagaacaacgaaaaaagacatcatcaaaataggcaccgcagatgttgtcatacagggggacaataaagggccgatgatttttggtgaatcgaccaacacaaccaaaaaggataacacaaccaaaaaggatacggctatcgtcaaaacagccgatccaaaatactccatgcctcgatggtgcccggcgggattgacacgatcccaaaagagaaaattacagcgcctaagagtgagggagagtcaggagaaagaggcggagaagatattcaatgacacacatccactatacccgccaccgcaaaagaaatggagaccaaaggtcgtcgagaaaaaacaaacggccacagaaatagaaggtcaacctgcaccaggcgcggaccgtccggcctctgcgcgcggaccgtccgtccctcaccaggaagcgtctggacaatctgcaccaggcgcggactgtccggtccctgcgcacggaccgtccggctttcaccaggaagcgtctggacaacctgcaccaggcgcggaccgtccggcctccgcgtgcggaccgtatgccgttcaccaggaggcctccaacgacacgacaacatcaatggaggaggaggacctgctgggagaagacctggtcgactacgaggcttctccagaacgcccaggtatggatgtaaatattattacattttctgtcgattgtactattatcggcgacgatgaacctgttgttgcccagtttgattttggtcctaaagaagccacctttactaaaccaaaggaatcggtaaaccatttaaagccgctcttcgtgcgcggccacattgatgggataccgattgctaggatgttggtagatggaggggcggctgtaaatctaacgccttattcattgtacagaaaattaggtaaacaagatgacgaacttatcaagaccaacataaccctcaacggtgttggaactgatagttcgatcaaagccaggggagtcacgtccgttgaattaaccatcgggactaagacccttgctgatgcattcttcgtcgctgatgtagaaggaaattacagtttaatcctagacagagattggattcacgccaatcaatttcataagtctctagtcacggacagttcggcctccaaggccggatggtctggtctttcacaaaagggttcagactttaagaccgaacatatatcacagcaaaaggacagtattacggatgatccggtccccgagaccggagagtccgccgtcacacaaagatcttctaattcctctgtggggaacatgatagaggaattcagagatcttgataaattaggacaggggttcacatcggccgatcctttggaggagattgacataggagatggtaaaactccaaggctgacttttgtaaataagaccctggagaccgatcctagaaatgagatgatcggtctattgaaggaatattcagattgctttgcatggaaatatactgagatgcctggattaagccgagagatcgtagagcatcggctgcctattaaatctggtttcagacctttcaagcaaagagctagaacatttcgtccaaatcttctcccacgcatcaaggacgaaatccaccggctgctagaagctgattttatcagaccttgcagatacgcagagtgggtctccaatattgtgccggtggagaagaaggagtcaggtaaacttagagtatgcattgattttcacaatttaaatagagcaactcctaaagacgaatatcccatgcccatagccgacacattaatcaataatgcatcaggaaatagaattattagcttccttgatggtaatgccggatataatcagattttcatggccgaagaagatgcgtctaaaacggcctttatatgtccaggcttcattagtttatttgagtgggttgtcatgacatttggtctgaaaaatgctggtgctacttatcagagggctatgaatttgatcttccatgaattgttaggaaacactgtggaagtttacattgatgatattgtagtcaaatcggctgagtttagttcttatatagctgatttgcgcaaagcctttgataaaatgcgtcagtatggtttgaaaatgaacccacgtaaatgtgcttttggagtgtcggctgaacaacaagaagcatttgatctcatcaaaaaatacttatcttcggctcccgtattaaaagcaccacgagcaggagtaccattccgattatacattgcagctgaggataaggtcattggggctgttctgacacaagaaaccgaggggaaggagcatgtggtgacatatctaagccgaagatgttatttactgtctagtcattgcactgtttctggtcaagccgatgtgatcaaatacatgttgcataacccaattatgagtggtagaattgggcaaggaattggcattgtgcttgtttcaccaagtaatgtctcctttgacttctctagccgattgaaaacttattgcactaatactcaagctgaatatgaggccctcctattcggcttagaacttttaaatggtatgggagtaaaacatgtgaaggtatttggtgattctcagctggttgtccaacaagtgttagaagaatatcaatgttttgatggtactctgaatagttaccttgagaaatgttggagcattattcattcttttgacaaattcagtattcggcatatctctagagttgagaatcatagagctaacgatttggcacaagatgcatcaggttatcggataaagagagggaagtttcataaaactgaaaatctgataaccagtgcagagccaaattcccaggtcgcggaccgtccgcgtgatggcgccggaccgtccggggttaccagaaatgttctcttaatcgattcggctgacaatgaagccgatgcaagagattggaggacacctatacttaattatttacgaaatcccaatatcaaaacagataagaacattcggcgaacaactttcaagtatgttttgatgagtgacgaactttaccgccgaacagtcaatgacatcctgcttaagtgcttgggcccagatgatgctatattagccatggccgaagtacatgaagggatttgtggtactcatcaatcagctccaaagatgaagtggttgttgcaaaggtccggtttttattggcctagtatgatagctgattgtttcaagtactacaagggttgccaagtgtgtaaaaaattcggcgacctacagttggtccctgcagccgaattacatcctatcatcaagccttggccgttcagaggatggggattagactttattggagaaattcatccttcatcatcaaaggggcatcggtttgtgttagttgccactgactacttcaccaaatggactgaagtcgttgctctaaagaacatgacacacaaggaggccaatggtcaggccgagtctagcaataggacattgattaatttgataaaaaagaaaatttctgataatcctaaacattggcataagattttgtctgaggctttatgggctcatagaatatctaaacatagggctactaaagtatctccttttgagcttgtctatgggcaggaagtagtgttgcatgtggaaataagtttgaatgctgtcaggttcgctagacaaaatgatctaactgctactgattattatgattcaatgatggataatattgatgaggtgaccgacaaaaggatgatagctttgggagcaatagaaaaggacagaatcatggtagccagggcctacaacaagaaggtcaaagcaaaatcatttcaagtaggggacctggtgtggaagaccattctgcctctaaggaatagagaccggaagttcgggaaatggtcaccaagctgggaaggtccttatagggtaaaacaggtgatgtctagcaacgcctatttgctacaaacattgcaaggcaagggcttgcctaaggctttgaatgggcgtttcctcaaacagtaccatcctagtatgtggcaagatgcctaa

SEQ ID NO: 159737 - DNA, 132 bp, Zea mays
  unsure (1)..(132): unsure at all n locations
  Clone ID: MRT4577_77252C.1
gaccaacccgtccgttcttaagagagtaacatctggcccacttgacggtgcaaattccagccttgtggacggaataaggttagcatttgcaccgtcaagtgggccagatgtgactcntgatgagcggtcgcg

SEQ ID NO: 159738 - DNA, 5913 bp, Zea mays
  Clone ID: MRT4577_77253C.1
atgaccggttcaagggatagctctgatatttctccaagcaacatcatagagccgacttgggaaaccttgccggctgacgagcagctccagttcgaggagcacaaggagcggatgatccaggaggcgaaagcaaagttcttggccaacttcaaagtggacaggaacaacaaggtcgtccgacatcgggcgacggatccggcttcgctccaacccacgccagatatccccaatgttgtcacgaccagtcacaacccctttatgggatgccgatgggcacataccctgagcaaccgcaaatcggcagcaaatcagccgatctgcacatgcccggaccgtccgcacagagccggtggtcttgcaccggctgtcattgatatagtaagggaagaaatagccggggcgttccgagataagctcagagtaagcatggtccctggggggcaatcatatcggaaaccttatgacagccgatttgatcaccacccatacccacagggaaccaggatacccgaattcacaaaattttcgggtgatcaagggaaaaacacacgcgaacatataggccagttcttagcacgcaattgggagaattggccgacacagaggcatttcgcgccaaatcttcggcttgtgcctccttacagccggttcaaaagaaacggcaagaggaggttaagtttacatttaatgttgattcaatcggccattaacgaaggacgattgaaatttcaggaaatgcaggtggatatagagccctttccgatgaacatgattgacttcgagggcaagaaagtcctagttcggccaaacacagccgataaagacaaaggcaaagagacaatcatcggcaatgctaaagaggccgatgaggatcgtaaagtttcttgcaggaaagtggtggccgagaagactcccgatggaggggagaccctaaaggtgaccatcacagcctccagtactggggggcaagcgcagacagggagacagatgcaggagcccgtgttgcgtatcccggacagtctggcacgtaggcgcagacggtccgggaccccaccggacggtccggagagctccggcggacggttgacgccaccagtacaagaccgattgagcactgctcaatccggtcaccaggcacaaacccaacaggattgccggactactcggccttccaggtcgaccaatccggcaggggggcatatgcctgtagcaactcaaagaacaacaaaaaaggacatcatcaaaataggcactgcagatgttgtcatacggggagacaataaagggctgatgattttcggcgaatcggccaacacaaccgaaaaggatacgactaccatcaaaacagccgatccaaaatactccatgcctcgatggtgcccagcgggattgacacgatcccaaaagagaaaattacagcgcctaagagcaaaggagagccaggagaaggaggcggaaaagacatttaatgacacacatccactatacccgccaccacaaaagaaatggagaccgaaggccgttgagaaaaaacaaacggccacagaaatagaaagtcaacctgcaccaggcgcggaccgtccggcccccgcgcacggaccgtccgctgttcaccaggaagcctctggacaacctgcaccaggcgcggaccgtccggcccccgcgtgcggaccgtccgccgttcaccaggaggcctccaacgacacggcaacatcaatggaagaggacgacttgctgggagaagacctggtcgactacgaggcttctccagaacgcccaggtatggatgtaaatattattacattttccgccgattgtactattatcggcgacgatgaacctgtggttgcccagtttgattttggtcctaaagaagccgcctttactaaaccaaaagaatcggtaaatcatttaaagccgctcttcgtgcgcggccacattgatgggataccgattgctaagatgttggtagatggaggggcggctgtaaatctaatgtcttattcattgtacagaaaattaggtaaacaagatgacgaacttgtcaagaccaacatgaccctcagcggtgttggaactgatagttcgatcaaagccaggggagtcacgtccgttgaattaaccatcgggactaagacccttgctgctgcattctttgtcgctgatgtagaaggaaattacagtttaatcctaggcagagattggattcatgccaatcaatgtataccttctacattacatcaaatgctgatacaatgggtaggcgatgacatagaacaagtacatgctgatgtatcggcctgcatcgctgtggccgatgccccagtactctggacttatgagactgctacatgtctcacaagagtagacttttctgattatcaattcataagtatagataagaaagttcatgagtctttggtcacggaaagttcggccgccaaggccggatggtctggtctttcacaaaagagttcggactttaagaccgaacatctaccacagcgaaaagacagtattacggatgatccggtccccgagaccggaaagtccgccatcacacaaagatcatctgatgcctctgtgggggacatgatagaggaattcagagatcttgataaactaggacaggggtttacatcggccgatcctttggaggagattgacataggagatggtaaaactccaaggccgacttttgtaaataagaccctggagaccgattctagaaatgagatgatcggtctattgaaggaatattcagattgctttgcttggaattatactgagatgcctggattaagccgagagatcgtagagcatcggctgcctattaaatctggtttcagacctttcaagcaaagagctagaacatttcgtccggatcttctcccacgcatcaaggacgaaatccaccggctgctagaagctgattttatcagaccttgcagatacgcagagtgggtctccaatattgtgccggtggagaagaaggagacaggtaaacttagagtatgcattgattttcgcaatttaaatagagcaacccctaaagacgaatatcccatgcccatagccgacacattaatcaataatgcatcaggaaatagaattattagcttccttgatggtaatgccggatataatcagattttcatggccgaagaagatgcgtctaaaacggcctttatatgtccaggcttcattggtttatttgagtgggttgtcatgacatttggcctgaaaaatgctggtgctacttatcagagggctatgaatttaatcttccatgaattgttaggaaacactgtggaagtttacattgatgatattgtagtcaaatcggctgagtttagttctcatatagctgatttgcgcaaggcctttgataaaatgcgtcagtatggtttgaaaatgaacccatgtaaatgtgcttttggagtgtcggctggtaagtttttaggatttgtcatacatgaacatggtatagagatagaccctgaccgaatcaagtctattcggaatgtggggcctctgacctgtaaagtcgaggtacagaggttcctcggcaaggttaattatttacgaaggtttatttctaacctagccgggaagattgatgcgtttacccctattcttcggcttaagaatgatgccgaattcgcttggggggcagaacagcaagaggcatttgatctcatcaaaaaatacttatcttccgctcccgtgttaaaagcaccacaagcaggagtgccatttcgattatacattgcagctgaggataaggtcattggggctgttctgacacaagaaactgaggggaaggagcatgtggtggcatatctaagccgaaggttggtggatgctgaaacaagatgttatttactgtctagtcattgcactgtttctggtcaagccgatgtgatcaaatacatgttgcataacccaattatgagtggtagaattggtaagtgggcttatgcactaatagaatatgacttggcctatgaaccattgaaatctatgaaaggccaagtcgtagcggatttcattgtagaacatcgggttaatgatattcatgagctagacatgtcatacctcactattactccttggactttatattttgatggatcggtttgcaatgaagggcaaggaattggcattgtacttgtttcaccaagtaatgtctcctttgacttctctagccgattgaaaacttattgcactaataatcaagctgaatatgaggccctcctatccggtttagaacttttaaatggtatgggagtaaaacatgtgatggtatttggtgattctcagctggttgtccaacaagtgttagaagaatatcaatgttttgatggtactctaaatagttaccttgagaaatgttggagcataatccattcttttgacgaattcaatattcggcatatctctagagttgagaatcatagagctaatgatttggcacaagatgcatcaggttatcggataaagagagggaagtttcacaaaactgaaaatctgataaccagtgcaaagccaaattcccaggtcacggaccgtccgcgtgatgacgccggaccgtccggggttaccagaaatgttcttttcattaattcggctgacaatgaagccgatgcaagtgattggaggacacctatacttaattatttacgaaatcccaatatcaggacagataaaaacattcggcgaacagctttcaagtatgttttgatgagtgatgaactttaccgccgaacagtcaatgacatcctgcttaagtgcttgggcccagatgacgctatattagccatggccgaagtacatgagggaatttgtggtactcatcaatcagctccaaagatgaagtggttgttgcgaaggtctggtttttattggcctagtatgatagctgattgtttcaagtactacaagggttgccaagtgtgtcaaaaattcggcgacctacagttggtccctgcaaccgaattacatcctatcatcaagccttggccgttcagaggatggggattagactttattggggaaattcatccttcatcatcaaaggggcatcgatttgtgttagttgccactgactacttcaccaaatggactgaagccgttgctctaaagaacatgacacacaaggaggtaattgagtttataactgagcatatcattcatagattcggcattccccagaccttaactacagatcaaggtacttcttttatgtcaaaggaggtacgtgaatttgctgaattatacagaattaagttgcttaattcatctccatattatgctcaggccaatggtcaggtcgagtctagcaataggacattgattaatttgataaaaaagaaaatatctgataatcctaaacattggcataagattttttctgaggctttatgggctcatagaatatctaaacatagggctactaaagtatctccttttgagcttgtctatgggcaggaagcagtgttgcctgtggaaataagtttgaatgctatcaggttcgccagacaaaatgatctaactgctaccgattattatgattcaatgatggataatattgatgaggtgactgacaaaaggatgatagctttgggagctatagaaaaagacaaaatcatggtagccagggcctacaacaaaaaggtcaaagcaaaatcttttcaagtaggggacctggtgtggaagaccattctgcctctaaggagtaaagaccggaagttcgggaaatggtcaccaagctgggaaggcccttacaaagtaaaacaggtgatgtttggcaacgcctatttgctacaaacattacaaggcaaggacttgcctaaggctttgaatgggcgtttcctcaaacagtaccatcctagtatgtggcaggatgcctaa

SEQ ID NO: 159739 - DNA, 640 bp, Zea mays
  Clone ID: MRT4577_77254C.1
ccccccacagggctttttttttaaaaaaaaaaaccccctttgaattaaagggcccccccttccaaaacgggcctaattttttaaagaaaaaacattttggacctaccccaattgaccccaaaaaaaaaaaggggggcccccaaaaaaaagggggggggtttttttttttccccaaaaggggggggggggggctttaaaaaaaaaaaccccgggctttttttttttctaagggaaaatagggccccggggaaagggggggaaaccggcccaaaagggggggccaaggggacccaaggggccccaaaaaattgaattccggggaaaccccccttgcccaaaaaaatttcggggggggaaatttgggaaaaattttttaaaagggggcctttgggggttggcccccccccccggtttttttaggaacaaggggttttttttttggccttccaagcccaactggtttaaaaaccctttttaaccctttaacccacccccatttttttttttggccctaaaggggggccccctttttttaaaacgtttaaagaaccaaattcctttttgggctcccccttaaaaaaaaccaaagggcccccctttttttggtttggaaaaagtttgtttaacccccccccttggg

SEQ ID NO: 159740 - DNA, 1167 bp, Zea mays
  Clone ID: MRT4577_77255C.1
atggccggttcaagggatagctctgatatttctccaagcaacatcatagaaccgacttgggaaaccttgtcagctgacgagcagctccaattcgaggagcacaaggagcggatgatccaggaggcgaaagcaaagttcttggccaacttcaaagtggacaggaacaacaaggtcgtccgacatcgggcgacggatccggcttcgctccaacccacgccagatatccccaattcacaacccctttatgggatgccgatggacacataccctgagcaaccacaaatcggcagcaaatcagccgatctgcacatgcccggaccgtccgcacagaaacagctagtaggattagcctttaatggtctgcgatattatttaaaagaaagattagaaggcatccaattttttacactagcacagttacaccagagagctttggcttgcgaaagccggagcaaagaaactgctaaaacaatgcgtcacaacgtacacatagtagaatgcgaccaaagtagctcagatgacgaatcagcagaagtgtacgctgctgaaatggtttggccaaagcaggccaaatcttcggcttgtgcttccttacagccggttcaaaagaaacggcaagaggaggtaaagtttacatttaatgttggtaaatgtgataaaatatttgacgagttacttaaaaatggcaatattaaaataaatcacattgttccatccgccgacgagctaaaacgtcgtgcgtactgcaagtggcataactcattttctcatgccactaatgattgtaatgtatttcggcgacagattcaatcggccattaacgaaggacgattgaaatttcaggaaatgcaggtggatacagagccctttccgatgaacatgattgacttcgagggcaagaaagtcctggttcggctaaatacaaccgataaaggcaaaggcaaggaaacaatcatcggcaatgctaaaaaggccgatggggattgtaaagtttcttgcaggaaagtggtggccgagaagactcccgatggaggggagaccctgaaggtgaccatcacagcctctagcactggggggcaagcgcagacagggagacagttgcgggaacccgtgctgcgcatcacggacagtccgtcgtcccgacgcggacggtccgacacttcttag

SEQ ID NO: 159741 - DNA, 730 bp, Zea mays
  Clone ID: MRT4577_77256C.1
acccactcactccactccctcggccttcactcacacaccaactaagcccacggagcaagcacactagctagtttctgccatggcagctcgccgtgcccacgccgccgcgaccttggccctgctggtggcggcgcttgtgctgtctgcggcaccggcgccggcggagggtgcggttgcgaactgcggccaggtggtgagctacctggccccgtgcatcagttacgccatgggcagggtgagtgtgcctggcggtggctgctgcagcggcgtgcgtggccttaacgcggcggctgccacccccgccgaccgcaagaccacctgcacctgcctcaagcagcaggcgagcggcataggcggcatcaagcccaacctcgtcgctggcatccccggcaagtgcggcgtcaacatcccctacgccatcagccaaggaaccgattgctccaaggtgcgttaagcgtgagatcagaaccatttcagatgcatggtgagagcgaaataaatcgtggaagccggccgtccttgctgcatggctccaccgcgtttaatttactgctttactagttctactgtttccctaataaattagttttactgctgctgcttcgatcgtacgttgtggcgcagttgttgccacgagagctgtgatcttgtactcctgaggggacctcgtgtactttgtcggaactattgtaatgcatgcttacatctatatatagatgatgaacaagcc

SEQ ID NO: 159742 - DNA, 396 bp, Zea mays
  unsure (1)..(396): unsure at all n locations
  Clone ID: MRT4577_77257C.1
gttaaacattttatttgtttttttcatggaaaacccccaacccggggatgggaaacgttgaaataaaaccccctttgggttcgggaaataccactaaccccaggattgttcttgggccaccaaaaaaaaaaccggctttacttacgggtttggaaaaactgacttaaaatttacaaagatttatactgacctggcggggggcataaacccacagattccgcatatccctttggaagggtggatatcaaaaacattctattggggcccttttgggaaaaaaccttnaattggccttgaccaacaatgtgggggagacctccaaaaaaactctaccctggatccaagaagggcccgggggaggggggaaaatcctagatgggcaaccgcttttgaatt

SEQ ID NO: 159743 - DNA, 4971 bp, Zea mays
  Clone ID: MRT4577_77258C.1
atggccggttcaagggagagctctgatatttctccaagcaacatcatagagccgacttgggaaaccttgccggctgacgagcagctccagtttgaggagcacaaggagcggatgatccaggaggcgagagcgaaattcttggccaacttcaaagtggacaggaacaacaaggtcgtccgacatcgggcgacggatccggcttcgctccaacccacgccagatatccccaatgtaagtaataccaacgagctacaatctcttagaaattatgtagaagagcagcgtgaacaaatacagagcatcatagggggtatgcaaagcgatgttaagagactagtacgtgcattcgataagtctaacatcgcaaattttccttcacacgaggttgggttaggagataacgcgtgtaacacatcggctacaggttgtcacgaccagtcacaacccctttatgggatgccgatggacacataccctaagcaaccgcaaatcggcagcaaaccagccgatctgcacatgcccggaccgtccgcacgtgagcgcggaccgtccgggccagcaacagtcgggcctatttttaatgagttacctagatatgcgcccgagccaccacacacgacacagaacccaaactacccagtcggacggtccgcatacaacgacggacggtccgcatataaccacggacggtccgggtacgtatccggacagtccgcgcatgagtattttgaggaggattattacatgaatcctcgcccgtcccagcaacacttcccatcacactatgcgatgcaccagcccattaattcaggatccaaagcccaggaaagctttccggccccacctagaaggccggaaagaaatgatcaaacctatgacccatatagggcaaatgaaaatgcaccacgtaactcaaaccaatggggggaaagacaacatgctaatatccagccaaccccacctatgtttgaccagagagccggtggtcttgcaccggctgccattgatatagtaagggaagaaatagccggggcgttccgagataagctcggagtaagcatggtccctggggggcaatcatatcggaaaccttatgacagccgatttgatcaccacccatacccacagggaaccaggatacccgaattcgcaaaattttcgggtgatcaagggaaaaacacacgcgaacatataggccagttcttagcacaattgggagaattggccgacacagaggcatttcgcgtacgtttattttcattatcgctaacaggaaccgcgtttgcatggtatgccactttacctcctaattccatttcatcatggggggatctagaacaaaaatttcatgatcattttttctccggtgattatgaattggatttggtagatttagtgtcattgcgacagacaaaagacgaatcggttaatgattacatccggagattccgtgatacaagaaaccgatgctttcaaattcatttagcagaaaaacagctagtaggattagcctttaatggtctacgatattatttaaaagagagattagaaggcatccaattttttacactagcacagttacaccagagggctttggcttgcgaaagccgtagcaaagaaactgctaaaacaatgcgtcacaacgtacatatagtagaatgcgaccaaagtagctcagatgacgaatcagcagaagtatatgctgctgaaatggtttggccaaaacaggccaaatcttcggcttgttcctccttgcagccggttcaaaagaaacggcaagaggaggttaagtttacgtttaatgttggtaagtgtgataaaatatttgatgaattactaaaaaatggcaatattaaaataaatcacactgttccatccaccgacgagctaaaacgtcgtgcgtactgcaagtggcataactcattttctcatgccactaatgattgtaatgtattccgacgacagattcaatcggccattaatgaaggacgattgaaatttcaggaaatgcaggtggatacagagccctttccaatgaacatgatcgactttgagggcaagaaagtcctggttcggccaaacacggccgataaaagcaaaggcaaagaggcaatcatcgggaattctaaaaaggccgatgaggatcataaagtttcttgcagaaaagtggtagccgagaagactcccgatggaggggagaccctaaaggtgaccgtcacagcctccagtactggggggcaagcgcagacagggagacagatgcaggaacccgtgctgcgtatcccggacggtccgacacgtaggcgcggacggtccgggaccccaccggacggtccggagagctccggcggacgggccggccgtactcaggacttacgacagccacgtactttcaaaccacgacgaccagagataggtacgtggaaaacaaatacattcaaggcagctggtcggttggttaaagccggcccaacttttgatcaattactgtctaaatacgttaaaaagaaggccggccccagtgaccggccagcaaagcgaccccgctcacccatgcatgagcagcgccaggtcaggccgattggaccaccccaccaatcggaagaaatgaaaggtcatactatacaagtgagacctaacatacctgcatggacacctccacctccatatccacctatgccatatccgtacacatatttacctccgccatatgtcccaaatcaaatgtggggcatgccaccatatccatttgggatgccacagtaccccgcctggggggcaccccaaacatctgttttcaacaggttgacgccaccagtacaagaccgattgagcactgctcaatccggggggcatatgcctgcagcaactcaaaaaacaacaaaaggggacatcatcaaaatagacaccgcagatgttgtcatacagggagacaataaaggggcgatgattttcggcgaattggccaacgcaaccgaaaaggatacggctaccatcaaaacagccgatccaaaatactccatgcctcgatggtgcccagcgggattgacacgatcccaaaagagaaaattacagcgcctaagagcaaaagagagccaggagaaggaggcggaaaagacatttaatgacacacatccattatacccgccaccgcaaaagaaatggagaccgaaggccgttgagaaaaaacaaacggccacagaaatagaaagtcaatctgcaccaagcgcggaccgtccggcccctacgcgcggaccgtccgccgttcaccaggaagtctctggacaacctgcaccaggcgcggaccgtccggccaccgcacgcggaccgtccgccgttcaccaggaagcctccaacgacacgacaacatcaatggaagaggacgacctgctgggagaagacctgatcgactacgaggcttctccagaacaccaaggtatggatgtaaatattattacattttctgccgattgtactattatcggcgacgatgaacctgttgttgcccagtttgattttggtcctaaagaagccgcctttactaaaccaaaagaatcggtaaatcatttaaagccgctctttgtgcgcggccacattgatgggataccgattgctaaaatgttggtagatggaggggcggctgtaaatctaatgccttattcattatacagaaaattaggtaaacaagatgacgaacttgtcaagaccaacatgaccctcagcggtgttggaactgatagttcgatcaaagccaggggagtcacgtccgttgaattaaccatcgggactaagacccttgctgctgcattcttcgtcgctgatgtagaaggaaattacagtttaatcctaggcagagattggattcacgccaatcaatttcatgagtctttggtcacagacagttcggccgccaaggccggatggtctagtctttcacagaagagttcggactttaagaccgaacatctaccacagcgaaaagacagtattacggatgatccggtccccgagaccggaaagtccgccatcacacaaagatcgtctgattcctctgtgggggacatgatagaggaattcagagatcttggtaaactaggacaggggtttacatcggccgatcctttgaaggagattgacacaggagatggtaaaactccaaggccgacttttgtaaacaagaccctggagaccgattctagaaatgagatgatcggtctattgaaggaatattcagattgttttgcttggaattacactgaaatgcctggactaagccgagaaattgtcgaacatcggctgcctattaagcctgagtgggtctccaatattgtgccagtggagaagaaggagtcaggcttcattggtttatttgaatgggttgtcatgacattcggtcttaaaaatgctggtgctacttatcagagggctatgaatctgatcttccatgagttgttaggaaacactgtggaagtctacattgatgatattgtagtcaaatcggctgagtttagttctcatatagctgatttgcgcaaagcctttgataaaatgcgtcggtatggtttaaaaatgaacccacgtaaatgtgcttttggagtgtcggctgaaatagaccctgaccgaatcaagtctattcggaatgtggggcctccgacgtgtaaggtcgaagtgcagaggtttctcggcaagccgggaaaattgatgccttcacccctatccttcggcttaagaatgatgctgaattcacttgggggggcagagcagcaggaagcatttgatctcattaaaaaatacttgtcttcggctcccgtgttaaaagcaccacaagtaggagcaccattcagattatacattgcagctgaagacaaggttattggggctgttctgacgcaagaaactgaggggaaggagcatgtggtgacatatctaagccgaaggttggtggatgctgaaacaagagaaaacccctga

SEQ ID NO: 159744 - DNA, 1146 bp, Zea mays
  Clone ID: MRT4577_77259C.1
atggccggttcaagggataactctgatatttctccaagcaacatcatagagccgacttgggaaaccttgccggctgacgagcagctccagttcgaggagcacaaggagcggatgatccaggaggcgaaagcaaagttcttggccaacttcaaagtggacaggaacaacaaggtcgtccgacatcgggcgacggatccggcttcgctccaacccacgccagatatccccaatgtaagtaataccaacgatctgcaatctcttagaaattatgtagaagatcaacgtgagcaaatgcagaacatcatagggggttgtcacgaccagtcacaacccctttatgggatgccgatggacacataccctgagcaaccgcaaatcggcagtaaatcagccgatctgcacatgcccggaccgtccgcacgtgagcgcggaccgtccaggccagcaacagtcgggcctatttttaatgagttacctagatatgcgcccgagccaccacacacggcacagaacccaaactacccagtcggacggtccgcatacaacaacggacggtccgcatataaccacggacggtccgggccaaatcttcggcttgtccctccttgcagccggttcaaaagaaacggcaagaggaggttaagtttacgtttaatgtcgattcaatcggccattaacgaaggacgattgaaatttcaggaaatgcaggtggatacagagccctttccgatgaacatgattgacttcgagggcaagaaagtcctggttcggccaaatacagccgataaaggcaaagacaaggaaacaatcatcggcaatgctaaagaagactcccgatgggaggagaccctaaaggtgaccatcacagcctccagtactggggagcaagcgcagacagggagacagatgcaggaacccgtgctgcgtatcccggacggtccggcacgtaggcgcggacggtccgggaccccaccggacggtccggagagctccgacggacggtccggtcgtactcaggactcacaacgtccacgtactttcaaaccacgacgaccagagataggtacgtggaaaacaaatacattcaaggcagctggtgaaagggaaatgtgcccttgggccatttctaagtattttggtgattga

SEQ ID NO: 159745 - DNA, 118 bp, Zea mays
  Clone ID: MRT4577_7725C.1
cgcacgcgtccggcaggccgtggatgcgtccttcgccggcagcaccgccacgtcggagaccggtagcgccgcgtataggccgagatgcgacgaatactcgtccgatggcggcagcggc

SEQ ID NO: 159746 - DNA, 4809 bp, Zea mays
  Clone ID: MRT4577_77260C.1
atgccatatccatacacatatttacctccgccgtatgtcccaaatcaaatgtggggcatgccaccatatccatttgggatgccacagtaccccgcctggggggcaccccaagcatctgtttttgacaggttgacgctaccagtacaagaccgattgagcactgctcaatccggtcaccaggcacaaacccaacaggattgccggactactcggccttcaaggccgaccaatccggcaggggggcatatgcctgtagcaactcaaagaacaacaaaaaaggacatcatcaaaataggcaccgcagatgttgtcatacagggagacaataaaaggccgatgattttcggcgaatcggccaacacaaccgaaaaggatacggctactatcaaaacagccgatccaaaatactccatgcctcgatggtgcccagcgggattgacacgatcccaaaagagaaaattacagcgcctaagagcaaaggagagccaggagaaggaggcggaaaatacatttaatgacacacatccactatacccgccaccgcaaaagaaatggagaccgaaggccgttgagaaaaaacagacggtcatagaaatagaaagtcaacctgcaccaggcgcggaccgtccggcccccgcacacggaccgtccgccgttcaccaggaagcctctggacaacctgcaccaggcgcggaccgttcggcccccgcgtgcggaccgtccgccgttcaccaggaggcctccaacgacacgacaacatcaatggaagaggacgacttgctgggagaagacctggtcgactacgaggcttctccagaacgcccaggtatggatgtaaatattattacattttctgccgattgtactatcatcagcgacgatgaacctgttgttgcccagtttgattttggtcctaaagaagccgcctttactaaaccaaaggaatcggtaaatcatttaaagccgctcttcgtgcgcggtcacattgatgggatgccgattgctaagatgttggtagacggaggggcggctgtaaatctaatgccttattcattatacagaaaattaggtaaacaagatgacgaacttgtcaagaccaacatgaccctcagcggtgttggaactgatagttcgatcaaagccaggggagtcacatccgttgaattaaccatcgggactaagacccttgctgctgcattcttcgtcgctgatgtagaaggaaattacagtttaattctaggcaaagattggattcacgccaatcaatgtataccttctacattacatcaaatgctaatacaatgggtaggcgatgacatagaacaagatagtattatggatgattcggtccccgaggccggaaagtccgccatcatacaaagatcatctaattcctctgcgaggaacatgatagaggaattccgagatcttgataaactaggacaggggtttacatcggccgatcctttggaggagattgacataggagatgattgctttgcttggaattacactgagatgcctggattaagccgagagatcgtagagcatcggctgcctatcaagtctggtttcagacctttcaagcaaagagctagaacatttcgtccagatcttctcccacgcatcaaggacgaaatccaccggctactagaagctgattttatcagaccttgcagatacgcagagtgggtctccaatattgtgccggtggagaagaaggagtcaggcttcattggtttatttgagtgggttgtcatgacatttggtctgaaaaatgctggtgccacttatcagagggctatgaatttgatcttccatgaattgttaggaaacactgtggaagtttacattgatgatattgtagtcaaatcggttgagtttagttctcatatagctgatttgcgcaaagcctttgataaaatgcgtcagtatggtttgaaaatgaacccacgtaaatgtgcttttggagtgtcggctgagatagaccctgaccgaatcaagtctattcggaatgtggggcctccgacctctaaggtcgaggtacagaggttcctcggcaagcaagaagcatttgatctcatcaaaaaatacttatcttcggctcccgtattaaaagcaccacgagcaggagtgccatttcgattatacattgcagctgaggataaggtcattggggctgttctgacacaaaaaactgaggggaacgagcatgtggtgacatatctaagccgaaggttggtggatgctgaaacaagatgttatttactgtctagtcattgcactgtttctagtcaagacgatgtgatcaaatacatgttgcataacccaattatgagtggtagaattggtaagtgggcttatgcactaatagaatatgacttggcctatgaaccactgaaatctatgaaaggccaagtcgtagcggatttcattgtagaacatcagattaatgatattcatgagctatacatgtcattcctcactattactccttggactttatattttgatggatcggtttgcaatgaagggcaaggaattggcattgtacttgtttcaccaagtaatgtctcctttgacttctctagccgattgaaaacttattgcactaataatcaagctgaatatgaggccctcctattcggtttagaacttttaaatggtatgggagtaaaacatgtgaaggtatttggtgattctcagctggttatccaacaagtgttagaagaatatcaatgttttgatggtactctaaatagttaccttgagaaatgttggagcataatccattcttttgacgaattcagtattcggcatatttctagagttgagaatcatagagctaacaatttggcacaagatgcatcaggttatcggataaagagagggaaatttcacaaaactgaaaatctgataaccagtgcagaaccaaattcccaggtcgcggaccgtccgcgtgatgacgccggaccgtccggggttaccagaaaagttctcttaatcgattcagctgacaatgaagccgatgcaagtgattggaggacacctatacttaattatttacgaaatcccaatatcaggacagataagaacattcggcgaacagctttcaatatgatagctgattgtttcaagtactacaagggttgccaagtgtgtcaaaaattcggcgacctacagttggtccctgcagccgaattacatcctatcatcaagccttggccgttcagaggatggggattagactttattggagaaattcatccttcatcttcaaaggggcatcggtttgtgttagttgccactgactacttcaccaaatggactgaagccgttgctctaaagaacatgacacacaaggaggtaattgagtttataactgagcatatcattcatagattcggcattccccagaccttaacaacagatcaaggtacctcttttatgtcaaaggaggtacgtgaatttgctgaattatacagaattaagctgcttaattcatctccatattatgctcaggccaatggtcaggccgagtctagcaataggacattgattaatttgataaaaaagaaaatatctgataatcctaaacattggcataagattttgtctgaggctttatgggctcatagaatatctaaacatagggctactaaagtatctccttttgagcttgtctatgggcaggaagcagtgttgcctgtggaaataagtttgaatgctatcaggtttgccagacaaaatgatctaactgctaccaattattatgattcaatgatggataatattgatgaggtgactgacaaaaggatgatagctttgggagcaatagaaaaggacaaaatcatggtagtcagggcctacaacaagaaggtcaaagcaaaatcatttcaagtaggggacctggtgtggaagaccattttgcctctaaggaataaagaccggaagttcgggaaatggtcaccaagctgggaaggcccttataaagtaaaacaggtgatgtctggcaacgcctatttgctacaaacattacaaggcaaggacttgcctaaggctttgaatgggcgtttcctcaaacagtaccatcctactccaccaaaaggcaggggggcatatgttgagcaccatattgagcgggcggacggtccggccctgaggccggacggtccgcggtccggacagtccgcgcttgtgggccggacgaaaaactataatagcgcaaagcttagttgtgtcttccaccaaaaatggaagaatccaggtgaaaggccaaaccgccaaagagagagggtggcacatcttggagagcgatggatggtgctgggctcggaccgtgagcaagttagacgaatgggagcaggcacgtggaacaggagggcgcgtatccgaccaaggaagctggaccatgagcgacactgttgcaggcttgcagcaaccttgctcttcgaaggggtcggtcgtttgctttttcccttgaccggtcatccagaagccccaccagaaaggccgacggcagcgcgcacgtttgcgtcgatcagggtggccgctcccgctggaggggccatgtcggattctggccaggggagccgacgacgtggaacagaggaggcgacgatggatccacacgagaaggccgcgccagatccaaccaggaagacggtgaacccgaccgtgaaggtcgcgatagcgttgaatccggttgtgacggcgatgaagagaatgggagggcggctgggcggttcatccaagcagggggctacgccggatctagccaggcgaaggagcgacgtcgacgacaggtga

SEQ ID NO: 159747 - DNA, 7170 bp, Zea mays
  Clone ID: MRT4577_77261C.1
atggctggttcaagggataactctgatatttccccaagcaacatcatagagccgacttgggacacattgccggctgacgagcagctccagttcgaggagcacaaggagcggatgatccaggaggcaaaagcaaagttcttggccaacttcaaagtggataggaacaacaaggtcgtccgacatcgggcgacggatccggcttcgctccaacccacgccagatatccccaatgtaagtaataccaacgatgtgcaatctcttagaaattatgtagaagatcagcgtgaacaaatgcagaacatcatagggggtatgcaaagcgatcttaagagactagtgcgtgcatttgataaatctagtatcgccaattttccttcgcacgaggttgagttaggaggtaacacgcgtaacacatcggctacaggttgtcacgaccagtcacaacccctttatgggatgccgatggacacgtaccctgagcaaccgcaaatcggcagcaaatcagccgatctgcacatgcccggactgtccgcacgtgagcgcggaccgtccggaccaacaacagtcgggcctatttttaatgagttacctagatatgcacccgagccaccacatatgacacagaacccaaactacccagtcggacggtccgcatacaatgacggacggtccgcatataaccacggacggtccgggtacgtatccggacagtccacacatgagccttttgaggaggattattacatgaatcctcgcccgtcccagcaacacttcccatcacactatgcaatgcaccagcccattaattcaggatccagagcccaggaaagctttccggccccacctagaaggccgaaaagaaacgatcaaacatatgagccatatagagcaaatggaaatgcaccacgtaactcaaaccaatggggggaaagacaacatgctaatatccagccaaccccacctatgtttgaccagagagccggaggtctcgcaccggctgccattgatatagttgagagcacctaggccggggcgttccgagataagctcggagtaagcatggtccctggggggcaatcatatcggaaaccttatgacagccgatttgatcaccacccatacccacagggaaccaggatacccgaattcgcaaaattttcgggtgatcaagggaaaaacacacgcgaacatataggccagttcttagcacaattgggagaattggccgacacagaggcattccgcgtacgtttattttcattgtcactaacaggaaccgcgtttgcatggtatgccactttacctcctaattccatttcatcatggggggatctagaacaaaaatttcatgatcattttttctccggtgactatgagttggatttggtggatttagtgtcgttgcgacagacaaaagatgaatcggttaatgattacatccggagattccgagatacaagaaaccgatgctttcaaattcatttagcagagaaacagctagtaggattagcctttaatggtctgcgatattatttaaaagaaagattagaaggcatccaattctttacactagcacaattacaccagagagctttggcttgtgaaagccgaagcaaagaaactactaaaacaattcgtcacaacgtacatgtagtagaatgcgatcaaagtagctcagaagacgaatcagcagaggtgtatgctgctgaaatggtttggccaaagcaggccaaatcttcggcttgtgcctccttacaaccggttcaaaagaaacggcaagaggaggttaagtttacatttaatgttgctaagtgtgatagaatatttgatgaattacttaaaaatggcaacattaaaataaatcacactgttccatccgccgacgagctaaaacgtcgtgcatattgcaagtggcataactcattttctcatgccactaatgattgtaatgaaatgcaggtggatacagagccctttccgatgaacatgattgacttcgagggcaagaaagtcctagttcggccaaacacagccgataaaggcaaagagacaatcatcagcaatgctaaagaggccgatggggatcgtgaagtttcttgcaggaaagtggtggccgagaagactcccgatggaggggagaccctaaaggtgaccatcacagcctctagtaccggggggcaagcgcagacagggagacagatgcaggagcccgtgctgcgtatcccggacggtccggcacgtaggcgcggacggtccgggaccccaccagacggtccggagagctccggcggacggtccggccgtactcaggattcacaacgtccacgtactttcaaaccacgacgaccagagataggtacgtggaaaacaaatacatttaaagcagctggtcgactggttaaagccggcccaacttttgatcaattattgtctaaatacgtaaaaaagaaggccggccccagtgaccggccagcaaagcgaccccgctcacccattcttgagcagcgccagggtaggccgattggaccaccccaccaatcggaagaaatgaaaggtcatactatacaagtaagacctaacatacctgcatggacacctccacctccatatccacctatgccatatccgtacacatatttacctccgccatatgtcccaaatcaaatgtggggcatgccaccatatccatttgggatgccacagtaccccgcctggggggcaccccaaacatctgttttcaacaggttgacgccaccagtacaagaccgattgagcactgctcaatccggtcaccaggcacaaacccaacaggattgccggactactcgaccttcaaggccgaccaatccggcaggggggcatatgcctgtagcaactcaaaaaacaacaaaaggggacatcatcaaaataggcaccgcagatgttgtcatacagggagacaataaagggccgatgattttcggcgaatcggccaacgcaaccgaaaaggatacggctaccatcgaaacagccgatccaaaatactccatgcctcgatggtgcccagcgggattgacacgatcccaaaagagaaaattacagcgcctaagagcaaaggagagccaggagaaggaggcggaaaagacatttaatgacacacatccattgtacccgccaccgcaaaagaaatggagaccgaaggccgttgagaaaaaacaaacggccacggaaatagaaagtcaacctgcaccaagcgcggaccgtccggcctctgcgcgcggaccgtccgtccctcaccaggaagcgtctggacaacctgcaccatgcgcggaccgtccggcctccgcgcgcggaccgtccgccgttcaccaggaggcctccgacgacacgacaacatcaatggaggaggatgacctgctgggagaagacctggtcgactacgaggcttctccagaacgcccaggtatggatgtaaatatcattacattttctgccgattgtactattatcggcgacgatgaacctgttgttgcccagtttgattttggtcctaaagaagccgcctttactaaaccaaaggaatcggtaaaccatttaaagccgctcttcgtgcgcggccacattgatgggataccgattgctaggatgttggtagatggaggggcggctgtaaatctaatgccttattcattgtacagaaagttaggtaaacaagatgacgaacttgtcaagaccaacatgaccctcagcggtgttggaactgatagttcgatcaaagccaggggagtcacgtccgttgaattaaccatcgggactaagacccttgctgctgcattcttcgtcgctgatgtagaaggaaattacagtttaattctaggcagagattggattcacgccaatcaatgtataccttctacattacatcaaatgctgatacaatgggaattcagagatcttgataaactaggacaggggtttacatcggccgatcctttggaggagattgacataggagatggtaaaactccacgaccgacttttgtaaacaagaccctggagaccgattctagaaatgagatgatcggtctattgaaggaatattcagattgttttgcttggaattatactgagatgcctggattaagccgagagatagtagagcatcggctgcctattaaacctggtttcagacctttcaagcaaagagccagaacatttcgtccggatcttctcccacgcatcaaggacgaaatccaccggctactagaagctgattttatcagaccttgcagatacgcagagtgggtctccaatattgtgccggtggaaaagaaggagacaggtaaacttagagtatgcattgattttcgcaatttaaatagagcgactcctaaagacgaatatcccatgcccatagccgacacattaatcaataatgcatcgggaaatagaattattagcttccttgatggtaatgctggatataatcagattttcatggccgaagaagatgcgtctaaaacggcctttatatgtccaggcttcattggtttattcgagtgggttgtcatgacatttggtctgaaaaatgctggtgctacttatcagagggctatgaatttgatcttccatgaattgttaggaaacaccgtggaagtttacattgatgacattgtagtcaaatcggctgagtttagttctcatatagctgatttgcgcaaagcctttgataaaatgcgtcggtatggtttaaaaatgaacccacgtaaatgtgcttttggagtgtcggctggtaagtttttaggatttgtcatccatgaacatggtatagaaatagaccctgaccgaatcaagtctattcggaatgtggggcctccgacgtgtaaggtcgaagtgcagaggtttctcggcaaggtgaattatttacgaaggtttatttctaacttagccgggaagattgatgccttcacccctatccttcggcttaagaatgatgctgaattcacttggggggcagagcagcaggaagcatttgatctcattaaaaaatacttgtcttcggctcccgtgttaaaagcaccacaagtaggagcaccattcagattatacattgcagctgaagacaaggttattggggctgttctgacacaagaaactgaggggaaggagcatgtggtgacatatctaagccgaaggttggtggatgctgaaacaagatgttatttactgtctagtcattgcactgtttctggtcaaaccgatgtaatcaagtacatgttgcataacccaattatgagtggtagaattggtaagtgggcttatgcactcatagaatatgacttggcctatgaaccattgaaatctatgaaaggccaagtcgtagcggattttattgtagaacatcgggttaatgatattcatgaactagacatatcatacctcactattactccttggactttatattttgatggatcggtttgcaatgaagggcaaggaattggcattgtgcttgtttcaccaagtaatgtctcctttgacttctctagccgattgaaaacgtattgcactaataatcaagctgaatatgaggccctcctattcggtttagaacttttaaatggtatgggagtaaaacatgtgaagatatttggtgattctcagctggttgtccaacaagtgttagaagaatatcaatgtcttgatggtactctaaatagttatcttgagaaatgttggagcataatccattcttttgacgaattcagtattcgacatatctctagagctgagaatcatagagctaacgacttggcacaagatgcatcgggttatcggataaagagagggaaatttcacaaaactgaaaatctgataaccagtgcagagccaaattcccaggtcgcggaccgtccgcgtgatgacgccggaccgtccgaggttaccagaaaggttctcttaatcgattcggctgacaatgaagccgatgcaagtgattggaggacacctatacttaattatttgcaaaatcccaatatcaggacagataagaacattcggcgaacagctttcaagtatgttttgatgagtgatgaactttaccgccgaacggttaatgatgtcctgcttaagtgcttgggcccagatgatgctatattagctatggccgaagtacatgaaggaatttgtggtacccatcaatcagctccaaagatgaagtggttgttgcgaaggtctggtttttattggcctagtatgacagctgattgtttcaagtactacaaggggtgccaagtgtgtcaaaaattcggcgacctacagttggtccctgcagccgaattacatcctatcatcaagccttggccattcagaggatggggattagactttattggagaaattcatccttcatcatcaaaagggcatcggtttgtgttagttgccactgactatttcaccaaatggactgaagccgttgctctaaagaacatgacgcacaaggaggtaattgagttcataactgagcatattattcatagattcggcattccccagaccttgactacagatcaaggtacttcttttatgtcaaaggaggccaatggacaggccgagtctagtaataggacattgattaatttgataaagaagaaggtatctgataatcctaaacattggcataagattttgtctgaagctttatgggctcatagaatatctaaacatagtgctactaaagtatctccttttgagcttgtctatgggcaggaagcagtgttacctgtggaaataagtttgaatgctgtcaggtttgccagacaaaatgatctaactgctactgattattataattcaatgatggataatattgatgaggtgaccgacaagaggatgatagctttgggagcaatagaaaaggacaagatcatggtagccagggcctacaacaagaaggtcaaagcaaaatcattccaagtaggagacttggtgtggaagaccattctacctctaaggaataaagatcgaaagttcgggaaatggtcgccaagctgggagggtccttataaagtgaaacaggtgatgtctggtaatgcttatttactacaaacattacaaggcaaggatttacctaaggctttgaatgggcgtttcctcaaacagtaccatcctagtatgtggcaagatgcctaa

SEQ ID NO: 159748 - DNA, 450 bp, Zea mays
  Clone ID: MRT4577_77262C.1
tcaagtcattacttcgagtcttattgatccttaattatcttcttgatctcaaacgtttccgaggatatcgaaatgctggatggctactcaagtccatctgaaatgaaggtcactaatgcacttgctgaaacagatatcaaatatgaatactaagacaaggacttaacgtactatagacctctatttctccaaatgaacccggttcacaataaaactcctattctcattcacactggcgaacccatttgttaatccctcatcactgttcatttcattcacgaagttaggaatgacagaaatccattgttgccttatgacccttaccacatagctcaggcctgattctagactgattatgcagatccgaagatatactatcttggaatgaagatctggtcattaataggaaaagaacatgaagctgccattaaagagtacatagaatccctt

SEQ ID NO: 159749 - DNA, 242 bp, Zea mays
  Clone ID: MRT4577_77263C.1
attcggctcgagctgatcctgctgtttctggcacccactctcgggaggacgagctaccatctttaagtcacatgcgcggccttccagacgcatgcatgcacagagacaagcatagagagctccgacctctgagtggatctataggtggctgctgctctactccaagtggccaccggacacacacgcctggtgtgatagggccacaatccgtggtaatgcataacgggagccagagtgccaat

SEQ ID NO: 159750 - DNA, 415 bp, Zea mays
  Clone ID: MRT4577_77264C.1
gccgcccacccccactaccccggcagctaccggcgccgccgccaccgccgcggtgacgccggagcatgcacggccacgtagaatggtccgcttcaacccgcggagcgaccgcttccacacgctcgccttccaccacgtcgagttctggtgcgcggacgccgcctccgccgccggccgcttcgccttcgcgctcggcgcgccgctcgccgccaggtccgacctctccacggggaactccgtgcacgcctcccagctgctccgctcgggcaacctcgccttcctcttcaccgcgccctacgcgaacggctgcgacgccgccaccgcctccctgccctccttctccgccgacgccgcgcgccggttctccgcggaccacgggctcgcagtgcgctccatagcactgcgcgtcgcagac

SEQ ID NO: 159751 - DNA, 268 bp, Zea mays
  Clone ID: MRT4577_77265C.1
ccgtgctggtgaagtatgtggcggacgacggcgacatcgtgctgatggaaatccaggggaagttgtcggctgagtggaagcccatgaagctcttttggggcgccatctggaggatggacactgccaaggcgctcaagggccccttttccattcgtctcaccagcgagttcggcaagaaggttatttgcctaagacgtcatctctgttaactggatactttatgcctattacactttcaaacgatcaattttacttgactttttaatct

SEQ ID NO: 159752 - DNA, 451 bp, Zea mays
  Clone ID: MRT4577_77266C.1
ggattccctaaaaaagatagaaatctggaagctgccacctgtgcttttagtgcatctgaaacgtgtttcctatgatggcaggtggaaacaaaaattacagacatctgtggactttccattagaaaatcttgacttgtcgcagtatgttattggcccaaagaacaatctgaagaaatacaacttgttttctgtttcaaatcactacggtgggctggacggtggccactacactgcctattgtaaaaatgcagcaagacagcggtggtttaaatttgacgatcatgaggtttctgatatttccatttcttcggtgaaatcttcagcagcttatatcctcttttatacgtcactgggaccacgaataactgatgtagccacgtaaggagaagttggttttaagctagttatcttttaacaggctgagcaacacaactcttgaatggcttgtaaa

SEQ ID NO: 159753 - DNA, 471 bp, Zea mays
  Clone ID: MRT4577_77267C.1
ctacttcagaagcagactgacgaataacaaagttggctgctacagtcaatcagaccgttggcagctctttttaaaaaaacctcctctgaataagatgacacaaatatcgtttggtacccacgtttgtggcgaaaaaactacggccacaaaaacgtctagttgctaccctccctcagagatgcgccgacaaaaagcccatttgtatacatatcattcttttctccctccaaagatacaacactgatcgatattgcatataccgtcctccagactgctctgatcctatcacattcatctgatcttcatgctgttgaacgtactccctatggtgcccgctggcattaggatcccgatgatggttacaggttacaggccgtgtggagacttgctatacaaatcagaggaccatttccagttatcacttgctaccaactagccgttgtgtgatgaggcacactctcatccagcatt

SEQ ID NO: 159754 - DNA, 281 bp, Zea mays
  Clone ID: MRT4577_77268C.1
acgcctcgtagagcagggagcggaagaccgcggggcggacgccgtcgtcgggcgcggcggcgagcaggttgagcaggcccgcccggccgtagaactttgcgaggaagacggtggcgttggcctgcgcctcgggggcctcgatccactgcaggcaggggcggatggtgcaggcgtcgccgcagcccttgcgcaggacgcggcagccattgcagctcatccgcatcttcgctcctcccggtggtgggcgcacagatcgcgagcttttgctacccggccgcgcg

SEQ ID NO: 159755 - DNA, 836 bp, Zea mays
  unsure (1)..(836): unsure at all n locations
  Clone ID: MRT4577_77269C.1
aaatctcccctcccctccccctgttcgtcgttcttctcggttcgatccactccagcagccccaaatcccggcccgattcctccccaaatccaatcgactccctgccgaaatccaccctcccactgatcgccgcaagctcccggacacggagcaagcaatttcgcgccgcaagaactgctcgccgtccgtggacaaaagccctcgcccgactctcccaacctcttttctgttcgtcctgaccatcgtcttacgcgcctcgccgccatcgccgtcgcagttcttcctcgtctcgtctcgacatccgcgttcctgctatctgcaccccgtccgcagcctttgggtttcgagatccgcccttgatggcgggggaggaggccgcggagggaagcgggaacaggaggcggatggatctaaacctgtacctgggcctccctccattgccgcggcctccaggtcggctgggcgtagctatggatcgcccgccgccgcccaactcggccattccggttccggaatctccaagaacagatgagcctgcagtattaccggcaccagaggagatgccgccactgcccgttgtatactcgccgtccaatgcgctctccacgccggagctatcgctgatagatccgatgctctttgattggcttgatggcctcagtacggacagtgaagaggctcttgatgctggtgaaccggctgtggtgcgcgacacgccctcacatgatgccaatgtatcaccaccgccgccagcgccattgtctcttcctgggctggaagggttcgccttgagtgngtggaaaggctttctcaccctattctggtggctcctgcag

SEQ ID NO: 159756 - DNA, 415 bp, Zea mays
  Clone ID: MRT4577_7726C.1
gttcgcacgcgactaacagccagcccccgacacgtgaacaagcacaagggcgtcgcctcgcctcgcgcgcgctggcgccgcgcacagacacgcaagcgtggatcgcgccgccgctcatcggggcatcgtccgtcgcgacagggatccgtcgccgccgccgccggccgagccacaggcggcgggagacgtcggaggcggcggtgtctcttggggcggcccccggttgcgcgccgaggacgagcacgccgtcatcgtcgcggccctggctcacgtcgtcggcgccgggacgcggagctcgccaccggccgggctcggccagcaaggccgacacgctcccctcttctgcgtggattcagtgacgctgacgcaccgcaggggcagggccgtccacgcgccggcgacggagacacagcgg

SEQ ID NO: 159757 - DNA, 382 bp, Zea mays
  Clone ID: MRT4577_77270C.1
gtaatcctctgctcttaatcttctagtactatttgggatcaatttgttgcaagctagcaaacatttactgtctactatgatatagtaataaattatacgccattactgtgttgcagtgctgcttttttgggacatatttactgtacttgctattaaatttattgagagtgcatgcccaatagtagtttgtttttacaccgtacacaatttattcttgttttatacgaacggcaaatttggtgctgtcttaatcctgagtcttttgtgtcttgaaaaacattaagttatacctacggaagctcttattggctaataaattatgttcagttatcatgcaagccttttcttaagttttagcttggacaacatcaaggattgaagg

SEQ ID NO: 159758 - DNA, 204 bp, Zea mays
  Clone ID: MRT4577_77271C.1
atggtgaccaaccacctccgggtactgtcctgtgcggttattatgtatgtgaatggtgtcgtgtcacctttcccttacatggtcaatcgtgaggatgttcctaaatctaagatcaatgctgaatggttagaaagagatatggtttccaccggcgtggctaaggttgcggtgcaccacaagcggttcctggaaccgcctgtgtag

SEQ ID NO: 159759 - DNA, 348 bp, Zea mays
  Clone ID: MRT4577_77272C.1
ccgtttggtcaggcggcggcgatggcgtcccgggacgacgggtggggaggcggcgaagaggcagctcgctcttcgagggcatggtcctcttcgcgccagagcccaccgccgccgaggactcggtccctgcccctgcccctgcccccgcccccgccgaggactcggtccctgtccgcggcggtggccctgagctgccatccgccgcccgccacgacgccgacgcgggctcgtccgtgccaccaccgctggacaaggatcttttctactatctacccttttcgacccaacaaaaagaaccgagtctcgcggtatagacaatccacgctcatgttcccgtgcgggcagaga

SEQ ID NO: 159760 - DNA, 213 bp, Zea mays
  Clone ID: MRT4577_77273C.1
acctgtttcaatactgccacccataattagaagttaactacctcctcatgttcttgtgggatcggaaccttaatatcagaatcatgctttcctaactagcactgcaactaccgaggcctttttattatcaaagaccatcactgcctccacacataaccacaggataacaaacagcaccattcactttaacaactcaaaatgcaccacttattt

SEQ ID NO: 159761 - DNA, 4017 bp, Zea mays
  Clone ID: MRT4577_77274C.1
atggcagatagcacggccagcaaggctggacaatctgcaccaggcgcggaccgtccggcctctacgcgcggaccgtccgtccttcaccaggaagcgtctggacaatctacaccaggcgcagaccgtccggcctctgcgcgcggaccgtctgtccttcaccaggaagcatctagacaatctacaccaggcgcggaccgtccggcctctgcgagcggaccgtccgaccttcaccaggaagcgtctggacaacctgcaccaggcgcggaccgtccggcccccgcgcgcggaccgtccgccgttcaccatgaagcctccaacgacacgacaacatcaatggaggaggacgacctgctgggagaagacctggtcgactacgaggcttctccagaacgcctaggtatggatgtaaatattattacattttccgccgattgtactattatcggcgacgatgaacctgttgttgcccagtttgattttggtcctaaagaagtcgcctttactaaaccaaaagaatcggtaaatcatttaaagccgctcttcgtgcgcggccacattgatgggataccgattgctaagatgttggtagatggaggggcggctgtaaatctaatgccttattcattgtacagaaaattaggtaaacaagatgacgaacttgtcaagaccaacatgaccctcagcggtgttggaacagatagttcgatcaaagccaggggagtcacgtccgttgaattaaccatcgggactgagacccttgctgctgcattcttcgtcgctgatgtagaaggaaattacagtttaatcctaggcagagattggattcacgccaatcaatttcctgagtctctggtcacggacagtttggcttccaaggccggatggtctggtctttcacaaaaaggttcggactttaagactgaacagatatcacagcaaaagggcaatattacggatgatccgatccccgagaccggaaagtccgccgtcacacaaagatcttctaattcctctgtggggaacatgatagaggaattcagagatcttgataaactaggacaggggtttacatcggccgatcctttggaggagattgacataggagatggtaaaactccaaggccgacttttgtaaacaagaccctggagaccgatcctagagatgagatgatcggtctattgaaggaatattcagattgctttgcttggaattacactgagatgcctggattaagccgagagatcgtagagcatcggctgcctattaaatctggtttcagacctttcaagcaaagagctagaacatttcgtccagatcttctcccacgcatcaaggacgaaatccaccggctgctagaagctgattttatcagaccttgcagatacgcagagtgggtctccaatattgtgccggtggagaaggagtcacgtaaacttagagtatgcattgattttcgcaatttaaatagggcaactcctaaagacgaatatcccatgcccatagccgacacattaatcaataatgcatcaggaaatagaattattagcttccttgatggtaatgccagatataatcagattttcatggccgaagaagatgcgtctaaaacggcctttatatgtccagacttcattggtttatttgagtgggttgtcatgacatttggtctgaaaaatgctggtgctacttatcagagggctatgaatttgatcttccatgaattgttaggaaacactgtggaagtttacattgatgatattgtagtcaaattggctgagtttagttctcatatagctgatttgcgcaaagcctttgataaaatgcgtcagtatggtttgaaaatgaacccacgtaaatgtgcttttggagtgtcggctgctgaggagaaggtcattggggctgttctgacacaagaaactgaggggaaggagcatgtggtgacatatctgagccgaaggttggtggatgctgaaacaagatgttatttactgtctagtcattgcactgtttctggtcaagccgatgtgatcaaatacatgttgcataacccaattatgagtggtagaattggtaagtgggcttatgcactcatagaatatgacttggcctatgaaccattgaaatctatgaaatgccaagtcatagcgaatttcattgtagaacatcgggttaatgatattcatgaactagacatgtcatacctcactattactccttggactttatattttgatggatcggtttgcaatgaagggcaaggaattggcattgtgcttgtttcaccaagtaatgtctcctttgacttctctagccgattgaaaacttgttgcactaacaatcaagccgaatatgaaacacttttgttcggtttagaacttttaaatggtatgggagtaaaacatgtaaaagcatttggtgattctcagctagtcgtccaacaggtgttagaagaacatcaatgttttgatggtactctaaatagttaccttgagaaatgttggagcataatccattcttttgacgaattcagtattcggcatatctctagagttgagaatcatagagctaacgatttggcacaagatgcatcaggttatcggataaagagagggaaatttcacaaaactgaaaatctgataaccagtgtagagccaaattcccaggtcgcggaccgtccgcgtgatgacgctggaccgtccggggttaccagaaatgttctcttaatcgattcggctgacaatgaagccgatacaagtgattggaggacacctatacttaattatttactgaatcccaatatcaggacagataagaacattcggcgaacagctttcaagtatgttttgatgagtgatgaactttaccgccgaacagtcaatgacgtcctgcttaagtgcttgggcccagatgatgctatattagccatggccgaagtacatgaaggaatttgtggtactcatcaatcagctccaaagatgaagtggttgttgcgaaggtctgaattttattggcctagtatgatagctgattgtttcaagtactacaagggttgccaagtgtgtcaaaaattcggcgacctacagttggtccctgcagccgaattacatcctatcatcaagccttggccgttcagaggatggggattagactttattggagaaattcatccttcatcatcaaaggggcatcggtttgtgttagttgccactaactatttcaccaaatggactgaagccgttgctctaaagaacatgacgcacaaggaggtaattgagttcataactgagcatattattcatagattcggcattccccagaccttgactacagatcaaggtacttcttttatgtcaaaggaggtaagtgaatttgctgaattatacagaattaagctgcttaattcatctccatattatgctcaggccaatggacaggccgagtctagtaataggacattgattaatttgataaaaaagaagatatctgataatcctaaacattggcataagattttgtctgaagctttatgggctcatagaatatctaaacatagggctactaaagtatctccttttgagcttgtctatgggcaggaagcagtgttgcctgtggaaataagtttgaatgatgtcaggttcgccagacaaaatgatctaactgctactgattattataattcaatgatggataatattgatgaggtgaccgacaagagaatgatagctttgggggcaatagaaaaggacaagatcatggtagccagtgcctacaacaagaaggtcaaagcaaaatcatttcaagtaggggacctggtgtggaagaccattctacctctaaggaataaagaccggaagttcgggaaatggtcgccaagctgggagggtccttataaagtaaaacaggtgatgtctggcaacacctatttgctacaaacattacaaggcaaggatttgcctaaggctttgaatgggcgtttcctcaaacagtaccatcctagtatgtggcaagatgcctaa

SEQ ID NO: 159762 - DNA, 3792 bp, Zea mays
  Clone ID: MRT4577_77275C.1
atggcagatagcacggccagcaaggctggacaatctgcaccaggcgcggaccgtccggcctctacgcgcggaccgtccgtccttcaccaggaagcgtctggacaatctacaccaggcgcagaccgtccggcctctgcgcgcggaccgtctgtccttcaccaggaagcatctagacaatctacaccaggcgcggaccgtccggcctctgcgagcggaccgtccgaccttcaccaggaagcgtctggacaacctgcaccaggcgcggaccgtccggcccccgcgcgcggaccgtccgccgttcaccatgaagcctccaacgacacgacaacatcaatggaggaggacgacctgctgggagaagacctggtcgactacgaggcttctccagaacgcctaggtatggatgtaaatattattacattttccgccgattgtactattatcggcgacgatgaacctgttgttgcccagtttgattttggtcctaaagaagtcgcctttactaaaccaaaagaatcggtaaatcatttaaagccgctcttcgtgcgcggccacattgatgggataccgattgctaagatgttggtagatggaggggcggctgtaaatctaatgccttattcattgtacagaaaattaggtaaacaagatgacgaacttgtcaagaccaacatgaccctcagcggtgttggaactgatagttcgatcaaagccaggggagtcacgtccgttgaattaaccatcgggactgagacccttgctgctgcattcttcgtcgctgatgtagaaggaaattacagtttaatcctaggcagagattggattcacgccaatcaatggtttacatcggccgatcctttggaggagattgacataggagatggtaaaactccaaggccgacttttgtaaacaagaccctggagaccgatcctagagatgagatgatcggtctattgaaggaatattcagattgctttgcttggaattacactgagatgcctggattaagccgagagatcgtagagcatcggctgcctattaaatctggtttcagacctttcaagcaaagagctagaacatttcgtccagatcttctcccacgcatcaaggacgaaatccaccggctgctagaagctgattttatcagaccttgcagatacgcagagtgggtctccaatattgtgccggtggagaaggagtcacgtaaacttagagtatgcattgattttcgcaatttaaatagggcaactcctaaagacgaatatcccatgcccatagccgacacattaatcaataatgcatcaggaaatagaattattagcttccttgatggtaatgccagatataatcagattttcatggccgaagaagatgcgtctaaaacggcctttatatgtccagacttcattggtttatttgagtgggttgtcatgacatttggtctgaaaaatgctggtgctacttatcagagggctatgaatttgatcttccatgaattgttaggaaacactgtggaagtttacattgatgatattgtagtcaaattggctgagtttagttctcatatagctgatttgcgcaaagcctttgataaaatgcgtcagtatggtttgaaaatgaacccacgtaaatgtgcttttggagtgtcggctgctgaggagaaggtcattggggctgttctgacacaagaaactgaggggaaggagcatgtggtgacatatctgagccgaaggttggtggatgctgaaacaagatgttatttactgtctagtcattgcactgtttctggtcaagccgatgtgatcaaatacatgttgcataacccaattatgagtggtagaattggtaagtgggcttatgcactcatagaatatgacttggcctatgaaccattgaaatctatgaaatgccaagtcatagcgaatttcattgtagaacatcgggttaatgatattcatgaactagacatgtcatacctcactattactccttggactttatattttgatggatcggtttgcaatgaagggcaaggaattggcattgtgcttgtttcaccaagtaatgtctcctttgacttctctagccgattgaaaacttgttgcactaacaatcaagccgaatatgaaacacttttgttcggtttagaacttttaaatggtatgggagtaaaacatgtaaaagcatttggtgattctcagctagtcgtccaacaggtgttagaagaacatcaatgttttgatggtactctaaatagttaccttgagaaatgttggagcataatccattcttttgacgaattcagtattcggcatatctctagagttgagaatcatagagctaacgatttggcacaagatgcatcaggttatcggataaagagagggaaatttcacaaaactgaaaatctgataaccagtgtagagccaaattcccaggtcgcggaccgtccgcgtgatgacgctggaccgtccggggttaccagaaatgttctcttaatcgattcggctgacaatgaagccgatacaagtgattggaggacacctatacttaattatttactgaatcccaatatcaggacagataagaacattcggcgaacagctttcaagtatgttttgatgagtgatgaactttaccgccgaacagtcaatgacgtcctgcttaagtgcttgggcccagatgatgctatattagccatggccgaagtacatgaaggaatttgtggtactcatcaatcagctccaaagatgaagtggttgttgcgaaggtctgaattttattggcctagtatgatagctgattgtttcaagtactacaagggttgccaagtgtgtcaaaaattcggcgacctacagttggtccctgcagccgaattacatcctatcatcaagccttggccgttcagaggatggggattagactttattggagaaattcatccttcatcatcaaaggggcatcggtttgtgttagttgccactaactatttcaccaaatggactgaagccgttgctctaaagaacatgacgcacaaggaggtaattgagttcataactgagcatattattcatagattcggcattccccagaccttgactacagatcaaggtacttcttttatgtcaaaggaggtaagtgaatttgctgaattatacagaattaagctgcttaattcatctccatattatgctcaggccaatggacaggccgagtctagtaataggacattgattaatttgataaaaaagaagatatctgataatcctaaacattggcataagattttgtctgaagctttatgggctcatagaatatctaaacatagggctactaaagtatctccttttgagcttgtctatgggcaggaagcagtgttgcctgtggaaataagtttgaatgatgtcaggttcgccagacaaaatgatctaactgctactgattattataattcaatgatggataatattgatgaggtgaccgacaagagaatgatagctttgggggcaatagaaaaggacaagatcatggtagccagtgcctacaacaagaaggtcaaagcaaaatcatttcaagtaggggacctggtgtggaagaccattctacctctaaggaataaagaccggaagttcgggaaatggtcgccaagctgggagggtccttataaagtaaaacaggtgatgtctggcaacacctatttgctacaaacattacaaggcaaggatttgcctaaggctttgaatgggcgtttcctcaaacagtaccatcctagtatgtggcaagatgcctaa

SEQ ID NO: 159763 - DNA, 244 bp, Zea mays
  unsure (1)..(244): unsure at all n locations
  Clone ID: MRT4577_77276C.1
ccacgcgtccgtnttgttgnnncnaaataaaaagcanaanaacaagaagtcnttagagcgaagaaaaggcattggcggccgagagcttacttttcacctcggagtccgagaacgaggagcacccagaaaaggtgcgccctcactgaaacataacgtgctttcgtccaaactatcgcaactgaccacaagcacactgggagggacaaccttcccacgcatcagcccactggtcggctcatgcgtt

SEQ ID NO: 159764 - DNA, 1616 bp, Zea mays
  Clone ID: MRT4577_77277C.1
ttgggtacctcgaggccggccgggatcacttcacttatgtgcacacattgccgtgccgtgcggtgcgtgaaaggcacggggccgccggccggactcttctgacttggcaaccgccgcgcagcgcgacgagcgccacctgcttgctgccgcgtgcctgcgtgcgtgtgcgtccaccactgaccccgcgcccgcccgccgcccctgcccctccactccacttgctcactcgtcggctcgtcgcggcccgcttcccccccggccaagggatggacgcgcttcgcctacggccgtccctcctccccgtgcggcccggcgcggcccgcccgcgaggcagtggtagctgcccttttcatgaatatctatattgttggactgaaccagttattcgacattgagatagacaaggttaacaagccaactcttccattggcatctggggaatacacccttgcaactggggttgcaatagtttcggtctttgccgctatgagctttggccttggatgggctgttggatcacaacctctgttttgggctcttttcataagctttgttcttgggactgcatattcaatcaatctgccgtaccttcgatggaagagatttgctgttgttgcagcactgtgcatattagcagttcgtgcagtgattgttcagctggccttttttctccacattcagacttttgttttcaggagaccggcagtgttttctaggccattattatttgcaactggatttatgacgttcttctctgttgtaatagcactattcaaggatatacctgacatcgaaggggaccgcatattcgggatccgatccttcagcgtccggttagggcaaaagaaggtcttttggatctgcgttggcttgcttgagatggcctacagcgttgcgatactgatgggagctacctcttcctgtttgtggagcaaaacagcaaccatcgctggccattccatacttgccgcgatcctatggagctgcgcgcgatcggtggacttgacgagcaaagccgcaataacgtccttctacatgttcatctggaagctgttctacgcggagtacctgctcatccctctggtgcggtgagcgcgaggcgaggtggtggcagacggatcggcgtcggcggggcggcaaacaactccacgggagaacttgagtgccggaagtaaactcccgtttgaaagttgaagcgtgcaccaccggcaccgggcagagagagacacggtggctggatggatacggatggcccccccaataaattcccccgtgcatggtaccccacgctgcttgatgatatcccatgtgtccgggtgaccggacctgatcgtctctagagagattggttgcacaacgtccaacatagcccgtaggtattgctaccactgctagtatgatactccttcctagtccttgccagcaccagtgacccaaacttggtcggctgagctcagcgctcagcagctttacgtgcatctgcgccttgacttgtgcagtgggcgtcgctagcatgaatgatgtatggtgcgtcacggcctgacggttcgtcagtctgggccgtgttttgtgtccgaggaagatcgtctgtcagagatctggattgcctcgctgct

SEQ ID NO: 159765 - DNA, 3144 bp, Zea mays
  Clone ID: MRT4577_77278C.1
atggaagaggacaacctgctgggagaagacctggtcgactacgaggcttctccagaacgcccagttcatgagtcattgatcacggacaattcggctctcaaagccggatggtccggtctttcacaaaatagttcggactttaagaccgaacatctaccacagcgaaaagacagtattacggatgatccggtccccgagaccggaaagtccgccatcacacaaagatcatctgattcctctgtgggggacatgatagaggaattcagagatcttgataaactaggacaggggtttacattggccgatcctttggaggagattgacataggagatggtaaaactccaaggccgacttttgtaaacaagaccctggagaccgattctagaaatgagatgatcggtctattgaaggaatattcagattgttttgcttggaattacactgaaatgcctggactaagccgagagattatcgaacatcggctgcctattaagtctggtttcagacctttcaagcaaaaagctagaacatttcgtccagatcttctcccacgaatcaaggacgaaatccaccggctgctagaagctaattttattagaccttgcagatacgcagagtgggtctccaatattgtgccggtggagaaggagtcaggaaatagaattattagctttcttgatggtaatgccggatataaccagattttcatggccgaagaggatacgtctaaaacggcctttatatgtccaggcttcattggtttatttgaatgggttgtcatgacattcggtcttaaaaatgttggtgctacttatcagagggctatgaatctgatcttccatgagttgttaggaaacactgtggaagtctacattgatgatattgtagtcaaatcggctgagtttagtcctcatatagctgatttgcgcaaagcctttgataaaatgcgtcggtatgatttgaaaatgaacccacgtaaatgtgcttttggagtgtcggctgccgggaagattgatgccttcacccctatccttcggcttaagaatgatgccgaattcacttggggggcagagcagcagcaagcatttgatctcattaaaaaatacttgtcttcggctcccgtgttaaaagcaccacaagtaggagcaccattcagattatacattgcagctgaagacaaggttattggggctgttctgacacaagaaactgaggggagggagcatgtggtgacatatctaagccgaaggttggtggatgctgaaacaagatgttatttactgtctagtcattgcactgtttctggtcaagccgatgtgatcaaatacatgttgcatagcccaattatgagtggtagaattggtaagtgggcttatgcactaatagaatatgacttggcctacgaaccattgaaatctatgaaaggccaagtcgtagcggatttcattgtagaacatcgggttaatgatattcatgagctagacatatcatacctcactattactccttggactttatattttgatggatcggtttgcaatgaagggcaaggaattggcattgtacttgtttcaccaggtaatgtctcctttgacttctctagccgattgaaaacttattgcactaataatcaagctgaatatgaggccctcctatttggtttagaacttttaaatggtatgggagtaagacatgtgatggtatttggtgattctcagctggttgtccaacaagtgttagaagaatatcaatgttttgatggtactctaaatagttaccttgagaaatgttggagcataattcattcttttgacgaattcagtattcgacatatctctagagttgagaatcatagagctaatgatttggcacaagatgcatcaggttatcggataaagagagggaagtttcacaaagctgaaaatctgataaccagtgcaaagccaaattcccaggtcgtggaccgtccgcgtgatgacgccggaccgtccggggttaccagagatgttcttttcattaattcggctgacaatgaagccgatgcaagtgattggaggacacctatacttaattatttacgaaatcccaatatcaggacagataagaacattcgacgaacaactttcaagtatgttttgatgagtgatgaactttaccgccgaacagtcaatgacatcctgcttaagtgcttgggcccagatgacgctatattagccatggccgaagtacatgagggaatttgtggtactcatcaatcagctccaaagatgaagtggttgttgcgaagccgattacatcctatcatcaagccttggccgttcagaggatggggattagactttattggagaaattcatccttcatcatcaaaggggcatcggtttgtgttagttgccactgactacttcaccaaatgcactgaagccgttgctctaaagaacatgacacacaaggaggtgattgagtttataactgagcatatcattcatagattcggcattccccagaccttaactacagatcaaggtacttcttttatgtcaaaggaggccaatggtcaggccgagtctagcaataggacattgattaatttgataaaaaagaaaatatctgataatcctaaacattggcataagattttgtctgaggctttatgggctcatagaatatctaaacatagggctactaaagtatctcctttcgagcttgtctatgggcaggaagcagtgttgcctgtgaaaataagtttgaatgctatcaggttcgccagacaaaatgatctaactgctaccgattattatgattcaatgatggataatattgatgaggtgactgacaaaaggatgatagctttgggagcaatagaaaaggacaaaatcatggtagccagggcctacaacaagaaggtcaaagcaaaatcatttcaagtaggggacttggtgtggaagaccattctgcctctaaggaataaagaccggaagttcgggaaatggtcaccaagctgggaaggcccttataaagtaaaacaggtgatgtctggcaacgcctatttactacaaacattacaaggcaaggacttgcctaaggctttgaatgggcgtttcctcaaacagtaccatcctagtatgtggcacgatgcctaa

SEQ ID NO: 159766 - DNA, 285 bp, Zea mays
  Clone ID: MRT4577_77279C.1
gcaaagaccaaaagcaaaaccgacgcagacgacgaggcaagacaggtacaagcggggacaccctgaagcagccggccaaaaacggaggacggacgcccaaggcctagctgccgagccgcccgaagaaacaactcgcctgcagggacgttcggaaatggaaaacaaaaccaacaggaatcacgtgctaccaaaagacaaaaacagcaggtgcgtaaaacaagaaaagatcgacggattcgcgctcgacaccataaaaactacaaaaaaaaaacgcgagcgcagagg

SEQ ID NO: 159767 - DNA, 745 bp, Zea mays
  unsure (1)..(745): unsure at all n locations
  Clone ID: MRT4577_7727C.1
ggtacccccggtcccggccgggaggcgcctcgacccgaccgcgctatttatattaattatccattctcccaggtccacagtccaggcgtatgcggcagtgcatgcctgtgtgtccgtccgtcgatcgacgctacactgttcacacgccgctgcagctcttgatcgatcttaggccgccggggaaaatatacttgccatatggttctctaaccaacaggacgtagcaaagcaactataacgaccagctgcatgccataggaacaagatcgaggtctccgaacacgcgtgccggcttgcatgtctctgaacatatatatgtggatgttgctcagaaattgtggatccgaacataccaaattcagtggtgttgtggggctctagcccgggggtgctgtcgcttcttcatactgaaaaacggcgagccacgaactatttattgctgtacccttccggttctaaaatagtattcgttttagagaattagtagattcatataattttaatgtatgtgttttatacatgtgtttagatccaccaccatctatttgaatatagacataaaaattaagagctaaaacgactacaaggtncgggggtaccatatagatctacatagtgtagaaacataccataaaaaggtttggttgaaaaaagaaaaaaataaaaaatatattttaaccgagtgtccaaaaatgtcactcggtaaagcatgctctggtcgagtgttagctgagcaaacaggggg

SEQ ID NO: 159768 - DNA, 707 bp, Zea mays
  unsure (1)..(707): unsure at all n locations
  Clone ID: MRT4577_77281C.1
tacgcctgcaggatccgtccgnatcccgggaaaatatttgacgaattactcaaaaatggcaatattaaaataaatcacactgttccattcgccgacgagctaaaacgtcgtgcatactgcaagtggcataactcattttctcatgccactaatgattgtaatgtattccgacgacagattcaatcggccattaatgagggacgattgaaatttcaggaaatgcaggtggatacatagccctttccaatgaatgtgatcgactttgagggcaagaaagtcctggttcggccaaacacagccgataaaagcaaaggcaaagaggcaatcatcggcaattctaaaaaggccgatgaggatcataaagtttcttgcagaaaagtggtagccgagaagactcccgatggaggggagaccctaaaggtgaccatcacagcctccagcactggggggcaagcgcagacagggagacagatgcaggaactcgtgctgcgtatcccggacggtccgacacataggcgcggacggtccgggaccccaccggacggtccggagagctccggcggacggtccggccgtactcaggactcgcagcgaccacgtaccttcaaaccacgacgaccagagataggtacgtggaaaacaaatacatttaaagcagctggtcggctgatcaagcctggcccaactttcgatcaattgttgtctta

SEQ ID NO: 159769 - DNA, 663 bp, Zea mays
  Clone ID: MRT4577_77282C.1
gtcggctggtaagtttttaggattgtcatccatgaacatggtatagagatagaccctgaccgaatcaagtctattcggaatgtgggacctccgacctgtaaggtctttcttggcaaggtgaattatttacgaaggtttatttctaacctagccgggaagattgatgccttcacccctatccttcggcttaagaatgatgccgaattcgcttgtggggcagagcagtaggaagcatttgatctcattaaaaaatacttgtcttcgactcctatattaaaagcaccacgagcaggagtaccattccgattatacattgcagctgaagataaggtcattggggttgttctgacacaacaaactgagggaaaggagcatgcggtgacatatctaagtcggaggttggtggatgctgaaacgagaggcatacaagagtggagaactgcaggaaactctagagaaagcaatgtgctcatagagaaaagaaattagaaccaggagtgcacggcatacagttaatcaaaatgttatagtatttgatgtacaattcaggcaatgttatgctggagatgccgaagttgtaggcaatccatgtccaaatgctcagtgcacttggtttggaaacatttgtttctgcaatttgtgattaatcatccagtttgagag

SEQ ID NO: 159770 - DNA, 624 bp, Zea mays
  Clone ID: MRT4577_77283C.1
atggcagacagcgcggctaaaacgaccgaaccatctgcacaaggtgcagactattcgacccctgagtccggaccatccgcaccacaccaggacacctccgacgacgtgccgacatcaatggaggaggacgacctactgggagaagacctggttgactacaaagcttctccagagcgcccaggtatggatgtaaatgttattacattttccgtcgattgtactattgtcggcgacgatgaacctgttgttgcccagtttgattttggtcctaaagaagtcgccttcactaaaccaaaggaattgttaaatcatttgaagccactcttcgtgggtggtcacattgatgggataccgattgctaaaatgttgttagatggaggggtgactgtaaatctaatgccttattcattgtacagaaaattagattatttcggacaggataagctttttggaaaaacaccttcgcgcggaccgtccgggcccttgcagcggaccgtccgcgacaccagggtgaccctcggacagaacaaatgcaaaaacacaagtctacactacggactgtctgatggaaaatcaagcatcgtccgacctcaggcgcggactgtccgatcggcgcagaactga

SEQ ID NO: 159771 - DNA, 831 bp, Zea mays
  Clone ID: MRT4577_77284C.1
atggccgaagtgcatgaaggaatttgtggtacccatcaatcggctccaaagatgaaatggctgttgcgaaggtctggtttttattggcctaacatgatagctgattgtttcaagtactacaagggttgccaagtgtgtcaaaaattcggtgacctacagttggtccctgcagccgaattacatcctatcatcaagccttggccttttagaggatggggattagactttattggagaaattcatccttcatcatcaaaggggcatcggttcgtgttagttgccactgactactttaccaaatggactaaagccgttgctctaaaaaacatgacacacaaggaggtaattgagttcataactgagcatattattcatagattcggcattccccagaccttgactacatatcaagggacttcttttatgtcaaaggaggtacgtgaatttgctgaattatacagaattaagctgcttaattcatctccatattatgctcaggccaatggacaggccgagtctagtaataggacattgattagtttgataaaaaagaagatatctgataatcctaaacattggcataagattttgtccgaagctttatgggctcatagaatatctaaacatagtgctactaaagtatctccttttgagcttgtctatgggcaggaagcagtattgcctgtggaaataagtttggatgctgtcaggttcgctagacaaaatgatctaactgtcactgattattataattcaatgatggataatattgatgaagtgactgaaagggaaatgtgcctttgggccatttctaagtattttggtgattga

SEQ ID NO: 159772 - DNA, 642 bp, Zea mays
  unsure (1)..(642): unsure at all n locations
  Clone ID: MRT4577_77285C.1
ggggaagtgcgagcccgagcgccacgcctacgagaagtgctagtacgagctcgtcatggagcggatgctccagatgcagaagatccgcgaggcgcaggagaccaaggtcaagggcggcgcctccattggcctcatcccggccaccgccaagctcgcctgatacgggtcccagcccgatccgcttgatttaggaaatgcaggtggacacggagccctttccaatgaacatgatcgactttgagggcaagaaagtcctgactcggccaaacacagccgatgaaggcaaaggcaaagaaatagtcatcggcgatgcaagagaggccggtgggaatcataaaacttcttgcagaaaagtggtggccgagaagactcctgatggaggggagaccttgaaggtgaccatcacagcctctggcgttggggggcaaacacagacagggagacaggcgcaagaacccattctgcgcatcgcggacggtccgccatccagacgcggacggtccgacgcttctccggacggtccggcgaactccagcggacggtccggccgtgctcaggacccngcacaaccacgtaccttcaaaccacgacgacccgagataggtctgcctggtggctatagcagcgtccagaggcgttgcg

SEQ ID NO: 159773 - DNA, 291 bp, Zea mays
  Clone ID: MRT4577_77286C.1
taattcggcacgagggccgagcccgccgacgtacaccccttctcccaagcctccgacgcccaacccgaccccgccgacgtacactccaagccccaagcctcccacacacccgacgcccaagccgaccccaccgacgtacaccccttccccaaagccttcgacgcccaagccgacccggggggggtacaccccttccccaaagcctccgacacccaggccgaccccaccgacgtacactcccacaccgaagccgccggccaccaagccgcccacctactcttcgaggccgcc

SEQ ID NO: 159774 - DNA, 473 bp, Zea mays
  Clone ID: MRT4577_77287C.1
agccaacaagttcgcaccatactaaactactggagttacactgaacacaaattttatttttccactacaacagcaacatgtacacactggatttcactattggatggggatgtcctgttgcagccgaagggaatgggcctcatcctttatttggcgacgctggcctccttttgcgcggaaatcctttccggggggccgtcctccagtgcacgcgtccgccaccgaatcctttggagcacgccatccacagggagggcgacgggatccttaacggcctttttaagtttgggcgtgctcccgtgccgccggtacaccacccttggggccaccttcaggacgcgctggcgaattctccggacctttttcttcgggacggccttgagcgttttgacgattcggaccccgccgaacaccacggcctccttgggcatgtgcaccgagaacttattgtaccggaccggggggaggggcca

SEQ ID NO: 159775 - DNA, 492 bp, Zea mays
  Clone ID: MRT4577_77288C.1
atggccggttcaagggagagctctgatatttctccaagcaacatcatagagccgacttgggaaaccttgccggctgacgagcagctccagtttgaggagcacaaggagcggatgatccaggaggcgaaagcaaaattcttggccaacttcaaagtggacaggaacaacaaggtcgtccgacatcgggcgacggatccggcttcgctccaacccatgccagatatccccaatgttgagttaggaggtaacacgcgtaacacatcggctacaggttgtcacgaccagtcacaacccctttgtgggatgccgatggacacataccctgaacaaccacaaatcggcagcaaatcagccgatctgcacatgcccggaccgtccgcacgttcgggccgcttagagatgcgtaacaccctatgtcctggtgagtatacgagtgtggttacaagagggctctctggattgaaggcacagagagtttacgtgggtggctaa

SEQ ID NO: 159776 - DNA, 6209 bp, Zea mays
  Clone ID: MRT4577_77289C.1
atgccgatggacacgtaccccgggcaaccgcaaatcggcagtaaatcagccaatctgcacatgtccggaccgtccgcacgtgagcgcggaccgcccgcacgtgagcgcggaccgtccgggccagccacggccgggcccatttttaatgaggtacccagacacgcacccgagccaccacatatgacacagaacccaaactacccagtcggacggtccgcatacaacgacggacggtccgcacataactatggacggtccgggtacatatccggacagtccgcgcatgagtcttttgaggaggattattacctgaatcctcacccgtcccagcaacacttcccatcacactatgcaatgcaccagcccattaattcaagatctagagcccaggaaatctttccggccccacctagaaggccggaaagaatcgatcaaacctatgaaccatatagggcaaacggaaatgcaccacgtagctcaaaccaatggggggaaagacaacatactaacatccaaccaaccccacctatgtttgaccagagagccggtggtcttgcaccgactgccattgatatagtaagggaagaaatagctgaggcgttccgagataagctcggagtaagcatggtccctggggggcaatcatattggagaccttatgacggccgatttgatcaccacccatacccacagggaaccaggatacccgaattcgcaaaattttcgggtgatcaaggaaagaacacgtgcgaacacataggccagtttttagcacaattaggagaattggccgacacagaggaatttcgcgtacgtttattttcattatcgctaacaggaaccgcgtttgcatggccaaatcttcggcttgtgcctccttacaaccggttcaaaagaaacggcaagaggaggttaagtttacgtttaatgttggtaagtgtgatagaatatttgatgaattacttaaaaatggcaacattaaaataaatcacactgttccatccgccgacgagctaaaacgtcgtgcatattgcaagtggcataactcgttttctcatgccactaatgattgtaatgtattccatcgacagattcaatcggccattaacgaaggacgattgaaatttcaggaaatgcaggtggatacagagccctttccgatgaacatgattgacttcgagggcaagaaagtcctagttcggccaaacacagccgataaagacaaaggcaaagagacaatcatcggcaatgctaaagaggccgatggggatcgtaaagtttcttgcaggaaagtggtggccgagaagactcccgatggaggggagaccctaaaggtgaccatcacagcctccagtactggggggcaagcgcagacagggagacagatgcaggagcccgtgctgcgtatcccggacgatccggcacgtaggcgcggacggtccggagagctctggcggacagtccggccgtactcaggattcacaacgtccatgtactttcaaaccacgacgaccagagataggttgacgccaccagtacaagaccgattgagcactgctcaatccggtcaccaggcacaaacccaacaggattgccggactactcagccttccaggccgaccaatccggcaggggggcatatgcttgtagcaactcaaagaacaacaaaaaaggacatcatcaaaataggcactgcagatgttgtcatacatggagacaataaagggccgatgattttcggcgaatcggccaacacaacagaaaaggatacagctaccatcaaaacagccgatccaaaatactccatgcctcgatggtgcccagcgggattgacacgatcccaaaagagaaaattacagcgcctaagagcaaaggagagccaggagaaggaggcggaaaagacatttaatgacacacatccactatacccgccaccgcaaaagaaatggagaccgaaggccgttgagaaaaaacaaacggccacgaaaatagaaagtcaacccgcaccaggcgcggaccatccggcctctgcgcgcggaccgtccgtccctcaccaggaagcgtctggacaatctgcaccaggcgcggaccgtccggcccctgcgcacggaccgtccgactttcaccaggaagcgtctggacaacctgcaccaggcgcggaccgtccggcctccgcgcgcggaccgtccgccgttcaccaagaggcctccaacgacacgacaacatcaatggaggaggacgacctgctgggagaagacctggtcgactatgaggcttctccagaacgcccaggtatggatgtaaatattattacattttctgccgattgtactattatcagcgacaatgaacctgttgttgcccagtttgattttggtcctaaagaagccgcctttactaaaccaaaagaatcggtaaatcatttaaagccgctcttcgtgcgcggccacattgatgggataccgattgctaagatgttggtagatggaggggcgactgtaaatctaatgccttattcattatacagaaaattaggtaaacaagatgacgaacttgtcaagaccaacatgaccctcagcggtgttggaactgatagttcgatcaaagccaggggagtcacgtccgttgaattaaccatcgggactaagacccttgctgctgcatacttcgtcgctgatgtagaaggaaattacagtttaatcctaggcagagattggattcacgccaatcaatgtataccttctacattacatcaaatgctgatacaatgggtaggcgatgacatagaacaagtacatgctgatgtatcggcctgcatcgctgtggccgatgccccagtactctggacttatgagactgctacatgtctcacaggagtagacttttctgattatcaattcataagtatagataagaaagttcatgagtctttggtcacggacagttcggccgccaaggccggatggtctggtctttcacaaaagagttcggactttaagaccgaacatctaccacagcgaaaagacagtattacggatgatccggtccccgagaccggaaagtccgccatcacacaaagatcatctgatgcctgtgtgggggacatgatagaggaattcagagatcttgataaactaggacaggggtttccatcggccgatcctttggaggagattgacataggagatggtaaaactccaaggccgacttttgtaaacaagaccctggagaccgattctagaaatgagatgatcggtctattgaaggaatattcagattgctttgcttggaattatactgagatgcctggattaaaccgagtgatcgtagagcatcggctgcctattaaatctggtttcagacctttcaagcaaagagctagaacatttcatccagatcttctcccacgcatcaaggacgaaatccaccggctgctagaagctgattttatcagagcttgcagatacgcagagtgggtctccaatattgtgccggtggagaagaaggagacaggaaatagaattattagcttccttgatggtaatgccggatataatcagattttcatggccgaagaagatgcgtctaaaacagcctttatatgtccaggcttcattggtttatttgagtgggttgtcatgacatttggcctgaaaaatgctggtgctacttatcggagagctatgaatttgatcttccatgaattgttaggaaacactgtggaagtttacattgatgatattgtagtcaaatcggctgagtttagttctcatatagctgatttgcgcaaggcctttgataaaatgcgtcagtatggtttgaaaatgaacccacgtaaatgtgcttttggagtgtcagctggtaagtttttaggatttgtcatacatgaacatggtatagagatagaccctgaccgaatcaagtctattcggaatgtggggcctccgacctgtaaagtcgaggtacagaggttcctcggcaaggtgaattatttacgaaggtttatttctaacctagccgggaagattgatgcgtttacccctattcttcggcttaagaatgatgccgaattcgcttggggggcagaacaacaagaggcatttgatctcatcaaaaaatacttatcttcggctcccgtattaaaagcaccacaagcaggagtgccatttcgattatacattgcagctgaggataaggtcattggggctgttctgacacaagaaactgaggggaaggagcatgtggtggcatatctaagtcgaaggttggtggatgctgaaacaagatgttatttattgtctagtcattgcactgtttctggtcaagccgatgtgatcaaatacatgttgcataacccaattatgagtggtagaattggtaagtgggcttatgcactaatagaatatgacttggcctatgaaccattgaaatctatgaaaggccaagtcgtagcggatttcattgtagaacatcgggttaatgatattcatgagctagacatgtcatacctcactattactccttggactttatattttgatggatcggtttgcaatgaagggcaaggaattggcattgtacttgtttcaccaagtaatgtctcctttgacttctctagccgattgaaaacttattgcactaataatcaagctgaatatgaggccctcctattcggtttagaacttttaaatggtatgggagtaaaacatgtgatggtatttggtgattatcagctggttgtccaacaagtgttagaagaatatcaatgttttgatggtactctaaatagttaccttgagaaatgttggagcataatccattcttttgacgaattcagtattcggtatatctctagagttgagaatcatagagctaatgatttggcacaagatgcatcaggttatcggataaagagagggaagtttcacaaaactgaaaatctgataaccagtgcaaggccaaattcccaggtcgcggaccgtccgcgtgatgacgccggaccgtccggggttaccagaaatgttcttttcattaattcggctgacaatgaagccgatgcaagtgattggaggacacctatacttaattatttacgaaatcccaatatcaggacagataaaaacattcggcgaacagctttcaagtatgttttgatgagtgatgaactttaccgccgaacagtcaatgacatcctgcttaagtgcttgggcccagatgacgctatattagccatggccgaagtacatgagggaatttgtggtactcatcaatcagctccaaagatgaagtggttgttgcgaaggtctggtttttattggcctagtatgatagctgattgtttcaagtactacaagggttgccaagtgtgtcaaaaattcggcgacctacagttggtccctgcagccgaattacatcctatcatcaagccttggccgttcagaggatggggattagactttattggagaaattcatccttcatcatcaaaggggcatcggtttgtgttagttgccactgactacttcaccaaatggactgaagccgttgctctaaagaacatgacacacaaggaggtaattgagtttataactgagcatatcattcatagattcggcattccccagaccttaactacagatcaaggtacttcttttatgtcaaaggaggtacgtgaatttgctgaattatacagaattaagctgcttaattcatctccatattatgctcaggccaatggtcaggccgagtctagcaataggacattgattaatttgataaaaaagaaaatatctgataatcctaaacattggcataagattttgtctgaagctttatgggctcatagaatatctaaacatagtgctactaaagtatctccttttgagcttgtctatgggcaggaagcagtattgcctgtggaaataagtttgaatgctgtcaggttcgccagacaaaatgatctaactatcactgattattataattcaatgatggataatattgatgaggtaaccgacaagagggtgatagctttgggagcaatagaaaaggacaagattatggtagccagggcctacaataagaaggttaaagcaaagtcatttcaagtaggggatctggtgtggaagaccatcttgcctctaaggaataaagaccggaagtttggaaaatggtcgccaagctgggagggtccttataaagtaaaacag

SEQ ID NO: 159777 - DNA, 275 bp, Zea mays
  Clone ID: MRT4577_7728C.1
ggccccctcgagccggccggggccaagggggaagcgaaaccgaagagaggcagagcttggcaatggagctcccgtggggaatgctgctgccgctgcttctggtcctctccgtctcgccctcgtcatcgtcgtcggctgctgccacactcgccgtcagcgctccgaccccagtgcctgttcctactcctcgccatgctcaagacgccgaaggcatcctcatcaacgccaactcgtagacggcgccgtgcaggttgcacaataaccttatgccgcgg

SEQ ID NO: 159778 - DNA, 267 bp, Zea mays
  unsure (1)..(267): unsure at all n locations
  Clone ID: MRT4577_77290C.1
cgaccacgcgtccggttcacagtgccgactggaatccccgcttagataacgagaccnnaacggggccngccgagaacgctgnccgaaagcgggagcgaccgcaaccggggacgggaggagccggnccnccaacacacaaaagcgagggccacaaagcagccagagcccggaggcagacggcaccagacagagcancnagnncaggaagagccgcagaagaagggggcggaaaggacagggaccangagaagggggggaagaagaaaa

SEQ ID NO: 159779 - DNA, 307 bp, Zea mays
  Clone ID: MRT4577_77292C.1
gcgtccgaactaaaaaaaaaaaaaaaaaaaaacaataataaaaaaaaacaaacttacaaacaaaaaacgggggggggggtaaataaggggggggggggacctaaaattaaattcactgaacatttggtttacaacatattaaagtgggggcacctttgcaggaccccaacttaattgccgtgcattacaaggtgctttttttttttttgggtaacctaaattaaatccccgccggtcgtttttacaaacaggggtggggaaaaactggggattccacaatttatgtttttggaaataaatccccttt

SEQ ID NO: 159780 - DNA, 318 bp, Zea mays
  Clone ID: MRT4577_77293C.1
cagacgcgtgtgcgggcgcgtgggtcgacttaatacagtcatacacagtcatatcagcaggccatgcattcacaatgcgagcttatctgcagcactatttggttgattttttaatcattgcctgcggccgaacatattgccgttgactcattcgatctcgtcatcactagctacgatgatgtgctgcgacgcctggctgatgacgatgccatgattgacctcaagaccggtatggtcgatcaggactatgtgccaccgacaattaatgttgcagaggagaaggagatcgggatcgatgtgctcatgaataatcttgtc

SEQ ID NO: 159781 - DNA, 300 bp, Zea mays
  Clone ID: MRT4577_77294C.1
ccggccgggataggtagtgaacaggtcggtagggctggacacacggaccacgtggtacgcgttgtccactgtccagtcgtcatcgcgcgtctgtgcgaccatacccttcacgcgatcgtattcgtcatctcaccgatccaaccctccaggattccagagcgatgggtgccaccctccaggcacgcatgctcgagcaataagaattcatgttatcatgcgacaatcgttcttatttcttaacctgtaaagtgctaatctgcaccgatttatatcaaaaaaaaaaaaaaaaaaggggcggcc

SEQ ID NO: 159782 - DNA, 756 bp, Zea mays
  unsure (1)..(756): unsure at all n locations
  Clone ID: MRT4577_77295C.1
cattgggtacctcgaggccggccgggaatcttttgtacctcagtagccttggcttggacatgtaagctgcatgcattgtgagcatgatggtctgaaagccctgagatgtctgtgttggtactcataagttgcgttcagtagatggagcatttatgtccaactgaatacaaaccacctaaacctcaaaactaactcatggaggagctcactttcgcttggaaatttgtggccccttttatgccggcttgccatctgattctgcctcttcactaccaatcacctgaattcattgtgcaaggaaccatgaatcctctgctgcttgaacttgtcgctctcttggtttgtgcggaaagtataaacagatggcaataatcttgaacactatgctgaaaacttgtgtagccaagtttgggagcttgaaaaaatgtgcttgtgcctaaatgtcgttatgcagtaagtgtttttattgtccttgagaggtactgagagggtgcttgtctgcctttctctccttaagaaaatcaatttaaatttagtataggctgatttttgtgtatatatttttattttgccatgaccagattcaaggaaggagctacaggcaccgcattgctacatatcanaatgatttttctcatgcatatacttgtggaaaatctccttttcaccttttgnatggntttatagatccatcgcttcttttggaaatgnttcangttcatcttcctcatgattatgcttatgccttttcatttg

SEQ ID NO: 159783 - DNA, 2054 bp, Zea mays
  Clone ID: MRT4577_77296C.1
aattcggcacaggacaagacacaacaacgctgtgggcttgtacgtggctgtcgatcgcagcacacgtacgtaaactcgaaagcagctaggccggaagcaaaatggacgacgacgtcgtcgtagcagctgcagctgcagctgcagccgcggcggcttcgtcttcgccatcgccgccgtggagcctgctccaggggctccttgcgctgctcgtcgcgtggggggcctaccgggcggcgcagacgttctggctgcggccgcggcggctcggccgggcgctccgcgcgcaggggctcaccggcacggcgtaccgcttcccggcgggcgacctcaaggagaacgcccgcctcaacgacgagggcgcggtgcatgtccatgcagccgctaagtagccatgatgttgttgcccttgtggtgtggagtctagtgctcagtagctgatttgcagggtagaactgaaacacctgggtgggaccgaatcccagggtggttaacacggaggcagagttagaaagacaaacagtgtcgaacaacggatataccttcgagaagttcacgaacaagagtctcgggaagatgatcgccctcggggtggcgagctacgacggcgagaaatgggccaaacacaggaggatcctgaaccccgcgttccatctcgagaagctcaagcgcatgcagccggcgttcttgacgtgctgcaccgagctcattgatcgctgggacaaggaggtcgctggtggttccgacgggtcattcgagctggacgtctggccggagttccagagcctcaccggcgacgtgatctcccgcacggcgttcggcagcagcttcatggaagggcggaggatcttccagctccaggccgagcaagcggagcgagtgatcaaggctttccagtacatatacatcccaggcttcgtgttcttcccgacacccaacaaccggaggatgaaggagatcaacagggagatcgaagcgactctgagaggcatgatcgacaagagggagcgcgcgatcgagaacggcgaagcgagcggcgacgacctgctcggcctgctgctgcagtccaacttggagagcgggaaaggcggcctgaggatgagcacggaggacgtggtcgaggagtgcaagctcttctacttcgccggcatggagaccacgtcggtgctgctcacctggacgctcgtcatcctaggcatgcaccccgagtggcaggaccgcgccagggaggaggtcttcagcgtcttcggcagggacaagcgccccgatttcgacggcatcagtcggctcaaaacggttacgatgatactgtacgaggtgctcaggctgtacccgccggcggtgacgctgaaccgaagaacgttcaaagacatgcagatcggaggcatcacgtaccctgcgggggtgatcctggagctccccgtgatcgtcgtccaccacgaccccgacgtctggggcaaggacgcgcacgagttcaggccggagaggttcgccgaggggatctccaaggcgaccaaggaccagcagccggcgttcttcccgttcggctggggcccgaggatctgcatcggccagaacttcgcgctgctcgaggccaagatggccctcagcatgatcctccagcgcttccagttccggctgtccccttcctacacgcatgcgccgtacaccgtccttctgctgcatcctcagcatggcgctccaattattttcgacaggatctgactgcccttgcatgacatcgtcgatcgttgtcagcatgtcacagtgcaaataaactcgtatgaataatattgtgttagggagagtctagttctgtgtatccgattttgaaggtggaaccaaaacataagggtgtaaggctatgtcccggaaaatgagtcgcatgcgagctcgcaaacgccaacagagtccacatgcggatatacatatagtatataactgtgaagaagaataatgtgctttggggtgtaagctgaggttaaacgctcatattgtttaaactctaaatttagaaactcaaaaaggtatttttcaatttaaaaaaaaaaaaaaaa

SEQ ID NO: 159784 - DNA, 498 bp, Zea mays
  unsure (1)..(498): unsure at all n locations
  Clone ID: MRT4577_77297C.1
ccaactatgcatggcacaggcgcttaccacttcttttgttctccatccccagctaggccgtgacccatggcatgccgctagccgtagcactcgttctttagaacggtggcactctctatcctacaacaaagctagccgcccttggttacacatggcgccaaaaagaccatgcccatggctagtagctccctgctcttttcaatcgcccaaatgggagaaacgctctgcttactaccctataccctggtgctcccttatcacataagcgatggaaaaaataagatgataacatcactatgcaaacctattgatggacccatgatgtttacgagtaacaatatcagggacgctcattgaacaatgtatgacgttgacaccaacagggtcagaaccctggtgaggactgatgaatganacgaaggcttatgtgatcacggacgccctgctacgaggcccgctctccaggcgacaataatgtaaccacataaactaataggc

SEQ ID NO: 159785 - DNA, 602 bp, Zea mays
  Clone ID: MRT4577_77298C.1
aaagacgcaagcctgcagaacaacactttattagaacaagctagcagcaccgggcagcagccataatttaagtaggggggggcaagaacacatggaaaacaaaccatcccggacgggaatttcttttttcttttggattataaaagcacgatacatgcatgacaccagggaaacactacatcagcatcagcggggatgaaacctccatccaggaagcaaacatggggtgcacctgggctgggacaccaaaactaaatcgctggcgctggtgctgctactggggcccccgtcgggggcggggccctcgccgggcttttttttaaccttctttttcttggccttcttttccttgggggcgccggacttgtcgccgggctcgccggggaacttggccttgatcttctccacaaagccttccttgggctccccgccggcctttttggggggccccccctcctcctttttggggggcccctcggccttcttggggggccccccccccttattcttgggggcgccccccatggggagcttctcctcaatcttggggatgatgccaaacatggggaatggttttcgctctttttctttgctcacccaaa

SEQ ID NO: 159786 - DNA, 171 bp, Zea mays
  Clone ID: MRT4577_77299C.1
aacttgttgcttttcaaagagtgtaaaatgcatgcaggttagttcagtgccatgtatatttgtttgtatttcttattggaaatttgtgcagtttaggattgtattcacacaacattttgtttgtttcataaaagtatgtctataatatggtaatcgatttacaaagttatt

SEQ ID NO: 159787 - DNA, 393 bp, Zea mays
  unsure (1)..(393): unsure at all n locations
  Clone ID: MRT4577_7729C.1
gggaaaaaagggtggaaccaagagaactaattattgaaagaggattgtacttttaattttatgtagtatcaaaatttgatggtggtggggtaaattattaccgaacagntatattgcgaataagaggatggtttaatataaatgtttgtgggaactggaatgctttattaggcttataatttgcaaaccaataaccgcattggacaaatgtatttagcaaagggaaagaaattatgggtagttgaaaaaatttttttttaaaaaaatggttttttaacactatttgattaaaatcatgtcattttttattgtgcaaaagcattgaataattggggcagttgatataagataattggtttttggaaaacatgtttgagataactttaccaagta

SEQ ID NO: 159788 - DNA, 252 bp, Zea mays
  Clone ID: MRT4577_772C.1
cccactttgttctacttgatctacaagagaatacacaagagagagattgagaatgactacacacttgtttttacacttactttctgctttgatgtactgtttgtggacgagggtgggcctatttatagccctaagagctcccatagccgttggagctttcctaaaaaaccaatcttaggtggtgcaccagattaacacggtgtattagaagaccatgtgttacaacaagtgcttgttgagagcgtcttacaa

SEQ ID NO: 159789 - DNA, 1097 bp, Zea mays
  unsure (1)..(1097): unsure at all n locations
  Clone ID: MRT4577_77300C.1
aattcggcacgaggcacacacaagacacaacaacgctgtgggcttgtacgtggctgtcgatcgcagcacacgtacgtaaactcgaaagcagctaggccggaagcaaaatggacgacgacgtcgtcgtagcagctgcagctgcagctgcagccgcggcggcttcgtcttcgccatcgccgccgtggagcctgctccaggggctccttgcgctgctcgtcgcgtggggggcctaccgggccgcgcagacgttctggctgcggccgcggcggctcggccgggcgctccgcgcgcaggggctcaccggcacggcgtaccgcttcccggcgggcgacctcaaggagaacgcccgcctcaaccacgagggcgcggtccaggcccgtgcagccgccgtgtagccatgacgtcgttccccgcgtcatgccgcatctcttcaacaccgtcaaggaccacggcaacatctgtattacctggttcggaccgattcccagggtggtcatcacggaggcagagttagtcagagacatcctatcaaacaagtttggccacttcgagaagttcacgaacaagcgtctcgggaagatgatcgccctcggggtcgcgagctacgacggcgagaaatgggccaaacacaggaggatcctgaaccccgcgttccatctcgagaagctcaagcgcatgcagccagcgttcttgacgtgctgcaccgagctcattgatcggtgggacaaggaggtcgctggttccgacgggtcattcgagctggacgtctggccggagttccagagcctcaccggcgacgtgatctcccgcacggcgttcggaagcagcttcatggaagggcggaggatcttccagctccaggccgagcaagcggagagagtgatcaaggctttccagtacatatacatcccaggctttcgtgttcttcccgacacccaacaaccggaggatgaaggagatcaacagggagatcgaagggactctgagaggcatgatcgacaagagggagcgcgcgatcgagaacggcgaagcgagcggcgacgacctgnctcgcctgctgctgcagtccaacatggagagcggggaaaggcggcctg

SEQ ID NO: 159790 - DNA, 351 bp, Zea mays
  unsure (1)..(351): unsure at all n locations
  Clone ID: MRT4577_77301C.1
gtcgacaaatatcttgtgttggcacaaaccacacatgagagaagcatgtttagctacagctgcaactatctatgccagcaaagaggctgcatgggggaagaagaaagattaacaatggagaagaaacaacagtgatggtggctggtgatgcattcgtgagctgacggtatcttaaggtctctagattcatggatgagctagcaggccagcacatggaagcatatctgggcttttctctattatnntttcttccccctttatctttggtagatctacattcagaaatagattagttgttccggtgttcattagcatcctattttatgcttaaatacttaatattgaatcaat

SEQ ID NO: 159791 - DNA, 1246 bp, Zea mays
  unsure (1)..(1246): unsure at all n locations
  Clone ID: MRT4577_77302C.1
cccgccgccgccggttgaatcgacggagggaggcgttgatggattgctcgattcctggtgggaattgattgatttcagctgcatgtgcttgtgcttgtgctgctcaatcgaattcgagtccgaattggattaggcaggtgggttgggtaggtgcgggatccagcgagcggaggatgggcgaggaggcggtggacgactacgagctccacatggtgtgctacggcagcgacgaggacgagcgcgtgatggagtgggagtcggggctccctggcgccgacgagctgaccccgctctcgcagccgctggtgccgccggggctggccgcggcgttccgcatcccgccggagcccgggcgcaccctgctggacctgcaccgagcgtccgaagccacggtggcgcggctgcggcgcgcgccgccgtcgtcgccgggcacctcctcctccccccacggccaccaggaggcgagggggggcgaaggggcggactcggcggcggcgactaccacgaacagcaacagacggccccggctggtttggacgccgcagctgcacaagcggttcgtggacgtggtggcgcacctggggatcaagaaggcggtgcccaagaccatcatggagctgatgaacgtggaaggtctgacgcgggagaacgtggccagccacctgcagaagtaccggttgtacgtgaagcggatgcgggggcagggtccgtccccgtccgaccacatcttcgcacccacaccggtgcacggcgtcgccgtcggcatggtgcccatggtcagcggccaggcgtaccactacctgtacaacggaggagggggaggagacagatgacacccgcttcggcgacgactccagaatctagtttcctcttggggaagaccggaagacaaatccaaaacggaacaagcgattgcctgcctcactctatactctactccctccaaattatccaaagcttctactgtactccgtccgtcccgttccaaggtattcggtatttttaaagccaaagcttttgttcaagtttattagagaataaatttcgaagcttttggtgaaggggaaagtaatgagtttttagtcccatacagaaaattgaagagaaataaaattaacttaaatagctaaaaaaaaaaaattgcttaacagttaaaagcgcgttttacagaacgtgtgattgctcgtgtgactttgggtgtggagacagacactaattccgtttctatctactacatnttgtctta

SEQ ID NO: 159792 - DNA, 293 bp, Zea mays
  Clone ID: MRT4577_77303C.1
ctgcatgtactctttcctgatatttcctgttggggggcacacgtcctctaaattttcccccactctctactcgcatctacacctttatcattcatttactccatcatgggcattaacattgggaagaatggggcaccctttcacaatgcatactgccccatgaataaatctgtgactccgtccgtcaatgccggtcttcatattcccttccgccagatctgtcgctaccttaataagggcctgtactcgcatcactgttggcacttgctcccccttttacctctcctctctcc

SEQ ID NO: 159793 - DNA, 349 bp, Zea mays
  Clone ID: MRT4577_77304C.1
ccatattccttccctttcaatccatgtatgttcctttccccaacccgggcggcaagaaaattaaaaccaaccaacccagaagccccccaccaaccattaaagaaaaaaaaacccaactgtttttaccccaaaaaaggtggcggagagacccccccttagatcaaaagaaaaacaggggggaggcgacctaacgggagggctaacaaaacacccgggccggggtaaaaacgggatcctccaccaccagccggggaacggccccgaccacacaaatacagcaaaggggggtaaaggggaccggccctcccccaggaaagaggggggggaaaaacccaactatagggccccc

SEQ ID NO: 159794 - DNA, 446 bp, Zea mays
  Clone ID: MRT4577_77305C.1
ctcccgcgcattcgctttgttgtgttagagatttgagctctattcgagtcgaggactccctgtgttgtcaattgagctcgagtcttcacttgtgtgcgtggttgtgctgcgatttgagtcttgtgtgcgttgcttctcccaaccttactccgtgctttcattgtgatctttattgtaagggcgagagactccaatatgtgaagattcctcgcaaacgggaacaatcaactaaaagaaaagccgtggtattcaagttgatcatcggatcacttgaaaggggttgagtgcaaccctcgtccattgggacgccacaacgtggaagtaggcaagtgttacttggccgaaccacgggataaaaatcacgtgtctggtgttgctctatctatgattatttgtgttcacaagaactcacttcaagctacttagccatactaacacttataact

SEQ ID NO: 159795 - DNA, 277 bp, Zea mays
  Clone ID: MRT4577_77306C.1
cggggtatttaccagaccacatcagaaaaatctggagaagattttgcgttgagttggataacacgagctaacctgtggtgggccgacgagtgaaacaagattgtgcatgcggaggaacaggaaggattccggctatacgacggcggatctaggggaggaggaccaggcggaggaactgactgaggagggcgacgaggaaaaggaggaacagaccgacgagggatgtggtgaggaggacgcaagtgcagcgtacacaccctagcaagaagctgtggag

SEQ ID NO: 159796 - DNA, 419 bp, Zea mays
  Clone ID: MRT4577_77307C.1
agagcatcaaacaaaatgtgattaataaactagctacgatggagtacgtgagtgttcgattatatatagcctgctaaaagaagagattaacgcctaccgtaccactagcatatatgccatgtttggtgttgatgctgatgaagatgaaatgggatcccaaaacatattacaaagggaaaggatctctcatccgtcttgcagctcttgcaagctgtatgccttgctggcccgttcctcagctaggcacactgcggccatcgtcgtcgttgtcgtcgccgccggctatgggcggcaacgcggcgagcgaggtggtcgacgcggccctccggacgacggagcagcaccggagcacccgccgccgcttgttgaacgggttctccggcttcgccaggtcgcgggcgctgtccaccgccgacgcc

SEQ ID NO: 159797 - DNA, 248 bp, Zea mays
  Clone ID: MRT4577_77308C.1
ggccggggactctttctccacctcccccggcgataccaccaccaccacagtcctctcccccgcaacgagttccttcccggagcatgaaaccctaaacctataccccactcccctccccgagccatcctctccccccgcgccgatggccaaggcactggtctactcctacctcctccccgaggtgccaccaactgtccagagaacaccacgccatgccgcaacgatggtgctgactcccgccgaccacg

SEQ ID NO: 159798 - DNA, 7593 bp, Zea mays
  Clone ID: MRT4577_77309C.1
atggccggttcaagggatagctctgatatttctccaagcaacatcatagagccgacttgggaaaccttgccggctgacgagcagctccagttcgaggagcacaaggagcggatgatccaggaggcgaaagcaaagttcttggccaacttcaaagtggacaggaacaacaagatcgtccgacatcgggcgacggatccggcttcgctccaacccacgccagatatccccaatgtaagtaataccaacgatctgcaatctcttagaaattatgtagaagatcagcgtgaacaaatgcagaacatcatagggggtatgcagagcgatcttaagagactagtacgtgcatttgataaatctagtaccgcaaattttccttcgcacgaggttgagttaggagataacgcgtgtaacccatcggctacaggttgtcacgaccagtcacaacccctttatgggatgccgatggacacataccctaagcaaccgcaaatcggcagcaaaccagccgatctgcacatgcccggaccatccgcacgtgagcgcggaccgtccgggccagcaacagtcgggcctatttttaatgagttacctaggtatgcgcccgagccaccacacatagcacaaaacccaaactacccagacggacggcccgcatataaccacggacggtccgggtacgtatccggacagtccgcgcatgagtcttttgaggaggattattacatgaatcctcgtccgtcccagcaacacttcccatcacactatacgatgcaccagcccattaattcaggatccagagcccaggaaagctttccggccccacctagaaggccggaaaggaacgatcaaacctacgagccatatagggcaaatggaaatgcaccacgtagctcaaaccagtggggggaacgacaacataccaacatgcaaccaaccccacctatgtttgaccagagagccggtggtcttgcaccgactgccattgatatagtgagggaagaaatagccggggcgttccgagataagctcggagtaagcatggtccctggggggcaatcatatcggaaaccttatgacagccgatttgatcaccacccatacccacagggaactagaatacccgaattcgcaaaattttcgggtgaccaagggaaaaacacgcgtgaacatataggccagttcttagcacaattgggagaattggccgacacagaggcatttcgcgtacgtttattttcattgtcgctaacaggaaccgcgtttgcatggtatgccactttacctcctaattccatttcatcatggggggatctagaacaaaaatttcatgatcattttttctccggtgactatgagttagatttggtagatttagtgtcgttgcgacagacaaaagatgaatcggttaatgattacatccggagattccgcgatacaagaaaccgatgctttcaaattcatttagcagaaaaacagctagtaggattagcctttaatggtttacgatattatttaaaagagagattagaaggcatccaattttttacactagcacagttacaccagagggctttggcttgcgaaagccggagcaaagaaactgctaaaacaattcgtcacaacgtacatgtagtagaatgcgatcaaagtagctcagaagacgaatcagcagaggtgtatgctgctgaaatggtttggccaaagcaggccaaattttcggcttgtgcctccttacagccggttcaaaagaaacagcaagaggaggttaagtttacatttaatgttggtaagtgtgatagaatatttgatgaattacttaaaaatggcaacattaaaataaatcacactgttccatccgccgacgagctaaaacgtcgtgcatattgcaagtggcataactcattttctcatgccactaatgattgtaatgtattccgtcgacagattcaatcggccattaacgaaggacgattgaaatttcaggaaatgcaggtggatacagagccctttccgatgaacatgattgacttcgagggcaagaaagtcctagttcggccaaacacagtcgataaaggcaaagagacaatcatcggcaatgctaaagaggccgatggggatcgtaaagtttcttgcaggaaagtggtggccgagaagactcccgatggaggggagaccctaaaggtgaccatcacagcctccagtaccggggggcaagcgcggacagggagacagatgcaggagcccgtgctgcgtatcccggacggtccggcacgtaggcgcggacggtccgggaccccaccggacggtccggagagctccggcggacggtccggtcgtactcaggatccacaacgtccacgtactttcaaaccacgacgaccagagataggtacgtggaaaacaaatacatttaaagcagctggtcggttggttaaagccggcccaacttttgatcaattattgtctaaatacgtaaaaaagaaggccggccccagtgaccggccagcaaagcgaccccgctcacccattcatgagcagcgccaggtcaggccgattggaccaccccaccaatcggaagaaatgaaaggtcatactatacaagtgagacctaacatgcctgcatggacacctccacctccatatccacctatgccatatccgtacacatatttacctccgccatatatcccaaatcaaatgtggggcatgccaccatatccatttgggatgccacagtatcccgcctggggggcaccccaaacatctgttttcaacaggttgacgccaccagtacaagaccgattgagcactgctcaatccggtcaccaggcacaaacccaacaggattgccggactactcggcctcctaggccgaccaatccggcaggggggcatatgcctgcaacaaaaaaggacatcatcaaaataggcactgcagatgttgtcatacaagaagataataaagggccgatgattttcggcgaatcggccaacacaaccgaaaaggatacgactaccatcaaaacagtcgatccaaaatactccatgcctcgatggtgcccagcgggattgacacgatcccaaaagagaaaattacagcgcctaagagcaaaggagagccaggagaaggaggcggaaaagacatttaatgacacacatccactatacccgccaccgcaaaagaaatggagaccgaaggccgttgagaaaaaacaaacggccacagaaatagaaagtcaatctgcaccaggcgcggaccgtccggcccctgtgcacggaccgtccgccgttcaccaggaagtctctggacaacctgcactaggcgcggaccgtccggcccccgcacgcggaccgtccgccgttcaccaggaagcctccaacgacacgacaacatcaatggaagaggacgacctgctgagagaagacctggtcgactacgaggcttctccagaacgcccaggtatggatgtaaatattattacattttctgccgattgtactattatcggcgacgatgaacctgttgttgcccagtttgattttggtcctaaagaagccgcctttactaaaccaaaggaatcggtaaatcatttaaagccgctcttcgtgcgcggtcacattgatgggataccgattgctaagatgttggtagacggaggggcggctgtaaatctaatgccttattcattgtacagaaagtttggtaaacaagatgacgaacttgtcaagaccaacatgaccctcagcagtgttggaactgatagttcgatcaaagccaggggagtcacgtccgttgaattaaccatcgggactaagacccttgctgctgcattcttcgtcgctgatgtagaaggaaattacagtttaatcctaggcagagattggattcacgccaatcaatgtataccttctacattacatcaaatgctgatacaatgggtaggcgatgacatagaacaagtacatgctgatgtatcggcctgcatcgctgtggccgatgcccctgtactctggacttatgagactgctacatgtctcacaggagtagacttttctgattatcaattcataagtatagataagaaagttcatgagtctttggtcatggacagttcggccgccaaggccggatggtctggtctttcacaaaagagttcggactttaagaccgaacatctaccacagcgaaataacagtattacggatgatccggtccccgagaccggaaagtccgccatcacacaaagatcatctgattcctctgtgggggacatgatagaggaattcagagatcttgataaactaggacaggggtttacatcggccgatcctttggaggagattgacataggagatggtaaaactccacggccgacttttgtaaacaagaccctggagaccgattctagaaatgagatgatcggtctattgaaggaatattcagattgctttgcttggaattatactgagatgcctggattaagccgagagatcgtagagcatcggctgcctattaaacctggtttcagacctttcaagcaaaaagccagaacatttcgtccggatcttctcccacgcatcaaggacgaaatccaccggctactggaagctgattttatcagaccttgcagatacgcagagtgggtctccaatattgtgccggtggagaagaaggagacaggtaaacttagagtatgcattgattttcgcaatttaaatagagcaactcctaaagacgaatatcccatgcccatagccgacacattaatcaataatgcatcgggaaatagaattattagcttccttgatggtaatgccggatataatcagattttcatggccgaagaagatgcgtctaaaacggcctttatatgtccaggcttcattggtttattcgagtgggttgtcatgacatttggtctgaaaaatgctggtgctacttatcagagggctatgaatttgatcttccatgaattgttaggaaacaccgtggaagtttacattgatgatattgtagtcaaatcggctgagtttagttctcatatagctgatttgcgcaaagcctttgataaaatgcgtcggtatggtttaaaaatgaacccacgtaaatgtgcttttggagtgtcggctggtaagtttttaggatttgtcatccatgagcatggtatagaaatagaccctgaccgaatcaagtctattcggaatgtggggcctccgacgtgtaaggtcgaagtgcagaggtttctcggcaaggtgaattatttacgaaggtttatttctaacttagccgggaagattgatgccttcacccctatccttcggcttaagaatgatgctgaattcacttggggggcagagcagcaggaagcatttgatctcattaaaaaatacttgtcttcggctcccgtgttaaaagcaccacaagcaggagcaccattcagattatacattgcagctgaagacaaggttattggggctgttctgacacaaggaactgaggggaaggagcatgtggtgacatatctaagccgaaggttggtggatgctgaaacaagatgttatttactgtctagccattgcactgtttctggtcaagccgatgtaatcaagtacatgttgcataacccaattatgagtggtagaattggtaagtgggcttatgcactcatagaatatgacttggcttatgaacccttgaaatctatgaaaggccaagtcgtagcggattttattgtagaacatcgggttaatgatattcatgaactagacatatcatacctcactattactccttggactttatattttgatggatcggtttgcaatgaagggcaaggaattggcattgtgcttgtttcaccaagtaatgtctcctttgacttctctagccgattgaaaacgtattgcactaataatcaagctgaatatgaggccctcctattcggtttagaactgttaaatggtatgggagtaaaacatgtgaaggtatttggtgattctcagctggttgtccaacaagtgttagaagaatatcaatgtcttgatggtactctaaatagttatcttgagaaatgttggagcataatccattcttttgatgaattcagtattcagcatatctctagagttgagaatcatagggctaacaacttggcacaagatgcatcgggttatcggataaagagagggaaatttcacaaaactgaaaatctgataaccagtgcagagccaaattcccaggtcgcggaccgtccgcgtgttgacgccggaccgtccgaggttaccagaaaggttctcttaatcgattcggctgacaatgaagccgatacaagtgattggaggacacctatacttaattatttgcaaaatcccaatatcaggacagataagaatattcggcgaacagctttcaagtatgttttgatgagtgatgagctttaccgccgaacggttaatgatgtcctgcttaaatgcttgggcccagatgatgctatattagccatggccgaagtacatgaagggatttgtggtacccatcaatcagctccaaagatgaagtggttgttgcgaaggtctggtttttattggcctagcatgacagctgattgtttcaagtactacaaggggtgccaagtgtgtcaaaaattcggcgacctacagttggtccctgcagccgaattacatcctatcatcaagccttggccattcagaggatggggattagactttattggagaaattcatccttcatcatcaaaggggcatcggtttgtgttagttgccactgactatttcaccaaatggactgaagccgttgctctaaagaacatgacgcacaaggaggtaattgagtttataactgagcatattattcatagattcggcattccccagaccttgactacagatcaaggtacttcttttatgtcaaaggaggtacgtgaatttgctgaattatacagaattaagctgcttaattcgtctccatattatgctcaggccaatggacaggccgagtctagtaataggacgttgattaatttgataaagaaaaaggtatctgataatcctagacattggcataagattttgtctgaagctttatgggctcatagaatatctaagcatagtgctactaaggtatctccttttgagcttgtctatgggcaggaagcagtgttacctgtggaaataagtttgaatgctgtcaggtttgccagacaaaatgatctaactactactgattattataattcaatgatggacaatattgatgaggtgaccgacaagaggatgatagctttgggagcaatagaaaaggacaagatcatggtagctagggcctacaacaagaaggtcaaagcaaaatcattccaagtaggagacttggtgtggaagaccattctgcctctaaggaataaagaccgaaagttcgggaaatggtcgccaagctgggagggtccttataaagtgaaacaggtgatgtttggtaacgcttatttactacaaacattacaaggcaaagatttacctaaggctttgaatgggcgtttcctcaaacagtaccatcctagtatgtggcaagatgcctaa

SEQ ID NO: 159799 - DNA, 300 bp, Zea mays
  unsure (1)..(300): unsure at all n locations
  Clone ID: MRT4577_7730C.1
cacntcctattgatttttttttcacattctgagagtgacaaaaaaccaaaggagggggaatgacatgcccgggtagcatgaaagtgcccacctaatacaatatagggggggggcacaacttatcaaaagagcgacatgaacataaacatggtccaactagacctgcaagggcttagctaacagaagaaaaaaggggcatgcaccctccctatgacaaggagagaaagggactgcttccagaataacacaagctggtacctagcccacaagagcaccttcaggaggaccctgaaaaagacc

SEQ ID NO: 159800 - DNA, 265 bp, Zea mays
  Clone ID: MRT4577_77310C.1
gaactcaccaccgggctagcaacacattactattgaccgaactacgctgcagaacctttggattaaatgaatcacacactgagcagtgccaacagcagcacctgttattaacggcgacactggaacaatttttgagaataaaggcttaccagttgtgagatccaagtcttcaaacacataccctggacacattaacgacttaaccagctcatttgtattgcttgtactacacattatcgtgaggccacaacactgtattttcaat

SEQ ID NO: 159801 - DNA, 513 bp, Zea mays
  Clone ID: MRT4577_77311C.1
ttttttttttttttttttttttttttttgttttttttttttttttttttttttttttttttttttttttttttttttttttttttcaaaaacgccaacacaaccgcatgggtttaattcttgccaaccccagccatgggggggggggggcaacattagcaaaaacgggggaaacaaaaaacaaggggggccaacgggtatcttcgtggccaatggccaaaggcaaaaggggaacattcagtattacaagccaggaaagggttatggatatttatggggcccttaatttttttcggacggggggacacagggattttctaggaaacggggggccagggagttttgcacgcagtcgcgggcccaacaaattagccaacggacccctcaaggtaaaggggcaggggggggcccacctccggggggaaatcaaagggagggggctcgaaaaccgatctggaaaaaccaccaaaaagggggggaaacagcccttttaaaaacaaccccctttgggggg

SEQ ID NO: 159802 - DNA, 395 bp, Zea mays
  Clone ID: MRT4577_77312C.1
ccttttcttccgcccacgcgtccgcctttgtctgtttgttgctgcaacatttcgagctctgactggacagcatacacagctactactccatggcacatccacagttgtcagccaagaatacgtagaaatacatacatacggctctgcttgaagcaagaagcggtgctctgctaaggcgctaagctgcttccatctcgctttatggcttgtcgcgcaccagcttcgcttgtaaccacctttaatttgcccacataatcacatatataatagtacgtactactacccgttgtcgatgcttgctttgtactcctcctacctacgaggctacgacctcgtagtatgtgcaaccacgtgctgaatcatgcatgcctagatgcctacgtaccacgcgattc

SEQ ID NO: 159803 - DNA, 121 bp, Zea mays
  unsure (1)..(121): unsure at all n locations
  Clone ID: MRT4577_77313C.1
gttnaaaggaaatattaagcggttgattaggaggaattaacagggttggagagaagggctaatggagtagagtattcaggtagtcaaaaccaggcatggctggatctggataccaaaggtg

SEQ ID NO: 159804 - DNA, 357 bp, Zea mays
  Clone ID: MRT4577_77314C.1
acctttttcttttcccgccgcaaggagaggtaagtgcaggttacatattatagaagcgggagacgcctcctaaagctactcctgccaagaaaggtgatgccaatacccatgccttgaaggatgccaaggttttgaagtctgttgctttctagattaagaccaagaagatccgcatcgttgtgacatattaccttcccactaccctgtataatgcttgtgaccccaagtaccctccaattaactctaccgtgaggaacaagcttgatcagtaccaaatttctaagaacccctttaccacagaatcaatcgatgaagaagattgttgttaacaacactctgggctttattgttgacctt

SEQ ID NO: 159805 - DNA, 414 bp, Zea mays
  Clone ID: MRT4577_77315C.1
ccccaagttgtaagaaggaggacggggctttgcacgcgcgggcaacatggagagaggtgatgctctcctcgcaccattatgtctgaggaccgacttatcagcgctccgtacaacacaagaggaaacgacgcctacaaacgggggaagcggctgttctggccgcgaggaggatcatccactgggacgctacgggctcgctgcgaccctgccgacatggagcgcaaggtaggtcgccagacatccgccgcgctttcaagacctcaatcaacagttccagaacaagtgctctcacgaaccccagacgatatgattggtatgtactacagaaaaggacgtaggacgaaagaggcggatataggacgatgaggcttatgatagcatttagatcgcgaagaatgtcagacaaagaaactc

SEQ ID NO: 159806 - DNA, 235 bp, Zea mays
  Clone ID: MRT4577_77316C.1
agagagtcgatcgtgaggtctcatacacttatacacatgtatgcttagtacacatagatgatgcaacgttagctcaattggatcgcggcagacgctcgatatacacgcgactacgagactatggactctgttagagtacgtgattctctacactcgactgatcgacatgaagagctctatactacagattgtagcaagcgattgcgacagagcttctatgaagcacatctatatc

SEQ ID NO: 159807 - DNA, 209 bp, Zea mays
  unsure (1)..(209): unsure at all n locations
  Clone ID: MRT4577_77317C.1
ctacttcgactacatcgccaggaccggtgggctcgtcatcacgctgctcacttcgcccggcaaggacaagcggcctctctacgttgccaagaacaatgacgccagatggaattcaattttcagggaagaatgcgggctgttttccatgcagaggcgctgccgcggagccgccgncacacagaccgcttgtttttgccgctcccgatgaa

SEQ ID NO: 159808 - DNA, 3160 bp, Zea mays
  Clone ID: MRT4577_77318C.1
ttaattcgacacgaggctggtctcgatttttttttttttttttttgagaaaaagacagaaatatcacttatggagtgttctgccagggaaccagctcttgaaaaaatacaatattatccagtgattatatgattctggagtactcctgaagaaacaaaatggaaaagaaaaggccagatggccgatagcaaatattggacaaaagtagcttcgttttcgtacagctagctacaacctacaaggcgacggcaaaaaagaaaagaaaagatatggactgattgagtgttccattagtgtgacttgtgtatatttgggaacagcccatgaatatgctccggtatgaaatcgtgcctcgtcaggattccaacaattggaggtctccctggggtctttggcacaacgagcatgtgcctgagtcccagtgcccggaaaaggacggcagccttcgcaagtgacatggtctctaccaccgtgtacggtgatgtatttgtaattggatggagatcgacatacaagtccatttcctcatcagtgaaatccaggtcctcaatcttcaggcctttccctgagcctggcttggcaaaatcgaaggcaccaaatctttccagcacgaagctaccgctggttttcatcttctctttcataaagcccttacctttcagcaggaccagcagatgggatctgagcacaagcccaacaagttctggagcctctgatagaggtggctcatcgaccactggaaatccgttgtggcctgtgatcctcaacgcctgaacgatattccccactctctcgacgcctgaaaaggagatcagtggcccagacacaacatcgctagcaaccaagtgcgtcatgtatggttcggcatgagcttccaggaatggcaagcctttcatcaccacaatctgatcataaacccctttgttaaagctgtcggctatggtctttgatatcagaagaacgagcatgactaacgggagcataaggaggtcattggtgagctccagaagtatcacgcagactgacacagtcatcctcattgttccaccgaggaaagatgccgcgccaagaagtgcgaatagtccaggatcaaggtctgaaattggaccaagaagggtccccactatgcgcccgtacgtagccccagcaagtataacagggatgaagagaccagatggaacagcaataccgtatgtcacaaggccaaggcagtaaatcgcagtgaagaacacaaaaagagtggacatgtggaactcattctcggtgccactgctgaatagattgcggatggcgtcatcatttgtgttgaagaacaacgacgcaagaccattgtaatagcccggcgggcactgaaagttcttaaaattcccagagcggccaatggtagggcattcctccacagcatcagcagggcacggagtgcatggggcgagccaaggtagcccataggagcatgctgatgtgatgattgatattgtgacggtgagaaggatcttgtatggagcacctctctcgttgataaaactataagctcggagaatcctatccaagagaaagttgaacaggcccccgaagaccccaccaattattccaaggacaataattgcaatgatatcctgggtactgtaactcggtacggttgagctaagatcaaacataatcaaccctccctgaccaaaaagaccacattttccgctacgacagaactggatcaaacccctcagtacaacagcaacaacagcagttgtaaagaatgttctccacaggagagcacttcgccaccatgatgctgcttcttcaagagcaaagagcacaccaccaacaggcgcacggaatgctgctgcaactccagcagcagagccacaagtaatcaaatcccgcctatctctatcattcttaaagtatctgagccagttacatgtcagatggtacttgcgtgaccccccttgaccaagtaagttggcaatgcatgctcctgtatgtaccatgggaccttcctttccaaggacaaatccagctgaaactccaagtattgaaccaaatatcttcacaaacagtgtgcttggagctaatatagcataagcatcaactccattaaggtatgctttaacttcagggataccagacccagcagcagcaggtgctatgtaagcgcagatcgctgcagcagcagctgccaagactagattgcaacctccatatgccagaaatgctgtgaagtacctatgcttgagcatcagatcacttgtaagcaacaacttgaacccagcaatgttttcaactgcaaggttattgaagaagccaacaagtccagtacacaggccaataagaagaactaatgaccatttcagaacaatatactggaatatctgctgcttctttcttgatcgccaatcctgcttgaaaaggtcattttccacaatttcgtagtcgaggctctcgatggggcagatgttggcgccgacgatggcaatctgggaggtggtgttcatggtgcgccttcgcagcagcggctcccggggcccgtcgtcgtcgtaccgcagcagggcctccgacgatgggtcctgctcctgccacgcccccgcgccgcgccacgtgccgtccgtgctctcgatgtcgtagttgaagctgccatgatgcctctccggctgcgccggcggcgagtggttagcgtccattattgccgtccgcttgggtcgtggcgtcgctcacgctgccgctgcctcgtcctgcgcttctgcctggactagcaatcccggttggacgggcgaactgatccggccgccacaagcatggatcgtcgtcagctatacccggggaattctccgcgatcgatcgatgttctcttctgaatgcgtcttcctggtcgaccggggctgtcgctcggcctgcagctcgcctccgtcgagcccgtacgtccgccgcctcgtgctccgcctggggctggaggacgacgaaggccgagaggcctacacggcgggcaccaggtccaggtgggtgggtgtgcgtgaccttggccgcggggacaactcgagaagcttccaatccaaaccaaatagaacgaggggaaaaaaaggaagcgggagggggagaaaagaagagaggatgtgggcgtgcaacggtgcgaggggtggatttatgccctttctttactttctac

SEQ ID NO: 159809 - DNA, 384 bp, Zea mays
  Clone ID: MRT4577_77319C.1
tcgtttacgtgagccctgacccctgacaagaacaccaggtcagatccgatcccagctacacggtcaggctcgagcgatccggacgaataatatcaacccacgtgcaacaaggtaagctacgaatctgaactctatgaatcttttactaacagggacgctcaggtcaagaaagggtcagagcatgaggctcttcttttggaattatcagagttcccaaaggaagagcaagattgggtttgcattatgtttcttaccacataacacctctccgaggacgagcatatgaggcaacaaggctttattctgttctggattctcaccgactatactttttgtgtctgcaaaaacacatcgtcgatactatactgttattgatgaacaagg

SEQ ID NO: 159810 - DNA, 200 bp, Zea mays
  Clone ID: MRT4577_7731C.1
ggtcagaacactggctgatcaggccgaaactttgcctttgagaacgtgctcaagacgtccttaagacggggcatgcccgggcattatatttttatgccaacactgttcaaataacctacacaaaataccggctgagacctgaaaagagaaagggttcttttgcaattagaaaaggggtaaaaaagggtgtcaggggggta

SEQ ID NO: 159811 - DNA, 221 bp, Zea mays
  Clone ID: MRT4577_77320C.1
gctcttgttacaactttgtttgggttaggaacccaaaattgtgtctcgaaaaaaaacccaagggcatgaggctggaagataccttaggttttatttcccggcgggaggtcaatatataaccccccccccggggggtggttccgctaaccgttagactcccctgtttctgatgtagcttccccgcaaaggcctaagcctgtgatgggggaaatcaggctttg

SEQ ID NO: 159812 - DNA, 381 bp, Zea mays
  Clone ID: MRT4577_77321C.1
tcactgactagcaatgtaactgatgataatgcggagaaagtaagatcaatattgaaaccatttgttcatatacataatggcaatattcttcgaactcttccaggactcagggagagtgtaattattttgaagcctcttccccttcaaaagagtatcattaaaaaggtggaaaacattggttctggtaacaacttcgaacatgaatatgtcatttctttagcttctacacacccttcccttgtaaccgccattaacatgtctgaggaggaagcttcacttattgataaacctatgcttgctaaagtgagatcaaatccatatgaaggggtaaaaacaagatttgtgatcgaagttgttcgtttgtctgaagcattaagagag

SEQ ID NO: 159813 - DNA, 804 bp, Zea mays
  unsure (1)..(804): unsure at all n locations
  Clone ID: MRT4577_77322C.1
actcacaccgagctttccttcgacccacatgctacacatcgcaaacagccacagtcctagttagcagccctcactcgaagacacacacacacaccgaagcccagttgatcaggccaccatgagcaagggcaaggttcaccacgactggatcctccggcggtgctgcggctccatcgccgcctgcatcctcacgctcgccgtcctcgtcggcttcgtcgcgctcgtcatctacctcgccctgcacccctccaagccctccttctacctccaggacatccagctccgctccatcgacctcgccgatccggctctctcccttgacgtccaggtgaccatcgcgtcgcggaacccgaacgaccgggtgggcatctactacaagaccctgcacgccttcaccacgtaccgcgacgagccggtgacggtgccggtgtcgctgccggcgatctaccagggacacaaggaccagtcggtgtggtcgccggtgatgtccggggactcggtgccggtggccccctacgtggcggacgccatgaagcaggacatcgccgccgggcacgtgctgctgcacgtgaaggtggacggccgcgtcaagtggaaggtcggcagctgggtctccggcggctaccacatcttcgtcaactgccccgcgctgctctccgccagcggcggcttccgtcggcggtgccttcgccatgagncgccacggtgggcggcaagcagaccgtctcgctcagttcacgcagccgtcctactggcaccgtcgacgtgtgagtgacgcggacgcacgtcgtctcgccggggcga

SEQ ID NO: 159814 - DNA, 546 bp, Zea mays
  Clone ID: MRT4577_77323C.1
atggccgcggctaaggccgcgctcaccggagacgggggccgccagccgccggggcctcgcccacgggccgtcggggccgcacccgcactgccaggggaccgcgcgcccgccccgccgggggaccgcacctgtgaagccgggggccgcgcacccaagcagccgggggccacgcgcccgggcagccgcgcgcccgcgccgcgtgccggggtgccgcgccagcgtgccggggccggcttcccgcgccgccagggaaggccggaaaggccgcgagcctggccccgccccacggggaaccgtcggggccacgtgcccgcgtcgaggcctacggccgccgtgccgcgcccgctcccgcgcgtagaggccgcgacctgcgccgccagggccgccgtgccggcgtgccgcgcttggccgccagaaatggccgccgccaccgggagtatggggttcaaaccccaactgtctgctaaaatggccttcctagttgggccttcatgggccgacttggcagcagctggacagattgggtctgcgattttatcattttag

SEQ ID NO: 159815 - DNA, 387 bp, Zea mays
  unsure (1)..(387): unsure at all n locations
  Clone ID: MRT4577_77324C.1
tttgtttgntttttttttttgggtttggtttattttttttttgggagggttttttctttgggacccttggtttaaacccggaatatttcttaccggggccagcgggggaaccacccttaaaaaagggaggggaacaaaaggggggccaaactttgccaaaagggggtcccaagaggaaatgggtatcccttgacaattcctcccacccatggggaaccggaagcccaaagaaaaaagcccggggggccaaaggggggggccaaaaaaaaaaaacgggggggggctaaaggggggatttacaaaaaaaaaaaggggggggccccccggcttaaaaaaaaggccaaaacccgggggggggcgttttttgaaatgaccccccaccgggcg

SEQ ID NO: 159816 - DNA, 255 bp, Zea mays
  Clone ID: MRT4577_77325C.1
caaacatgcctgatattttttagaacaagaattttaaggaaaaaacacggaaaaccaacaatcatcagataaaagttaaacggttctagcatgggtgcccatataaaaagggcaagagcatatttcacgaagcaggacctagaaaatttgtgacggctggtcctataagaccaccaaacttgttcatgactggacggggttttaggtagaaagggggaaaccctccacgatcacccaggaactggtcaacgccgc

SEQ ID NO: 159817 - DNA, 348 bp, Zea mays
  Clone ID: MRT4577_77326C.1
aaagcgaaaccagagccattgcctacacctttaccttaacctaatcccgaacctaagccaggtcctaggcccgatctctaaaataaaaccaaatccaaaacctgaaccaaaaccagatcctaaaccagatcataaacctgagccaaagccagagcctaaacccatacctaaaccagagccaaagccagatccacaaccaataccagagcctaagccagagcctaaacccgaaccgaaacctgatccaaagccagagccccaacctaagccatagcctaagcctgagccataaccataaccaaagccagtaccacaaccaaagcctgaacctaaaccagaaccaaaacc

SEQ ID NO: 159818 - DNA, 2753 bp, Zea mays
  Clone ID: MRT4577_77327C.1
aattcggcacgaggcacgagccgccgccaggagaccaccgcgcgccccggcccttcttcacgcctccgtcttccgcgcctggccacggcccaccgccgtccgcccttcgacgcccaggcaaggcggccgccggtagctacggacagcccaccgcatccgcggcaccgcccaccggcagcagcggaccgcccaccgcgcccaccggcaacagcggaccgcccaccggcagcagctaccggccaccgcgcccgcggctctgtacccagggagtagcctatcatggggaagaggccgaggacaactctgcggcgcacgccagcacggggccttccaaagtccaagcgggcagacgagctgccaacgatgcctgattctgacaacgacgaaattgatgcattccacaagcagcgggacatgatccctttcgacgctgatgatgtaagggagtcggaggatgatgatgtggagcagcccgtgtttgacctcaagggtgtttctgatagcgaaagtgatgacagcaaaggagaattgtccggtgacatggctgaagctgattatgaaggatgggacaaagggtatatttcgaaattaaaaagagcacagagggctgtcaaagaaattgctggaggtgatgatagcatggatgagcaggaggatgaaacacaagaaaatgtttggggcagaggtaaaaatgcatactatgctcctggtgaacaatctggtgatgatgaggtggattacgaggaggcacaaaggatacaaaaaattaaggaaaaaaggctgtctatgaaggattttggattagaagatggtgaaagtgatgaagagggtaatgcaacaaaggtatccaaccatgaatccaaaatgaaagaagactttgctgtcttatcaggcgatgagaaaatggatgtgctatacagttctgcccctgaactcgttagcttgttgtctgagttgaaggatgcccatgaagaacttagggccataggacagctaacaagtgaggtcacgtcttgtctaggcaaagataaaatgcaaccttttgaagtgaagaaagcttgtttgcttgctcattgtcaagctattaccttctacgcgtccgtgaaatctgaggggttgtccgtacaggatcatcctgtaatttctcgcttgatagagaccaagaatatggtagagaagataaagcaaatcactttgaatccagtgagccaccaagggtccgcggacgcgtgggcggacgcgtgggtggcaccatccaaacagataagatagtctcattggacaaacaggagggcaaatttagcaatgtactagcactggataaagtgaaacaaggtgctgaagtctctgaatcaagaaagagtgagccttctaataacgattatcatgaagttaaaatttagaaaagaaaggatgaacgaatgggcttgcatagccttgaaatgttgaaggtaagagcaaaccttgaggaaaggttaaagaaaaaagggctctataatttgacacgctcgaagccagagaagtcgtcaaaaaccaggacaactagtgataaaagtggcctgcagacattggatgattttgatgatgaagtgctgaagaataaccaaatgatgaagcctagcaagcttgttgcagcagctgctaaatcaaataaaagcatgtttgtttctggtgatgatgaccttccgaagagagataatatcggagaaagacggagaaaacatgagcttcgcgtcctatcaagagtaggggctaactcagcagaggatcatgagctgccagatggtgacgcttctgaagaggaggaccaccatgagttgccagaaggtggtgatgaatctgaagacgacatccatcgggatgtcaaaagaaagaggactgaaaagctatcaaccaagaatgctctgtactcgccaactccgggcgttgaacatctggaggaagaaacagaaggcgatggcaagaggacgatttcgtatcagatcttgaagaacagggggttgactcgttccaggaataagaagaagaagaacccgcggaagaactacagggataagcacaagaacaagcttgtcaagcggaaaggccaagtgcgtgatatcaagaagcagtctggtccgtatggaggtgaaacgtctggcatcaacccgaatgtcagccgcagtgttcggttcaagagttgagttggtgcaagtagtatatttaggttggacatggaaggagttatttgtggtcttaacttggcattttctttattttttgtttgcatgtcattcgaacgcataaactccagaatttgtcttacggtattagatgagtacaattttgcttgcgaaagaagaaaatctccccgttgcctgcttgagtgaaaactaggagataacaagctagtaaagcggtaagtccaagtgcgtgatatcaagaagcagtctggtccgtatggaggtgaaacgtctggcatcaacccgaatgtcagccgcagtgttcggttcaagagttgagttggtgcaagtagtatatttaggttggacatggaaggagttatttgtggtcttaacttggcattttctttattttttgtttgcatgtcattcgaacgcataaactccagaatttgtcttacggtattagatgagtcaattttaatgggaaattgtgtatattatttcgaccccatatatattagtaggggctgtttatttagataaaaaaaaaaaaaaaaaaaaaaaaactcgaggaagggcgccggtacc

SEQ ID NO: 159819 - DNA, 331 bp, Zea mays
  Clone ID: MRT4577_77328C.1
cgacaagcgagtccacttccatcccaaagcctagtacctcatggcgctcacgccagggcacacaccacagacagagccatcccgcgaaggcgcgcgcccgatcagagcccagcgtgggacggatcaccaagcgcgatacaccaggccaaactgcaccacgcaacgagcacgaagaacaacaccacggcactggtgcagatgagacgcacgcacacgctgcgggacgccagagctaggcacgagcctcagatacctccgtcgaaacagaatatcacataccccgacgagctgcgcgattaacgactacaggaacggcaggagctagaggacg

SEQ ID NO: 159820 - DNA, 134 bp, Zea mays
  unsure (1)..(134): unsure at all n locations
  Clone ID: MRT4577_77329C.1
tgtgctgngattctccttaaccgggcccccgccgaggtaccgtatgctgtagagcttataaagctatagccattttaccatctcattttggtattctagttacaacgcatcgtccgcctatcatcatctcctgc

SEQ ID NO: 159821 - DNA, 179 bp, Zea mays
  Clone ID: MRT4577_7732C.1
ccccgacctccgtactaccttacatacattttttccctttcagccttccaattgctcgtgtagcattatcatacatttctcgacttactcatcacttcttttatacaaccaaaatgcctctctatagagcatttcgacatcaacactattatcacatatccatcctatgttaacattac

SEQ ID NO: 159822 - DNA, 1535 bp, Zea mays
  unsure (1)..(1535): unsure at all n locations
  Clone ID: MRT4577_77330C.1
gaaaatggatgtgctaaacagttctgcccctgaactcgttagctgtttgtctgagttgaagnatgcccatgaagaacttagggccataggacagctaacaagtgaggtcacgtcttgtctaggcaaagataaaatgcaaccttttgaagtgaagaaagcttgtttgcttgctcattgtcaagctattaccttctatctccttatgaaatctgaggggttgtccgtacaggatcatcctgtaatttctcgcttgatagagaccaagaatatggtagagaagataaagcaaatcactttgaatccagtgagccaaaaagggtgcgctgatgaccatagtatgcattgtggcaccatccaaacagataagatagtctcattggacaaacaggagggcaaatttagcaatgtactagcactggataaagtgaaacaaggtgctgaagtctctgaatcaagaaagagtgagccttctaataacgattatcatgaagttaatgaagagaagaacaaggatgaacgaatgggcttgcatagccttgaaatgttgaaggtaagagcaaaccttgaggaaaggttaaagaaaaaagggctctataatttgacacgcttgaagccagagaagtcaaaaaccaggacaactagtgataaaagtggcctgcagacattggatgattttgatgatgaagtgctggagaaataccaaatgatgaagcctagcaagcttgttgcagcagctgctaaatcaaataaaagcatgtttgtttctggtgatgatgaccttccgaagagagataatatcggagaaagacggagaaaacatgagcttcgcgtcctatcaagagtaggggctaactcagcagaggatcatgagctgccagatggggacgcttctgaagaggaggaccaccatgagttgccagaagggggngatgaatctgaagacgacatccatcgggatgtcaaaagaaagaggactgaaaagctatcaaccaagaatgctctgtactctccaactccgggcgttgaacatctggaggaagaaacagaaggcgatggcgagaggacgatttcgtatcagatcttgaagaacagggggttgactcgctccaggaataagaagaagaagaacccgcggaagaactacagggataagcacaagaacaagcttgtcaagcggaaaggccaagtgcgtgatatcaagaagcagtctggtccgtatggaggtgaaacgtctggcatcaacccgaatgtcagccgcagtgttcggttcaagagttgagttggtgcaagtagtatatttaggttggacatggaaggagttatttgtggtcttaacttggcattttctttattttttgtttgcatgtcattcgaacgcataaactccagaatttgtcttacggtattagatgagtacaattttgcttgcgaaaaatatcattatcaccgttgcctgtgtgtgaaaactaggtggtatacaaggaaatttgtatattatttcgaaccanctatatattagtaggggctgtttattt

SEQ ID NO: 159823 - DNA, 826 bp, Zea mays
  unsure (1)..(826): unsure at all n locations
  Clone ID: MRT4577_77331C.1
aaaaccttagtttatatatgtatacatgtttcgggatggtcatcatgctaacatagaacaatgcaatctagctatgaacaatatatatagcttgtttgctgatgtgagtgtgcccttgtcttgtactacattcttgaatatttgtcggccgtatgtataagtttatctttaaactaaaacacgaaaaagaagtatgtgtttttttggtctccgacaacatttcacatgtatgccgtatgatgcatgcattataattcttcttcacctgtgcctccatgtgtcgtctctttcactcagtgacttgcttgtcgactactcctagctagctgcatgcgtggtgatgatgatatgcatcagcaggtgagctcagcgtgcacggctgctctaagctaaggtcgtccaggctccagaggccgccctcgaaataccctatcccaaagtcctgcagctgcaggccgatcatggacatggagctgcagtcctcgtgagggccgccggtagcggtggtggcgagaagctctgaccaagtcgtcccggcaaacacgtcgtcgtcaccggcggcgtcactcggcgttggcccggttcttgcatcggcgccgcagtggtgcaggacgccttgttggtcgtctgtcgtcggggtcgccgtggccgccgaggtgtaagcgtaagctgcagcataatgcgacgcgtcgtccgccgtgagcgacgacgacggccgcagcgcgctggacgcgtcgtcggggctcagggccgtggccgtcgccgccgtcgggcctgccggctcgctgtagtattggtggtggtggtgagctcgctncgccgccgg

SEQ ID NO: 159824 - DNA, 408 bp, Zea mays
  Clone ID: MRT4577_77332C.1
gattcccccatacgattttgggttgggccagtgtttcagctcgtctatcttgcctaggcaccgtcatcttatccgtcgtcacgcggatggaggcagtcaactaccagcatcagcggacggccacagagatcgaccaacaccccccactggctgttgcctgttgcctgttgccggatggaagcggtggcactgaagcgtgggcaaacttgcctgcatttctttcgttaaagcactagaacatcgggcgcccaatgcaatgcaatgacttcaaaacattgggtacttactgtataaatcaaccaaaaaaaaacatatcgtaccaccactgcctctttataaataaacagccttatttgaagtgcatggcagcacggcagaaaaaaaaaaaaaaaaaaggcccctagggcc

SEQ ID NO: 159825 - DNA, 299 bp, Zea mays
  unsure (1)..(299): unsure at all n locations
  Clone ID: MRT4577_77333C.1
acgcggccttagcgtgaaaaaaaaacgaggaacaaagctaaaaaaaaaaaaaaaaaaaatttaaaaaaaaaaaatttaaaataaaaatataataaaaaaaaaaaaaaaaaaaaaatttttttccttggccgggcccccccttggggggatttctgcgggtgccggccccctggggggggcttgggcctgcttttggggggccccgttcgcccttttggggggcgttttccatttccctggccggggttttccaacggngggtctgggaaacccctggcgttccccgcgtgtttcgtctt

SEQ ID NO: 159826 - DNA, 556 bp, Zea mays
  Clone ID: MRT4577_77334C.1
tcgcgatctagaacggattgacacacttctccccttgcctttttctttactcaactgaattgcaatgtgaaactgaaaattcgtatgatggtagatccttgagtactacctttacagttgttttagaagttttcatattatgttttaggaacaaaatgatagtatttgtcatgatagctagtgtgtgatctgctcatctgcattatgtctcatggaaatgtacatcacaaattatagcttattgataaaaattggaaggctggatggatgatacctatgacctaggaaaatattgttttcatctgccacttctcttcaaaaagcaaacgtcggtttactgcttttacttttcaacacagaaacacacatcggtatctgggatagcaacagtgcacagactctgagagtaacaattaaacagatgcaatttttatggtgtggccattttgtttgcatggacattttttctcttattttttatacaagatgcatgcagaagaatgagttagcattgtgtatcagaagattgatgctggtctatcagcagctgctaaca

SEQ ID NO: 159827 - DNA, 575 bp, Zea mays
  Clone ID: MRT4577_77335C.1
gtggggggggggtgttttttttttttttttggagactaagttattttttacttccaatagctatttagcaacttgctaaacatgattttaacaagctattttttagagaactattggagttgctctaaggggaagttgttgcggcttcctcccgggaacgcttgggacgaggttatacctacgaccacgaccacgctagagtcttctggggattacatgcaataagaaggcgccagttgccagcgctgttatgctctttctgcgggctactaaagctgcaattgactatgtagactgcacagcggcaggcgctgccactgcaagcttcttgctgcttgggctcttgtcatcggccttcttggcaccttcggtagccttgccaggagcggcgggttttgaccctgaagcagaatcgggctcgtcgtcctccaggaaaaccatctgttcgccgacacctccctggttctggttccgggttcttcccaaagtccaagcagagcgttgctaagcccatcaaagtagggtacttctgggcgccttcagaggatgcaccggtcacactcttccataccggg

SEQ ID NO: 159828 - DNA, 585 bp, Zea mays
  unsure (1)..(585): unsure at all n locations
  Clone ID: MRT4577_77336C.1
ccctgggcccggcctggagggcccatagggggaatcctttacaactaaaaaaaggggtttttttttttactcccccccccccattttttacggccccccgttaaaaactcaggctttttgggaaaggagggggggggggcacagaacctatttagttaaacggccctagaaacagggaaaaggggtttgttcttggaaagaatcaccccaaaggtttaatccaggctaactttcccgccacggtttttttttttttgggggcccccccagccaaaagggaccagggggggggggaccatgatcccctgggccggaagcgcaaatttgcccccggggaaaatccggcccccaaacccaaaggggaggaccctgaagcccgggccgttgaacctgtggaacttgccccacccggggggcaggaccctttcgggaagaaactcctggggtttttcccaaaccggggggtttttgccgagggcccaccctttaacaaggacccccgtgttggcgggaatgggccacccgtctattgggcacccgggggggggagaatgggggcncccccgggggccccccggggggggg

SEQ ID NO: 159829 - DNA, 394 bp, Zea mays
  Clone ID: MRT4577_77337C.1
cctacccccgcccgtcaaagcgagagcgccgtatcacctgtccctccgtccaccgccgtctcgatccgcgcccaaagaacccgtcggccggtggcggaggggataacccccagcaccagcaggctgcgccggcgccggcgcgggggagaaggacgacggcgcgtgcagagatctggtcctggtcgaggatccggaggtcctcgccgtcgaggatccggaggaagctgcagcaaccgcagcactccaggaagaaatgaaagcgcttgtggcatcgatccctgatggtgctggagcagcattcacagccatgcagcttcaggagctagagcagcagtcccgggtgtaccagtacatggctgcccgagtacctgtgcctactcacctcgtttttccg

SEQ ID NO: 159830 - DNA, 1036 bp, Zea mays
  unsure (1)..(1036): unsure at all n locations
  Clone ID: MRT4577_77338C.1
ctactccatcttctcgtgttgttcggcgcacgcggagacagcccgcgatcccgatcccgatccttcttcacgcgaatctcgacgatcccccccttccttccttcaagatgttcaatctttgtgggtatggatgatccgacggataaccccacatggttatggatataaagaccacctatagatgcgggtcaactagcttcccaatagtccggtaatgtgttatgtgttactatcctagtgttgctactatatccaattatctatatctatgttgttcttgaatagatgattgaatgatgctagaaattttgtaatagatatacttgacatttgtataatgtagatgtttaatctttgtgagtacggatgatccgacgggtaactcatacctatatgagtaatctatacccatcagtagatataagtgacccaatgggactattttttttatcttaggtatgtatatgagatagataagagatcatagtgctcatgtacgccatcaatgccattttttaaatgaacaacatttgaagccttttccatgagaaagagaaagggccaaagtggaactaagatatttatagaagtttcttattagagcaacttcaataggaaccctaatcacataaacaaattaaaatatagagctttaataagaaaagacagctacacaggagccttattttaatgaaattcgtgtaaacttgaagggtagcatatttggatctgagatctgcagccctatatggttcgcgctcgtcccaaccaccttggatattttcgctttcttcaaggtcagcttcgtttccatcgccgcatcgcgtgtgccaaccccgctcccatctcgactgtcaccgtccgaagaactgatccgttctgcacaaccgctcgtccctctccaaatttcttgcacccgccctcntcaaagttgctgcactcgtccctctccaaagttcctgcagattcacttctctccaagttcgggaggatgtgtggtgtgacagcgctacaacaaatctgtcaacggggactc

SEQ ID NO: 159831 - DNA, 194 bp, Zea mays
  Clone ID: MRT4577_77339C.1
tcgtcgtctctcgctccctcggtccttccttcacccatctcacccgcgaccgcccttccctaagcatctctctctcactcgcatgcgtctcttatacttcagagcaaggaagcatgcctctagaaggacggcttgagcatcggctacttacggtctcgaacgagactggacggtagatggtggccggagattga

SEQ ID NO: 159832 - DNA, 446 bp, Zea mays
  Clone ID: MRT4577_7733C.1
caaaaaggattaaacccatcctgctgcaaaaaagtttggggtccaacacaaaggacccaacggggccattaaaccaacgaagccccaaccccgattcatgacacaaaacccacagttgttttttaaacgacgacaacccaaatccccaggtccagcagcagtttaaaaaaaccatggtttactgaccaccacgggggcggagcaccagggggaaagggccctccttctggatgttgaagcctgctagggggcaaccatcctccaattgtttgccaaaaaaaataaaaccctgttggtttggggggatcccctttttgcccgggatctttgccttcacgttgtcaatggggtcggacctctcaacccccagggttttggtcttcccagcaaaggttttaaaaaaaatctgcataccacctcggaaggggagcaccagggggaggggg

SEQ ID NO: 159833 - DNA, 380 bp, Zea mays
  Clone ID: MRT4577_77340C.1
catcaagcaacatagaaagtggcatactttagcatcaatagagcaacaatggcggccatggaatattccatccttacgttcagagctctttctgcatgtgttgctaacgcgaccatcatatctcattacttacaagctactatagctgccctttttgcggcatccttacattaatgaccgcttcagtttgcgagatcccatgcatttaaccgtacaggctccaacacgtctatctagcacgccatgttacctgtatgacctgtgtggtttcaatcaatggcagccttatatctggtgcatgtcattgatacagaccatcacggcacaccagctgcatcaactcgtgctaccagtgatcagccaagtagctctggcaaacc

SEQ ID NO: 159834 - DNA, 1531 bp, Zea mays
  unsure (1)..(1531): unsure at all n locations
  Clone ID: MRT4577_77341C.1
aattcggcacgaggatagataagagatgcaatgctcatgtacgccatcaatgccatttttttaaatgaacaacatttgaagccttttccatgagaaagagaaaggggaactaagatatttatagaagttccttagagcaacttcaataggaaccctaatcacataaacaaattaaaatatagagctttaataagaaaagacagctacccaagagccttattttaatgaaattcgtgtaaacttgaagggtagcatatttggatctgagatccgcagccctatatggttcgcgctcgtcccaaccacctcggatattttcgctttcttcttcgccgccaccggctcccattccaccgccaaggtcagcttcgtttccatcgccgcatcgcgttcgcgtgtgccaaccccgctcccatctcaactgtcaccgtccgaagaactgatccgttctgcacaaccgctcgtcactctccaaatttgctgcacctgccctctccaaagttcttgcactcgtccctctccaaagttcctgcagattcacttctctccaaagttcaggaggatgtgtggtgtgacagcgctacaacaaatctgtcaacggggactctcatcctcttgctcatagaaagaactgcagtgttacaggtaggtaattactagagtactactactaagtccctactttatgggcttagcacgctctgcttggatttgggaagaacccggaaccagaaccagggaggtgtcggcgaacagatggtaagaaatggcnatgttggagaancactatcccaaacgagaaatactgcgaacgtcacatgcatcgtggccgcaagcgtcctgtacaggttttcctggaggacgacgagcccgattctgcttcagggtcaaaacccgccgctcctggcaaggctaccgaaggtgccaagaaggccgatgacaagagcccaagcagcaagaagcttgcagtggcagcgcctgccgctgtgcagtctacatagtcaattgcagctttagtagcccgcagaaagagcataacagcgctggcaactggcgccttcttattgcatgtaatccccagaagactctagcgtggtcgtggtcgtaggtataacctcgttcccagcgtctgtgggaggaagccgcaacaacttccccttagctgtcaactgaaaatttcactctttaggtgtatagtttgatttagctttgtcgcggtaggcgatgcggcatgatattataaatcctgcctgaactgacaagacaaaatcgaattgtgacccaagaagccggcggaagaacttgtgaaattgcattggggtgctttttggtgtccgcctttattgggctgtgcgcaattgtgtgattcatcagttgtataacgaagtgtaagatccataattttatgccttgtggaggttaccacctgatgtgcagtgattatgtcattatgatgatagtagggcaaatgtaattggctgattgaatgacaaagcctgtttattgaaaaaaaaaaaaaaaaaggccccta

SEQ ID NO: 159835 - DNA, 284 bp, Zea mays
  Clone ID: MRT4577_77342C.1
ctcccatttcatggattcttaagctcacagagtcagtgaataacagtaagggattcagatctagctcgttagctgcacagtggagttcttctccagagtcttcccttgtctgggctctggctggaactattcctcagccaaatcctcgcccagaacagtgcttcctgtttctccagctgagaagtcgccctttcagtttccttcttccagcacggagtacactgctctgcctccacttagattacttcagaaatgaaatgcagcagatatttatccagcagtgc

SEQ ID NO: 159836 - DNA, 1179 bp, Zea mays
  Clone ID: MRT4577_77343C.1
tatctagcattcacttgaaatggttggccatactttcatgatttataatggttacaatcattacttatttacataataaatcccacggagtctggtatgttagtcttgaattgaccaaaaaatggtgagaacaattatacaaccaatgaatttgtaaagcccttactcatctgaaagtagttagtagttacatccgctcaggtagagcttatatatagctgcataatccattaggattttgttaacagatgaaacaagaacttgctgtttctaaactttgaagtcagctggtgcctcaaatgtttgcaccgcaaatgtttgtggcagaagaacactgctcttcatgagttatgtaccaaactgtgaagccactgtcaacaaaatgcggctattttcttagtggagcaccaatagcttcctgttaaccttatatctgatatgggtttagattaatcttcctttacttgattggttgattcttgaggaagattgtatagaagcaatccgagcactaaggtagcaacaccaatcaaaaaagatgcgctcaaatttgttccttcgggtagatatggtagaggcagtgacagtatatagatggaaagaggtactgctaaagttgatgtcagcgaagcaaccactgctgtagacatcttcacaagattaaggacagaaatgttgaaggccatgttcagagttatgtagagaagtggtagcaaaggagctccatggcaatccttcagattccctcccacattcagaaagcatgcagcaccacgggttaggtatgcagggagttcagcaaaaggaatccctttcaagttagagagaaatggaaggagtaggaaaataaaaagtgcctggaaaccagaaccaaaagagttgactacaaatatatcaggccggacgccctcaaggcgttttgcaccatcaatgaaaacaaactccttgataatggaagcagcagcttgaaatgcagctgaaatctacttaatgctgcccccccccctttgacttcaaagagaatcggaccattactggctccaccggccactgctagaattactccagctgtaacaagcaagcagccaaggatctgatttgctctatatttccttcccaagatgagggcagataagataagccccccccccccccaggactgtgacaacactggaatca

SEQ ID NO: 159837 - DNA, 865 bp, Zea mays
  unsure (1)..(865): unsure at all n locations
  Clone ID: MRT4577_77344C.1
cattgggtacctcgaggccggccgggatgcacatctaccacaaacgcccattgccatcaaccccaccaccagcagcagacagcagaggcattgttagttccgaaagcacacgtacctcacattagctacttccagccttcgtccaggacacgagaggaaaccgcagccatggccaacaaccgcacctacgaggagcatacccccgccgtcgagtggagccgctccgccgccgaggccgacgccgtcaagatctcgctcccagggttcaagagggaggacctccgcgtgctggtggacaaccacggccacctgcggacgcgcggcgagcggcacctcaccggcaacaggtggatccgcttccagaacgacttcgagcttcccgccaactgcaacgccgacggcatccgcgccaagttcgagaacgagacactcaccatcacgctccccaagaagaccccctcgacgcccatgcagccgccgccaaggatgcccacggcggcgccgcctccgttgcagggccaggggcaggggcttccgccggcggccaggcctgccgcgccgaccccggcgccgctggctccagctgctccttccgtgaagccgcccgccgagtccagagcgtcgatgccgaggaagacgtacgatcctgtgccggcgccggcgccggaagtggaaccgcctgcaaccacaaagccccagccgtcgctgggggctgttcagaggctgaaggaggaggaggaggagaggaagagggaggaagaggggaagatggnncgagacaggaaggagatggtgcatgagaaggacacgcagcaggagcagcagccaatgctagcagagacgatggcgttggcgaactgaagcc

SEQ ID NO: 159838 - DNA, 427 bp, Zea mays
  Clone ID: MRT4577_77345C.1
cccacgcgtccggacccacgcgtccgcctatctttgccccctgagtctcttagcattctgtggtctatgctcagtattttaaaagttcatttttttgcatatctatgtggcatcaattaccatatgtattgtggcatgtatggacttctgcttatttttagaaaataatgctcgcttgactgaatagataaataatactcactccattttttatattttgtgtgttttagttcaaaaatggactggtcggacgattaatattccagaacagagatgatatatctgacccatacatactttgatgtaacaacttggttttatgcttcttgcgctgatatggcagcttgacttcacaccatttacggtgcagatcattgtcatcctcaatgactgcatgcgtcctttatattagttatcgtgcatgatc

SEQ ID NO: 159839 - DNA, 1091 bp, Zea mays
  Clone ID: MRT4577_77346C.1
atggccaacaaccgcacctacgaggagcatacccccgccgtcgagtggagccgctccgccgccgaggccgacgccgtcaagatctcgctcccaggcaagcagtcccttggctcctttccagcctggagcgatgatgggttcaagagggaggacctccgcgtgctggtggacaaccacggccacctgcggacgcgcggcgagcggcacctcaccggcaacaggtggatccgcttccagaacgacttcgagcttcccgccaactgcaacgccgacggcatccgcgccaagttcgagaacgagacgctcaccatcacgctccccaagaagaccccctcgacgcccatgcagccgccgccaaggatgcccacggcggcgccgcctccgttgcagggccaggggcaggggcttccgccggcggccaggcctgccgcgccgaccccggcgccgctggctccagctgctccttccgtgaagccgcccgccgagtccagagcgtcgatgccgaggaagacgtacgatcctgtgccggcgccggcgccggaagtggaaccgcctgcaaccacaaagccccagccgtcgctgggggctgttcagaggctgaaggaggaggaggaggagaggaagagggaggaagaggggaagatggccgaggacaggaaggagatggtgcatgagaaggacacgcagcaggagcagcagccaatgctagcagagacgatggcgttggcgaacctgaagcccaggcaggcctccgcgaggcaaggcatgctggtgagcgtggcggtcgcggtggttgtgctgcttgggttcaccgtctacgtgtggcacagcctgaggaacgccacgggaggcgccggcggcgagcacggccacggacaccagctgtggaccggtagctacggcgacgagatgtgagcaagctagctcgaggtgtggcgtggcgtgagtacacagtacatcgaagtggaaaggaagcaatgcaagtgtgcgtgtgtatatagttatacacgcacacgtacatacacatatactacatacatgggaggctcagtacatgcactacatactctactcgtgttgatcgtttatca

SEQ ID NO: 159840 - DNA, 367 bp, Zea mays
  Clone ID: MRT4577_77347C.1
ggggaaaatgggggggggataattttgggatttacacatttttttaagggggggggggatttcggagggggggggttaaaggctaagctaaggggtggggaaaagggcttccacgggggggggtttgggaactaaactacacttttccgggggggaggggtttttccgggagatcaaaaaagggattcccctttccgggaagagggggaacgcattttttttaagaaaggaattaaggttgggtttttttaatccggccccagagaaaatgggccattaaaacattactaggcaggtgggaatcaccatcaccctttgatctggatgggatggtgaacaaaatatcctttggtttgccataaggggg

SEQ ID NO: 159841 - DNA, 334 bp, Zea mays
  Clone ID: MRT4577_77348C.1
aaacagaaggagaatgtacacacgtgagcaaccataaagtcctggaaatgttcgccgggatacaaccaggttacaaacggcatgattcataaactgcaaaataatttatgcacaagacacatggtgaaagatcccaagagacttttcaccatttttagggggttaaggcagcacactaagcgcggcggctgacccatcagcgaacgttcctagtaatggggagagtggcagctaccctcgcccttaggaaagaccaatccatacatctcataatcctcgtctagcgcatccatgtactcaaggggcgtatacaactaacccagctttataagat

SEQ ID NO: 159842 - DNA, 117 bp, Zea mays
  Clone ID: MRT4577_7734C.1
ttaagtaaatgccttgtttcattctaaatagcgaaggacaacttatagggcggcccgtccacaaacaaccaccttctacctatatgcatactacttttcactatatacagtctacta

SEQ ID NO: 159843 - DNA, 172 bp, Zea mays
  Clone ID: MRT4577_77350C.1
cagcctacacctatgtctcgatttcctttcccgatcaccccaaccccccacctgggaggtccaacaagttattgttcctggtgcccacaactatcccccgcccccaactacgaacccacccacatatccatacctccgtccctcccttcaactacaaacagcacccactaag

SEQ ID NO: 159844 - DNA, 221 bp, Zea mays
  unsure (1)..(221): unsure at all n locations
  Clone ID: MRT4577_77351C.1
caacgaatcagctcnaggcacgggggggatatattataacaaggggggcaccttgtactcagacccacatgatatttctccaaaagcacctgcttctaccattcctagaagcttggctactagctttagctaattttattctgtgccttcaaaaacaagtgaaagaggcttattgttcaactacttaatatccttaattttattcatttcacttaatgcta

SEQ ID NO: 159845 - DNA, 291 bp, Zea mays
  Clone ID: MRT4577_77352C.1
gggggcaggggaaactttttctgacctgtatttatgtgcagggtaatgaccggttatttttatttaaggaacattatgttacaacacattctgggatgtaggggggggggggacatgcgggaattcaatggaaaccatttttggggaaggaacaccgcaaaaagctcaaggacaagagggcaaccatgggagcccacaagagggcattcccccccttggagcttgaccccgaggagggattgccagccccctttggcgccggggagttggggggtgatcacaagtttaact

SEQ ID NO: 159846 - DNA, 343 bp, Zea mays
  unsure (1)..(343): unsure at all n locations
  Clone ID: MRT4577_77353C.1
cggggcgagccacatccttactcccacccttccnaattaatccttatataatttaacctcctttncccccacaanggcaacaggtttttttaaatgcgggccgacctcctctttctcttaatcctccaattccctcaaaaattccccttcccttataaaaacaaccacctccttcctatccactttcttcttttctttttcccctaaaaaaaaaccccacccctatttctttaacccttcttttattccttcatttcctcccactatttacatttcctatccacctacatttcctaccctttcaacttttatccccatcaatccacgcccttttttttaattt

SEQ ID NO: 159847 - DNA, 229 bp, Zea mays
  Clone ID: MRT4577_77354C.1
tcggggcggccggcgggggagaaaccctccagggatgatcccctcggctctggagacgcccgggtgaggcaagcagagctgggctacgttagctcattgatctaggatctgcgggcgctgagatgatagctgacgggaacaccgatccctgctagcgtatggagccccatggacactgcaccgcttggcacggcttcgtctgtcgagggcgtacctgcggtctgggacg

SEQ ID NO: 159848 - DNA, 339 bp, Zea mays
  unsure (1)..(339): unsure at all n locations
  Clone ID: MRT4577_77355C.1
ccggtcncnncggtctttgcttnntctcaacnntacnngattcnnttattactttccanacgcttttcnnngaatttctgaatcgactcggccaggagtggggnngcacggttgctttccgggcgaaagttgcattcacttttggaagcgtttggtgaaatgggaatcnaatgaagctnnttggagtacnctcggcnnagagttctttacggtggnnntccccataaccgaggggagagaanntattaaataacccaccanncagttgaaagaacccannaagagttttcatttatgcnncacgagcttgaggggacaaaaatatttgcaaagagtttt

SEQ ID NO: 159849 - DNA, 443 bp, Zea mays
  Clone ID: MRT4577_77356C.1
cgggtcggccacgcgtctaatcgacatcatctctctccctgtgatgctcagaaccatcggcctcgcgggtgtatttggctcctacgccttcgtctgctgcttgtcgctcgtcttcgtgtacctcagggtgcccgagaccaaggggttcccgctcgaggtcataatcgagttcttcaacgtgggtgccaaagctcagaagccggagcagcatgaagaggaggagaaccacgactaacccgtatatatttggattcattaataataactgttttttctttctttctttctttctttctttctttctggattatgagttgaatgaatgatgtcgatcagagagcttgatgaccatcatgttagcgatcccatgaaatatgtttgaggacgcatttggatgtttctatataggctagtcgcttttctcgttgttgggacccccaaaa

SEQ ID NO: 159850 - DNA, 684 bp, Zea mays
  Clone ID: MRT4577_77357C.1
ttttattatcctcctagggttcaatctgggcgagatcgtcgccggatcccccgggcggttctcgtgctgggacggccaggccgggcctcgatccgtgggcgccgccagttcgagtcaaattccccatctcctctgtgcttgagttcgtcgcgccaccacgatccctctagcccacacactggactttgataaatagtctctggctgctgctgctgactggagtgatgaattcgaggccgatcgtgctcgtcttcctcctgctcgtgctcatcatatcatcgcagttcgagtggaagcagcagatcggtgaggccgaggcgagtcccgaagctacgcggcggaggcagcaaccgctggtcgtaagggaagatgccgttaaagagaaaataatactggcgcaggagaagaacatccagcagctcaccgagctcatccagagcctccaggttcagctgctgcattgtcgtggcagcaacagcactgctcatggcgcctcctcgaatcagtcttcagccagttacgccgaagcggacaggcatcagataatcgatgactgatgacccgtcaacatgcccaggtactttgcatcacagtacaaccggctcaagggcacacacctgaatgatatatgatagacaccatcgttgcggaccactatgtagtgccctggagtctagggagctt

SEQ ID NO: 159851 - DNA, 1200 bp, Zea mays
  Clone ID: MRT4577_77358C.1
ttcggcacgaggtggacagagatggtcggggccgacggcgtgagacgcggtggcgtcaagaggatgtacctacatgaggaaggcggcggcgatggggactcatcggacccggcagggggttacgtgcacgcggcggcgctggtgagcccgtccatcctctacaccaaggacgtgctcatcgggcagagcccgaccccggcgttcgacagcccgccgccggagacggtggccaacaaggcaggcggggggccctgttggagagagctcctggagccgggtgtcaggcgcgcgctcttctgtggcgtcatgattcagatcctgcagcagttgtctggcatcaatggtgtgatgtactacacgccccagatccttgaccaggccggtgtgagcgtcctgctctctagcctgggccttagcgccgactccgcgtccatcctcctcagcggcgtcaccatgctgatgatgctcccttgcatcgtcgtggccatgcgcctcatggacgtggccggccggcgctcgctgctgctgcggaccatcccggtgctgatcgtgtcgctggcggtgctggtgctggcgaacgtggtgcccatggcggccaaggtgcacgcgctgctttcaacggcctgcgtggtcgtgtacttctgctgcttcgtcatggggttcgggcccatccccaacatcctatgcgcggagatcttccccacgcgtgtcagggggatctgcatcgccgtgtgctccctcaccttctggatctgcgacatcatcgtcaccaactctctccctgtgatgctcagaaccatcggcctcgcgggtgtatttggctcctacgccttcgtctgctgcttgtcgctcgtcttcgtgtacctcagggtgcccgagaccaaggggttcccgctcgaggtcataatcgagttcttcaacgtgggtgccaaagctcagaagccggagcagcatgaagaggaggagaaccacgactaacccgtatatatttggattcattaataataactgttttttctttctttctttctttctttctttctttctggattatgagttgaatgaatgatgtcgatcagagagcttgatgaccaaaaaaaaaaaaaaaaaatttgcggcctttgagcgcaaaaaaaaaaaaaaaaaaaatcatgttagcgatcccatgaaatatgtttgaggacgcatttggatgtttct

SEQ ID NO: 159852 - DNA, 1918 bp, Zea mays
  Clone ID: MRT4577_77359C.1
gttactgcaaacgtcgcagcactatcaaggacaacaaataagcccttcagacatcctacagtctcaggggacaaactgcgtatcttgcggattgacaagagagaaagagcatagcaactaggattaggaagctgggatcatatcatcaatggagatggcaggcgccgcaggaacggaagcatggttgccgtacgtgaccacggtggcgtcctgcgccgtcggcgtcttcttcctgctctacttctacgcgccacactggcggatcagggacgtgccggggccgccggccttgcccgtcgtggggcacctcccgctgctcgcccgacacggacctgacgtcttcggcctcctcgccaagaaatatggcccgatcttcaggttccatttggggaggcagcctctggtgatcgtcgctgacccagagctctgcagggaggttggcgtcaggcagttcaagctcatccccaacaggagcttgccggcgccgatcgccggctcccctctccaccagaagggcctcttcttcactagggatgaacggtggtcggcgatgaggaatacaatcatctcgctgtaccagccatcgcacctcgccggcctcgtccccaccatgcagcactgcatcgagcgcgccgcggacgccataccggcgatggtggttcaggagaacgggcaggtcgatttctccgacctctcactcaacctggccacggacatcatcggtcaggcggcgttcggcgtggatttcggcctcacggcgagcggtcccggctgcgaggccgcggagttcatcagggagcacgtgcactccacaacctccctgaagatggacctgtccgcgccgctctccgtagtgctcggcctcgtcgcgcccgcgctgcagggcccggtacggcacctgctgagccgtgtcccggggaccgccgactggagggtcgcgcggaccaacgcgcggctgcgcgcgcgggtggacgagattgtggtgtcacgggcgcgcgggcgcggccagcacggcgaaaggaggaaggacttcctgtcagcggtgctggacgcccgggaccgcagtgcggcgctgcgggagctgctcacgccggaccacgtgagcgcgctcacctacgagcacctcctcgccgggtctgccaccacggcgttcacgctctcgtcggcagtgtacctagtcgccggccacccggaggttgaggccaagctgctggcggaggtcgacgctttcgggccgcgcggcgccgtgccgaccgccgacgacctgcagcaccggttcccctaccttgatcaggtcataaaggaggccatgagattctacacagtctcgccactgatcgccagagtgacgtctcgacaaacagagcttggaggccacactctcccaaagggcacgtggctgtggatggctccgggcgtcctgtcccgcgacgccgctaacttcgaggaccccggtgcattccggccggagcggttcgacccggccagcgaggagcagcgccggcggcacccgtgcgcgcacatccccttcggcatcggcccgcgggcgtgcgtggggcagcggttcgcgctgcaggaggtgaagctctctatgttgcacctgtaccggcgtttcctcttccggcggtcgccacggatggagtcgccgccggagctccagttcgggatcgtgctcaatttcaagaagggcgtcaaactcgtagcagttgagcggtgcgctgccatgccgttgtagcgtgtacggacggatggcaagggcttgagggtgtacggtgtaccagtggtcacttggacggttagtccggtgtaaacagataaaatgtgttccattgcttgcagtcagtgataacacatctaggcatcttgaatctcgagaagaacaataataatgttggtttgaatccaaattgatttaacc

SEQ ID NO: 159853 - DNA, 313 bp, Zea mays
  Clone ID: MRT4577_7735C.1
ggaaaaagaagggtcaacgggtccttcaagggaaacaaaagggaagggccacctgatcacaatttgcaatgccaggggcgcctggtttgggttaacggttaaaaatacatgaatcactatggggttccccagaaatgccctttggttggacacatctccaggggggggccgttagaatttggtcaaaaaccggagggctgaaattgctaccctaagaagacagggcgtcgggaattaacttggttgcaacctcctttgacagccccatgacactggtactagaaccaaccactggtttgacaaacgggagggt

SEQ ID NO: 159854 - DNA, 1625 bp, Zea mays
  Clone ID: MRT4577_77360C.1
gacaacatggaaaaaagaactttcgcgtcttcccctttccctagttggaagaatgtgctcgacacaccgggttccactcatgtcgttggttactgcaaacgtcgcagcactatcaaggacaacaaataagcccttcagacatcctacagtctcaggggacaagctgtgaatcttgcggattgacaagagagaaagagcatagcacctaggattagtaagctgggatcaatggagatggcaggcgccgcaggaacggaagcatggttgccgtacgtgaccacggtggcgtcctgcgccgtcggcgtcttcttcctgctctacttctacgcgccacactggcgggtcagggacgtgccggggccgccggccttgcccgtcttggggcacctcccgctgctcgcccgacacggacctgacgtctttggcctcctcgccaagaaatatggcccgatcttcaggtggcaaagccacaacgataagatcgagacttgatcttgcagaatcgagtgctctatttcagcacttcacctagtagatgttttcatcaggattaaaatgggaatgaggtttagccatggctgcaggttccatttggggaggcagcctctggtgatcgtcgctgacccagagctctgcagggaggttggcgtcaggcagttcaagctcatccccaacaggagcttgccggcgccaatcgccggctcccctctccaccagaagggcctcttcttcactaggtgacttttagtttgttcgttttcctctacacatttggaaccacgagcaggtgcgccacatagcattgcgatctcgtcagggatgaacggtggtcggcgatgaggaatacgatcatctcgctgtaccagccatcccacctcgccggcctcgtccccaccatgcagcactgcatcgagcgcgccgcggacgccataccggcgatggtggttcaggagaacgggcaggtcgatttctccgatctctcgctcaagctggccacggacatcatcggtcaggcggcgttcggcgtggatttcggcctcacggcgagcggtcccggtcccggctgcgaggccgcggagttcatcagggagcacgtgcactccacaacctccctgaagatggacctgtccgcgccgctctccgtagtgctcggcctcgtcgcgcccgcgctgcagggcccggtacggcacctgctgagccgtgtcccggggaccgccgactggagggtcgcgcggaccaacgcgcggctgcgcgcgcgagtggacgagattgtggtgtcacggacgcgcgggcgcggccagcacggcgaaaggaggaaggacttcctgtcagcggtgctggacgcccgggaccgcagtgcggcgctgcgggagctgctcacgccggactacgtgagcgcgctcacctacgagcacctcctcgccgggtctgccaccacggcgttcacgctctcgtcggcagtgtacctagtcgccggccacccggaggttgaggccaagctgctggcggaggtcgacgctttcgggccgcgcggcgccgtgccgaccaccgacgacctgcagcaccggttcccctaccttgatcaggcaagtgacacgacaatgcagcgtcacgtgtaggattag

SEQ ID NO: 159855 - DNA, 496 bp, Zea mays
  Clone ID: MRT4577_77361C.1
aatccaattaaactagacatatgtttccacgttgggaattaaaatgcataaaatataggtcgagggggctaaccacaatcggccatatccatacttaaaactaacttaattagtttaaacatactcgacaagtatacccattgaagctctattcccataaccttcatctcaaactggggattcactacacgaccttgactaaatcgctgcaagcgattcgggtatcctaataaatattatacctacaactacaacacacatatgctacgagcatgaggaccgacgtaattaatatatccaaaccatcaatcaaacactatctgaaacaataaatcgacttatcattacctaaacccgatttgaaatcgtgagattgacgacgatgtccggtgggaacatttttcagcacaccatggaagcgacggatgggattcgttttttttttacccagatttccctagatttttttctcgcggagtactgaacaataacgaat

SEQ ID NO: 159856 - DNA, 1500 bp, Zea mays
  Clone ID: MRT4577_77362C.1
acagacatcaaatatgcagccaaaggttggtagagggagcggtggtgccgcagggccacaggcgggtggtaattatggcggtggccgtggaggaccggtcggtcctggccccggtggcgcccctggtgcggccgctggtcgtccgcctcgagctggggcggccgcccggcatgggcccccccccgcgcctccgcggggcgcggcgggcccggcgggtccgggtccccgcccaaggccaagtgggggggtgcgcggcgcccccgccgcccgtctgcccgccgggtcccgtgcaaggggcgccgcgccgccgcgctaacgcgtgcgcccgggggtgcgaacgcgtcgtacaccaccacgtgccgaggccgccggccgggattccctgggctgatctcgtcatttccgccggacctcgcccactcgattaactcgaatttctttggtcgggctgggatgggtgccggtggaatgtggcctgatcccaacatgggagcctggggtggggaggaacagtccagttacgggggtcgtgcagcttctgatcagcagtatggagaaggggggagccatgggaaagagaggccaccagagaggcgagcggcttgtcgaactggaggaggcgtgaaagggagaagccgggaccaggaggacgtggaaggagtcgtcgaactgagcgcgccatggttgtgagagaacgaatgacgaagtgtgagacagggaaagagaccgtgacggggaaagagaccgagaccgagatagggagagggacagagatagggagagagagagggagagggagagggagaggcatagggatgacagagatcgctatggcgattatcacaggcacagggatcgcgattcggaacgtaatgaggactgggacaggggtagatcatctgggatacgcggcaggtcaagggaggctgaccactctaagcgcaggcggatgacacctcagtagtcgtagctgggtgagctactaatgtagaggcaaacgatgatccagagccgagtcttgcttgcacactggcatggttaacagctagcatcttcttgctgcctctggctgtggtggttctaatatcttgtgtctccggcaatgtgttgtagcaagaacgagagatgaatgtctggttgggacctgttgagctgtgcgaagatggacttccctggatgatagttgctgcctcttattgtacgccatgttaaatgtctgagttttcacaaagacaaaaaaaagatctctgttttgtgtgtaattcaggaccgatgctgttgctgttgaaaactgtactatttctgctgtaatcttatgataaaccagtctgtattatgacactgtccttttgttcatcctttctcctttgttcctggttgaagttgtctcatgttttggtggctgcagcgctagttgtgttgccagttggaatattcagaacgcgagacctctaaatatactggctgtttctttggaaaaaaaaaaaaaaaaagcgggcc

SEQ ID NO: 159857 - DNA, 464 bp, Zea mays
  Clone ID: MRT4577_77363C.1
tcgagcggccgcccgggcaggtactttttttttttttctttgttctcggacttaaaacattgcatgccttaacaaccataggatagcaagccaatgctacatctttataagagtataggagttgcccttcagcctacacggaaaccaaacaactgtgccacagacccaattaaacaaatcctgaagcataattgtctcgttgcagatgaacagctcaaaagtccgaacagaactttcaattcctttcaatcttctttttacgattatctgtccaatttcttgctctacttcagactcaactaccaagcttgcaaagtattcgtcgaaagctctttgttttatttttaaatattaagttcaaataggacagattggtagcaaagtaaatggtaatcaattagctgctgtgacatcaaattatttcactgcacctcatcaaggctgcttgatgtcccaaacatgtc

SEQ ID NO: 159858 - DNA, 288 bp, Zea mays
  Clone ID: MRT4577_77364C.1
tccctcattggacttgtaacttctcatttttggggggtctttttcattattcacaacacttttttgatgggcaccacaactcgagatcaatccaaaagagggcaccacaaaggacctgcaacgggaaggaggctgccgggccagacaaggcacgtcaaacagaaccggacgattggtgacaatgtaagatggtggcggaaggcggcgacaactgcttgtacaacggcacaagcttgaactaactgaagaaggagatgcaggctcgcaacaaatggcgacatagatggc

SEQ ID NO: 159859 - DNA, 354 bp, Zea mays
  unsure (1)..(354): unsure at all n locations
  Clone ID: MRT4577_77365C.1
catcaaatggagtgaatcattcgaatntcctgagataccccattcggtgggcctttttggccggcacgtggccttactacaaaggctcccagcaggcacggaaacgggccgtgcgcttgccgagccgcctcgggcggaggccgggcgcccgggccgacgcggggttcgacccggctagaacggaccggtccaagcttgcgtcccgggggatgctaaacagaggcggattaacgccgggcccaattgagcccccagtggaaacctgtgtctaagtgcaatgcgctaacaataaaacacgccgtacaagcccattgcgtttggtggctagaaggggctgcctaccgtgggcgctcc

SEQ ID NO: 159860 - DNA, 1840 bp, Zea mays
  Clone ID: MRT4577_77366C.1
cctcgagccggccagccggcagagtctgaatggcggcgagctccactacgcctccgtcgacggtgccgggtggcgactcgcgctctggcggtacaggccaccgcgcaatgctcccgtcaggaatcacccgctgatgctgctgtcgggagtcgggacgaacgccgtcggattcgacctctcacccggggcttcgtttgcccgtcacatgtctagccaaggatttgatacatggatagttgaagtaagaggtgctggtctgagcatgcgtgaatatgatgattctactccatctggctcagtcacttttgaggatgtctctagtggtattcaacctcttaatagtacattcgaggccacttccattcagagttctggtggctatgctagtgattgtgatgaccttggaatagttgctttggatgaaccacctttacttgctgaactttctaatttttttgatcgaatctcaaaactcatggaagaggctgtagttaatggaaattttcatgagatcacagaaaaagtttctgttctctcagaaatggtagagagctctaccattattggtccagtgagagaagaaagtctacgtcttcttaagaattttcaggaccagttggattcatgggagcgttttgtagcaacacaaatggatctgacttctgagtataattgggacttcgaccattacctagaggaggatataccagccgcggtggagtatattaaacaacacagcagagcaaaagatggcaagttgcttgccattggacactcaatggggggaattttgttgtatgcaatgctgtcaagatctggttttgaaggagtttcgtcaaatttagcagctattgtcactttggcttcttctgttgactatacaacatccaattcatcgctgaagctgttactgcctcttgctcatcctgcacaagctcttaatgtccctgctgttccattgggtacattgttggcagcggcgtatccgtgggcatctggtccaccatatcttttttcctggcttaatcctcaaatatcagctcaggacatgatgcatccggagttgctggctaagcttgtttcaaacaacttttgtttgcaggtacagtgcctgcaaaggttgttctgcaacttacaaccgctttcagggaaggtgggctgtgcaaccgaaatggaaccttctcatacaaggatcatttgcgagagtgtcagactcctgtccttgcattggctggagataaagacctaatctgccctccagatgctgtttatgaaactgtgaaactcattccgaatcacaaggtggactatagagtgtttggaaagccacaaggcccgcattatgcacattatgacttggttggaggccgactggcgatcaatgaggtgtatccatgtatcatagagttcctctctcgtcatgatggttattgatttgattatatgatgctaatacagagtaacttacaacaccatgttcatctcaaaggttttttaagttgagctgaacagtcttttccatggcttggccagaaaataggtgcatgcacgaattctcgtgtgtgttgaagagagagaaaaaaacacgagctcatctgatgtatccttgtaacaagcatcggttagtgcttctctgtttcccgttttgaggaaaagttaatggtaatcttgtagaaaaagggttgaaaaaatttacagtaggcttacatgtactcccacgaacaagaagccaagatcaaagaaattgtacaattgatctcttactatgatgtaacacttctaatataatgatacgcatctcacatttccacttgcattttcatgaaaaaaaagttgatgt

SEQ ID NO: 159861 - DNA, 557 bp, Zea mays
  unsure (1)..(557): unsure at all n locations
  Clone ID: MRT4577_77367C.1
gggnnaaaagctttccgtttctccattcacacaatcacacaccactagttttccggagtgccttccatcccgcacaatacggtgggggaggaggcgacgttcctggatcggagaccgccaagggcttacttcaaccagatcaaggggtacccgcgcagaagcactggatctgcctcaagaactacttcaaccagaagcgcggcccggtgtttggaaagcagggggtcgagcactcgagcttcaaggaagaaactctggatgtggcgaagcggctagcagcagcagttgaatctcactgaacgggttctcatcgtcttggggaatcaaaatgtaaataatctttgggtgttctatggtggccaaaacttgagactactttggtctcctcagaaactagtgtcatactatgtcgtggtagtggtttgagaatggttggtccagtaattcatcatgaactatgcgtttctgcaccaagtttcttagaatgtgaagctttatctgtgcctgaaattgaatcgttactgtaaccaattgccatgatttcgcacttttggtcc

SEQ ID NO: 159862 - DNA, 429 bp, Zea mays
  Clone ID: MRT4577_77368C.1
gaactactgacgcaaaatatacatgtggggtggtccaaaattgatgcgttacaaacgcaaacaagatatagtacccttcatactgggcaattacattttggatgacaacttggccacaggattcgctacacaagcttttattttgttcttgccactcaacaaaatagcgtagaataaaagggcaggcaaggtccgaatcataactgtaaagcgaggggaagtggatcttattacagaaacgaataaataccatgcactggtaccataggtatcacctgggagggattatggttcatgaggcaattattaagcatgagaaacttctggcggtgctgcaagaccaatactaagatcatgaacttagaaccaactggtaagcttatacataactttctatacattgcgagggaataaaaaaatgcgtatatg

SEQ ID NO: 159863 - DNA, 106 bp, Zea mays
  unsure (1)..(106): unsure at all n locations
  Clone ID: MRT4577_77369C.1
ccgtccgtgcgcttcctgcctgcnntgatctcgcactctcaaactccactactactagcagcatcaggaggtgtgagaatagaaatggccagtctnnngtggaaga

SEQ ID NO: 159864 - DNA, 200 bp, Zea mays
  Clone ID: MRT4577_7736C.1
attgaaggagtacttgctgtgttggcgaaactggtttggactgggaaacagcacacttatgttgaaacagaaaatgtgcgctgtgttgatcaacctacttgaaggaggatattttctacttatcacaaacaagcagagcagtattcttgtagatctggacacattgagggtgctctccaagcatgtggctgaatactccc

SEQ ID NO: 159865 - DNA, 166 bp, Zea mays
  Clone ID: MRT4577_77370C.1
aattcggcaacgaggtcaaaccgaacaagcgctaaatatcatttgtctttgtgttccctcagattcataaatatggatcttgtgctgatcacctgctgcatagcatataatcttaaaagaacggatttaacttcggtgttcatggaaatattgtgctctaaaaatt

SEQ ID NO: 159866 - DNA, 648 bp, Zea mays
  Clone ID: MRT4577_77371C.1
ctccgagatcgcgagcggccgcgggcgattccgtccctcgaggccggccggggaaacaatccggagagcgtccgtccgtcaccttccgctctgcagcccgcaaggcatctctcgcaagaggatcgacatggccgccgcctctgccgctgctctccgcggcctcgtggtcgtcctcgccgtcctctccgtctccacgtggggcgcggtggccacgatcaacgtcaaggatacgtgctccttcacggcgcacccgaacctgtgcgagaaggccatgaccaagctgatggggcagaacggcgtgcccacgtcggcgccggcggctccggagacgtcggcctgagatcgattagctcatgcatgctgcatgcattcgccttcgcgatatctagtgtgctgtaacattattggtgtgccctgccgtgtttgatcgtccacctgagagtgagatgatggaggatcgattgcaagtttcgttgtcgtgagagtttcactagtagaaaaaatcgattttcactggcggtcctcagttacccgcctgtaaaaatgatgatttctactggccctaccactggcggttacgaaaaacgccactataaataggtttacaaccgccaaaaaaaaaaaaaaaaaaaagcggccattgcgcgc

SEQ ID NO: 159867 - DNA, 296 bp, Zea mays
  Clone ID: MRT4577_77372C.1
tttatgtctacctgcttccttctgtatagtgggtatgctactgggaggttgtgggggaggcatctgctaagaatgtacgtgatttagcttgaatgcaggtgggattcaatcaggatggaccacgggtcgtttagagcttaagcggacgacggcatttcttttaacgcaattagagttagggccgagagtgatattagacagattaatgacggcggggttgaatatggtactacacaggggacgtgcctgatgtcttgaatgggatcatagacgcgttaataatactggatggcgtg

SEQ ID NO: 159868 - DNA, 544 bp, Zea mays
  unsure (1)..(544): unsure at all n locations
  Clone ID: MRT4577_77373C.1
gntagtgtcgcgtatttttgtttgttctcgcgagggtgtcagtggccgcccaagcagaggtggagccatagtcattgcaaatggtggtgcagggtcagcaggcacacctaggccaggtccgccgccaacacggaccggatgtcaggcaagaatggtgataaagatcaccccctgccgaacataccgtgtagcaaagttttttccagagcataaccatcctctggccaatccagacagcgtgcataagctgcggtctcataaaatgagagcccgtgcacatgagcttggagcaggggaaatgcatcgaaggaagcaagggaagggtgtgcagcttggggatgttggcgcagcattgcaatacttggaggagttgcaggtagaaaatccttcagtttattacgcggtaggagtggggcctgatgggaaatccgctgtggatttctttctgggctgatgcaaaatcaataattgactacaggagttttggggatgttgtttgctttgatacaacatatgcattgaacatttatggacgggcatttgc

SEQ ID NO: 159869 - DNA, 640 bp, Zea mays
  Clone ID: MRT4577_77374C.1
ggccgcttttttttttttttttttccttaagcagctatcagtgcgatgttatttacttgcatacacggtacacggatgactagccttaggccgttgtcgatcgtcgttaagcaaagaatcatacagtagtagaagatggatgcagatccagctctcaggattacgtacagcgaaaacctgagtgatcgatggagctggcagaacacagcagtatactagtattccagaagaagaacccgaagcaaaatcgaacgttgtagtactagctagctatagctacgtaaatcccagcgtgtaggggaatgaggtggcgttgagccagatgtctccctggatgaagtcgagcgcggtgaagttggcggcgtcggcggagtcgttgagcacgtggtatcccggccacggcaccctggcggaggtatcggcgccgggccctcggttcatgtactcggcgtagtagagcgtgtcgagcgcgaaggtgtcgttccactcgagccagccgcgcgggtggacgagcgcctccaacttggtctgcgcgaagacggcgcgggagtagcgcttccaggggcggccgaggtaggacgagacgttggcgacgagcggggccaggtcggcggcccggccggcctcgaggtacccaatg

SEQ ID NO: 159870 - DNA, 347 bp, Zea mays
  Clone ID: MRT4577_77375C.1
gggccacaaattgaacaggggcggggcaattttttttcgagggaatttttttacaaaactttactttagtgccggggaattacaaaaaattactttagtgccaagggtggaacaaaacctaacacgacccttatttttacatttcagcttgaccacccaaagcccaaaacagttattcaaattttaaccaacgtttacttttttttggggtcaccagcttttgtttttttgacaccccggatttttttggccctgtttttccgctttttcatttggttgggggactttttaacctttgttgcaagaccatttcttatgaggggggtttttgggttgaacttttttgc

SEQ ID NO: 159871 - DNA, 1008 bp, Zea mays
  Clone ID: MRT4577_77376C.1
cattgtgcgcctctcgaggggccgggacggattgcccgtccacttcaatttccatcttcctgggcactccggcggaagggagaacgcccacggatccgaggaacaagccgtctttgtgggctttaggtatacgagaatgcagatcttcgtgaggagccccagcggcaagatgatttgcctcagggtccaacctgacgataccttgcatacagttaagaaaaacattttagaaaaataccaccttgtctttgaaggagtgcagatggaggataacctcacactggctgattataacatccagcatcaatccacgcttgacctccaagaaaagatgcaaatctatgtgaaggagacgctaaaaggcctaaccatcactcttgatgttgatagcttagatactattgacatcataaaggacaagattgaatacaacgagggatttcccaagggtcggcaatgcctcatctttggcgacgaacagctagagggcaagtacaccttggcggactacaacatttgcaacgagtccacgcttctccttgtcatccacccatgtacaagtacaagtgacgcaatgcagatctttgtgaagatgcaaaacggaaagaccaccactgttagggtcgacagctcagataccgtcaacagtatcacggtgaagatctatgaaatggagggcatcccacccctagaacagcgcatcatctttcgcggcaggcgtcttgagggcagacgcaccctggcggactacggcatccagaaggaggaaaccctccatctgatgctttgcctttgtggctggtgatgagactgatgccatgcatgcatgcatggtcattcaatattactactagtggtttgttatcagtaaaaagtatcattaattatagggatgccgtgtcatttagctaaaggtctttcttaccaggagagttctgtcatcagtaaaagtttttattgtggtacgtcagtgtgtgacatcttatatcaaccgttttttttatttac

SEQ ID NO: 159872 - DNA, 430 bp, Zea mays
  Clone ID: MRT4577_77377C.1
attcggctcgaggcatctgctgcagtgctcctgtcaccagtgttgttgtaatctgatgttctgttcgagtatgagaagccaacaccagcagggctctcaaggaagagcatgtttgccactgccatcaagaaattatcagtcaacacggagtgtcttgttatctctgttgacgaagaatggcccaatttcatgcatagctcctcccagagaagagcaaccgggccctgaaatttcacgaaaacaggaaaataaagaagatgcttatgattgaacaatggcctgagtttatgcaaggattgaaaatcaggcattgcacaatacagaacttcaatgaaggttatgggttgttgatactctggtaccaaattagtcatatacgtactatatcaattaagattttactggttgggagtctggagagtctaaaatg

SEQ ID NO: 159873 - DNA, 452 bp, Zea mays
  Clone ID: MRT4577_77378C.1
ggtggtgatacggggcagagtccgtggggattgtgggatatatgatattggatctggggcgcggacgcggggactcgatctctgggggggatgacatggaccgcacggtggcgttccagcgcggcgcatggagcacggagcactggcagtagtcttcctgcaatccccgctacctcaacccagatcgccgccctcgctctcgatcctcgcccacgctctccatggaaggcgaggccgctatgctcgcgtggatctatgtagaggttgagacgctctgacatgaatactactgtaagtgatactagcttaatgcgcggtgctgaaacgctactaggcgtactagaatataaagggttcagatatcacggacgttggtttgtcatacaagactaatttcgatgcttaatacgaggacaagtttacggaggagtgaagtttgaagaatgaaattg

SEQ ID NO: 159874 - DNA, 642 bp, Zea mays
  Clone ID: MRT4577_77379C.1
atctgctagagaggctctcgccttctattgtcctcggaacaacgcccagcgcccctgcagatagcttgcgtcctgtcgttgactggggatgacgcattctttcgccatgctcaagcatgcacggagcggcttaaaaggcatcgtcgtgtaccttcttgctcgacgatacgtctctgcctatctggctcccgaggatgacttcggatgtgtacacttacgattaccactgctgcctcgaacgagcatatcgacgtagcagagtggtgttctgatcttggtgcagctcgtgatgctgattgtcattactgcgaatggccaagggatgctcggcgtatcctcagcacatgcttcggccccggctatacatgatgatgtctacttgccccttctgatgaggaggaggacaatgatgatgttgacatttttggggaggacaccgactacgaaatcaaagttgttgttgatggtagtgcgattcgccgggttgctggctactacaaacaatctgagaagctctcacccttacgtgatgacaagtcatgtacagatgacactgtgatggcctaactggtagcctctgatgggattgtccatatgacatgtgtgctcggtcgagcattggatctaggcccatcttgatat

SEQ ID NO: 159875 - DNA, 309 bp, Zea mays
  Clone ID: MRT4577_7737C.1
gttcacccccaagaccagcggtgacacttgggctcgagtgcgcaattgccgtgccgtgcatgggccgactaccaaccttccgcctctagagaccgagaagagcctgccaggactttgctagttcgggcgctcttttgaaaaatgcgagcgggtcgctgttcaaccaacctaacaatacagaaattgccatcggagcacctggggtaccaaaaggatgagctaactcactatacctgagcaggggcccatacaatggtctcaggctcgtagtcggcttatactgctgcatctaactctcactccaactgg

SEQ ID NO: 159876 - DNA, 431 bp, Zea mays
  Clone ID: MRT4577_77380C.1
cgccaagagcaagctgccaccaccgcaaacacaggggcggccatgttgacattcacacacgaaaaagccacaggagggacggggggcacgcaaaaccagcgacgcccctgacaacacggagcacactaaagacgatggacgaggacaggcagaaccaggaaaccagtgcacgcgacctagcacaggggaaggaacacaaccaggaccacggtgcacacctggcggcacaagagaacgcgcacaaggggcacggagacaaaaccgtgaccataagcaccaagaagtgaagcgacagcgcacccaggcggggaggccacgaggtgcggggcatggacagccccagccggcgcaagcacgacacgcccagccactcggtgacggcgaccgagcaaaccccaaccaaggacatgtgaagcaagcacccaaaggag

SEQ ID NO: 159877 - DNA, 563 bp, Zea mays
  Clone ID: MRT4577_77381C.1
gggtacctcgaggccggccgggatgcctcttccccgcgcgctgctcctctactcacttttccatccagtcgcactcacacgagtcacgctcacacccccgtgcgtgtagccgttgacggctgtcagagcctgctcgagcggagcccgcggtcaggagctggcctacgccctcgaccaggatctgggatgtgactgaatggtgtagcatctgctccatcgtgacctggctatgacggtggcccaaccatggtcgtcattgccctcaagagcccacacattgtggtcgtcgtcgtccacatctccaagccccgcattgaggcctgtaacagcgacaccctgccgatctacgagcctgggcccgatgatgttgtttttttttgcccgcccaccaacctcttcttcagcaccgatgacgagaagcacgtccctgaggctggcattatctttgtctcggagaacacccccaccaagacccgtggccttgtagctgtcaaggctgccgacctcacctactgagagagagctgctcgcatgatcgccgatgtctccaagcctgacaagat

SEQ ID NO: 159878 - DNA, 387 bp, Zea mays
  Clone ID: MRT4577_77382C.1
ccggccgggtccgataactgtctaatgtaaacttattgtaacatgtaatcattttacaataaagaatttatttccgctgcaaaaaaaaaaaaaaaaaaaaaaaaaaaaaaaaaaaaaaaaaaaaaaaaaaaaaactgtcaccgacggattttataagccccctcccttttacatttcatggcttgtgagtgagcggttctctttgccatgtcatgtcatgtgtgagtcctttttttcatggcttgccttgagtgaacacggatgttcttttgcttccttggatttcggaagttcgcttggtgtgatttttgtaaccctgtaagtatcccctgtcaaataaagcaaagagatggttacgcgaaaaaaaaaaaaaaaaaaggcccctac

SEQ ID NO: 159879 - DNA, 279 bp, Zea mays
  Clone ID: MRT4577_77383C.1
ccaaaaaaacccatgcttatgccaaaacaggggtgggcccacaatcctgatgggaaagccaccccaagatttttcccctaacaagagggccctaatctgacagggggcaacttttatttggaaaacccagatgtgggaaacaaatccaacccggggttttttaaccggccctgtctccaaaacaaggggaacctccagggctttttactcaggggggccctttggctttttggagccctgatttttttggggttgggggggctcccttttaagcccctt

SEQ ID NO: 159880 - DNA, 581 bp, Zea mays
  Clone ID: MRT4577_77384C.1
acttcggtcttcccgcccacttccagttccccacactcgcccccatcttcttctcttcgagatgtttcttaggattgcgtcgtctccggccgccgtcgccgcggctagccagctctctgcgccaggaccggcccacggttctgcgaggctgccgccgttggcgaaagggtcgtcgacggcgacggcgtgcagggctgcggggaaggggaacaaggaggaggtgctcctcagcggtgtgatgttccagccgttcgaggagctcaagggggagctttcgctcgtgccgcaggccgagggccagtcgctcgccaggcaaaagttcgtcgacgaatgcgaggccgccatcaacgagcagatcaatgtggagtacaatgcctcgtacgcgtaccactccctctacgcctacttcgaccgggacaatgttgcccttaagggctttgccaagtttaaggaatcgagcgacgaggagagggaacacgcggagatgcttatggagtaccagaacagacgtggagggcgggtgaggctccagtctaccgtcaccccattgacagagttcgaccactctgagaaaggcgatg

SEQ ID NO: 159881 - DNA, 516 bp, Zea mays
  Clone ID: MRT4577_77385C.1
catttccagcctgcccacacctgcctcgcctggtcccaacgcccaacagcagagcgcctctatgctctaacccccagcagcggtggagaagatcctgcaggtagtgcagctgtgaggcggtggatctccagacagtgcagcagttgggtggcaggtggagcagccccagcaaatgcattacatcaagaaaaagatttagtgaaactgtttagaaagctattgatgatattgatgctcggatgatatggaagcaacgatagcagtaccagttgaagatggacagtttgcgaagtcttctacataaatttcacatgtcttgcttttgtgactgatcagctctggagtagctagagtgatgtagttgtgggcttttgaacaatagctggagtgatatgaaacattagtgatgtagttgtgggctttataattgtgaatgatattagtaaatgatctagttgtgaatgatattataattgtgatgcttttgtgaatatataattgtggtgcttttgtgtt

SEQ ID NO: 159882 - DNA, 440 bp, Zea mays
  unsure (1)..(440): unsure at all n locations
  Clone ID: MRT4577_77386C.1
tttgcgtaccaatgcaaataattanttggaagtagaaacaatggtcctcatttgcgtaccaatgcaaataattanttggaagtagaaacaatggtcctcacatgacaccaggaattttatccttgactgtcctaagaactgagccaggcagattcggaaaattgttcaanttccacgggcttgaacagtatttctgccacgtctctaggtccatagatgatggcactggatcaccaagacgaggaaacccgctcccgtaaattgaaatgtccaagtcactcccatacatnacctcaagttcccctgccttcccctccacaatctcccagaactgcttctcaatttgaatacggctgggattcctctgcccaaaccatctctttctcaccctgtcgtcaaaccgccggaaagtctccagcaagcaggacttcctcctttgg

SEQ ID NO: 159883 - DNA, 463 bp, Zea mays
  unsure (1)..(463): unsure at all n locations
  Clone ID: MRT4577_77387C.1
ggagacaaggcagaacatanagaaggagctttataatgttgacacgggcggttctgcatgcgatggaggagagcacctccaactaagaggccatagccgaggggctactgctggtcttgtacatgtacgagccgtactggaaggagcggcacgtgccgtgccccgatccgctgccattcgacggccataatacacctgctgacgaggcacgggcctgacgtcttgctaacagctcaccaacaagcacgggccaatgttcaagggacacataggaaggcatcctttgataatcgcgtccaacgcatagatttgcaaggcggctggaattaaaactttcaagagcacgccaaaccggatctaaccttcatccatatctaaactaccgatccacctcaaacgactgttatagacaagggattaaaagcgctcggtggtgcgaaacattatggcaaacatttaccac

SEQ ID NO: 159884 - DNA, 105 bp, Zea mays
  Clone ID: MRT4577_77388C.1
cccgggtcgtacattggtatcatactactcgcatctggagatgacgcatggagcgcatgcacaatctcaccgatgcgcacatgagctcgctgactatgtgttgcc

SEQ ID NO: 159885 - DNA, 364 bp, Zea mays
  Clone ID: MRT4577_77389C.1
tgagacgtcgcccaggagcggagctccagggtctaaatcataggagctgggacctccagcgtactagaacacaatacctgcattatagtccatcaaaggttcggcgtctgatcgggcgcctagcgacagcaataggaagtgcttgacggcaacaatgaagatatcatgaaagtggctgccgaattattaccaacgggggacagccacaagctccaagaagctatcttcgaagaggagcgctagcagagctaggagaacaaagaggcgaacgacaacaataagctggacaccaggggaacgaaatcggggggcacgtcacactcatagttcgaaataacaaccctccgctataactaaagtagga

SEQ ID NO: 159886 - DNA, 351 bp, Zea mays
  Clone ID: MRT4577_7738C.1
gaaaagggattgacagctttttaataatcagccctttttaaaaagggggaaaaaaacaattttttgttagttaaagctcgagttttaagctaaaacaggggacacttttttacaaaacgtttaaaaacattaatttggggtttttgcaaaaaaaaaatcccccaacagtgtcaattagggccgggaggtttaaattgttagaagcttaaagtaaggacccattgttttcaaatttagtttttttttttttccaattgaaaaagccttgccaaaaactggagggaaaaaaaatggttttgtacaattaaagactttgtgcaaggaaaagcccccaaaaaaaggttttttaac

SEQ ID NO: 159887 - DNA, 234 bp, Zea mays
  Clone ID: MRT4577_77390C.1
cccacacatacacggacgcttgggccagtaactcgcatcttcctccgacatccaagcgcgtggcatcgcaacgcgttggaaaccacaatatgtcggcacacggcacgggcaccaagggtcttgacaaggtcatatccaagcgccaccgcaaggtcctgcgcgacaatatccagagcatcaccaaacctgcgatccggaagctgcctaagaggggctgcaaaaagcgcatctcct

SEQ ID NO: 159888 - DNA, 350 bp, Zea mays
  Clone ID: MRT4577_77391C.1
acccaagcaacatataaagtggaatccaggctcaacaatagaccaacaatggcgaccgagattggggccgtccttatgcttgttggtctttccgcatgtgatggtaacgccacaattttgccatcaatgctgacaagctcactataggattccctcttaccccatacctttcattaaagatagcttcagtatgtgaaaacccagctcttcaacgctataggcttcaacaaggcattcgagtaaggcacatagctttatgacccttggttcaacaattgccaagcctatctttggtgcagtcattggtacaaaccatcagggcacagcagcttgagcaactcgtgctacct

SEQ ID NO: 159889 - DNA, 365 bp, Zea mays
  Clone ID: MRT4577_77392C.1
cggcgacagattcgacccgctcggtctctcacgcgaccctaaggccttcggtgctctcaggtgaatgagctcaagtaacgggcgactcgccatgttatccatgttcgtgatcttcgaccaggccatcgtcaccgggaagggcccgctcgctaacctagctgacacattgccgaccccgtctacaacaacgcttgggcctactcctccaacttcgtccacagcaagtgagggaggtgccgccggtgacctttatgtgtacggatgcatgtgagcgcacgctggtttgcgggttgtaccatgatgtaaactatggttcaatcaacaacgaataattgagttaaaaaaaaaaaaagaagggagatcgg

SEQ ID NO: 159890 - DNA, 629 bp, Zea mays
  Clone ID: MRT4577_77393C.1
gttaagctctcttctcctagtagtataataatagatgaagtgattatctcatgaccctcacctcaacacgccatgcatgcctagtaacactcactatctagtttcatactatcaggaaaaaaaactatacattctgccatgcatagtttacatacggccaaaatatgcatcttgccctatcaagttagaccctactccgagcgcaaacgaatcataagacgacttgagcttcaaacacgaatcacaaagggtagtgaccagcaacccatcgtgccacccattgcttgaaagtttcctcctgccgtcccttcaacatgctggcaatgtgacgattctgagcaagataggtcagcagatcaaggcgtgccggcaaaggatactcatccatgtcttcaatggctttgtaaataccctcgtatgggtccgtgccaccgtgggtaaagctcacagcttccgacagggcctgcatgaagatggggacgccttgcctagcccatttccattccttctccttctccttctccttctcctcgtgcctgcgcttcgagcctactgggttcggactatcagactctgcgagggtgtcgaaatcgtgttgagaagagcaccattcagatctgctggctctt

SEQ ID NO: 159891 - DNA, 306 bp, Zea mays
  Clone ID: MRT4577_77394C.1
gggggtgcatacacatcaagagggacaacaaacgtattccacatagaaattgtttgacggcggcaacgcaacaaaaccaacggaacgttttggggccacaaggcacaaaaaaggaccttgggcaagatgcacaaactagaaaacacatttggtaaggccgtgcggaccatgacgataacacctggaacaaagggcaggggaaccattggcttgggaaaaaactcatgtccactccaacgaatcctcatagaacatctaccccgtgtggacatgtggaagcggtagagatgaaaaaccttttccgag

SEQ ID NO: 159892 - DNA, 1578 bp, Zea mays
  Clone ID: MRT4577_77395C.1
tctagaagtactctcgagtttttttttttttttttttttttttttttttttgttaagctctcttctcctagtagtataataatagatgaagaagtgattatctcatgaccctcacctgaatcagttgatattttaagcatttggccggctaaaagggattaccttcggagaaattgaagctggaggtctcccggaggccccctcaacacgccatgcatgcctagtaacactcactatctagtttcatactatcaggaaaaaaaactatacattctgccatgcatagtttacatacggccaaaatatgcatcttgccatatcaagttagaccctactgcgagcgcaaacgaatcataagacgacttgagcttcaaacacgaatcacaaagggtagtgaccagcaacccatcgtgccacccattgcttgaaagtttcctcctgccgtcccttcaacatgctggcaatgtgacgattctgagcaagataggtcagcagatcaaggcgtgccggcaaaggatactcatccatgtcttcaatggctttgtaaataccctcgtatgggtccgtgccaccgtgggtaaagctcacagcttccgacagggcctgcatgaagatggggacgccttgcctagcccatttccattccttctccttctccttctccttctccttctccttctccttctcctcgtgcctgcgcttcgagcctactgggttcggactatcagactctgggagggtgtcgaaatcgtgttgagaagagtcaccattcagatctgctggctcttgatctaggttgacattcccaacggcatcatcctcttgccttcctgagcgatcaaacggtgcttcaataacactgaactctccagtagcgtgtttccccgtgaagacaaactccatctcatcatacaaggggatcggaacattgtagtacttagccttcttgtcgcctttagctttcatcttgacaacctcgatctcgtcgtaggttatcttcttctgaacatcatcaaaaccagcacccctagcagacttcgcctccatgatcaccttccattctcctttcagcttgtggtacttgttgtaggtttgtttccacgtgaagttagcaccatacttctcattaagcctccgagcacactcttcgtgatggacctcccttagaacaaaggccctccccgactcatggattttctccttgtagtaaagaaggattttctccttgtggtagagaaggagatcctccacttccaggtgttgccacatcacactgttcccaaccatatctctcacgcagaaggcagtaacagggtgcgatgcagggaggcggcgacgggccccaaagcttcgatgaggaggagggaaggcaccagtggcaccggatctgattctgcggccgggtcgggcgcgaccggaagaagcaggaagcagtcctcgcacggcgccgtgtgctcggattatcactcagtagaacagatgtaacaagcgaaggggccggggtaacatcgtaacaatagcaatgcaagaggagggaggaagtttttttttttccccggccggcctcgaggtacccaa

SEQ ID NO: 159893 - DNA, 222 bp, Zea mays
  Clone ID: MRT4577_77396C.1
ccccccttcggcttgcgaggaggcggatgggaggcggtacgtggtactggtcgtggtagggcttacaggagtgctctgtccatggaaaaggcggggcaacaacgccatgtcatcggcagcttcggcaataatgcgcccgtgctggggctgcaaaatcagaactcgttgtcgacatacatcgagcgcgaccaggcgtgggagcgccggcacatgtgcatgcgc

SEQ ID NO: 159894 - DNA, 411 bp, Zea mays
  Clone ID: MRT4577_77397C.1
ctccgaagccagtgctaatgtggttccatgatgatatatgattgtgtattggtaatggacccttataaggcgattacagttgctcaaaaagggaactttggaaaatgcattccgaataatttcaaatagtgcctataaaagccctttatcaatcattgactttttctaattatttcatttaatccttaattttccctttattaatatttttactttctatttttttttattttaccttatatatttcttttaaattttttttttatctattttttaatttatattttttttatattgttttatttttagtttttataatttatttttcttgttttttaattatttattttataatttttttatttattttttttattttattatatatcttttttatttttttttttttta

SEQ ID NO: 159895 - DNA, 413 bp, Zea mays
  unsure (1)..(413): unsure at all n locations
  Clone ID: MRT4577_77398C.1
tccttttaaaccttaataaatcacctcnannnaaaannaaacacaagggggcaccactttaaggaaaggggctggattgactgaaatacaggttacaggcccgcattacaacacaaaactaccaagggcgggcaagatactaagagtcagatttggagtctgctcataatcatgtcgaactctccgttggcgtgcacctgccgaaccgttctgtcgaagtcgtcgtcatcgccagggtcgactttttcttcctgtggctctgattcgccggccctggacggtggctggggcaccgtctgcgcctcctgcacaaaccttaagatctcctccacgctttgcgacaagaaggcgggcgctgctgacgaattattgctgttgctgctgctgctgtctccctggcggttgaagaaaaa

SEQ ID NO: 159896 - DNA, 329 bp, Zea mays
  Clone ID: MRT4577_77399C.1
ccgggcctgccaaaatataaattccaccttttttttggcccgcgacagacattgaaacttcgacaaacaacagcaaaaggcaggagggccagggcttcccgggttctccttatttcttctataccccaatggctttgaacggggtggggcataaacctatacatttttccatataaaacaggcgttttgtaagcccgacaaagggcataaggcatttttcttagggggggctctccttttttgaaggcatgacaacatcaatgccggggggatggggtggttttttttcacgcgcggggctggaaagaccgacttttcccgcctttttt

SEQ ID NO: 159897 - DNA, 225 bp, Zea mays
  Clone ID: MRT4577_7739C.1
tctttaaaagcgggcggcccttggtttgttcttttaaaaaaaagttactggaagccccttcccacatttcactggagggtcacaaagacaatgtgggcccgggttttttccccctgaacaagtgggggatgaaaacattgtcgcctttgtaaaaaattatggcccgggttaaacaaccataggctggctaattataacttacaaagggcggttatgatttcttaa

SEQ ID NO: 159898 - DNA, 224 bp, Zea mays
  Clone ID: MRT4577_773C.1
attcatattattttggaccattttttatttgttatttttttttacttaaagtcaaataatatgaaagtatacgcactggcatgaaaaaataactaacggcaaaaatgcagcgagagctaacaaactgaagaagggaggaaaaacttacaggaaaaacaacaatgtggggcacattttcgacaaccaggaaaaactggccaaaaatacgacaaggaccaccacaa

SEQ ID NO: 159899 - DNA, 167 bp, Zea mays
  Clone ID: MRT4577_77400C.1
tgtctatctggaaggcacactgctgaagcccatcatggtcacccctggccatgcttgcacccagaaattttccaatgaggaaattgccatggctaccgtcacagcacttcgtcgaacagtgccccctgccgtccctggggtcactttcctgtctggagggcagagtg

SEQ ID NO: 159900 - DNA, 185 bp, Zea mays
  Clone ID: MRT4577_77401C.1
gttaaagcaagcaactgtacttcagttggtgcttgatggctgacaaccatggagtgttcatctccggcactgttcttgtctggatacagcaaaatgtctcttggtcttttggatttggcatctcctcgatatgccttgttatcgccgaagttgccttattggatggaacaccgctttacagggtt

SEQ ID NO: 159901 - DNA, 1086 bp, Zea mays
  Clone ID: MRT4577_77403C.1
ggctggtatcctccaggccatggtgatgtgttcccctctctgaataacagcggaaaacttgacatcttattggctcagggcaaggagtatgtcttcgttgcaaactcagacaacttgggtgctatagtcgacatcaagatcctaaaccatctgatcaataaccagaacgagtattgcatggaggttactccaaagacgctggctgatgttaagggcggtacactcatctcttacgaaggaagagttcagcttttggagattgcccaagtacctgatgagcatgtcaatgaatttaaatcaatcgagaagtttaagatattcaacactaacaacttgtgggtgaaccttaaagctatcaagagactcgtagaggctgaggctcttaagatggaaattattccaaaccccaaggaagttgatggtgtaaaggtccttcaactcgaaactgcagctggtgcagctattcggttcttcgacaaagcgattggaattaatgttccccgctcaaggtttctcccagtgaaggctacatctgatttgttgcttgtgcagtctgatctttacaccttggttgatggctttgtcatccgcaacccagccagagcgaatccagctaacccttcgattgagcttggacctgagttcaagaaggttgccaatttccttgctcggttcaagtccatccccagcatcgtcgagcttgacaacttgaaggtttctggtgatgtctggtttggctctggaattacactcaagggcaaggtgacaatcactgccaagtctggagtgaagttggagattccagatggagctgtacttgagaacaaggatgtcaatggccctgaggatctttaagcgatgcttggcgtcaccagtttttcccaaggacatgtcacaggagctggcaaccctaatcacccccactgagctctatcttttgtaattttcttgtgcattccgcttccgttgtgagggttctgtgagcccgctagagaataattgtgatctttggtgcgtctgtacttctgtttttggtgcaccagggacgtatattttgctgaaatgatctttgctgtatggcgtctt

SEQ ID NO: 159902 - DNA, 187 bp, Zea mays
  Clone ID: MRT4577_77405C.1
tgcgtacacggtctccctcttcctgtcagtagtagagtgagagtgaggcagcgagggggagacaaggggaaatggggaagggagcccaggggaaccatgcggcggcggcgttcggccaggtggaagacaacatggcggctttattttttcacaagaaactccctgtagttggtgcaatgggagtttg

SEQ ID NO: 159903 - DNA, 408 bp, Zea mays
  Clone ID: MRT4577_77407C.1
attcggctcgaggacaagctttagatcgggagttttcgcccattcgtttgttttatgaacaggacgggccctacaagagctggttggatacattacagcccacagaaactgtgttcacagccccagcccatccaaacagaccataaatgcgattgctggggcggtcgttaactgaaatcacagtgcatagcactggatctacgttcccggacctaagatatgcacgcccagcaaatcgcatatcgagtgaaaaaatcatgcatgagaacaatggcaccggacttgcccggtgcacacgatatgaaggaaatcgcggggagagagataaatccaatgcattgcgacaggcaaaagtacaccagcgtgttatcgggtgaaccgattgagccttgtgtctgtgttgtacta

SEQ ID NO: 159904 - DNA, 394 bp, Zea mays
  Clone ID: MRT4577_77408C.1
aaaaaacagagtaaacacacatttgaaaacaaagttgttcttcacaaaaaacacaagtacacgaagttttgtggggtaatacacggggaaaacaaaaagggattattaaaacaagaaaaactacaccaaatacaagtaaagtatgggaaattgggctagaaaacattgacacctagctcataagtgtggggaaaacaaacctggtgaatcctggcttttgctcttgcattggtggaccattgccaagcaccacacttagtttgcttgaagtagctgggccctcattatctatgggtaagggagccttttgaatactgctagtacagtagggcatctcggacttctgttgatctccacaagcatggaaagttgtgggtctacacactcaaatact

SEQ ID NO: 159905 - DNA, 377 bp, Zea mays
  Clone ID: MRT4577_77409C.1
ggtgccaagggtaaacctaaatttagaatgctttttttttttttgcatacgcccccgcataagatggatgcaccaatcataattcccaccaaatgggcttgaacaacaaagaaaaaaagaaaggaatgaaccgagcgaggccaaaataaatggcaatggcagatggagtggaaatggccgctattccgcgccgcagcccgtactagagcagggggtactggcctggatacggggtgaccaccacaccggaagttctgataaaatactggtacctgctgaggtcgaagccatgggcgcgcatgaatcgcttttgtttggtcgggaaccggctctagaagaagcctttgaacaaacgctttttcttggtgcggaagaag

SEQ ID NO: 159906 - DNA, 625 bp, Zea mays
  unsure (1)..(625): unsure at all n locations
  Clone ID: MRT4577_7740C.1
ccggggncgcccagccctncgtcgtcccgttccgggtttcgcggccgcctttctcctaacccgcgatccgtgtcagctgcctgcactgccccttgcgccttaccggcctgcggcgacggcaacaagcggtcgagaaggcgtgcggctacgctcgcttggcgcggattgcttcctccatcgcgtgtgatcccatgacttttccaagccacctgtcatgttcctccacatcgcgacagtgatgctcgaccccaaggcgcttcgttactccctggacctcttcgttaagcggtacatagcactcattgatatcaccgctttgtgttggggtgaaaagctagagggatgatttatcagtcctcctatccctctaaccatcgatggtaaatctgtgcctttcttgattccgaaaaagtgggcaacctaacctatcttctgggaatattctatgacttacagccctgccagaataaacatgcctggtgtagctacgcacctcaacgtttggcctttcgtcatacatgatctccattgacaaaggctagaacactctgtacacatgtgaaacttatcagaacatgttagagcacaggtcatagagtgtcctttggtcactgattggtgtgaa

SEQ ID NO: 159907 - DNA, 604 bp, Zea mays
  Clone ID: MRT4577_77411C.1
gaggccttcgcgctgacgagtcacaaaagatcagaggctaaccactggaggaggtgggacctgcgattgctacagcctccgagggggagttggagccgatgtatgggatatttgcttgtcctcctgggtgtgcggcgaaaggaggtagagacaactgtcgatggcgtggtcggcgagttccggggagagtgcgatgagcttctatcgctgcgtgtggcctccttcttgcgatatgtccgacagaacgaggtggtggatgtggagctattgctcttgatctgaggagaggtagatcatgagaggatgccatggacaactagattgctccccgtattgaaagtggtggaggtgcaaaagaggaaggatatgatggagctgttactgcaaagcgtgagagacttgatgaaagatgctgctgccccccctaaggaggagctcggagatatagataattctaaacagctcacaatcttgtatgacgctaatgtgctgctatttgacgatttcacctgcgaatggggacatgatctgatgcagaatggtcagcaaggtgatgccagtggtacagaacgatgtgttgactcaaacttctgcagctgctgct

SEQ ID NO: 159908 - DNA, 413 bp, Zea mays
  unsure (1)..(413): unsure at all n locations
  Clone ID: MRT4577_77412C.1
gagacagagagavcggggtggggggaaacccgaagcgaggcacaagaagaggccaccgcagcgggcgggcggccaggcggcgagcgagacacctccacacgtctctcccccttccgtttcctcccgtccctgctcacacvtctgtagctgydcycgaccgaacncctcctaccccggaatcctccccccgatgcggcgccgataarrrggcgagamcggcggaagaacggggaatggcgggsscggcgagaagcgcgcgccggacaggaggggcccacgaggagcccgaggaggaggaccgcatctcggacmttcccgacgtgctgcgcctgcagattctgagcctgcwgccgctcaaatcggccatccgcaccggcgcgctctcctcgcgctggcgccgcctctrggcgtac

SEQ ID NO: 159909 - DNA, 201 bp, Zea mays
  Clone ID: MRT4577_77413C.1
gaaattaattgggttttaaataatttcttggtttttaaatataaatacacttcattgcgcgaaaaaacctatgtccaacccaacacaggctgcttgtatttcacaataggataacctcccttggtatgggacaaaacaagggctcgtttagggccttaaaccgaacgatttcccgcgtatgtggattctgacttgcgaaac

SEQ ID NO: 159910 - DNA, 1575 bp, Zea mays
  Clone ID: MRT4577_77414C.1
caggtattagcggctacacaaatgcctgaagagccagctggatggttccagggtacagtcacaaatccattgacaacattgtaatcttgagtggcgatcagctttatcggatgaattacatggaacttgtgcagaaacatgtcgaggacgatgctgatatcactatatcatgtgctcctgttgacactagcccatttttagaaaatcggctagtgaagattgatcatactggacgtgtacttcaattctttgaaaaaccaaagggtgctgatttgaattctatgagagttgagaccaacttcctgagctatgctatagatgatgcacagaaatatccataccttgcatcaatgggcatctttcttgaagacataaatgcccattgatgcacttttagaccttctcaagtcaaaatatattcaattacatgactttggatctgaaatcctcccaagagctgtactagatcatagtgtgcaggcatgcatttttacgggctattgggaggatgttggaacaatcaaatcattctttgatgcaaacttggccctcactgagcagccttccaagtttgatttttatgatccaaaaacacctttcttcactgcaccccgatgcttgcctccgacgcaattggacaagtgcaagatgaaagatgcatttatctcagatggttgcttactgagagaatgcaacatcgagcattctgtgattggagtctgctcacgtgtcagctctggatgtgaactcaaggactccgtgatgatgggagcggacacctatgaaactgaagaagaagcttcaaagctactgttagctgggaaggtcccagttggaataggaaggaacacaaagataaggaactgtatcattgacatgaatgctaggattgggaagaacgtggtgatcacaaacagtaagggcatccaagaggctgatcacccggaagaagggtactacataaggtctggaatcgtggtgatcttgaagaatgcaaccatcaacgatgggtctgtcatatagatcggctgcgtttgcgtctacaaaacaagaacctacaatggtattgcatcgatggatcgtgtaaccttggtatggtaagagccgcttgacaggaagtcgagcgttcgggcgcaagatgcgttgtctggcatgctgttccttgaccatttgtgctgctagtatgtactgttataagctgccctagaagttgcagcaaacctttttatgaacctttgtatttccattacctgctttggatcaactatatctgtcatcctatatattactaaatttttaaaaaaaaaaaaaaaaaaaaaaaaaaaaaaaaaaaaaaaaaaaaaaaaaaaaaaaaaaaaaaaaaaaaaaaaaaaaaaaaaaaaaaaaaaaaaaaaaaacgaggccaaggggcgaaaacccccctaaggcaaaattttggggaattctacaaaatgggtggccggggcaaaatccttttaaagggccaaatgggcccaataaagggccgtttaacaatcaactggcccgctggaaaaaccttgtgattggaaaaaccttgggattccccaacttaac

SEQ ID NO: 159911 - DNA, 546 bp, Zea mays
  Clone ID: MRT4577_77415C.1
agttgcaaacaaagacaagacccattgtttcgttaaaaggactggaactcttgtgggcaacaagcatatcacacaacatgcctggctagccaacggctccctatgtgaatatatacaacaaacctcaggatgatcgttccatccaaaaagaattaccgaaacaattagggaccaaaaacactcgaaatttgacgaagttgagcgcttctaaaccatatacctgtgaaaattaggccaatgatcatcccggtctatcgatagacagagtgaaatatcacatcctatcacgtgttctgcgctgagcacaggctatgatctcatcgaccctgacgatcatctgggcagcctgtgatgcatacagaataagtgctgcttaaccttgaacgactcttgtaatacatagcttttgcatgtccccaacagtgcctgtaatgacatctattacagcagcggagctctctatgcggtgctcaccatcagagctgagagatcaaatcaggactttccaaaccaagattgactgctatgcattgaatggcatggctt

SEQ ID NO: 159912 - DNA, 435 bp, Zea mays
  Clone ID: MRT4577_77416C.1
acgcgggactggccgggtcgtgcctccggcgccgttaactgaagaagaagcttcaaagctactgttagctgggaaggtcccagttggaataggaaggaacacaaagataaggaactgtatcattgacatgaatgctaggattgggaagaacgtggtgatcacaaacagtaagggcatccaagaggctgatcacccggaagaagggtactacataaggtctggaatcgtgtaaccttggtatggtaagagccgcttgacaggaagtcgagcgttcgggcgcaagatgcgtagtctggcatgctgttccttgaccatttgtgctgctagtatgtactgttataagctgccctagaagttgcagcaaacctttttatgaacctttgtatttccattacctgctttggatcaactatatctgtcatcctatatattact

SEQ ID NO: 159913 - DNA, 1354 bp, Zea mays
  Clone ID: MRT4577_77418C.1
ttttccggaatctggtttgtttaaaaatttagtaatatataggactgacagatatagttgatccaaagcagggtaatggaaatacaaaggttcataaaaaggtttgctgcaacttctagggcagcttataacaggtacatactagcagcacaaatggtcaaggaacagcatgccagactagcatcttcgcccgaagctcgacttcctgtcaagcggctcttaccataccaaggttacacgatccatcgatgcaataccattgtaggttcttgttttgtagacgcaaacgcagccgatctatatgacgccttcttccgggtgatcagcctcttggatgcccttactgtttgtgatcaccacgttcttcccaatcctagcattcatgtcaatgatacagttccttatctttgtgttccttcctattccaactgggaccttcccagctaacagtagctttgaagcttcttcttcagtttcataggtgtccgctcccatcatcacggagtccttgagttcacatccagagctgacacgtgagcagactccaatcacagaatgctcgatgttgcattctctcagtaagcaaccatctgagataaatgcatatttcatcttgcacttgtccaattgcgtcggaggcaagcatcggggtgcagtgaagaaaggtgtttttggatcgtaaaaatcaaacttggaaggctgctcagtgagggccaagtgtgcaggcatgcatttttacgggctattgggaggatgttggaacaatcaaatcattctttgatgcaaacttggccctcactgagcagccttccaagtttgatttttacgatccaaaaacacccttcttcactgcaccccgatgcttgcctccgacgcaattggacaagtgcaagatgaaatatgcatttatctcagatggttgcttactgagagaatgcaacatcgagcattctgtgattggagtctgctcacgtgtcagctctggatgtgaactcaaggactccgtgatgatgggagcggacacctatgaaactgaagaagaagcttcaaagctactgttagctgggaaggtcccagttggaataggaaggaacacaaagataaggaactgtatcattgacatgaatgctaggataagggcatccaagaagggtactacataaggtctggaatcgtggtgatcttgaagaatgcaaccatcaacgatgggtctgtcatatagatcggctgcgtgtgcgtctacaaaacaagaacctacaatggtattgcatcgatggatcgtgtaaccttggtatggtaagagccgcttgacaggaagtcgagcgttcgggcgcaagatgcgtagtctggcatg

SEQ ID NO: 159914 - DNA, 357 bp, Zea mays
  Clone ID: MRT4577_77419C.1
cacacgctgagtcggacgcgtggtttctatctacgctgatctaaaaaataacaggctgactaattacacatttaggtttgaacaaatgctgagcggggggggcgatactggtgtgtacctttactatgcacatgcttcgaatttgttccattattctggagtccaccaagaacattgaagagctggagatgtaagaagccatttctgtggaacatcctgatgagcgcgagctgaagctcgttcttatccaatttgcataggcagttggagaggtatgcacaaagtctacttccaaatgttgtttgtgaatacttgtacaatctatatggaatgggaacacactctataccaactcat

SEQ ID NO: 159915 - DNA, 965 bp, Zea mays
  Clone ID: MRT4577_7741C.1
gccggccgggccggatgcatctgtgtggctgtggcaaacagttctgaggtgtgagcaatggcggccggccagtttgcagcagcaggagtcctcaccggccttctcgctctcgcaacacttgcaagctgcaacactgatggcgacatactgtacaagcagaggctagcatgggaggatccaaacaacgtgctgcagagctgggatccaaccctcgccaatccctgcacgtggtttcatgttacctgcaacctgaacaactccgtcgtccgtgtggatttgggaaaggcaggcatctccggccccctgcttccagatcttggagcacttgagagcctccagtacatggagctgttcggcaacagcctgaacggttcgattccggcaacgctgggcaacctgactgatctcatcagcttggatctctgggacaacctgcttaccggcccaatcccaactacgcttggttccatcagcacgctgcgatatctgaggttgtacgagaacaacctgacagggcctataccaccatcgtttggcaatctgactagccttctggaactgaagctccacaggaattcgttgagcggttcgattccggcctcccttggcgacatcaaatcgttgcagttcttgaaattgaacgagaatatgctgaccggcacggttccattggaagtcctctcccttgtcgttgttggcaacctgaccgagctaaatattgcaagaaacaaccttgatggcactgtgagatcatccggacttagagtgactgcggttatccaggacatgaggactgcatgatatggcttgaagagtcctggatcaaggctttattttaatttgcttcatgttttaatttgcttcatgtagacactgcaaataaatgaataattgcaatgggatacattggcctagattattcatacattggcctagattattcaaaaaaaaaaaaaaaaaaaaaa

SEQ ID NO: 159916 - DNA, 203 bp, Zea mays
  unsure (1)..(203): unsure at all n locations
  Clone ID: MRT4577_77420C.1
gccggcagccgttgcgagtcccaacatcggcagtacgtcgacgaggttcccgcgcgacctaatttccttcatccgacccctacgaccgcgccattgtcgctttgggcctctacgtcgcacngtctacgcgcgggtcccgtgttagggcggcgggggggtggggggggtgggcggccgcgcgcgctgcgcgctgggcggcgttc

SEQ ID NO: 159917 - DNA, 383 bp, Zea mays
  Clone ID: MRT4577_77421C.1
cgcgcccgcgcccgcctgcctccgcctccccgcaacggccgcgtccccaccccaagatttcagcgctcgtgagagccgcccggagattgctcccacactgggtacaccgtgcccccgccccggctctccttgtcgatggaaactcacccgcattccgccattatcgcatacctcgccccctcgcggcccctccaccgtgatgctcgcccaagctcgatggaaagcgcccgcaatcacccagaccgccctcgctcccgcaatcgccctcgcgcccgcaatccccctccgcgcgcgcatggaacgaggctcaccctgtcgtgcccccgcagactccccctcccctaccacccatgcgtgatcccctaatggccccacaccgccgg

SEQ ID NO: 159918 - DNA, 317 bp, Zea mays
  Clone ID: MRT4577_77422C.1
ttcatatacaccgcctcaaagagaccaagcaggagcatacaacacgtaggtcaaccacgcctgcagataaaaagccatggactaaaggcggaatgccgggatcgattagagggacagcatagaatgttgtcaaagctgctacatacggggctggcagaagcaaggcctcaggcacgaagaacctacaccctgtcaagagaaagggcgcaccaaccagcgaagacaatgctatggaacccatcatagatgacggcctagcttgagcagacgcacaaacaaacagatatccgatagaaaaagccaagactcaagtacac

SEQ ID NO: 159919 - DNA, 120 bp, Zea mays
  Clone ID: MRT4577_77423C.1
gcacggatcaatgtccagaatcctgaagcctaaaggaggttagaagctacatgtatgacggtaacccagcactcagggatggccttctctgtcttgatcccccggcatgtgactaaacac

SEQ ID NO: 159920 - DNA, 264 bp, Zea mays
  Clone ID: MRT4577_77424C.1
gtagcaacaatgtcgaagcgaggtcgcggaggatcggcgggaaacaagttccgcatgtcgctgggtctgccggtggcggtgacggtgaactgcgccgacaacaccggcgcgaagaacctttacatcatatcagtgaaggggatcaagggtaggctgaaccggttgccgtcagcttgcgtcggagacatggttatggccaccgtcaagaagggaaagcccgatctccgtaagaaggtgctgcccgccgtcatcgtccgccagcgc

SEQ ID NO: 159921 - DNA, 179 bp, Zea mays
  Clone ID: MRT4577_77425C.1
ctctcttgttatgcatattacctacacttatatttactayctcttcwactctatttcctcttctcattctgccactagtatttcactctcattaatcgcacgactaacacttcttcatatcattaaacttcttcgcacaaaaattagactagtatattctggtgttgctccccctcccc

SEQ ID NO: 159922 - DNA, 133 bp, Zea mays
  unsure (1)..(133): unsure at all n locations
  Clone ID: MRT4577_77426C.1
ttgcgtccttgagnctcttccatgtgcataggttgtcagtagtaataatgaataaatgtagacccctcgtcgaaaacaataaagaaaggtcccagaagagtggactacatttgttcattattattattgacaa

SEQ ID NO: 159923 - DNA, 117 bp, Zea mays
  Clone ID: MRT4577_77427C.1
agatgatgggagcaaacatcatctagctagcagctgaggccttatttgtgtgtagtcacccaacatgtgaagagcctcaagcagcaagcagaagatgtttagctcccttcatcacta

SEQ ID NO: 159924 - DNA, 442 bp, Zea mays
  unsure (1)..(442): unsure at all n locations
  Clone ID: MRT4577_77428C.1
tttcccagngttggtttgtagtgcgggggagggggagaaaaaaaaaaaaaaaaaaaaaaaaaaaaaaaaaagtatggcgggatggaggatccaatctttcttgcgcgggcttgtgatgacataactttttgttcggtgtatgctagactaagtttttttttttttgataacattttggggggggggggtgcccatccctaacccaaattaatcacattcaagggcgtgatatttttcacttggtaggaagcctttgaaggtgcttgcagcttacgagctgcgatttctgtgttaactgttcctggccaagggatggggcgttgatacatagtacggttgggcagacttagaacacttggaaatatttgtgtttttggtgagcttctcaagcaaaaggtggtttctgtgtagtatgtttcttatgttgttatggagctattgt

SEQ ID NO: 159925 - DNA, 127 bp, Zea mays
  Clone ID: MRT4577_77429C.1
cacctgtccagcggacgagatccagaggctggagtcgtggcctccgtgagcgccgccgtgcgggaccaccatcgtggcccgcgccgcgatcgccatcgcccaaggctctaggggtgcctgcgatcag

SEQ ID NO: 159926 - DNA, 210 bp, Zea mays
  Clone ID: MRT4577_7742C.1
ggcaaatacaccaacacaggtatgattataaatatcggttttgggacctatcccaccaactttagaactttttacagtttctttcgttcgagggatatagagtggctttaaaactctttacaattggcttcaatccatggatatagagtaatgagataagaacagtcaccttctttggctgcaatcaaccataacaaatttatcataacc

SEQ ID NO: 159927 - DNA, 324 bp, Zea mays
  Clone ID: MRT4577_77430C.1
tgctcggaattcggctcgagcttagtcgactggtttcttttctgcatactgcgcagacgtgcaatggctactatacttcctagtgctcgcattcgtcgtttcttcaaggctgcttgttaacaagctggttacgtgtgatcccctagagataatgcgcgatgtgagcatgcaccggaagcgggatcgatcgttctttgggctagcgtaggccgttatagagtcacacagagaagatggagtgggcctgctgcgactgcgatgctgaacacactgaacttagattctgggccggggctgacctgcaatcaccatgtgcgtatcaat

SEQ ID NO: 159928 - DNA, 132 bp, Zea mays
  unsure (1)..(132): unsure at all n locations
  Clone ID: MRT4577_77431C.1
atctgaggcaagatattgatcagctagtactcagaagacactagcccttcgtatctgaggataggtnctacggctcggctattctgaacggtaaaacttgcacaaggcaactctgacattacaacaatggat

SEQ ID NO: 159929 - DNA, 394 bp, Zea mays
  unsure (1)..(394): unsure at all n locations
  Clone ID: MRT4577_77432C.1
gctggtatcttccgtgggggcagacccgtgagcatgctgctgggggctgggacgcttggagtgaagcagatgatttgctgttgcgccangatgggtgccaccacacccaagtgctccaagggccgttntgatgagattgtgaaggaggtctcttcctacctgatgaaggttgggtcctnccctggcatgatgcggtgggtggccgtctctggtgttcggggtggcatcgtggttgagaggtgcaccatccttggctggtgcaagggcccaaccctacttggggctttgggcttggtcattgtgccgtggaggccttctggcgngcccctgcgtcttccccttcggggtgggcgctcgattggtggtgttgcggctggtcctggtgggcgtgttg

SEQ ID NO: 159930 - DNA, 463 bp, Zea mays
  Clone ID: MRT4577_77433C.1
cggacgcgtgggcaagtttggatcttcgtttcgatttggattagaagctggttctaaacctgagatccttcttgctatgagctgcttgtgtaaaggtagccctgatgcctttcttgtgtgcaatggattcaaagatgctgagtatatatcattggctctgcttgggagaaaactggcgttgaatactgtgattgtgcttgagcaagaagaagagcttgatctggttattgagctgagccagaagatgaatgtgaggcctgtcattgggttaagggctaagctgaggactaagcattcgggtcatttcggatcaacttctggtgaaaagggtaaatttggattgactactactcagattgttcgtgtggtgaggaagctgcgtcaatctggtatgcttgattgtctccagcttctgcattttcatattggttcacagattccgtcgacttcgttgctctctgat

SEQ ID NO: 159931 - DNA, 1906 bp, Zea mays
  Clone ID: MRT4577_77434C.1
tcaatacacaagcagagctcaaacaattcttgcttcccgctagctagctcgcaagaaataatggctccacttcttcttgcttctcgcacagcctgtcgtcctggccttacaagccgccatgcccatgataatggccggcacggcctgtcttcttcaccaccaggaagtcgtagtaagcgaagccgtagccttagcttgaggccacgagctgaaaagacgacgacaggcggtgggggtcatgttgtgagcgaaaagctgagcccctggcaaatccccaggagggagtggttcccccctagctttatctttggtgctgccacttcagcataccaaattgaaggggcttggaacgaaggtggaaaggggccaagcacttgggacgacttctgccacaaccatccggagtggatagcggacgggagcagtggggatgttggagcaaactcctactatctgtatagggaggacgtcagattgctgaaggaaatgggtatggacgcctacaggttctccatctcttggcccagaatattgccaaaggggacactcgagggaggcattaaccataaaggcatcgagtactacaaaaagctgatcaacttgttgaaagagaacggcatagaaccatacgtgacactttttcactgggacacacctcaagcactgatggacaagtacggcggttttttagataagagtattgtaaaagactatacagacttcgccaaggtgtgctttgacaacttcggtgacaaagtaaagaactggtttacctttaatgagcccgagactttttgtaccttttcgcacggaactggacaatgcgccccagggcggtgctcccctgggataatcactccaacgggatccacaagttgtgctaacccaattggaaactcgctcactgagccatacattgttggccacaaccttctccgagcccacgccgaggttgttgatctttacaacaagcattacaagatagattacaagggtgagaatggacgcatagggattgtatttgacgtgatgggccgtgtgccattcgaaaaatcggcgtttattgatcaacaggccgaagaaaggtcctgggacatcaacctaggatggttcttggagccggttgtccgtggagactatccattctccatgaggtcgttggtaagggaccgactacccttcttcactaacgaggagcgagagaagctagtgggctcctatgacatgctggggttaaactactacacctcaaggttctccaaacacatcgatatcacgcaacacaacacgctaaggctcaacactgacgatgcatatgccagtcaggaaacgaaagggcctgatggcgagcccattggtcctccgatggggaattggatctacctgtatcctcaaggcctaaaggatctccttaagatcatgaaggagaaatacggaaacccacccatgtacatcactgagaacgggatggctgaagttgaccttggccataacttgaatgaccagaaaagaatagattacctccagagccacttggcagctcttcaggactcagtggagtcgggagcaaatgtgaagggctacttcctttggtctctgctggacaacttcgaatggttctgcggctacacccaaccttacggcatcgtctatgtggaccgcaacgatggctgcaagcgctacatgaagcagtcagccaagtggtacaaaagcttcatcgctgcgaatgataaatgaagtgcacccatacgtatactcactaccagaggagaggtagtggagagcaccatatgcattgttccagtccagggttaccgtaccttattatatatgaaataaatgaagtgctctaatatttcgtcctgtgggaattaaaaaaaaaaaaaaaaaaaaaaaaaaaaaaaaa

SEQ ID NO: 159932 - DNA, 365 bp, Zea mays
  unsure (1)..(365): unsure at all n locations
  Clone ID: MRT4577_77435C.1
cgggccggccccccanancccccggcggacccccccccaggagcaccgcggcnccccccaaacccccaccacaggacgagaaggagggcacgngaangagaggaaaagacaaggagaggcnccccncnccncggaagaagncgggggaaaccnaggcggcacgggggggggangcaagaacanaaacacaacancgaagaaggagcaaggggcacancaaggggagngggaagnagcagcacaaccacccggaggcgcagaanaaagcggcccagacgcagccagganggaaggagaaacggcgnggnaaaggaagggaggggngaaacgaggcgggcgcacagaggaagccagaacaggggggc

SEQ ID NO: 159933 - DNA, 2294 bp, Zea mays
  Clone ID: MRT4577_77436C.1
cctcgagccggccaagactcaatacacaagcagagctcaaacaattcttgcttcccgctagctagctcgcaagaaataatggctccacttcttcttgcttctcgcacagcctgtcatcctggccttacaagcagccgccatgataatggccggcacggcctttcttcttcaccgggaagtagtagtaagcgaagccgtagccttagcttcataccacgagctgaaaagacgacgacaggcggtgagggtcatgttgtgagcgaaaagctgagcccctggcaaatccccaggagggagtggttcccccctagctttatctttggtgccgccacttcagcataccaaattgaaggcgcttggaacgaaggtggcaaggggccaagcacttgggacgacttctgccacaaatatccggagtggatagcggacgggagcagtggggatgttggagcgaactcctactacctgtatagagaggatgtcagattgctgaaggagatgggtatggacgcctacaggtcctctatcgcttggtccagaatactgccaaaggggacgctcgagggaggcattaaccataaaggcatcgagtactacaaaaggctcatcaacttgttgaaagagaacggcatagaaccatatgtaacacttttccactgggacacacctcaagcgctggtggacagctacggtggcttcttagatgacaggattgtaaaagattacacggactttgccaaggtgtgctttgtgcacttcggcgacgtcgtgaagaactggttcaccttcaacgagccacagacgttctcctctttttcctacgggaccgggatctttgcaccggggcggtgctccccgggacaaaaatgcgctaacccaaccgggaactcactcaccgagccatacattgttgcccacaacctcctccgagctcacgctgagactgtccatgagtccaacaggcattacagaggtaacaaggacgcacagatagggattgcgttcgacgtgatgggccgtgtgccatatgacaatatgtttctcgacgaccaggcccaagaaaggtccatcgattataacctaggatggttcatggagccggtcgttcgcggcgactaccctttctccatgagatcattgatcaaggatcggctaccctactttaccgacgacgagaaagagaagctagtgggttcgtatgacataatggggataaactactacacctcgaggttttccaagcacatcgacatctcgccaaagtactcgccagtgctcaacaccgacgacgcctatgccgcccaagagacgaaaggaccagacgggaatactattggtccatctatggggaatccgtggatttacatgtaccctaacggcctaaaggatatccttatgttcatgaagaacaaatacgggaacccacctatctacatcactgagaatggaatcggggatattgacagcaaggagaaacctctacccgtaaaagatgcgttgaatgaccacgcaaggctagattacctccagcgccacatctcagtgctcaaagacgcaatagacctgggagcggacgtgcgtggccacttcacctggtctctgctggacaacttcgagtggtgcggccggttacacggagcgttacggcatcgtctacgtggaccgtagcaacggctgcaagcgccgcatgaagcgctcggccaaatggttgaagaaattcaaccgagccgcgcattccaagaagaaagacaagacgggcattattccgccgccgtcggcttattaattaattacaacagtgcgctggcatatgtttttagatatatataatatatataatatacatgtgtggtctgtggtacgtacggtgtacgtatgttgcttgtaaaataaacccacctgtgttgtgggaacgtactaaagtgaaatactcaacggatcggaggcctttggctgtttcctatacataatcacataatcgcaccgattcctcttaaaaaaaaagaatgtttcctgccccttattatcaccacttttgtaaccaccccctacagggggggggcgcggatacaaatggactcttatgggtgtccatgacgccccgccccccggttctattccccacgttagtcattgttagtgcattcagaaagacctttcaatttagacctccttacttttcgcggccatatcgcgctcccacggtccctttttttatccctcttttctcccccccgaatttgccggtcaccacgaaatttcgccccctttcctatccaccccaccacaaatat

SEQ ID NO: 159934 - DNA, 1486 bp, Zea mays
  Clone ID: MRT4577_77437C.1
gttccagagtggatattagacaagagcaatggggatgttgcagctgattcgtaccatatgtaccctgaggatgtcagattgctgaaggaaatagggatggacgcctataggttctccatctcttggtccagaatactgccgaatgggacgctcgaagggggtattaatccagatggcatcaagtactacaaaaatctcatcaatttgttgttagagaacggaatagaaccgtttgtaacaattttccactgggacacgcctcaagcactgatggacaagtacggcggttttttagataagagtattgtaaaagactatacagacttcgcaaaggtgtgctttgacaacttcggtgacaaagtaaagaactggtttacctttaatgagcccgagactttttgtaccttttcccacggaactgggcaatgcgccccagggcggtgctcccctgggataatcaccccaacgggatccacaagttgtgctaacccaattggaaactcgctcactgagccatacattgttggccacaaccttctccgagcccacgccgaggctgttgatctttacaacaagtattacaagggtgagaatggacgcatagggattgtatttgacgtgatgggtcgtgtgccattcgaaaaaacggcgtttattgatcaacaggccgaagaaaggtcctgggacatcaacctaggatggttcttggagccagttgttcgtggagactatccattctccatgaggtcgttggtaagggaccgactacccttcttcactgacgaggagcgagagaagctagtgggctcatatgacatgctggggttaaactactacacctcaaggttctccaaacacatcgatatcacgcaacacaacacactaaggctcaacactgacgatgcatatgccagtcaggaaacgaaagggcctgacggcgagcccattggtcctccgatggggaattggatctacctgtatcctcaaggcctaaaggatctccttaagatcatgaaggagaaatacggaaacccacccatgtacatcactgagaacgggatggctgaagttgaccttggcaataacttgaatgaccagaaaagaatagattacctccagagccacttggcagctcttcaggagtcagtgcagtcgggagcaaatgtgaagggctacttcctttggtctctgctggacaacttcgaatggttctgcggctacacccaaccttacggcatcgtctatgtggaccgcaacgatggctgcaagcgctacatgaagcagtcagccaagtggtacaaacgcttcatcgctgcgaatgataaatgaagtgcacccatacgtataactcactaccagaggaggtagtggagaggaccatatgcattgttccagtccagggttaccgtaccttattatatatgcaataaatgaagtgctctaatatttcgtcctgtgggaaaaaaaaaaaaaaaaaaggccccta

SEQ ID NO: 159935 - DNA, 541 bp, Zea mays
  Clone ID: MRT4577_77438C.1
ccggccggggaggaggtggccgtttcggtgctgagtgctgagttggtgaccacacggctaagttcattacccaagcgagagccaccaaggaaaggaggaatggaagccaccggcgcttcctctcagacctcgacgccgcagacaactcacccgtacgcgacgacgctggccttcctactgagaaagtgttgatcgtaatgaaaaaccgcctctgccacgatgtgctccttcctacaccgagaagtgctcctcttgtccattcatccctccaatttggtgatctcgaactattcaaagacaagaaagtcgaagatatgtggtacctatgcacgccgtgagatattctgatgtcccgcctggggatcgtgattgaaatcctaaaagatggctcgcttcttacttaagagtcattctatggttgatcttagactcgcaactgatgagactcttgtgacccaaagcatcgaaggtgtagaagatcacgagaattttgatgtgactgtatggtctgctatgggacgaggagcagatgtgcacgatg

SEQ ID NO: 159936 - DNA, 358 bp, Zea mays
  Clone ID: MRT4577_77439C.1
cccatttgtattcttatacatatcgcgggggaggcggttattacttgagtaggggtaagccccttgtcccaaaaagacgtatgttcttggtttaggctcattttttcaaacaacacagtaacactacttgtaatttcattaataagaaagaaaaacggatactccaagtataagcgaggaaaattaagtcactcccacatccaacacttaaaacaagaaaactaaaaggaaaaacacccccacattaaaacatttcacatcacgtttgtgtgcacatcacttgaagaagcatctactaagagcataggctccacccatgcacctcttatcactcatcttagccacaggttgttgaacc

SEQ ID NO: 159937 - DNA, 339 bp, Zea mays
  unsure (1)..(339): unsure at all n locations
  Clone ID: MRT4577_7743C.1
cacccacangaggtggcttcgcaccaaaaccctaccctttgtctccacagangcgaacaaccatgggctccaccgcccctgcctccctgctcccggtgtcccccggctcccgcgagaacctcgtcctcatcctcggctaccgctcgcantacacccacctcatcaccccccccgtgccccanctcnncttccggggggggggcntntccttcactgcccccctcncctccctnaaagacctccaaccacgccccgtcatcctctcccgcgggccccactcagtccacgcccccggggcgccccccttccccgagggattcctgggcttcccggctgccc

SEQ ID NO: 159938 - DNA, 416 bp, Zea mays
  Clone ID: MRT4577_77440C.1
tcgttggatttctttctttaggatctaaaataactctacggagtccagagttacagaccataggctttcatgtagccataagaaatggaggagccaaccacgttgcttcgtcttaattgacaatatgtccacacagtctccagatctgtaggctacaagtacattccggacagtctaggctctttattatggtaaaaacgaaatacgatctaccttcccaatcagttgaaccgatccgatgcgcgcgaaataatggcccaccaccggcgctttatcaggaggagctgtgacggacctaacaaggccacccggcgacactggttcatgaggagcaccctgtatttcctgttttttaattcgtttaccccaaaactgcagtggtttctgcggcaagtttaaaaaatccaagtttactt

SEQ ID NO: 159939 - DNA, 174 bp, Zea mays
  Clone ID: MRT4577_77441C.1
actagtattccatcttcgagtcctgctctatgcgtccattctcctttatgtaacaagggacccttccgagactcgttctataaaaacctacattactcgatgcatgtgactaacgtgcgattccaacatctcttcttattccatgagttacactgcttactgactttactgctt

SEQ ID NO: 159940 - DNA, 306 bp, Zea mays
  Clone ID: MRT4577_77442C.1
tcccacccgcgggcagacaaccagacccggggagaccttaaacaaagaagggggcaccccccgcaaacaatacagaagccggacacagaaaccaacagcgccgcccaacaacaccaaaggaccccccccaggggacgcacaaagaaccccagacaggaggagcaccctggcctacatcaatagcgaacaacacgtacactcacccccgcgacgccacccaaatgccaaagccaccacagccaccaacatgaaccaagacaaagccacagccacaaccaaacttgagccaaccccgaccgaaaaaca

SEQ ID NO: 159941 - DNA, 340 bp, Zea mays
  unsure (1)..(340): unsure at all n locations
  Clone ID: MRT4577_77443C.1
ctcactccccgctccactccactccccccatcccgctgctgcgcgtgctccctccccgtcgcctttcgccgccgcccctccgcccctttcccaccccactttcccggctccatcctcccgtgatccgcgcccgcccgcaggccgccggctctcggccgcccctccgctcctccgaggaggattggagcttggcagagacgaggacagccaggggaaggaaaggnggtggcggggggttcttggccgctccgcctcccagttgaagttgaatctccccgaccgccgactggattcgctcgccatctgtgtccaccgccggaaaaggaccgcccgccctact

SEQ ID NO: 159942 - DNA, 502 bp, Zea mays
  unsure (1)..(502): unsure at all n locations
  Clone ID: MRT4577_77444C.1
ccaccaccgccgagcgcgagcccnagcccgagcgaggcggggggaggcaccagancccgccgcccgcggcgacccgggacgcgccccgccgaaaccgccgcaccacgcaccgcaacacgcccggaccacggagcanangaaccgacccggccgccaacacgangaccaagacgggagcgcnggagcggggggggggccacggagggaagaacaacaaggnggaagacaagacggccgacgangagnangagaaanaacanggaaaccanggagggaaggaggaagcaaggaagaccaaccaaaccgaaanggagaanaaaaaccangaacnngccacaagcnacaaagagaanggagggggggaaaccaaccacnnngcacacagaaggaaaggagaaaccnaacgagaaagcaacaagcgacangagcanaaacaggcccggcaacagggaaagaaaccaggaaagaaggacaaagacgagggccgaggaaaaggaggacc

SEQ ID NO: 159943 - DNA, 369 bp, Zea mays
  Clone ID: MRT4577_77445C.1
ttcacgcgtccgggtatgtacacggggtatcaggggctgacagcatcaggacattacgcataacatcgaaacggcaccattagaggcacatggaaatgttattgctgcgaggaaagaaaatacagctgctgcaaccatctagaagaggatagtaaaaacatggaggaagaggggacaaaggttaacaatagattcgtgacgaggatggcgcttagaaagcaagctcacatttctaacacgctccttgggtaatagtgcggtaacgaaacttttacttgaacgaagcttatgcaagttaggggttacttttaaagctttaataggtttaacctacttggaatgcttaattcggttgaccatagcgggagt

SEQ ID NO: 159944 - DNA, 1278 bp, Zea mays
  Clone ID: MRT4577_77446C.1
ccctctgccggccgggagcccctctcggccggctatcggcaaattcgacatccgctccgccgtctacagtctacataaggaatcgaggtagccccagtcgtcttcggcgctcaagtttcggccgccggccgcggtgccctccgccccttcccaatcctgcccccaagccccagtcagccatcgaaactccaacccccaggcggccaggcccaagcgtccggcggttgcggccccgcggcttggcgaaggcgaccggtggctaggccccagcgactcagggcggatcaagtaagatttgtagtttcaattaattaggcctgcagatgcacccccgatgcccggttttggatttcccactgccgatgcccgagatgaaggccgccactgcgctggggagctggctgctcccggctgcgcctgccattcgccccacactggtgaatctcagatcccgggggttctgcagtcatggttatttcccctcggcgtcccggatttcttgctcatcagagttatctgatagcgatagaggtctcgccaaggagatggagtcagaattcagtgacgagatatgtgccgagaatggtgctgaagaggacgatgaaacagaggatttaatttggagcaaagaagagatcgatgctatttcagcgctcttcgaccggccgatgcgccagaagcccctgaagccgcgaaaccccgcgaggcagagggcgcttccattgccactgccgcacaagacgaggctgcccgtggctcctgcgccgaagcagcacgtccgcctcgctgcaagagcggggctctcttctcgtgcttgcttcagcgaccaggtgcgcaagaaaccggagttccttctcgggattgcccgggagatcgcagcgcttcctcccgagcacgacgtctccacggtgctcgaccgttgggcgaggttcctccggaaaggctccctgtcacttaccattcgtgagctcgggcacatggggctccccgagcgcgcgctccagacactgtgctgggcccagaggcagaaagctgtgccgttgttccctgacgatcgtgttcttgcttcggccatcgaggttttggcacgctttgaacggctcagagtggagtctgcgctggagcaatgtgtgcccacggccagccgtgccgttctcgaggccatggcgagcgggttcatcagggcggggaaagtagaccgcgtgcgcaagctcctggaacttgcaaggatcaataacaggacgctgcaccccagcatctacgtgaagttgatgttgg

SEQ ID NO: 159945 - DNA, 270 bp, Zea mays
  Clone ID: MRT4577_77447C.1
gcaactgatatatgataaaatatcttgatgggggaaggacagggtgcacggcacaacctacaaaggcgctgccattcatcagccaaagcgctggaacactatcacgggcaagggttggagcgcggccatgcggctccagggtattccacagggcaaagcaagatggccctgccggagggcgctggacacatccttggaatttttccatgaggatgaaggcaagggccattagcattccttagtggtgatctccgaggacaggaagagcag

SEQ ID NO: 159946 - DNA, 1053 bp, Zea mays
  Clone ID: MRT4577_77448C.1
ggggagcaagcagcgcgcgagagagacaggttgagatggcgatgccgtatgcctctctttccccggcaggcgccgccgaccaccgctcctccacagccacggcgtccctcgtccccttctgccgctccactccgctctccgcgggcggcgggctgggcgaggaggacgcccaggcgagcgcgaggtggccggccgcgaggccggtggtgccgttcacgccggcgcagtaccaggagctggagcagcaggcgctcatatacaagtacctggtggcgggcgtgcccgttccgccggatctcgtggttccaatccgccgcggcctcgactccctcgcaacccgcttctacggccaacccacacgtacaacgcttacggaataagatctctggcggacgagcacaaccagctgatcgcagaagccatcgactcgtcgatagagagccagtggcgcctccccagctcgtcgttcccgctctcgagctacccacatctcggggcgctgggcgacctgggcggccagaacagcacggtgagctcgctgccgaagatggagaggcagcagccgccctcgtccttcctagggaacgacaccggggccggcatggccatgggctccgcctccgcgaagcaggagggccagacgctgcggcacttcttcgacgagtggcccaaggcgcgggactcctggccgggcctctccgacgagaccgccagcctcgcctcgttccccccggcgacccagctgtcgatgtccatacccatggcgtcctccgacttctccgtggccagctcccagtcgcccaacgatgactaatggtgcgtggatcgtcgcgttctggccctttgtctgtctcccctccagtcctccacccaccgcgcagtagtagctgcggaaacagcccatgctcctgtatatttgtcggtcattttccgtgtcagatctgtgtaccaaaccaagcggcggcggccgtcgtctccccccgcctccgcctcgcctcatgtgggtgggtgaacatgagaccgttttgcttaggctcaaagctttgtgtgact

SEQ ID NO: 159947 - DNA, 910 bp, Zea mays
  Clone ID: MRT4577_77449C.1
gcccgccgccgcggccgtctccgccgctccgcccctggcagccgtcgccgccgccaccagcggcagcggcttccagaaccactctctatacccggccatcgccggcagcactggtggtggaggagttggcgggtccggcaatatctcctccccgttctcctcgtcgatggggggatcgtctcagctgcacatggacagtgctgccagctactcctacgcagctcttggtggtggaactgcaaaggatctcaggtacaacgtttacggaataagatctctggcggacgagcacaaccagctgatcgcagaagccatcgactcgtcgatagagagccagtggcgcctccccagctcgtcgttcccgctctcgagctacccacagctcggggcgctgggcgacctgggcggccagaacagcacggtgagctcgctgccgaagatggagaggcagcagccaccctcgtccttcctagggaacgacaccggggccggcatggccatgggctccgcctccgcgaagcaggagggccagacgctgcggcacttcttcgacgagtggcccaaggcgcgggactcctggccgggcctctccgacgagaccgccagcctcgcctcgttccccccggcgacccagctgtcgatgtccatacccatggcgtcctccgacttctccgtggccagctcccagtcgcccaacggtgagtcgcgtacgttcctgctggccacggaccgaaggtgaaaggttgttgctggtttactgataggagacaaccatgtctggtctctgcagatgactaatggtgcgtggatcgccgcgttctggccctttgtctgtctcccctccagtcctccacccaccgcgcagtagtagctgcggaaacagcccatgctcctgtatatttgtcggtca

SEQ ID NO: 159948 - DNA, 520 bp, Zea mays
  Clone ID: MRT4577_7744C.1
gacgcctgcggttccggtccggaattcccgggtcgacccacgcgtccgggcgagcgccagggcgaggccgaggctcgggcccaggcgcaggccgaggccggccgcgcgagcgctcggcggggagacgatccagggaaggccgcgggtcgcactctccactcagctctatcgcctggacctctgcgattacggccgggcgcgcgcggcgtgcgggactccgggtctccgacgcgcgctcccgccgcccctcccccctcgccgcgtaacttgcggccaaagtttccccccgggctcgggggcgcccgcgcgcgctcggatggtgagccactaagttggcctgggcggcggggccgggccatggcccccgcgacgctaccgggtccccaggactccggaccacgggacctgggcgccccagactcgcgcctctagcgcgcccccgtcgaccgcgggcacgcgtgggaaagttggcctggaaccggcccgaccagttgctgcctggcgcgcggaccgggcgtag

SEQ ID NO: 159949 - DNA, 365 bp, Zea mays
  Clone ID: MRT4577_77450C.1
aagcccaaaaatccttttttaaacagggcatcctgcccaaaaaaggaccaaaggtaaaccacccccggacccccccctagggggctgggcccgttaagctgttaccctttttggaacccctcgggccttcaaaggggaccataatttaaaacctgggacctggaaaccccccctttcaagtcttttttcgccctttgaccatccggggggttccggaaaaaaaaaaaaccaaatccttgggaccgcccggtttttgggccccaaataacattagctttggggcggggggggtacccagaaaaaaaggcaaccaagggaccttttgggccttccgggcaaaaacccccacaaaaaatttaaaaagg

SEQ ID NO: 159950 - DNA, 278 bp, Zea mays
  Clone ID: MRT4577_77451C.1
ccggaagaaaaaaattgggggggtgcctaaagaatgttcaaaagcacaaacctcaaattggcaatgcaaacatttaaaggtgggtgcacacagcacagtttttttttccaaacctgggcaagggcctctgttaagaaaaagggcatttaaccaattcccgtttatggggaccaaaaatcgacgggagctaaaaactttttcaaacttaaattcaagaaccttcaaaggggttccaaccttgggggggcaaaaaaatttttacccccttgttcattccc

SEQ ID NO: 159951 - DNA, 374 bp, Zea mays
  Clone ID: MRT4577_77452C.1
gaaactagaaacttataacctcacatgactccatgttgcctgacacagaaccaaggtctggctttgcaacttggaactgatatcccgcttctgaacccataaacgagcgtatggcttccaccgtacctctgttcatagtggaaacagccctcctataaaagtgacaaaaattctacaggtgagtttttcggactggcaactaagttgaaaccgtgactgctactgataatgacatgcgaagagcatggtaactgatgattgactggctcaggaacgagcctgggtcacgacattggggggctacattgcgtatactggaccctacaaggattgctcacaaaggcttaggactctgtggactgtggagttgcaca

SEQ ID NO: 159952 - DNA, 555 bp, Zea mays
  Clone ID: MRT4577_77453C.1
ccggccgggaaactcattagcgttactttccttgcacaccgtgccgtccgtagcatggcgacacccgcgaaaacaaaacacctgatacagagactcctattgaaggaaaagatgctgtcatctgaacgtctccaagcgatcacagtctagccattgacactctgtgcaatgagctgctggagcaaggtggcgtagcacaacttggagtcattttctttccacatccccaaaatccactgcctcgcgctcggctgcttcacacgaccaatttgactccgctatttgctgccccagaagtagtctcacgactgggatcatgtctatgccagtgtgccgaactgtcacagagaatcttcatcggacgaataacatacacgatcatatgagactaccggtgacctactgtcaataccgtgctgctagaccaggccgtttttctccaccttgacgctgttctcttcaggatggtccgccagaagctggtcctcaatgtgagtgctgactaccttgatgacgatgactgctagggacaatatgtacatattcatgctgctc

SEQ ID NO: 159953 - DNA, 691 bp, Zea mays
  unsure (1)..(691): unsure at all n locations
  Clone ID: MRT4577_77454C.1
agagttgtccggtgaaggaagccaaacccacagaaattcagagctctccacaaggcagctatgctgatatttgggttaggggtctggatcattccaatgacgctcatctttgcaccatgcaggcgcctggttctccttgttgtcaagttccaggaactagaagcgagcatcatgcgcagtaggtcatcatatccagaagtatggagtcgcatagcgaggatacaaacaataagcatcacactgtgaaggaagattggaagtaattcccagttgagatatgcatttgaactttcatcaggtgggcagccctcattagagtcatttccttcagggcctctttgtttgaactacagttttggggctttcagcttctggctgttggctttttattttgacttctgtaataaaattttagcttcttagcacaccaaaagacagaaaagcttgtctcagcatgcttttcagtttttagtttattgcctcggaaaccagattttcaaaagccagctcaacaactggagttgtttgttttcaacttctagcttctagaacaaacaggccaccagtcatgtatcgggtgagtaccacacctcaactgccctagttcatgactagtcttaccctacagatgtttgcttgaaagcttanattcctccttgtatgcaatgcaagatggacatagtaaggaagc

SEQ ID NO: 159954 - DNA, 407 bp, Zea mays
  Clone ID: MRT4577_77455C.1
cagtccctgagacttttgattatttgttttaaactcccgtccagcccctggcgtggagtagaactgtatttgggaaataaaagcacggaaattctctctacagtgctcagacatgatactggttggttctgcaaggatactccctgctcactcacacagacacaataacaaaacaaagagaaggaaaagatgcatcattcccctacagccttattcatcgtccgttgagcacagcagcagcagagcagcccgtcgtgtcaagcatatttgcaggtgccaaggcctgcaagaggatccaatgatccatcatccggtgtcagctcccccaacacggttcacgggcaatgagacactcacagcaagcaaggaagcactcactggggtcagtgatggtgattaggccggtg

SEQ ID NO: 159955 - DNA, 230 bp, Zea mays
  Clone ID: MRT4577_77456C.1
gggcccaaattttatgttcatttcagggatcaaaaagggggcccagcactggaaagcgccacacactccggggcaacttggactcggggaaaacattaatttgggcggaaaccgaaatacatgtctgggctaaaattgattaaaaaaccgctgggggacccccacccgtatccatttggttacctaaaagccccgctgggaaacaaaccactaacacaaacaggttttat

SEQ ID NO: 159956 - DNA, 685 bp, Zea mays
  unsure (1)..(685): unsure at all n locations
  Clone ID: MRT4577_77457C.1
aattcggcacgaggcgtggatgccctcgtgaggttctacgccgacgccttcaggagggattcacagaggccatggtgaggatggccagcttgagtcggctcaccgggagcagcgcgagatccgctacaactaaatgataggaggtattttctagaaattacaaccccacctctgtcaggccttctgttgagtgaatttggtttgcacaccctcaccctgcacgctcttaccggactaccgctcctagcacccactcacacgagattgcaccccgctcgccatgccaccatagatccagctagggcgacatcattgtgggcaatcctgtgcgagagaatgtgaaattgttgtaggattgataatgaccaggggtttctccgcccacatgcaccaggtttcgctgccatttgcagcgactgtgttccagttcgaccgtttggggaaaaggtgagtcctcccatttcatgtagatgcatgggttgataaacatttgggagaaatgtcccctctttaattcgaaaatagttgtgtatttgttcgacttatctgcggcgatgtacctttgtacgcgtacaacatctatagacaaaacaaatgacacttattggatgtagcaagagcgggctacgagaactagcagatcatgcctannatcaattacatttagggtcagacaaatactaca

SEQ ID NO: 159957 - DNA, 412 bp, Zea mays
  Clone ID: MRT4577_77458C.1
agagagagaggaagctagctagttagcatggagtgcggcagcaataaggcagcaggcggatgtgatggcgctgatgcttctccagctggtgccagctgcgacgacggcgaaggcccgcctcctgcaggcggatacctccaccgtgattggcctggacatcatcgcgagggagaagggacatccagtgacaggcatcctctgtggagaaacctgtgtcttcctaccatgctatacggcagccatgggttgccaatgcattggccaaatcggcatgacgagatatctggactatcgataaccgccacccgcgctgggagaaaaacaaggacggaacggcgctgttcaaattattggatgagaatggtgatctaataagaaaagtataataacaaaggcatatgttggatgtgcc

SEQ ID NO: 159958 - DNA, 328 bp, Zea mays
  Clone ID: MRT4577_77459C.1
caagagtagagttgagaacctgaacaaggttctttaatgaagagggggtttgtcaaacattggtgtgcactgatttggcagttagaggcctgaacctggatgttgaccatgtaataatgtttaacttcccatcaaattctgaatgtgttggggtttgctttaactcccttcattgcgatttttatgcggtcttgggggtaatccttgggttccaagattgattacacttacagaaccggtagaacttgcacgcatgggagccaaaggtttaagcaatttttagcttgaactgaacatatgtgctagctcttaatcggaaccttgctaa

SEQ ID NO: 159959 - DNA, 543 bp, Zea mays
  Clone ID: MRT4577_7745C.1
ttgcatctctgtatatgtacgcgcccgccctttttttttttgttgcaactttacatttcccaagggacttaataaccgcgtgacaaggcctgggttataaccaaccatgctttattaagcttcgacaaccactcattatccacagaaacccacacataacgagataacatgggcagcttacgtgtgaaaacacccacaaggtgatttactgtgtccaccaactgcataatgacgctacttattaaaactcacagcctagcctcttcggtcccctcaggaacatgaaggcctacctgcctctagtccttctccagcaccgccaggtcctcatggtcgtaacagaacagaccttcctccataccctcaccgacgaaccaaagcaccaatgcacgctcggcgtacatcaagacgaactactggcctatgcgagagaacacccacacaacactgggggagttagaaatgatgcacacataacactgcaccttgcccagggagccactaaacacaaccctaggaggctggggggtgatgccgcacttt

SEQ ID NO: 159960 - DNA, 715 bp, Zea mays
  unsure (1)..(715): unsure at all n locations
  Clone ID: MRT4577_77460C.1
aattcggcacgagggcaatcccaatcacaacccaaagtttaaggccaaagacaattgttctctcatgtaaggattcagttagactggagtttgatgacatgtttttgtatcatgaaatacctgcaagaggataagaacatgtcacaaacaaatggaaataatatatcaattaacaagattgcaattgcagtgtaggttgagctggccccagtgaaggcgttgctcaactgctccttgaacaggtattagtgtgacatactaattaatcaggagaaagaaccattgtaaccgcctaagaacaagaccaaccaagtattttgtggactctatatctacttgtacattcagaggggtgtcaggtcccagttaatttaagctgatgctgtatggatggaaaagggaattaaacagcggcgggggagatggatggaggaggtaacatagcatcaaggtgaacaacataattccatgtggagactaacttgagaggaggcagataacaggagtggncaaatgatgtggtgctgcttgaccaaaccaacacaacacaacccaacccaaccacacacactctctctctttcttttactctgtccgtcggtcaaaccagtctcgatcatcgatcgattaaaatcatcacgcattcttttatagtttgtcattttgttgtatcacaacatatagccatatactgatttggatagaaattatgttc

SEQ ID NO: 159961 - DNA, 1618 bp, Zea mays
  Clone ID: MRT4577_77461C.1
attcggctcgaggtgcagtgacacaagtgagctcagcaaagccaaccaaagttcagaagaagcgagcgagcaggaggacaggaagcaagtatggcgcactaccagcaggggaggcggcagcaagtggacgagtacggcaacccggtccctgggggccacggtgtccagggccagcagctgggtgaagccgccggcgggtacggcgtcgcaggcaccggcagctacggcggccagcagcaggccgggtatggccccacgggcaccggcacgcatgacgccgggggctacggcggctcgggccatccgggttacggggctaccggaacgggcgtccacgacgccggtggcccaggtgcgtatggagcagtcacaggcacgagagcccacggcactcatggcggcgtgaccgggatccaggacggcgccgccggcctcaccggtggtggtctgcatggcgcaacaggcatggggacgactaccggtactggcgcgcacggtgccaccggaatgctcgacacgggggtcttgggcggcggagggcacgcggccaccggcatgcccgccggccacggcacgcgtcccggcgccacaggcgtagctggaaccggcggcgcgttcccccatgcagctgagcacaagacgggcggcggcatccttcgccgctccggcagcagctccagctccagcagctcgtcatctgaagacgacggcatgggtgggcgccggaagaagggcctgaaggagaagatcaaggagaaaatgccaggaggccacagggaaggccagggccaggcgacggccaccggtgcgtacggcgggacagggtacgtggctgggccgacgaccggaggcccccacgagaagaagggtgtggtggagaagatcaaggagaagatcccaggcggccacaaggactacgaccagcatcagcacaccaccgcggcaaccggtggcggcggtggctatggcggaaccaccgacaccacgtatgggacgacgaccactgaaggcactcacgagaagaagggcttcatggacaaaatcaaggagaaactccccggtcagcactaagcactaagcagctgcctctttcctcttccggctagctgcctctttcctcttccggttggcgactgcctgtaagtacatgtatacagaataaataaagcaataaagaataagcggcagctacgtatgtgtgtgtttttgtgtgtttgcattgtaaggcagctacgtatgtgtgtgtgtttgcattgtaaccacctcagtaatcctgtgcgttcatgatccttctatgtgacttcatgtgacgaagtagaaggaataagaaagtcaaatcttactattaaaaaagtaaaaaactccccggtcagcactaagcactaagcagctgcctctttcctcttaaggctaactgcctctttcctcttccggttggcgactgcctgtaagtacatgtatacagaataaataaagcaataaagaataagcggcagctacgtatgtgtgtgtttttgtgtgtttgcattgtaaggcagctacgtatgtgtgtgtgtttgcattgtaaccacctcagtaagatttgactttcttattccttctacttcgtcacatgaag

SEQ ID NO: 159962 - DNA, 443 bp, Zea mays
  Clone ID: MRT4577_77462C.1
agcagtggtaacaacgcagagtacttttttttttttttttttttttttttggttttttttttttttttttttttttttttttttttttttttttttttttttttccggcagcaaaaaaattttccttggcgggcccagccaggatcaaaccaaaaggggttccaaacatggacgccacacttcctgacctttttgatgacccacacatacaagggggggggaagacaagggccacagaaacaggcaagtctcacgggacatcgttacatggggttctactttgggccggaggctagggctggttgcctcttggggggcgacacacggggttaagctttttggcgtggccaggccgatggggctgggggcggcacatgaagccgtaccaggagatctccctttccgcagcattttggggaaaaaaattttggggcgatggtccc

SEQ ID NO: 159963 - DNA, 144 bp, Zea mays
  unsure (1)..(144): unsure at all n locations
  Clone ID: MRT4577_77463C.1
aaaaaatttgcctcttttagcgtcagtatattaaggccgcagcacgtaatgtgcagtgctgangccttaanagactgacgcnannagaggcaaattttagcgggtgtagattgaagcgtgaacaccggacaggtacctatacga

SEQ ID NO: 159964 - DNA, 955 bp, Zea mays
  unsure (1)..(955): unsure at all n locations
  Clone ID: MRT4577_77464C.1
ataccgagctctccttccggagggtcgccctcgtcatcggatccaccgggatcggcggcacatcgctcgtcgacatactcccgcgcgacgacacccccggtgggccctggaccgttcgctcgtccccccaccctcccgctctctctctcgtcggtgcgagcgcagctgtcgacgaccctcctccgactcgtcgcttcacaggcttgtggtcagcttgactgatatcaaacaatggcggaacacttggcttcgatatttggtacagagaaagacagggtcaactgtccattttacttcaagattggagcttgtcgtcatggcgatcgctgctctcgcatccataacaggccaaccatatcacctactattgtgctcatgaacatgtatcagcgccctgatatgattacccctggggttgatgctcaaggccagccgatagatccccgcaagatgcaggagcattttgaagatttttatgaggatatctttgaggaactgagcaagtttggtgagattgagaccctcaacgtctgtgacaacctttctgatcacatgataggcaatgtgtatgtccagttcagagaggaagatcaggcagcagcagctcataccgcccttcagggacgcttttactctggtcgcctaataattgttgacttctctcctgtgacggacttccgtgaagcgacctgcaggcagtatgaggagaacacctgcactcgtggtgggcactgcaatttcatgcatgtgaagcagataggtaaggatctcaggaagaaactctttgggcgctataggagatcgcaacgaggaaggagccgcagcccaagcccacaccatanggagagagcgtcatgaccgtgatgactatcgtggccgtgatgatttccgtcgtggtggtggcggcggcggcggtggacgggaggggtgggagcagtaggcatgaaaggcatga

SEQ ID NO: 159965 - DNA, 391 bp, Zea mays
  unsure (1)..(391): unsure at all n locations
  Clone ID: MRT4577_77465C.1
cacaggcnggnnnggaccaaaagagncaaanncccacacagaccangcancgncaagnnngancaggncccagccnnnnggnnannggaaangangnncagaaaaccaaaggcacnncanncaaacnannnngggannnccncnnggcagnccagaaaaancngaaccncnggnanccccaccaagngncgcanangacgggaaacnncaaaccccnccaacagacaacgangagccnngnncagaagcnacccagaananccagaacaaagngccaagnagnncaaccagaagccgcaagaaggnccanaagcaaggcagcgcccncgggagaacgancgancnaacanagnncacnngcnacgacnagcngaccgccgaacgggaccag

SEQ ID NO: 159966 - DNA, 667 bp, Zea mays
  unsure (1)..(667): unsure at all n locations
  Clone ID: MRT4577_77466C.1
ccggccgggccgccggccgccggagatgcctccgtccgccacaccatcctcggcatctaattcctggagaccttgaaggaaaatgcttcaagtgtctatcctccctccgaccatcgcgccaccatgtgccgtcgcagtccgcgccgctgcttccattgtgtgcctgcgccgtgtgacccttgccgccgcaagacaacacgacgccggacccgccatcggtggtctgacagacagggtgatctcgccctccttccccgtctcgttcttctggcgaagacacgcctgcctgagatagtgagatgcctccgtccgccaccgtgggcgagtgctcgggtgtcaccgttgagctcctcatcgcgcagatcgcccagagatttggtcttcctgaggatgtactggttcttcgttctgcgattttcctgctttacctctcggtggatgagacaacgaccacttgtgttagtgtcagacagccttttcatctctatcatctcagggatcacttcatgagatgcatggncaagattttacagctccctccagctccaggaggtatatttagagggcgtttggttcttggcgcattcttagagctcagattcttctcgattatctcccattagcagggatccaccgagcgtatagcacagcttgtcgacagtcattc

SEQ ID NO: 159967 - DNA, 378 bp, Zea mays
  Clone ID: MRT4577_77467C.1
ggcccacgcgtccgacactcccctctcaagtttttgtggataagattgagctgaatggttgccaggagaccgggtttgattgctttggttgatgttgatggaactcttacagctcccaggaaggtggtcacaccggagatgttgacattcatgcaagaactgctgaaggttgtaactgttggagttgttgggggttctgaccttataaagatatcagagcaacttggcagcacagttaccaatgactatgattatgcattttctgagaatggtcttgtggctcacaaggaaggaaagctcattggaactcaaagcttgaagtcattccttggtgaagaaaagctcaaggagtttattaactttacaccttattatatt

SEQ ID NO: 159968 - DNA, 262 bp, Zea mays
  Clone ID: MRT4577_77468C.1
ccgtactcgggattgttctagcctcgcttcgcttacttcctccggactacttgtctcgcattcactcgcggtgggagaaatcggggcgcgacgatgaccgtgatcgacatcctcacccgggtggacgcgatctggcagaagtcacgccaggcacgacgtcgacaagctcaccggcgcgaacgtcgccggcgacgacccgttcgcccgactctacgcgtccgtcgacgcggacaacaaccaatggctcgatacagcggaaacg

SEQ ID NO: 159969 - DNA, 557 bp, Zea mays
  Clone ID: MRT4577_77469C.1
cagttatagtacgaaactttcaagtaccttataaattcaaagaaaaatgtaaaaacgaaaactcacttttgttagcttcggcataatacgtagcatgtgagaaaaaggtaaggattaaatatatggaatgatttactgcagtttaattatattagtgttttctgtaatttaataatatatttaaatctattaatgcgaaatttctaaaaaaattagacacgagttgattgtatatctggaggttgtagaaaaagtttcgtgcagaaatgaggttgctaggtgaggttttactaatttgctttgtttatgctagaacagggtaagaatatgtttagtattcaatcgacttgtcaacatgttctgttagtgttgttgtgttaatttttcttatatggtaaagtgatgctttgtgttaatagaaatcgtgttctgtgtttattgattagttaaatgatttagaagattgttggtgccaccgaacttattagaaagtgagtaatatcgttaggttcgtttcatttaaaatttgaaaactacttagtgatcagtactcatta

SEQ ID NO: 159970 - DNA, 2385 bp, Zea mays
  Clone ID: MRT4577_7746C.1
cagttcaaaaataattatgtaatattctgaaactttttactttataataaagatacaagagcaagtaagaaacattctatttggaggttaatcatctaaaatgtgcatccatctgaccctctttgcttcattggaaccagctccaccatataagttgtaggagacatcaaccagtccatttcttttctccaccacaaccttttatcttcacacaatggttccaggttccagagttctccaaaaacagtagctttaacattaagtccgccttgtactatcatggtcaaagagcacagggacactccggtatacacaaaataaactacttttaaaaacgcgtgggtttttttttttttttttttaagttctcgtcatcgacatgctatcatcatcaaggtgccagcaagaaaagcagcagaggctgaccaagagcatcgtcagatcgttcagacgcaacagcaacacccggagacttcgacaggcaggactcgcctaatgctgatcttacagtacagtacgctataaactcgtcgcaaaaatacattacatcgcgctatttgctaaaggtaaccttgtggagcggacactgggccccgcatcaccctgtacatcggcaaaagattcacacaacagctgctgactgccctcaccacctcagctgcttcacttctttcttcttgccaacaacggcatcgtagcgcccgtccaccatgctgatctggtccatcagggaccgccggatgtgtcccggtggcgtctcggtgatgccggccaagtacacgtcagaggagaggtcgaacttcagcgtggccatgggggtgttcggcttcttgatcaggtcatcctccagcagtatctccgccacgcgcgacagtatgctgaacgctaccccaacaagaaccctagcgtaggcctccacgattgcatggcccacgtccacgttgtattggacctttaaaacatctataaaagtcgggggcaggttgggatatctggatttcagaagctgcacgagagcgtcaaccctttcgatgcatgcggacatcttgtcaacttccgacgagctatccttcatgaagctccaggaatggcgtcctggggacctcttgcttctttcctccagaattctttggttccatgcaaacacggcgccctccaaccggttaatagtctcgagcacactatgctcggttttcaaactgagcgaaacaaatatttcctctacaggaatataatctgtggttatagcctgatacaaatcttcacccaagctagccctcccagacttcggaagggcatccatgacagcggccggaataggcatatgggacaggacttgttcgttgatggattttgcggctttgaggatctggtgaacaagcttagcctgaaaaccaagccttttccgctggaattgagatagcccttgctcagggacacgaggagacgggagccaccactttttactcttccttggacctgtaattttcccccgaccatcagctctgctgccactctcctcataccagaattctgtatctatcattgagtccattacttcaatgagcatcatgtcaagcttctgaagggcaggaaggttcacatggacatctgagcgggcctttggagtcataatctcaaatgtacatccatctgctccgctttgctttgttggaaccagctcaaccatataagttgtaggagacagcaaccagtccatttcttttctccacctgatctttttatcttcgcacagtggttccagcttccagagttctccaaagacagttgcagagagattgattatgccattagacaaggccagagccgcacaaacgcccctagctcctcccgaagtatcatcaccgagcaatagttttgcaaatttttccttcatgttttcaatatctgaagcactcaaggtatatgtgattgttttcttccctttgaaagggagtagatgaattgccatgggtgtacccaactcatctagtgaatgctcctcctgcttgctaaggcagtgtgaagtgaaggaagaaccagaagcatctttactagagcaactagagacttcatcatcaagggaatcagtggtgatacagccatctccgcctgttgttgcactgatgccactgtcatcgtcataggcggaactgttgataatgcaggtctcgaggccattatatgtcaccaccctgtcgggctcttggtccatatcgatgctgaagtcttgaggccgccgccggcagcacgccagcgtcttcatcctcatctccgccgccgacccctcctccgccgccgccgccgcgccgcgctagcgctaccagcagtaagtgaaagacatgaagaagaggccccggccggcgaccgggaaggccggttccg

SEQ ID NO: 159971 - DNA, 804 bp, Zea mays
  Clone ID: MRT4577_77470C.1
ccggccgggtatatatccaacaaccagcagtgcaacaagcaagatttacctgcccatcgatcatatcgtcaactggtccggcagttcgcgacaccatgagctccacggagtgcggcggcggcggcggcggcgccaagacgtcgtggcctgaggtggtcgggctgagcgtggaggacgccaagaaggtgatcctcaaggacaagccggacgccgacatcgtggtgctgcccgtcggctccgtggtgaccgcggattatcgccctaaccgagtccgcttcttcgtcgatatcgtcctccagacgccccccactcgtctcgataatatatagcctacccgctatttctttcttgtccctgatttcccctatgtctctatactacccaccgcccaggatatcgcccagaaaatgcaaagctgagatagctccagcttgatcaacaaccaaacttcatcttcccaagtcaccgaggttgatgtaactgttcaatccgccgatgaattcttggcattcctctagcgcgatcaccctccaccggccgctcattaagaaaccgaaaagttgaacaaagggggggtgggtagtgggaagagaaagtgtagaacatccacttgataggtcaatagattagaagaagaaaagaaacccttacaaccccaacttcgtttctcgcctggctagcctggtataatgggagaagaaatgtcttttataacattttgctaaactcgtatgtggctcgttggttggtacaatgaaatgtgaatgatgcgtatttttccaaaaaaaaaaaaaaaaagcggcc

SEQ ID NO: 159972 - DNA, 191 bp, Zea mays
  Clone ID: MRT4577_77471C.1
gggggaacttgaggacaatgactggcatttaacccggggaaaaataatatacacaccaaaagacagaaggctcacatcagcagggaagccgtccacttcatactgtaaaaccaaagcagcagtaggggtcattggaagctataaacttttcgataggatgcgataaagaaaaaacatgtagagggggttaa

SEQ ID NO: 159973 - DNA, 445 bp, Zea mays
  unsure (1)..(445): unsure at all n locations
  Clone ID: MRT4577_77472C.1
tgggttccagcgccagaggccgccaagcaaagcgcccgcacacggcacgcggcggcgatggcggacgacgtcgccccgtgcaccgcatccggctacctcgacccctcctactgggacgggcggttcgggaaggaggagcactacgagtggttcaaggacttctcccacttccgccacctcctcgccccgctcctctccccctccctctcggttctggaggtcggctgcggcaattcgcggctcggggaggagctcttaagggagggcgtcactggcggcgtcacctgcatcgacctctcgccggtcgccgtccagaggatgcgcgacagactggcggagcagggcaccagtggtgtggatgtggtggtggntgacatgcttgaccttccgttcgagagcgagagcttcgaccttgtgatcgagaaagggaccatggatgtgttgt

SEQ ID NO: 159974 - DNA, 720 bp, Zea mays
  unsure (1)..(720): unsure at all n locations
  Clone ID: MRT4577_77473C.1
gccggccgggtcgtatatatccaacaaccagcagtgcaacaagcaagatttacctgcccgtgagtgtgcctttcaataatataatgtcttattttattattatgtttttgcagtgatagtagtctgtaataaatctctcctttcaatatatataattcacatgccagatcgatcatatcgtcaactggtccggcagttcgcgacaccatgagctccacggagtgcggcggcggcggcggcggcgccaagacgtcgtggcctgaggtggtcgggctgagcgtggaggacgccaagaaggtgatcctcaaggacaagccggacgccgacatcgtggtgctgcccgtcggctccgtggtgaccgcggattatcgccctaaccgtgtccgcatcttcgtcgacatcgtcgcccagacgccccacatcggctgataatatataagctagccgctatttcctttccttgccccagaacttgaaataaatatatatacgatgaaataacgcgggcatgccgaataatggatgtgtgaattctcactaattaagtaatgcataaataaacgtattcaaatgtcgccccatcttgcacagtgaatatattgtgttgacagcaaaaaaatatgaggttaaattcggtacaattaattatgggcctatttggatcgtcaccggacgaaagtttagcctaacgttgactaattaagnaattctaatgagttc

SEQ ID NO: 159975 - DNA, 3519 bp, Zea mays
  Clone ID: MRT4577_77474C.1
actcactcaccagtcacctcttgctttccattgccagcgccagcaggaggcagctgcaggcacgagccgccaatcgtgtgacgccaccaccgctctctgactcttcctccacgaaccacatcaaaactgatcaactctctccctctgcttcccgctagagcaaacgccacgagagtcgcgattcttccaccacttccacgggaccggtcggatccaatccgctgccgcccagccaccgccaccgccgccggcgccggctcctctataggggtcttccctccccttcgcccttcgcaacccgcaagttccgagcgattgatgagtatttttctccccgtcccttggagcgactcagtggatgcgagggacctgtccgcgctcgacccgccttcgcccctatctcgccgcccggcgggcaggctcctgctctcgccttccgttcccggagctagccgcaggcccatgggctagtgggtcgtcgttcgccctcctgcgatcgcgagcggagaggcggcctgcgggatccgcccgtccccaatccaaataactcctctccttggacgatttcggagttactggcctgcctgaaaatcgattcctgctaacgccagtattgtgcttttcagtaacaagagtgtacagttgttgcttcttgggatgtgaatcctgtcttgggtggggatccagctcacgctagatttccccccttttgcctttcactttttcactcgggagggaaaggttgggttcctgggtaattaacatccaatcgctctgcttgattctaccttatcttctaatcactatttccgtgctcttaatgcaagtggtgggaaggcaaagtaaatattgtattgccggttttggggacatattcttggggatattccggtctgtgcaaacatatctcttgcccttagtttagtttgatgctcatatcagtattcagtactggtggggagtgcacatatcacaaatcctgattatcctcggccgttggggagatgagttcctcacaagaatccaccttcacctcggcctcagcggctgcacaagttaatgcttccgctttggacttgctcccggtctatgccaaggagcttatcgccggcggcgctgctggtgcatttgcaaagactgcggtagcaccactggagagggtcaagatcttattgcagacaagaactgaaggtttccagtccctcgggatcctccagtccttgaggaagctgtggcaatacgagggaattcgaggcttctacaaagggaacggtgcaagcgtgcttcggattgttccatatgcagcattgcattacatgacatatgagcagtataggtgctggatattgaataattttgcttcatcaataggtacagggcctgtcattgatcttttagctggctctgctgctggtggtactgcagttttgtgtacatacccattagacttggctaggaccaagctggcataccaggtattaaatgttggcctaactgggaatgctttgggaaattctggtcaacaacaaacttataatggcataaaagatgttttcaagactctggttcaaatgttggccaaataggtaatgctttgggaaattctggtcaacaacaaacatataatggcataaaagatgttttcaagactgtttacaaggaaggaggcgcacgatctttgtatcgtggagtaggcccaactcttattggtattcttccatatgctggcttgaagttttacatatatgaagatctgaaatctcaagttccagacgattacaaggattctgttatactgaagctctcttgcggagctttagctggtctatttggacaaaccctcacttatccactggatgttgtccggagacaaatgcaggttcagagcaagcagtctcaaaattcgagcgatggcttccgtataagaggaacttttcagggtctcttgctcatcattcggtgccaagggtggagacaactctttgctggcttgagccttaactatgtcaaggttgtcccttcagtagctatcggtttcacaacatacgacatgatgaaggcattgcttggagttcctccccgagagagagtccatgcgtcaggtggtaacaagtgaagcaatgttggccatccttgtgttatgactgatgaactaaagaaattctaggttgtgacattgttattcttgttatgaatcccattgcatagggtggagagtgttgtatattggtcaaatagctatattcatgtaacattaagttgagatgcttgtatcatccattatgctgcttgtaatgtaaccatgaatacaatgacgcctccaaagatcgctttaaattaactataaaagattaatattacccttaaaaaaaaaaaaaaaaaaaaaaagccggacgccgacatcgtggtgctgcccgtcggctccgtggtgaccgcggattatcgccctaaccgtgtccgcatcttcgtcgacatcgtcgcccagacgccccacatcggctgataatatataagctagccgctatttcctttccttgccccagaacttgaaataaatatatatacgatgaaataacgcgggcatgccgaataatggatgtgtgaattctcactaattaagtaatgcataaataaacgtattcaaatgtcaaaaaaaaaaaaaaaaaaaaaaaaacgcagtcgccgccgccctgcccgtctccttcctgtcgtctccccttctccaatcgcttccccttctccaatcgcttcccgatcccagccaatatctcagacggaatcgatccaaagctatcctagggttccgccgtcccgtccagatccgggctcgtcgatggggaaggagggcgtggcggcggggccggcggcggaggggagtaaatcgcggtcggagtgtatcaactcgtccaacccgtatcacgagtgctccgactactgcctccgcaagatcgccgaggccaggcagcgtctcgacgacgagctccctgactcgtggaagcgcccgcccgagcagcgcaccgtccacccggactgcatcaatgcctccaacccctaccacgagtgctccgactactgcttcaagcgcatcgccgacgctaaatcccctgcctgcgggctggagcctgaggagcgacagccaccagctgatgtgtttgccgccgccggcttgtctgatgccgtggagcagcatcggcctgtagacaacgatcccgacgaacaggagggcgcaggcccggatgacggctatccgcagatgacggagaagcagaaaaagctgttcgagctgcggcttaagatgaatgaagcacggaaagcgaatcagcaggcgatggttgccgagaagaaaggatggagcctcgtggcgagagccgaggtgtttctaagcagaagtggttagacgacaggaagaagaagattgggaagctgctcgactcgaatgggcttgatatgaaaatggcgtacatgctcgacacacaggagactgcagaagccagtacagaagtgggagaaggacttgct

SEQ ID NO: 159976 - DNA, 1502 bp, Zea mays
  unsure (1)..(1502): unsure at all n locations
  Clone ID: MRT4577_77475C.1
aaaaaaaaaaaaaaaaaaaaaaaaaaaaaaaaaaaaaaaaaaaaaaaaaaaaaaaaaaaaaacgagcacaacagggcggccagacagggctcccacaggccatcaccacaacacacaaagacagctcagagcaggtcacacacaggctcctctcccccgttgcgcaacgcgctttcccccacttcacccgcctcggcgccatggctaagctcgcgctggcgctcctcctcctgctggccgtggcggcgtccgcgtcggccagcagcgggagccacctggatctcgacctgggcttcctctcctctggggaccgccggagggagtgccgcgggacggtggccgagtgcctcgccgaggagtcggatgaggagggccttgacctggccggatcccaccgccgcgcgctctacggcggcgggtacatcagctacggcgcgctgcggcgggacaacgtgccctgctcccgccgcggcgccagctactacaactgccgccccggcggccaggccaacccctaccaccgcggctgctcccgcatcacccgctgccgcggctgaggcggctccggatccgcccgactgccgaggaaaggtctggttggtcaaggtcccggccgggatatatccaacaaccagcagtgcaacaagcaagatttacctgcccatcgatcatatcgtcaactggtccggcagttcgcgacaccatgagctccacggagtgcggcggcggcggcggcggcgccaagacgtcgtggcctgaggtggtcgggctgagcgtggaggacgccaagaaggtgatcctcaaggacaagccggacgccgacatcgtggtgctgcccgtcggctccgtggtgaccgcggattatcgccctaaccgtgtccgcatcttcgtcgacatcgtcgcccaaacgccccacatcggctgataatatataagctagccgctatttcctttccttgccccaaaacttgaaataaatatatatacgatgaaataacgcgggcatgccgaataaaaaaaaaagaacatatttttttttttttagagaatattattttaatgtttgtggctttttttattttttaggtgtggccccccgcgggctatccccttttttctattttttatatagttcctctcttatccggaattgcccctcccccantactttcctccgccgcccgcccctttctcgccctccttctgtggtttcctcctatctcccgcccccttcggcggcatgccgtctccgcctttagcggttcttttaccttccgtattttttcctcccaccccgctttttattgcccctccgcctcctgtttttcccccccccttcgccgtttcccatctccctgccgttttcactgattctcccgttcgttgccaccaccacgtcactgttcgtcggtttatgtatatcttatggcagagcggttgccgtcccctggtcgtgtgtttcttcattgcgccgccccgcgcttcacccgttttatatattt

SEQ ID NO: 159977 - DNA, 2630 bp, Zea mays
  unsure (1)..(2630): unsure at all n locations
  Clone ID: MRT4577_77477C.1
gggtaccctcgggttcggccggagtgcgcagcgcatcgtcacccagccccggacccccactctttttttttttccttttctcttcggccggaagtcccagcccggcagtccacctgtccaccccctcccccgctgctccaaaaggcgggcaccaaacaccaacccgagccccgagcacgagcgcccaaccaaatggcgccgcacaccaccgctggaggcgggggcggagccgaggatgaggtgtccgaggcggcggctgcatcccccgccctgcggcaccgccacgcgggcaagggcgaggggctgggcggcaatggcggcgctggggccgacggccaggcgtccgtggagcgggtgttcgcggacaaggcggtgccgtcgtggcgggagcagctcacgctgcgggcattcgtcgtcagcgcgctgctggccgtcatgttcagcgtcatagtcatgaagctcaacctcaccacggggatcatcccctccctcaatgtctccgcggggctgctcggcttcttcttcgtccgcatgtggaccgccgccgccgagaggatgggcttcctccgccagcccttcaccaggcaggagaacaccgtcatccagacctgcgttgtctctgcctacggcatcgccttcagcggtggctttggcagttatctatttggaatgagtgacaaaatagctaaacaagcaacagaggctaaagatgctaataacataaaggatcctcaccttggatggatgatagggttcctattccttgtcagttttattggtctctttgcacttgtacccctaagaaagattatgattgttgactacaagttgacctatccaagtggcacagccactgcatatctcatcaacggttttcacacacctgagggagccaagcttgcaaagaagcaagtaaagacgttgggcaagtactttgtgtttagctttttctggggcttttttcagtggttctacactgcaggggatgagtgtggattcaaaaattttccaacattgggccttgaagcttataacaataggttcttctttgacttctctcctacatacgttggagttggcatgatctgcccatacatcgtgaatgtgtctgttctgctgggtggtatcctctcatggggtttaatgtggcctctcattgccaagaagaaggggagttggtacccagctaacctggaagactcaagtttacatgggttgcaggcttacagggttttcatttccatcgctttgatccttggggacggtttatacaacttcattaaggtgctgatccgcacaattgcgggtttcatatcaatggtgcagcaaaattcaaaaagcatgcttcctgtttcggacaatggcagttccatgtccagtatggaggctgtatcctttgacgatgaacgtcgcattgagaattttctgaaagatcagattcccaagtcagttgcatacgggggctatgttgcagttgctgctatatctattggcacccttcctcagatcttcccgcagctcaagtggtactacattttagtagcctacgtcgtggcacctgtgctggccttctgcaatgcttatggaagtggcctcactgactggtctctcgcctccacctacggcaagctcgctatcttcgtgttcggtgcatgggctggcctctcacacggtggcgtgctcgttgggctcgcagcttgtggtgtcatgatgagcatcgtgtcgaccgcctcagacctgatgcaagacttcaagaccgggtacctgacgctggcgtcaccgaggtctatgttcatcagccaggtgattggcaccggaatggggtgtgtcatcgggccctgcatcttctggctcttctacaaggcgttcggtgacattggcgagagcggcaccgagtacccggcgccctatgccatcgtgtaccgcaacatggccatcctcggcgtggatggcttcggctcgctcccgaaaaactgcctcaccctctgctacattttctttgcggcagcgatcactatcaaccttgtcagggacctgaccccctacaaggtgtcgaggttcatcccgctgccaatggcaatggcgattccgttctacatcgggtcctacttcgccattgacatgtttctgggcagcgcgatcctcttcgtgtgggagcggctgaacaaggcgaaagcggacgcattcggacctgcggtcgcgtcggggctgatctgcggagacggcatctggaccctgccgcagtccattctggccctcgccaaggtgcagccccccatttgcatgaagtttttgtccagatcgaccaatgccaaggtggacagcttcctcggcttgtcatgattttacacagaatggcaagtagacacgccctcatcctgtaattattggtgcaagatgcaatcaccaggctacagctctgtaaaagagaagaggttttgctgtggagtgaccaaagctttgtccgtgtagtctgtgtcaagaggaaaatactcaatggccctctgcctttttttgtgcaattattaactagcgtattcacagttataggtatttttgaaatgtgaaacgttcactacaaatttttttttaacgaatggagcttttgnnnnnnnnnnnnnnnnnnnnnn

SEQ ID NO: 159978 - DNA, 292 bp, Zea mays
  Clone ID: MRT4577_77478C.1
ctcactgcgtgcgaagacgcatataacccccatagagcaggagacgcccctatctgcctccccgatccacatggataaactgccgtgcaaaaatgtgcacggctgtcccgagccgttcatgaaaccactgaaacgactattttctgacccacatgttgccaaatctgtcagttgaagccatcgccgtctcgaatacccacactattatgcaagatgcaccttccacttagcatatgatatgaacactaggcttcaactgcagacattctctgttaacaaggaggactttatc

SEQ ID NO: 159979 - DNA, 659 bp, Zea mays
  Clone ID: MRT4577_77479C.1
cctcgaggccggccgagttgctgccacgatccactgagatccagccccgcgtcgcacggattcgtcagtgcagtagcaccgtgctgcccatgctcgcgtccgcaacctgacagcggtcaatagaagactcgctcgcgtccgcagaagactcgctcgcgtccgcgacacgcttcccgagccccgcgctgcggcctcccgtgcgctgcggtgagcatggtggtcgtcgatggagccatggaggggacggctccgtccgctcgtcagcaccacgagccacggctcggcgcggttctccaggcgcaccaggtcctcgatcccggtgcgggtgagggacaccacggcggggctctcgaagatgtccggggcacccgccgagccgttgtcattgccggacctcggggcctccacctgggcgtcttcgttgctgtggctcaggccggcgccagcacgtcccatggcggccggcgcgcccgtggccgccggcgcttcgccgtttgtcccgaatcgatggcatactttgaggctttatacatctcactgggcaccagagcgatggcaggagtacgaaccacttttgaattactggcgtgataatggaataaagcttgttggatgtgggacctccacttgagctcaaggaaggaacagcagcagggctg

SEQ ID NO: 159980 - DNA, 694 bp, Zea mays
  Clone ID: MRT4577_7747C.1
agggcatgcctggtgtagcggtgagacctgtctactgagtacaaggccacggatttgaaatagtttctcagcatttgtggagattatgactccaaaggcccgctcagatgtccatgtgaaccttcctgcgcttcagaagcttgatatgatgctcattgaagtaatggactcaatgatagatacagagttctggtatgaggagagtggcagcagagctgatggtcgggggaaaattacaggtccaaggaagagtaaaaagtggtggctcccgtctcctcgtgtccctgagcaagggctatctcaattccagcggaaaaggcttgtttttcaggctaagcttgttcaccagatcctcaaagccgcaaaatccatcgacgaacaagtcctgtcccatatgcctattccggccgccgtcatggatgcccttccgaagtctgggagggctagcttgggtgaagatttgtatcaagctataaccacagattatattcctgtagaggaaatatttgtttcgctcagtttgaaaaccgagcatagtgtgctcgagactattaaccggttggagggcgcggtgtttgcatggaaccaaagaattctagaggaaagaagcaagaggtcccccagacgccattcctggagcttcatgaaggatagctcgtcggaagttgacaagatgtccgcatgcatcgaaagg

SEQ ID NO: 159981 - DNA, 528 bp, Zea mays
  Clone ID: MRT4577_77480C.1
aaaattaaaagtacgggctccatttctaaaaaattggggctgggggtttataataaaaaaacggagggagaaagttggaagggacatcttttgtatagttcatcagaaaaaaaccacttccccaaaaatttttaaagataaaaaaatcaattaatatgcaaaacggggggaagggacgtgactctgattctgaaacaaatacctacggggggggaggaactgccgatataaaaaatcggaatcggaaaagatacatcatcgcacatgcaatgcatttaacggaggaagacccctgctagccctagtactaggacatacaaagcaggaacgggacaactcgccggggcctggaccactcaggggcccaggctgccgaaaaggacccccccgggggggcaaaggacggcggcgacgacggaggacgaaacggcggcggccccggacgtggggctggccgcggccccgttgggggccttggggacccccgcgtgggcggccccggggagcgcggcgacggcgatggcccgg

SEQ ID NO: 159982 - DNA, 484 bp, Zea mays
  unsure (1)..(484): unsure at all n locations
  Clone ID: MRT4577_77481C.1
gcctgcagttccggntccggattcccgggcgcgtccactgctatccggggagcatgggagccaccgggctgttccgtgagcacatcccgctgttacggctgatcttccggtcacagcagaagttcatcaccaagggctgattgtcacacgcggagtatcgaccagaggctggctcatgcagccactaaccccatactaaccaagcaaggggagtactgaagctggcacaaggactactcgtcggacgagaaccagatgggataggacgccagcgatcccaaaaaggccaggaagctttaggagatcagcgagaagctactaaggcttgcctgagctcgcaggcactgctacagacacatgatgaatctggcgagcagaggagcttgagctggcccgtatcatgtgcaccattagcatccattaagcctgacattagaagcatgtaatgaccgtcggagaagagcctgttatcgttgaaccatgt

SEQ ID NO: 159983 - DNA, 241 bp, Zea mays
  Clone ID: MRT4577_77482C.1
gctgctagcccttctaaccttgctcgacccttgaccgacgcctgaactcgcctcccccgcggccggtcccctgcatctgttccccgcgccgcaacccggacgagactacgactactagcaccaccagccagcagcaactgttttgctgccatctgacaaagcgcagggcctaagagtccccgcttcatttatgcttgaacactctttgcttgatttgggattgctgggagagtatgcttgc

SEQ ID NO: 159984 - DNA, 405 bp, Zea mays
  unsure (1)..(405): unsure at all n locations
  Clone ID: MRT4577_77483C.1
tatttatgtttaaatgggctttgacatttgtcacagaaaacacatgggacaggatgcgctccncaaactgtaccatgagagtccactactcatttgtgttctatacactttttccacatgttgtccttgcacaacctttataaccaattttttacattgactgtatttaatgttataaggttaaaggcatttctgttgtttatcgaggctaacaaattatttttgcacgccaatggaccccctcaaggtttttttgaagtcagttttttcttttgacgctatttttgactcccttcctcattcccccggttggccaaatttttttatatattatttttaagaactagcccttttttttattagccattgccaaatagtataactttacccgatccccttattatt

SEQ ID NO: 159985 - DNA, 172 bp, Zea mays
  Clone ID: MRT4577_77484C.1
gattgtgcgagagcacgcttaaaccggctttttagtacaagtaataattacggctggagagatctttagcggcactggaagtcccggatgagttcgtggccacggcaaatcaggacgtatctccgccagagatggggccgtctacgactaggccaccctcctggtccgattg

SEQ ID NO: 159986 - DNA, 1064 bp, Zea mays
  Clone ID: MRT4577_77485C.1
ggagagggagtgttttgttagagaagcgctagacagaaatcgtgtgaatttggttcatactattggtttcattccattgtgattactttttttactttagcttcttaatcttcactggacattcttcatgtggatgtagaattgaagaaatcccaattattcttgaggaagataaaatccagttccgtcatctactgtgtggagattggagaaatagcacatgaatcaagttttttggcagcattgtttgcttacttcatggaggatgccactgttcctaaatatcagtgtcctcaaaactttcaccatctagaaatcttcttgagataatgctggcagccatatctcaacacttgatagattgtatttctgggagagcaagctttatgatgaagccaaggccagcagtgccatctgcaggaagtacggtgggaaatgtaagaagctaagacttcatgaatcaagaggggtgaatcaaattgataacgattttacccgtgcggcaagggaaagatgtcagtatcactgcatcctccaagatgatcggatatgctcttcaggacccatcaataagagagatggctgagcaaattgcaagtgaccctgtgttcaaccagatggttgaacagcttcagaaaagtgctcagagcatcttgggaatgcccttatgtagatcctgctatgtccagaatgcttgagaacttgaccattctggctcataaggagtagcttgaggagaggatggcccgtatcaaggatgatccatccttgaagccaattcttgatgagatagataatgggcgtccatctgcaatggtgaagtgttgttactgttgtctactattactatccatgagatctgtttggaatatgcatcggacttgtggtgaacatgaatgactttggtcattctgagataatattagctacttacacagggaatatgccgagtttatgcatcttccaagaaattacagattttggtaattcgtcttttttttccttttggggctgcatgattcatggctgatgagataagattatatcaaactatattgtcactt

SEQ ID NO: 159987 - DNA, 302 bp, Zea mays
  Clone ID: MRT4577_77486C.1
cagacgcgttcgactgtgagccacagaaaatgccaaaactcagtaatgagcgcgtatcggctggaggtcctatagagacatgggactagacggatattgtgcgaagtgttccctgcatagaagatggctataatccatggaggctcctttgcttgtctggtcgtgatagctcccacgcaaccagtgagctattgaactgcacgggacttgcagtttctgcgtcaaatataccctcgagaaaatgaaggtagcggtgccgagtaacattagtaagcaacgacagtgagcattatactggaagc

SEQ ID NO: 159988 - DNA, 1566 bp, Zea mays
  unsure (1)..(1566): unsure at all n locations
  Clone ID: MRT4577_77487C.1
atcacgaaaggaccggatcttggtgagctcgaggcggacgcgtggcgagggtacatgacgcggttcttcctatcgcggcaggtgaccaggacctctatcccctccttgatggaggtcggggactgggatggaggccagggactcgacggcggtgggcctggaggtggcggcaaaggcctcggcgtcgacggccgcggcgaattgaagaaatcccaattattcttgaggaagataaaatccagttccgtcatctactgtgtggagattggagaaatagcacatggatcaaagccatcaagttttttggcagcattgtttgcttacttcatggaggatgccactgttcctaaattgtcctcaaaactttcaccatctagaaatcttcttgggactaatgctggcagccatatctcaacacttgatagattgtatttctgggagagcgctttagcacgaggccaaggccagcagtgccatctgcaggaagtacggtgggaaatgtaagaagctaagacttcatgaatcaagaggggtgaatcaaattgataacgattttacccgtgcggcaagggaaagatgtcagtatcactgcatcctccaagatgatcggatatgctcttcagtgttatatgctcgtcatgtgcaggacccatcaataagagagatggctgagcaaattgcaagtgaccctgtgttcaaccagatggttgaacagcttcagaaaagtgctcagagcatcttgggaatgcccttaggatcctgctatgtccagaatgcttgagaacttgaccattctggctcataaggagtagcttgaggagaggatggcccgtatcaaggatgatccatccttgaagccaattcttgatgagatagataatgggcgtccatctgcaatgagctttccaaaacatttctcccgaagctagatacagtctactatatccacaatttcaagggagctaaaggggaacgccttttcaggtgctaccctgagccttggaaggtcatgagaaaggcatcgtcctacagctacatctgcctgcatcaacaagaggagatgccttcgttgaaggaagtgtccctcgacatccttccttctgtttagctaggacctctcgagagttgttgtgtcaataagagagtttacgcgactagatcttcatttctcacttctttggtttatacctatgctgaccggtgactgctaagttgcatattgccgctatcaggtgcgcatttctcgtccccccattcttataccctccttcgattactccatttcggcgcgtaccaaatcgctcgatggaaaatggtgtctcgatggcttttccaaaatctggattgctatgcatgtctagcgatgcacttggatttttggtacgacttgattagggaacggacatggggaatctcggtgtttttgttttcttctggtcgantaattgttcaccatgtagatatcctctcatcggaggggcaggctgtagcaacaacacccgtttaatcgccatatattttgatcaaaaaaaaaagaacaagcgcgctcgctgatcaggactcaag

SEQ ID NO: 159989 - DNA, 380 bp, Zea mays
  Clone ID: MRT4577_77488C.1
ttatatattttatttattggaacttgagggacaaaaaaggaatttaatcgacaacagccataggagaagtagtatccttgatttttcccttttcggcttctcttccagcctttcttctttccaaaatggccttacgatccttatcgagctttaacttggtgatgactactttggatgggtgaactccgatgttgacagtagctccgttagccttttctctggtcaatctttcaatgtagactacatacttctttctgtagacttggatgacctttccttctcttcccttgtatgtacctctgacgacttggacttcgtcatcctttctgaaggggatgttcttaacgttgtacttttgctttaaatcagcagacaaaggg

SEQ ID NO: 159990 - DNA, 239 bp, Zea mays
  Clone ID: MRT4577_77489C.1
gaccaatccttaacctagttttgtttatttatatcaaactccatccgtatctcactcatcccatccatattagccatcctatttatggaatcaacacaggcccatattagccacattcaccacatttactcaccatttcatctttgcatttttattcttatttcctccaacatcaggttaacttacaacagttccccggtctgatataaacatattcttaacttttatatatttaacac

SEQ ID NO: 159991 - DNA, 1103 bp, Zea mays
  Clone ID: MRT4577_7748C.1
cagttcaaaaataattatgtaatattctgaaactttttactttataataaagatacaagagcaagtaagaaacattctatttggaggttaatcatctaaaatgtgcatccatctgaccctctttgcttcattggaaccagctccaccatataagttgtaggagacatcaaccagtccatttcttttctccaccacaaccttttatcttcacacaatggttccagcttccagagttctccaaaaacagtagctttaacattaagtcagccttgtactatcatggtcaaggagcacagggacactcgagtatacacaaaataaactacttctagaagtgtaccagagagattgattatgccattagacaaggccagagccgcacaaacgccctaagctcctcctgaagtatcataaccgagcaatagctttgcaattttttccttcatgttttcaatatttgaagcactcaaggtatatgtaattgttttcttccctttgaaagggagtagatgaattgccatgggtgtacccaactcatctagtgaatgctcctcctgcttgctaagactgtgtgaagtgaaggaagaaccagaagcatctttactagagcaactagagacttcatcatcaagggaatcagtggtgatacagccatctccgcctgttgttgcactgatgccactgtcatcgtcataggtggaactgttgataatgcaggtctcgaggccattatatgtcaccaccctgtcgggctcttggtccatatcgatgctgaagtcttgaggccgccgccggcagcacgccagcgtcttcatcctcatctccgccgccgacccctcctcctccgccgccgccgccgcgccgcgctagcgctaccagcagtaactttgcctgtggccgtcgaagccaacagcagcaagtcagcggccgccgcccggcatggaccgggttaccactgtggcggtgagggcgaggggcaggcgcttgaatgtggaaacatgcgtgagagcagagcagcggccagcagggcaggggcgcacgccgcaggggggagcagtagcgcagcccaggtatggaagcggaggagagcctcgtgccgaatt

SEQ ID NO: 159992 - DNA, 344 bp, Zea mays
  Clone ID: MRT4577_77490C.1
gacaggcggtggcgccattggtcgtgagccacgccttacccacatgtgagcgtgtggagcctaatctaggcccaggtgcggttgatcgtactatgacgacaagagctgcagctttcaatggattgcgggcacaaagatttggccgtgaagcgactctacagagcaatctgtgcagtgagccatggttgaaatataatagagacattgtggctgatattggattgagaaagtctctatatacttgtgctagactgaagaaaggagaagtcatatatctagaaacacacattaatcagttaaacagggctgagctttgctataaaggagacaagccttgccttatt

SEQ ID NO: 159993 - DNA, 543 bp, Zea mays
  Clone ID: MRT4577_77491C.1
actcaagaaaagaagaaattttatatttttttgaatcttcagcattactgatcactcaaaactaaagatgaacacatagcaaaattgttttcaaatcctaaaaagactaaaattcgagttaaacgtgcatcaaggaggaatagaagaagtccaaggatcatatcagaccagaaggtcaaaccagttccatatttgaacacaactgcaaaacacataagcatgtaagtttcctccattacaacagcaacatagtttttaagaaagcccacaatttaatgcacataacttatttccttgttttcataatgggagaatgtataacttattgttcgcctgcaatatcattaataggaaattaatatataatgaaatgcactaagtgtctgaagacaggaagaagtgctccaactaaaataagccattttaaatattaactatatcgaagggtaaaacatttatatgaagtaaccaatcacccaagttcacttggcctgtaaaaaaaatctacagaagtaaaaaagctctacataacccatgattcat

SEQ ID NO: 159994 - DNA, 191 bp, Zea mays
  Clone ID: MRT4577_77492C.1
ggtacccgcagtacggtccgaatccgggtcacctccgccgtcagcgcgcgacctggcgagctggctagctaggagcaggccgcctacgccatcggccgtccacagcaacttgtgctccatctcctggttctggagcagcggcggcggcggcggcagcgagaagcgcccgtctcttgtcgtcgtcaacctcg

SEQ ID NO: 159995 - DNA, 375 bp, Zea mays
  Clone ID: MRT4577_77493C.1
accaaatatatttatatataataaacataatagttagttttgtcttaaatattttattttcatgcggacaactcaacattgtacctacttagacaggatgaacaaatacaagcaaccaaacaaagagaccttatatagtctggttcagctcacacgaggtaggctaggtgatacaagtaaccaaacatactacaacactgtccaataagtcccaggacagattaagaaaaatatatataggggctagtttggaaacataaaccccctccggccttgtttgatactctagtattcacttcaatccacatgtattgaggatttgaggtaaatactagagtatccaaacaaaagctcccggattttcggggattgggg

SEQ ID NO: 159996 - DNA, 276 bp, Zea mays
  Clone ID: MRT4577_77494C.1
cgggacggtgggcggtgctcgatagagggttatgcacctggtagttgcattccaagtcctcaaaagaatgttgagagagacttcttgaagaaatattggtccaggtggaaagcggatcatgtaggtcgttgtcgggctatgcctcacataaaaacctttactcgttacagtggccaaaacattgcatggtttctgcttacctcagcaaatttaagcaaagctgcttggggcgcgctacagaagaacaacacacagctaatgatacgttcatatgag

SEQ ID NO: 159997 - DNA, 532 bp, Zea mays
  Clone ID: MRT4577_77495C.1
ccggccgggtcgcctcgcctcctcgacgcccctccctcacccttgatgccacgcccccctcccatggcgccacgcccgcgcccctccccaaccgcccgaggcgcgacgctgaccctcctactcccgatcctactcatcacctctacagcactcccctccgccgccgttgtcccctacgacgacgacgctgtacgacacgcacctgctaagccgctggccttactgacaacccattcctcctcgccctcttactgaagacgaagccgatagtcaacaggatcctcaatggcaagacgaaggagcagtacgataggctgcgctacctgctatccctgatcaactgataaatatgcatctggtaaggactcccgtaggacaccgacagaggcaggggccacatagccaccgacaactgcaccggactccatgttccagatcgcctacatctccctattcatcttctactccgacagaaagaccactaggataaaggtcatgccgcttatggagctagagatattcacgttcgcgc

SEQ ID NO: 159998 - DNA, 558 bp, Zea mays
  Clone ID: MRT4577_77496C.1
ttaccagcacaaggagctactatccgtgactgctttccagagtgctctagaggtcctgctcctacacacattcgcctcgccgccatcatgccctgactctgtatctgtctcctccacctcgtgtacccaccctcgccgtccaacttgcctaacatccttgaccatggtggtgacgcgctctgcctcctctacctccttcactgccacgtcccctccgttgaggcccgccgccgtgcgtttgtccccatcctcggtagagtgtactgtgcggagctcgccatcaagcgccactatggcgagcacctccatccgcagccaattaactcctccttcggcatgtccaaatcagtgtgagggaggggactggtcacttgctcccactgtggtttctgttttctagaagaagaaaaggtggtgagatcaagagtgtagttgatatagcatcgccatgctctcaagccctcaaggtgtttgctcaaatgccaataagatcagacactattattcaatttatgattataccatatgatgtataaaaaaaaaaaaaaaaaagcggcc

SEQ ID NO: 159999 - DNA, 1111 bp, Zea mays
  Clone ID: MRT4577_77497C.1
cgggaagtgtgagctaagcgaaacaaactcagcgatcgacaagctaagctagcagactacacatccaggagccgctgcttgatcaccgaccaatatggccacggagtacttgtccgggtggccgctgtcgtcctggatcagccccggcgcggcgttcttcctcttcgtcaacgtgctcatcggcgccatcgtggtcacgtcccgcgggcaccaagctggcggtggccgcgcggcggcgtccacgcggaggctctgccgcagcgcgtcgtccatggtcctcgatcggctccgctccttctccttgttctccgtccatcccgaccccacggaaacggaagagcgctgtagcacgtcgtcccccctcgagctggaagcagaggaggagcagcagccccaaccccaaccagccgtcgcggagcccgcaaggtcacttgttgcggcagtagcagctcctgcagacggtgcatcgtctgagatcgccaaggaagaggcggcggaagcgggaaaagacctgcccaccagctcgaacgaggcccacggtctggtgttgcagttgcagcagggtcacggcggccggcagcagccaccgtcgtcagtaaatgtcgtcacagccgccgatgcaactgcggcggtggagataaaggaggaggaagagaagaaggcagagcaggaagcaaccatgcagcgcgcacctgcgtgcaggcggggaacgacggaggaagcagcggaggggaaggcggcgctgaacgcgcgggcagagtccttcatccggaagttccgggaggatctcaagctggagcgtctcaactccattatcaactacacccgcacgctccgccgcggcgttggcgcaccacagcccactgcgcagtagctctccgctcatcggtggtccatcgttttttattgtttgcttaatgtatagagtacttgaatttgtttgctcatcacaatggtgccaaaaccagatagtttaatttaaatgtgattgtgtaccactgtggcttccttatatatggacactagtccaaatgattaatatatatccataattatcgaaaaaaaaaaaaaaaattcaagtactctatacattaaaaaaaaaaaaaaaaaa

SEQ ID NO: 160000 - DNA, 431 bp, Zea mays
  Clone ID: MRT4577_77498C.1
aaaaaaaaaaaacaaacccgggccccctttaatttttggcccgggggaaccaccccggaagaggggggggtttttttggggggcttatttttcaaacataggggctagctccaagcccattccccaggccctaggcttttcccagttactggggggggattgtcccccccccgaaaaaccaggggcttttggggacccccttggggggggccaagttgccctcggcccccggggggggggggggggggaaacccctttggcccccccggggggggcccgggggggcctttaggggggcctccaattgggcgtccgggcccggggggatccccccccccatgggggggctaaaggccgggccccgggagaaccccgggaggtcccccaattcccggaagaattttctttttaattccggccacggggggggg

SEQ ID NO: 160001 - DNA, 496 bp, Zea mays
  Clone ID: MRT4577_77499C.1
gatactaaagtagaaatatattactacctgatgtaacaggagacattctaataaaagcacggttggtggcttacactacattacactggcctttagacacaaaggctactgaaaatcaagcaacctgtctatcaaaattatgcttttcaggcatactcatacctgacgggacactataccgcaacatgaaagtgctaaaccctaaagctaaaacggatgctagaaaatgccatggccttaactgatgcacctaccagacccacctaatattgttaccgactcacctacaaaagagctccacaacctcatgaaaaccgcaacatccctataagtatatgcgcccggccattttcatttgttcacccgaagcctgcagtacacctctcttactaaccacgtaagcaacttgcccagtccaggtttgtggttgctacgcggtttctagggtcaaacacttgggcttcaaggccactgggtgaaataaggagcggaggca

SEQ ID NO: 160002 - DNA, 2220 bp, Zea mays
  Clone ID: MRT4577_7749C.1
gcccacacccacctattccgctattcgatctctcgttcgtcggcacgtctcttccccttctgctttgccttttccccttcctctctcccctgtcccccctccgtcccagccgagcgagaaagcgaaggggccaaaaaagccgcaccggcttccttcccccacccgaagagatggaactgttctacgaactgctcctcacggcggcggtcaccctcctcgctgccctcctgctcgccacgctcttcgcagccaatgattcccatcgccggaccgatcgcgccgcagccgcgatcgccgaggaggtggcggaggaggagaggatcatcgaggtcgacgaggtgatgcgtagcgaagggatggcggcggtggcgccgtcggaggcggatgggtgggttgaggcggagaaggcgccggcggtggtcgtcgcggaggtgaaggagccggagagcttgcccgaggaggagggggttcccgtgaaggctgttcgggaggtgcgccttgctgcggaagtggaggagggggaggacggtggtggcggcgtgaagcggcctgatttgacctccgcaactgttgtggcggcggtgggtgctgaagcgagccagctggtgtcgggcgctgatgttgtgcctagggaggtttctggtgcggcagggttggaggaacgaaccgtgcaggatgttgtggtgaaccagtatgatctgggtgctgaggttgctcttgttcccgttgaagttctcgaagcaggaccggacaagcagggagtagaagttgttggagttgcgcaagtgcctcctttggaaacagaagctgctgaagtgaaacagcaccatctcgttgccgaagcggctcctgctgaagatgttcttgacgtgggattagtggacaagagtgtacgagctatcgaagtgaggcccaacgaattggattccgagactgttcttgaagagattcttgatgcggtattggaggaggaggagcaagtagagcatgaattgcctgctggggctgctccacaaccagttctcgatgtgccattggcagggaagggagagcttaaacatcatcagcccgttgaagaagctgccgaggtacacgaggatgtgcagtgcaagcaggaagctgagtgtgaggcccaaacagttgatcaacaacaagaactggttcctgaagaggagtcggtcgcaggaaaaaatgatgatgtgaatgttatccatgaatgtagcttcagtgatgaagtggttaccgaattgcctgtgggggaagtgacatcgcaagggctgccgaaggatgaccctgaggcagacatggagtttgaggagtgggaagggatcgagaggagtgaagtggagaagaggtttggtgcggctgcagcatttgctgctagtggggctggggcggctgccctgtcaaagctcgatagtgatgtgcagctgcagcttcaaggtctcctcaaggttgccattgacggtccctgttatgactcagcgcagccacttacactgagaccctcatctcgtgcaaaatggtctgcttggcagaagttagggaatatgaaccctgagattgctatggagaaatacatgaatcttttatcagaaacaattccagggtggatgatgaatgaaaccttggacacagagaacactggcagtttacctgcggagactatcttaacaacgatggcttctacaagtgatcaacggagcaatcaagggaatgaagataattctagcataggtgaaggtcatccaataacttcccctaacccagagaaaggccagagctctgatatcccaactgaatgaaggcaacactgataaaacatttcttgcatcagtggttccagcccattgctgggagcattatcgatgcgttcgtcataaaattagatttgtacagttgtggcggttgtgctgtgatgatgttggttcgtgtatgtatatgactgtatatatatgtttgtgctaatactactgctgcggcctgtatatttggccagttgacgacttgtcaccggttgtggtcagtagtaacgttacctctggtaactgatgagtggtaactgtgtttgttaccacgtagtttggaacgaagaacttgagcggttcaggtaaaagacttgtcgcattacaaattgttgaacttatccgatgtagggttgcattgcatagttggactgctatgctttcgagaggaaaaaaaaaaaaaaaaaaggggcgg

SEQ ID NO: 160003 - DNA, 1371 bp, Zea mays
  Clone ID: MRT4577_774C.1
ctaatgtttgcaaaacatgagattagtcgactggaaagtgaattttctgcatacaaggtccgggcacatgcacttctgcaaaaaaaggatgctgagcttaccgcagctaaaagttcagatttcattaaagaacatgaagaggccataagggaagctgaaaaggaggtggcagctgctttagcagaaagagataaagcaatagatgatctccaaaaggcagaatccagacatggtgatgagattgaggcaagagatatggctcttgctgatgctgagaaaaagctaaaggatgtaatgaagaagttagattctgttacttctaatttcatctcagaaaaagggtcctgggagaaaaatttgatgaatgtaggggaaagctggagattgaaatgtgagtctttgaaggttcagagcaatgaccatgtcgatgatgaactaaaaaagaatttaggagagctgacactaaaatatgagaaactgaaggaagagcatcaatcattccgtgatattgctgatagaatgattgaagacaaggaacgagagataactaaactcctcaaggaaaacagggaccttcaccagtctttagatgctagaccaacagttagcaacaatgatcatcaaagtcaaggacctgttaaggatacaatgagtgttgaattggctgagcaacaaattttgcttctcgcaaggcaacaagcacaacgagaagaggaattggctcagtcacagaggcatatcttagcacttcaacaagaaattgaagagctcgagcgtgaaaatcgtctccatgatcaacaggaagcaatgttgaaaaccgagcttcgcaatatggagagatcacaaaagcgagaaggaatagatatgacatatctcaaaaatgtgattctaaaacttcttgaaacaggggaagtgggagcgttgttgcctgtggttgggacgttactacagtttagtcctgacgagctcaagaagtgccagcaaggtgtcctttcgagtgtggtctcttcacaagctactgcagtgtcagatggcacaaccacacagaattcgttctttgcaagattctcgttctgaggcattgccctcgaagatcagcagtttagctgggggagaggatgtcctgagccttcagattcacagttttgttgaccgtagaaaacgtttattcatttattagttacaagcgtccttaccccccttctccttctgtaaaagtagtgcatatagcaggattaagataaacacatgtaatggagtatatattgtgcaactgccatatatgatatgatatatagcggctcatattaggttgccgaaaaaaaaaaaaaaaaaaaaaaaaaaaaaaaaaaaaaaaaagaagatgcaaaa

SEQ ID NO: 160004 - DNA, 498 bp, Zea mays
  Clone ID: MRT4577_77500C.1
cttggaactttgggctgatttatgtgcttgtttatgtgcttgcttatgtgcttcgttattattgttctgttctgctcttgtctctccttctggataaagttggggttgcctggtgggaggtaggggatgtatgggtaggtagttacgaatggtactaattttaatggtgggccttcgctgcatgggaatacggagagtcatgtgacgcgggcggtgattggtgcggtgctggttcctcctgtgctttctgagtgtcgtcttcgtacttattcctatattgtggaggatgatggtgctgaggaggaggaggattctgaggaggtttgttgtcttcctctttgtttgactttcgagcatcatcatgattggcttggtcttcttgttcctgctgttaagacgcgattcgattgaattgtgttccttcttgcttaagaaacgtgcggcgacatgacttgccctcggactcaccacgcgtctccgtccgacctgccgagctct

SEQ ID NO: 160005 - DNA, 354 bp, Zea mays
  Clone ID: MRT4577_77501C.1
attccctacgctagccatctcatccttctcaatatcataaacttcctttgctttataatcacacttaataacactataagccagtttatctagaaagagtgcttccactttaatttcaccatcatcccttctaactacaactttccctatctctcatcatatttataatttcttatattacatttttttttcacatccatctaataaaaaataattttaactttattcatctttacaataaccactataatacatcacaatctctttcactatataattattaacaatattatatatcactaatcacatccacattatattaatctattccttttacattttcctataactcta

SEQ ID NO: 160006 - DNA, 210 bp, Zea mays
  Clone ID: MRT4577_77502C.1
cggatcagcgacttaagtcggaatcggctcgagtgaagagttcatgagtctattcattgatggaaaagccgaattatatgttgcataatcatacacgcaagtcacagaattatgtgtgtactatgaaatacgctctgacttgtacactgtaggatccataataatttatcaaatcaaggagaaaacattagccagcagctacgcataata

SEQ ID NO: 160007 - DNA, 293 bp, Zea mays
  Clone ID: MRT4577_77503C.1
cccccctgaataaaaccccactgttcccaaagtagattaatacactacaaataactgccatttaggggggcattatttgcacaggggtatccaaaaagctgattcctaaaaaaaaaattttttttaaaactaaaatggtgggccgggaacaaaaacactcaaataaaactggccatggattaataactgcggagggaacatgcacaattttagcaggaacaggttttaaggggggtcctaattaaaatccagttccttcctgtttttaaaaagggggttttgtttcaactcag

SEQ ID NO: 160008 - DNA, 189 bp, Zea mays
  Clone ID: MRT4577_77504C.1
acacccaatttagtggcaattccatttctatcccgcccaatacaccggcggctgctaaacatattgggcgaacacacttggcaattaaacggccgggacggcacaaaacaggccgggggccgcgcgccaaaaccccgagagagaaagggggggggttacgccaaagaaaggagaacgaaaccattttca

SEQ ID NO: 160009 - DNA, 1050 bp, Zea mays
  Clone ID: MRT4577_77505C.1
gtcgacccagcgtccggcgaggcggcgccggggcgccggaaggtgacgtacgggttccacctggtggagggccggatgccgcacggcatggaggaccgccacgtggccgagttccggaagctggacgacggcaacgaggtcggcctcttcgcggtcttcgacggacactccggcgccgacgtcgccacctacctccgcgagcacctcttcgacaacatactcatggaccaagtaatataatataacccacacgctagctctctgttcatttcattgtttagttcagaattcagatactagcgtcgcgttgggttgcgtcgcgtcgattatgtttcttctcgggacgcgtgtcgcgtgctcggctccgcagtcgggctccgatttctggacggacccgacggaggcgatccggcgcgcgtaccaccgcacggaccggaagctgctgaagaaaacggcgggcgacgacagcggcgaggggatgaagaagggcaggcggcgcggcgggtcgacggcggtcacggcgatcctgatcaacggagaggagctcgtggtcgccaacgtgggcgactcccgcgccgtgctgtgcgacgcgggcggcagggccaggcagctgtccgtggaccacgagccgctccgggagcgccgcgccatcgaggcccgcggcggcttcgtcaccgagatccacggggacgtgcctcgcgtagacgcgcagctggccatggcgcgcgcgttcggggaccggtcgctcaaggagcacatcagctcggaccccgacgtggccatcgaggacgtcggagacggcgccgagctgctcgtgctggcgagtgacgggctgtggaaggtcatgtcgaaccaggaggcggtcgacgaggctcggggcatcgaggacgcccggaaggcggcggtcaggctcgtcgacgaggcggtgcggcggggcagcaaggacgacatctcttgcatcgtcgtgcgactgcactagctagtgaacatctgctcggtcgtcgggcgaatgtgtgcactgttttagcatcatatgtgcaagtttacatg

SEQ ID NO: 160010 - DNA, 192 bp, Zea mays
  Clone ID: MRT4577_77506C.1
cccgataccggaccgccgcctcctggcggcccaccggctcctattataaggagtcttataacagctcgtcatcatcatcataatagcttcctgctgggaaaaattatcatctcatcacaccacaccacatcataccctccacatcaaatataaagcctccggtgcctccttattaggcatccaacctacaat

SEQ ID NO: 160011 - DNA, 140 bp, Zea mays
  Clone ID: MRT4577_77507C.1
tctccgcaggacgcgtggtactatacgcagtgagattattgcaaggacctatgctcagacagaagactcagatgctgcgcaatagctgctggatgcatgagcttgttggttgacaatagcctagtgagtgctcttatgta

SEQ ID NO: 160012 - DNA, 1124 bp, Zea mays
  unsure (1)..(1124): unsure at all n locations
  Clone ID: MRT4577_77508C.1
tttttttttttttttttgacttttaaataaagagtttcttgaagatgctctaaggccggacaaactgatagtgttagggccggtttggttcatcaaaatacatatgaattgaaggtgattgagtgagtttcaatccatagcaattaaaattattttataatttttttctaatcccttctaatctatgagacataggaataactcgtagataattgctgcactaaatcaggcacacggtattcagatgctggccatggtccttgccaggctccacctacgcaaacgtctccgacagcttgcagaagccgagcttcctgagcctgctggtcatggggttaccgcacttgacgtccaccaactcgacgccgtacacgccccccttcttcttcgccctgcctccactcggggtccggacgtccacgagcgcgccgtccgagcgcagcatcggcgagtcgaacgtgttcctccgggagaccctcctgggcttgcagcaggcatcttcggcgctcacgcggtcggccctgctgccgccggagatgtccgaggagcttttcctcagcacggtcttccgaggagtagcggctccgcacggcaccgagacaggacagccttggtggcgcctcaggcgcgggttgcccgcggctgccggtggcggcggcgcgaccttgacggcgtccagttctcttgtcatgagggagccgatggtgcccgttgtgcctactttgatcgtgcctccctcgccgtggacgacggcctcggtggctgcgcgaggcatggtctgtttcagccaggcaggagaccaccagcgacgggttagctttcgtacaatacaatacatacaatacaagcagcggctgagcaaagcttgaagcaacagctggacttggatcgagcatgcgagagctggtgagtggtgagaggctggcagtgtactgctgctgtggttaaaagcaagggaaaaaaggttgcgtaacaagagggaatgaaatcatggcaattttctgtaagtagtgtgcaggatgatgagaaggggtgaaattgcaggcaattgtctgccatgattgctgtttgatataaaacaaagaaagaaagcgataagtttgcagntattcaactgccatgac

SEQ ID NO: 160013 - DNA, 903 bp, Zea mays
  Clone ID: MRT4577_77509C.1
ctccctcaccttacggagcgagagaccggcttcttcttggggccgcccccgccgcgacgccccgccgcggccttcttaccacctttgctccggcatccatcttcgatcaatcccccgtgctcacgtctccctctctcctctctgttttctctctcccttgctttttctctctcacgcacaagcaggacaggcagcaggcggccgagcgcccgccccaccgcgacgccgcacaggccccgccctgcgcgagcagcgcgctgccgcgccagcccaccgcgatgccgagcgcgcccgacgaccaaacgccgcgaaccgtcgtccgtttcttgcttcatggcgatttatttcatccgcttcttattcctattatctctccattagtaaccgacgtattgacggcatttgaagcctgcggcacctcatgacctccctggcagactcttcttctcccctccttctctctataaatggggacagcagagctctctcttctctcctgcctacccaagcgccccatctctctagctcaccattgcactgctcgacgccgtcgttcgttgctgttcgccggagttcgccgctcgttgccggagcccgtggagttcgccggagtgtgccgttcgtcgccggagttcaccggagccacgtactcgctgtccgtagtcgagccccgctctccgtccggtcgaaacccgtcgatccgtccccgtcacacgcacgaacccgaggttgttggcgacccaaatttattttatgtattttataaattgctttcgattcgattcatgtgttgtatagttcgtttgttgtaatataaacacatgtgattccaatttatgtatttgtgtgcgctacggaatttgttaaaaatatacgattagtaggtaaaaaaaaaaaaaaaaa

SEQ ID NO: 160014 - DNA, 168 bp, Zea mays
  Clone ID: MRT4577_7750C.1
ttttaaaaatgcaaaaatttcttaacttggtgtggtctttaactagtaccacgcgcatttataaattgattcccattcattcgatcacaaacactttattgatcaccttcctcattcaattcccaacatccatagtctctatatcgcctctaacacaatcactcatac

SEQ ID NO: 160015 - DNA, 205 bp, Zea mays
  unsure (1)..(205): unsure at all n locations
  Clone ID: MRT4577_77510C.1
cagcttgttatctctggagcaatccgtgtccacgaggatattggtcttgccgnctcggaagcactagctgctcatggtatacaggagaacttcgacaagcgatcaatctgcgcggatctcaccagcatgagaaagatctctgcgcgcatttcagcagccgtgcctgagagagcttatgaactcggtttggagacccgtctgcctc

SEQ ID NO: 160016 - DNA, 599 bp, Zea mays
  unsure (1)..(599): unsure at all n locations
  Clone ID: MRT4577_77511C.1
anacatgcatacctgtgtttctttccacagttcgcgcttgcgaactccgacactgtttttcatcttgaattcagcttatgatgtatatcagttccaccacattctggcgccgccttcgtctgatcctggaggccattggagccgctgcaagtcggatcctggtggatgcagcgcaacacagatcgcaaccctccaaggactgagaaatgaaatgctgacatctttgagacagtttgaaagcaaaccgaaggcagggatgttcatcaactcctgcttcgcgcattgtcagagtgagctgcaggacacatggttcgcaccaaattctccatccatagataacaagaaaattgcagaggtggtaggtgattggtacttcgaaagaggagctgccgtcaagattgactgtgcctatccctgtgattcaacttgtcgcaaccttataccaattgataagaatgggttctctggcgcctgaagtggacctcgattcagaggcatcaacatttgcccaaacatgattgattacctgtatatattgcacattgcatcacaattcaacttggcacatggatgaataaaatgtagagccagtgctctcg

SEQ ID NO: 160017 - DNA, 1323 bp, Zea mays
  unsure (1)..(1323): unsure at all n locations
  Clone ID: MRT4577_77512C.1
caaaatggcggcgctcataaaccctatataccgccgattcgccgccttcgcctgccgctggatctctgcaccggcagtagagaagcctgtgctgcccctcgtgtatcaccggaacttgcagtgtttgtcctcttgttaattcatttctcatttagatcgaagctaatgcgtgcgatttttcatggttggtgtgctggaatgttctaaatcttagattttcagtgatcccaacaatctcgctgcccccaattctcctgcttcatatatttgattactcaaagcatgtgatgctcccctgaagtagtaagggaaatgctgactctgttcttgctgaaaatattgtacagaaagacacgcgtccgggggcttggaacacattctgatattatgcaactataaagttcaagctatatgggctgatggcagcctcatgcaactgcctgacaggcaaatgatcctagccacaggcataggaaatcgcccggcattgttgtgcaagaaactgataaaacttgggcgtatagtgctggatgctccatccactggacatacacttaagcttctgtcagcttctgattggattgaaatgttccttactttgagcattaagacagttccactacattctggcgccgccttcttctgatcctggaggcaattggagccgctgcaagtcggatcctggtgatgcagcgcaacacagatcgcaaccctccaaggactgagaagtggaatgttgacatctctgagacagtctgaaagcaaaccgaaggcaggggtgttcatcaactcctgcttcgcgcattgctagagtgagctacaggacacatggttcgcaccaaattctccatccatatataacaagaggtggtaggtgattggtactttgaaagaggagctgacgtggagattgactgcgcctatccctgtgattcacagtcttgtcgcaaccttataccaattgataaggctgaccatcctagattaaacttcaaagaccggtaccctgagccatacagagattctcatccgactgcccccgttgctgtgcatggatgtcaggtgtcattactgtaatgtagtggtgaaataggtagattaaaacaatgaaatttatatgtggctaggatcataaatgaattgcaaaattttttctcagaacagtataacacatatttgtcgtgcttcggtagaaggtacgagcccgccatcttttcgacctatacgtgcgagatgtccgtgcttgaggtagctctatgtcgagggaaagacgtcgcctagagccatcccatctctgagcatcgnggtctccccgatgtggat

SEQ ID NO: 160018 - DNA, 878 bp, Zea mays
  Clone ID: MRT4577_77513C.1
attggattgaaatgttccttactttgagcattaaggacacatgaggtgtagctattgggcctctaacttggttatcatggttttgggccgtgggtagagcaggcaatgcaagtgcagtctggcacaatcctggtggtttggcattgagtgtttcttttcacagtttgcgcttgcgaacatccgaaccccgttttcatcttgaattcaacttatgatgtatatcggacagttccaccacattctggcgccgccttcgtctgatcctggaggcaattggagccgctgcaagtcggatcctggtggatgcagcgcaacacagatcgcaaccctccaaggttaactctctgttaagcagatggactgagaagtggaatgttgacatctctgagacagtctgaaagcaaaccgaaggcaggggtgttcatcaactcctgcttcgcgcattgctagagtgagctacaggacacatggttcgcaccaaattctccatccatatataacaagaaaattgcagaggtggtaggtgattggtactttgaaagaggagctgacgtggagattgactgcgcctatccctgtgattcacagtcttgtcgcaaccttataccaattgataaggctgaccatcctagattaaacttcaaagaccggtaccctgagccatacagagattctcatccgactgcccccgttgctgtgcatggatgtcaggtgtcattactgtaatgtagtggtgaaataggtagattaaaacaatgaaatttatatgtggctaggatcataaatgaattgcaaaattttttctcagaacagtataacacatatttgtacataagttgttgtgttattatatgtttccgttcccacgcccgggcact

SEQ ID NO: 160019 - DNA, 1860 bp, Zea mays
  Clone ID: MRT4577_77514C.1
atatgaacctaattggctgttaaatatgcatagcagtttgtataataatcgatttcctcaacatattgtagtttcatggttcttgttctcactacttcctccattgtatttatagcccattgctgaagatgggatgcaggaggcctctatcaagtaggtcaattacctcattaacagggacacctcttgttgccccaccacttattgatatgattagcaatgacccaattttttggtaatatatgaacatgattggttgttaaatatgcagagcagtttgtataataatcaactgcctcagcatattgtaatttcttggttcttgttctcactacttcattgtatttatagctcattgctgaagcatgggatgcaggaggcctctatcaagtaggtcaatttcctcactagaatgtttggttagagtggaatgtaaaggtctggacactctatgaattcgatgatctcgagagcatcattgataggacactaaagcgcgattttgacaccgaggaagcactctggttgcttaagataggtcttgtgtgcatcccggatagccctaagatcaagccctccatgtcaatggttgccaagatgctgcaaggtgagtgtgctgtgagtgacaggatcatgaggcctggcctgatcacagacgtcatggacctgaaagtcaggatggtagagccgatttagttcagcttgacatcatgctcgagcactgccgcaccggaccttgttggggatttcctcgattaaaatataagctccttgatatggttctgtaacatagttctgcaatgctcctttatttagttctttactttttttgttaagatatgaggtgtagcgatacaatatgtctactaacagcgtttgtgttcttgatagttcatttaggattgaatgaagttactggtatgaccttgtcgagactgaagtaaggagggatagagctaaaaactctcttggcacaactataaagttcaagctatatgggcgtgtttggatggcagcctcccatgcaactgcctggcaggcaaatgatcctagccacaccacaggcataggaaatcgaacggtcggcattgtttcctgggccagctgataaaatccattgaagtgcaagaggccgataaacttaggcgtatagtgctggatgctccatccactggacatacacttaagcttctgtcagtttctgattggattgaaatgttccttactttgagcattaagacagttccaccacattctggcgccgccttcgtctgatcctggaggcaattggagccgctgcaagtcggatcctggtggatgcagcgcaacacagatcgcaaccctccaaggactgagaagtggaatgttgacatctctgagacagtctgaaagcaaaccgaaggcaggggtgttcatcaactcctgcttcgcgcattgctagagtgagctacaggacacatggttcgcaccaaattctccatccatatataacaagaaaattgcagaggtggtaggtgattggtactttgaaagaggagctgacgtggagattgactgcgcctatccctgtgattcacagtcttgtcgcaaccttataccaattgataaggaactgaggatgtattaggagttcggcagacgattatactcaattatcatcataataaaaaacactcttctaattgttgatgatgttatgttacttgcatcagatagcaaaccaccctattgtacaatctgttggtggaaacatgtttgtgttgtgtgttacaggttgtctgttcttggtagcctttttggctgaattggtgatatacacaaaatctatttacttgttagaactatactttgtattgcacc

SEQ ID NO: 160020 - DNA, 660 bp, Zea mays
  Clone ID: MRT4577_77515C.1
ctgtgcggcgctcaggcggcggttccggagaagcatccgccactgccgtgggcgctctccattgacactttcagctcctccgtcggggatccgtcacatcgtcgtcgtctccacgtgcgccggccgtcatgctctggaagcggaagagctcggggcgaggcggctgcggcggggacgagatgcgggagcggctgatccccgccgcggggtgcgtgccgccgggctgcgtggcggtgctggtcggcgggggcgacgagccggagcgcgtggtggtggacgtgcgcgccctggcgcagccctgcgtgcgggcgctgctgaaggcggcgcagcgggagttcgggttcgaccagaagggcgtgctccggatcccctgcgctgccgacgagttccgccgtgccgtcaccgccggaggccaccggtgcaggcggtaggagaccgaccacctggtgcctgctggtgctgagtctatgggtcgtgtacatacatgtgtacaggtgcacgcatagggttcatcatttagcgtctccgggtcctcaaagcttcacatagctagcgtagagaaggatgtatatatagatgctgagtttgcagctgttcacttccgagaacagtatccagtttcggttttcaaaagatgcaagtgctcaagttgaatttgcc

SEQ ID NO: 160021 - DNA, 298 bp, Zea mays
  Clone ID: MRT4577_77516C.1
ggctgtcttaggtgttttttttgtgggtgccaatcttcactggttttccaatcaccacccgtacccgagtctagtagacgaaccacagatcgagccaatagggagtgaaaaccagccttctgggtgtgaatcaaatacatggcgaagcgagtatgccagccatagccacagacatgggacagtcacagaacggcctgaggggttccaaccaactggtccactaaaagggtgaaagctcatgagacaagaaacgtgatcctttggcggcattgactactatgaccgcaaatttgctgta

SEQ ID NO: 160022 - DNA, 237 bp, Zea mays
  Clone ID: MRT4577_77518C.1
gccagtttgcgttcgccactttttcaaaacctctctaccaaagcccgcaccggcagcccccagcgcagcatttttcaatggctgcgccgcctgtccaacctgtgccaaccgctgctgcagcagcagcggctgtgaaccgggacgcgttccatctgtgcttcgtctgctcggacaacctggccgagatcatcgcccgctgtctggcagctgttagtcgttcttcctggcctccaccat

SEQ ID NO: 160023 - DNA, 194 bp, Zea mays
  Clone ID: MRT4577_77519C.1
ggccgctccgggaagcaaacaaaggcccccccccagggggggctcgacgttgaccctccccaaacaaaagggccccccgcagaaaagtttaacagtacccaataacagaaacacccgcatacaaaatttggggagggggggacaagtcaggttttgcaaaaccaaatcccggtttaacgccggggggcataatt

SEQ ID NO: 160024 - DNA, 227 bp, Zea mays
  Clone ID: MRT4577_7751C.1
tcccgagatatgttagagaagtgtcgattgctgattgttaccctgattcagggtagcggttatatctaaaaacttgagaaaatctagtgtactctagttgccatgtgttccattttgttggctctaaactttcaactagtgttggtgattaatgacaacatgagattaacttaaattttgtagaggcatttaaattatgccactaatagtgactatttagtcgctca

SEQ ID NO: 160025 - DNA, 357 bp, Zea mays
  Clone ID: MRT4577_77520C.1
gaagctggcgcgcatgccggtaccgttaacgaatttccccgccgctctagaaaatgcaagatcacctacgattccatgcgagagtataccattattatagcagcacctataatgattttacttgaccctgatgagcaacggtccgaccaactaaactaatcatggacctaacttaacattgttgctgtacataggagtttatgccgaaggagtaactgattgccggcctgcactggttgggctaacaaacagaacgcgcaatctgaatctgaaatggacacaaagaacgaactggcgctattaatggcagagcttgtagaggagcttgatcacacgaggcctaagcttggcactggc

SEQ ID NO: 160026 - DNA, 574 bp, Zea mays
  Clone ID: MRT4577_77521C.1
aattcggcacgagggttctgccctcctccgcgacccccttcccctgctccgcctgaccgtgattctcgccggcaaagtcatcctcctcccccgcctccttccatcttcggccggccttccatactcctccccatgccccttccctgcctccgcctcctgcccccatcctccctgtccaagatccccgcccccaatagagcaggcggggtcaatctcgaatccgtcaatccagcgcgcaatcctgtccgccactacgaatctccgctccgtgaccccccgcaatcaacgtcatcctccccctcctagatctcgtcgcggcggcagggagctaggggcaggcgtgcgctgatggaattcaggggccaggaggaggaggagcagcccgtcttagaggagatgggtgccagctccgcgccgtcgtccgcccccaccctcgccccggccctggggaaccagagtgcctacagaaccacgcggcggcgctgggcgggcacatcgtcgacggctgtggggagttcatgccaagggacagtgacagtctcaagtgcgctgcatgcggctggcaccgtagctt

SEQ ID NO: 160027 - DNA, 335 bp, Zea mays
  Clone ID: MRT4577_77522C.1
gggcaaccgcaatttcctccgtcccccccctccgattctcccctggcccaaggaaaaggaaaaggaaaaggaaagaaaaaaaaccgcgccgtccgcccaaggaaaaaagcaaagatccggaaccactgaaccgcgctacgcgtggtcgtcgtccggagccacgcgtggcgccgcggcgatgggcaactgctgcgtgacccggccgttttctggcaagcggcgaagcggctcccgcggtggcgctggcgggaaccgttgcgggcgcctcggcggcgccaacgtgcggtcctgctccacgctgtcctccatctccgacgcggcgcgcaccgccgcga

SEQ ID NO: 160028 - DNA, 2612 bp, Zea mays
  Clone ID: MRT4577_77523C.1
gtatggggccctcgaggccggccgggggctcgtcatcggaaggacatccacaccaacccgtgttcaaggaaaaaaaaccggggcggcgaaaaccctcgaaccctaatccttacgcccctcatggcggacgctgatgcggcgctgccaacgccgcctccggaggtagtagcccccgaggagcatcccgtgggcgccgaatccaccgtcgccgcgccggccgaagtcgataacaagcggaagctagaggaggtcagcgccgacgcggaggtgaaaggcaccagcgaggacgccaagcgcccgcgcgtggacggcgagcccgacgccgcaacaggggttgagcagcaaatcgatgggtcctccgtgaatgcggatcccgcagctccggaggataaggctgctcttaacgttggcgcagcaatggatggtgataatgacacgcctgctcccgctcccgctccagactcgcaggcggtttctgacgagaagccgcttgaagcagcagctgaagctccacagcaggaaggtgatgcagcaactgctgtacaggagatttctcgtaagatcgaagtgcccaacagcaaggttggtgtcgttattggaaaagctggtgagacaatcaggaacttgcaaatcagctcgggtgcaaagatccaaatcaccaaggacatcgaagcggactcaaatgccctgactcggccggttgaactagttggaacacctggcagcgttgataaagctgagcagcttattaagagtgtcatagctgaggctgaggctggtggttcccctgccttaatagctagaggatttggaagtggacagcctggatcagagcaatttgagatgacagttcctgataacaaggtcggtctcattatcggaaaaggtggtgagacaattaaaggcatgcagaccaaatctggtgctcgtattcagttaataccccaacatcctccagagggtgttacattgactgaaagaattgtacgtgttactgggaataagaagcagattgaagctgcaaaggatttgatcaagcaagctatgaatcagacattttcaaagcatacaaatcagtctggcggatatggtccacaaggttaccgacctcagggtcatggtgccgcttctcagttggggccacgctctcagaatcatggctatggatacccacctagaggtatgcctccacctcaaaactacaacgcaccctacggtggctacccaccgcagggaccgtcaagaggtggcatgggctgggaccagaggccgggcccaccaacccatccttcgtaccagggtggtggttctgactactacaagcagggatctcagccatatgatagccagccacccagctaccctcctgggccagggaattacaacagttatgggcaatcccagggccctaactatggccaacctcagtatccgcaacatgcacctcaacagaactacagccatggctatggtgatcctagatacaatgccccccctccgaaccagcagtactatggtcagccaccgatggccccgcagcaaggctatcctcaacagccagatccctatgctaggcctccatacagtggacctggtcaatggacccccaggggtgctccccgccgcagatggctcctaccaggcgccaccttcatcttatgggccaccgtctcagcaccctcctgcttatgggcaaacatatggtgcagcaacgggacctgatgggtatggtcaacagggttacccacagcagggtggccaggtaccagcttcatatggtcagagtgcaccagcagctccaggatatcctcagcaaggcacgcagcaaggtggctatgcacagtacccgcagacccaaccagcatatggtgatcaagcagctcaagccaatgcgaactatgggtaccagggagctccagcagatcccaactacggaagtgcgtacccacagcagccagggtatggtcctcctggtcaggcaactggtcaggctggttatgcatcctctgcgccagcggccagccagcctgtgtatggccaggctggatatacccagccacctacaaatcctccaagttatgatcagtctgcagcaccagcggcgactcagagcggttatgctgcgccccctgcaaatccacaacagcctgctgcagcaaaaggggtctcgccacagcctgctgctgctgctgctgctggatatggtgctagcgggcagtggacggcatgagcctcgtcttccgaacttcgatgacagcaaggtcaggttggatatccgcttttggcgcgtgtttgaatgtttgcatcttttggatgtctgtggacgcatcatgtagggcttgaccccgttatcgaaagagattgtaaccccttgagttgtgatactggacatcttctgtagtatctacgagtagttgcttaatgtgacttttaaacattctattcagtttggatgttccttgtcttgctacttcacagcttgccaagccagtaatctttggattcatgtttggttgctctttggtctttgctgtcgttcctgtaaataaatattggcgtttggccttctcttacgtcgttcatgggatgacggggtgccctttcgagttggc

SEQ ID NO: 160029 - DNA, 277 bp, Zea mays
  Clone ID: MRT4577_77524C.1
cgagggtctcacgtcgtgggcttgctgaccaccttgaacttcggagacggtccagacaggaacaagacccggacattccaggccacagtcctgggaagtcagatgggattgaaaggatcttctgcaggacaactggtccttatcacagccagggtgaccacagaaaggactgcaggaacctgcctatattttagtgctgttccaggaatcctaccctccagccagccacccatatcctgctcagaggagggggctggaaatgccaccctgagcccta

SEQ ID NO: 160030 - DNA, 640 bp, Zea mays
  Clone ID: MRT4577_77525C.1
tacaagtatttagaggagctttacaagaagaaacaatccgatgttcttcgattcttatccagagtaagatgctgggaatacagacaattaccagctattgtccgagttcaacacccaacccgtgtcgataaagcacgaagacttggatacaaagccaaacaaggattcgttgtctatagagttcgagtacgccgaggaggacgaaagagacccgttcccaagggtattatctatggtaaacccaaatctcaaggtattacccaacttaaattccaaagaagcattcgttctgttgccgaagaaagaattggtcgaaaagctggtaatctcagagttttgaattcatactgggttgctcaagatgccacttataaatactatgaagttatccttatcgatactttccacaaagctgttcgaaaagatccacgaattaactggattaccaaccctgtccataaacacagagaattaagaggtctcactgctgccggtaaatcaaatagaggtttagtcggtaaaggacatggatacaagaagaacactccatcacgaagagctgtttggaagagacaaaataccctctctttacgaagatatcgttaaaattttttgtgaaaataaacaaacccattctatc

SEQ ID NO: 160031 - DNA, 330 bp, Zea mays
  Clone ID: MRT4577_77526C.1
cattggtcacactttcactgcggcccgggggattctttacacattattactcaatcatcgccgctaaatgactcaactagctagctagccagcggctatactacagcacatagattcttcagtgggggacacctccggtagcagcgtaagggcatggagtccgctgctgcaggccgcacatcgccgtcagatgctgcgctatctgcgccgccaacagcccctcgacctgcccgctttgcggctgctgctgcaggatggactggaagaccaagccgaaaaacgcctggtaccggtgctgcagatacacctgtcaaaactgcctgacaacac

SEQ ID NO: 160032 - DNA, 828 bp, Zea mays
  Clone ID: MRT4577_77527C.1
cctcgaggccggccgggagttgcgtgcgccctcgcctgtccccgcgtccccgcccctgtctcccgaagtcgtccgcgaccgccgccctactctcctcgccccgtgccgcctccgtcgtgatagggatccgagaacaccctatggatatgtccgggattcgaggcctccccctcccttcccctcccccacccccatcggcgatgcccggatccgcgaccgccgccgtccaaccccggcctccgtctgtgaccgctccgtggtggcgcaagcgctggaggcatccacaggggctaccgacggctgggacgggttcgtgctcaccaccgccggctgggacgtccatcgggggaccttcccggcgtggatggtgtctttgcaaggaaacgacagctcgctggtgctgctgaacacccgtccgggttcggctgcggacggcgcaggcatggcggagcacctgcagctgcacctggggcaggtgagcctacggagctggtcgagtttcgctggctactgggtggcccgctggaccttcccgtccgactgcagatccagcgccttcttctgcgtccgtttcggcatttgcaccagcgtcggcacgtgtgcctgcgtcgacgaattcgagccttcgaaaccctgcgagtggcagcgcgggtactttgtggacgggtgcaccaccaggtctcacccgctgagctgcaccgcagacgatagtggccgccgcccgacgacggagcaggacgactcgtttctgctcctggacaacctgcgagggctcccttacagttccatcccacagcgaagggccacggctggccgcgcttcttcacc

SEQ ID NO: 160033 - DNA, 187 bp, Zea mays
  unsure (1)..(187): unsure at all n locations
  Clone ID: MRT4577_77528C.1
gaagcgagatngcacgggatgctgccggtcaagatgaagacaaatnnagtgacgaagcctcagcacgacactatgcagggttactactctagtcgcagcggcacagtcacgggaagatgtcgtaggtgttcagcggctatgacaccgtcgccttcttcggcttccatggcgccgtcgtcgctctcgt

SEQ ID NO: 160034 - DNA, 1011 bp, Zea mays
  Clone ID: MRT4577_77529C.1
ccacgcgtccgacgatggtgatcaataggccgcagttagtttctagtataatagtctgttttgcaacctgctgttttgcacctccaccgcctatccaccacatgtatgttgacatcactactcagacttacaatagtttatatattgagtttgcaaatctgctcaagatcccgatagggcctgtatatgatccccaagaggtcatgcaaagatacgttctcggacctcgccgctttggtttttatgatgagccacctgaatggatatatattcatgtcgtcggggaagaacaagacaaggtaactctggccatagccattgatgacttatgtcttattggctttcagaatgctagtgaccattggtacaagtttaatggacagtcatcatcgttcaaaggtttgccgggagccaccgtgctaccgatcagacaaaattatcaagatttgatcaaaggacacgccaacctttggaaggttcctctggggaagaagtcagccatacatgccaccaagcagcttgcgacgtatgaccgagccgttacccctgactccgaactcaaggacgggctggctaggttcgtggtgatgatgtgtgaaggcatgcggttccgatcgatccgcgacatgttctcatcgttgtcgggcaataactgggaggaggagaccttcatcactgagctccaagcaaaatctgtcgtctactggtcacaactccccccgcgccgcttgcggtcggcacgagccggaaggctgcccggggggccaaaatggggtgctgttgatggtcgatataacagtatggctaagcatgtccaagagactattaatgtcaatgatgcgaacgatgctttgacaatcattgattttctgcttcgcccaacagaggaagtagatactggtaattagttttaatatatataattattagttacgtcatcgatctgctgtaatagtttatatatacctctaatattaaaaaagtaaaatttcaaaaaaaaaaaaaaaaaaa

SEQ ID NO: 160035 - DNA, 554 bp, Zea mays
  Clone ID: MRT4577_7752C.1
agcaacaaattaaaactagctatgtaggtgccaattaaagattaacaattacacacacggctcatttcttatctcaagtttggaactaaaacgagaaggaaaacatctaacagttatcaggtcgtggcctctcggatctggagcgtcagacgtccggcggcgagcagtcggggcatcggacgagtccattctcgttgcagccggcgcaggcgcggaagcccccgccgcccttggcgctgtaccgcttgtggctgccgtcgcaggtgccgcagagcacgtactgctcgccgccgcaccggccgcaggcggcgagggaggcggcgccggcgccgcccacgacgcggcggagctcgccggcctcgtggaggcgccggacctcgtcggcgccgccgaggtggcggcccccgacgaacacctggggcagcgtggcgcgccgcggggacgcgaggcgcgggaggagcgccgcgagctcgtggaggtagcgcgggtccatggcgaggtccccctcgtcgaccgcgacgcggagcccgcgcaggatggcgcgcacgggccgg

SEQ ID NO: 160036 - DNA, 253 bp, Zea mays
  Clone ID: MRT4577_77530C.1
ttgtataaaatgaataaaacaagataaccggggggaaggctttaaagacttggaatatcccaaagagcccccaaaaccattgtttcggctggcgacccgaaccaaagggctcgcttaaaccccccaatggataatcccaaacggttccaccgggcccccacattttttaaagagacccaataaaagggaataaaatcttaaggcgaggggggaccatccctctgtagagaaaagcccttaaaacacccctttg

SEQ ID NO: 160037 - DNA, 268 bp, Zea mays
  unsure (1)..(268): unsure at all n locations
  Clone ID: MRT4577_77531C.1
cggcccgccctttattanattttttttttttttttttttttttgggggttttttttattttttgggggaaccccgccaaaaggaaaataaaaattagggttttttttgagccctaaagggggccctacccaggcaaggaaaaaaaattaaaagacagataaacaaaaaacgccccttgaaaacaaattacacccaacgaaataaccggttacacctacttgtcaaggggtaagcccccttggccaggaacacctcttggcccccaaga

SEQ ID NO: 160038 - DNA, 727 bp, Zea mays
  Clone ID: MRT4577_77532C.1
actccatagggcgattgggggaaacgccgccggccgggaaacgttagccttttccaatcagggagagagctcaaacatggcactcgaacccgtcgctctcctgctcacggtcctcgtcgccgcgccgctcacggtcctcctcctcctcctcttcctcgtcgccggcaacaagaggcccgctcgtgctgcttctcccacgccgcgccaccgcttgaggctgccgctgccgccgtcgccgcggggcctcccgctgctgggccacctgcacctgctgggctcgctgccgcaccgcgcgctggcgtctctggcgcgcgcgcacggccccgtgctgctgctccgcctgggccgcgtgcccaccgtggtcgtgtcctccgctgccgccgccgaggaggtgatgcgggcgcgggacctggcgttcgcgaaccggcccgcgagcgccatggccgtgcgcctcctctacggccgcgacgtcgcgttcgcgccctacggcgagtactggcgccaggcgcgccgcgtctgcgtcgtccacctcctcagcgcgcgtcacgtcgggtccttccgccgtgtccgagagcaggaggccgccgcgctggtcgcacgcgtcgcccgggacagcgccggtggcgcggccgtcggcctcagcgatctcctcaccgagtacgccaacgccgtcgtgtcgcgcgccgcgttcggagacgagagcgcgcgcgggctggttgggcgaatt

SEQ ID NO: 160039 - DNA, 503 bp, Zea mays
  Clone ID: MRT4577_77533C.1
tcgagtttttttttttcttttttttttttttttttttttttttttttttttttttttttttttaaaaaaaccgggggggaacccttatttttttttaatccgggccaaaaaatttgggaacaggcaaaaaaacttttggttatttccccccgttttggctaaaaaggggcccggacaaaaaaaaactgggtagcccacaataaaagaacccggccggtttttttttattttttaaaaaagttgggggccccccctcgtggattggacccaccccaaggactttccctcgggaaaatcgaaaaaatggttggaattcttggggaaaccattttcacctttttcttaagggatatccatttaacccccatgaattttggaaaaaaaaacttcgtttttttttttaacaggaccagggtcttaaaaaaccggggggggaagttaatcggggggccaaaaaaaaataaatggcttttggaaataaaaaaaggggggtttttaaagtt

SEQ ID NO: 160040 - DNA, 336 bp, Zea mays
  unsure (1)..(336): unsure at all n locations
  Clone ID: MRT4577_77534C.1
tctcgnaaaccctagtgcctctgttgcttgctccctccggcgccactcccctcccatggaccgccaccgccaattccataccgtcctccgccacctctgctgagagcgagaagagatggcaggcaagggtgatgggccggcaatcgggatcgatctcggcacgacgtactcttgcgtcggtgtctggcagtacgaccgtgttgagatcatcgccaacgaccagggtaaccgtaccacaccctggtacgggggcttgaccgactgcgagcgcctgatcggagatgcgggcgggaaccagggggccgtggacccgatcaacaccgcctttgatgccaa

SEQ ID NO: 160041 - DNA, 508 bp, Zea mays
  Clone ID: MRT4577_77535C.1
agggcgtcattgaacattgaatttaatacatacaataaaagacgcaaatgtccacattcgcaaattacttcatagcaagtcccgaacctagttgctaacaactatcttttcgcctccttaccattgcccctatatactctatttctccttggggggcggtgccggaccaccggtggtgggcaagcccatgaagatcttgaagtagtcgtaaatcatccactggagaccagtcaaagtgccaatcatgacgattctcattggcaaaccgttccaaagtcctctgaagccgatatccttgtagatgcgaccgacggcagaaccaaaaccctcgccgggctcgcgaaccgagttgagcttgctgaccatgacatctgcggggtgggaaacgatagcgcaaagaataccagcgaggtaaccaccagtgaaagagacaccggtctgagcagccttgctgtagtcattcttttctccaggcaagcgagcgtaaatcatctcaacaatggtttcg

SEQ ID NO: 160042 - DNA, 319 bp, Zea mays
  Clone ID: MRT4577_77536C.1
cataaaatagttattaggggtgtttaatcaaggaaagaaatgcatcaactgtttgatcacataactcctgtaacctaatgcatcattcaaggtgataaagttttgtaaacatcatggaagaggtgaatgcacaggggcttgcgtggaataaaactctaggctagtggtgttagagacatctttaatgagcatcaaatcttctgttactcgattagtccatccctcattaggtcgattcgttgacatcatcttgaagagtgatcgatccacacccttcatttcacataggcatccgctagcgcaccacagtgaacatgac

SEQ ID NO: 160043 - DNA, 148 bp, Zea mays
  Clone ID: MRT4577_77537C.1
aaagaaggtcaagggttcccaaccaaaataacaatttgttaatcatggaataaacaaggttgtccacagtccaaccgtccattttaatccgtttcaggcttttttttccatttaaagaagggcgcggtttaattccggacccgttggg

SEQ ID NO: 160044 - DNA, 462 bp, Zea mays
  Clone ID: MRT4577_77538C.1
tcctcctcgtactcttaggtctgcggccgcagagctgcgtcgccagtggcggaggtggaggggagccggcggagttcgagatacctcgggacgggagcgtgctggagcttgacgagagctacttcgaggcggcggtgcgcgcagccgaattcctcttcgtcgacttctacgctccctggtgcggccactgcaagcgcctcgccccgcagttagatgaggctgctgcagtgctagctggactgagcacgcccgtccttgtggctaaagtaaatgctgacaaatacaagaagctcggctctaaatatggagtagatgggttccctactttgatgttttttgaccatggagtgccctcggagtacacgggttcaaggaaggctgatgtgctagttgagaaccttaagaagcttgttgcacctgatgtttctgtccttgagtcggactcgtcaattaacggctttg

SEQ ID NO: 160045 - DNA, 508 bp, Zea mays
  unsure (1)..(508): unsure at all n locations
  Clone ID: MRT4577_77539C.1
gggggggaaaaagggggatgggaatggacaacaggttcccggccaaaaatcccaggccagggggggggcccacccaatttcggagaattaaccctgggccaagggcggggaaaaaagagagacaaattctgagacccggggggggggaaaaaacttttttttaatggcaaaagggggccccatgcaaaggggggcgggaaaaacccatttaccccccaaacccccaaaaggagggccccggccccaggggaaaccccaggcggcggctcgagggaagggaaaaccgggggggccaggggctgggcccccccccgggccaaggagcccggggggggctgggcccttngcgggggggaccccggggacggccgacaggccggggcggcggaatccaagggccggggaggaaaggggggggggggaggggttgcccaatgcccctttaaaaggggcctcccccggtgggggagcggggcagcgcccaggagagagtcccggagcgcccccc

SEQ ID NO: 160046 - DNA, 849 bp, Zea mays
  unsure (1)..(849): unsure at all n locations
  Clone ID: MRT4577_7753C.1
atttttgagaacctgaactctctatcttccactactgctcatcttcttcctcccttctctcgagtatccggattctcttccattctattcccttgctgctactggtttgagtttaagagattagtgttgctaaccgtgtggtgatggcaaatatcagtctccccatggcatgggaaagccgtaactcctcgcgcagcctcagcccccaacaccaccgacgcaggcttctcttcggcgctcccgttcgcccgcgcgctcaaccctggtatgccaccaccaccgccgtctcacaagctgctccccgctgcccctgccccttgccccgctaccgcttgcaggctcctccaccttcaccgcctcgagctccgaccgcgcgaggccaaggaccggccggagcctcgcgcccctgtcttgttgctgtgagctccgaggccaggggtcgcccgtgcatccgcatccggctcgacctgaccttgccgtcgtgagggagggcgatggcggtgaagggtgctgcgtcgtagtatcctctggaccatcgcttgatcaccatttctcagttttcgctgatcccccgcacctccatggttgccacatgaagacaacctatactgacaccgcaaatttcattggtgtgttgtgnggtgtgccagatcgacgctgccgatcaaaagatcgtcgctcctgcgacctacctttccgctgcttccacatacacgctatctcctcctcgtcagggctgacagatgctgctcgcctcgccagggagttacgggaaaaagcagcagctgacgcagaggncgaacgtgcacgccaagctngaatcatatttcatctttaaccaatcactct

SEQ ID NO: 160047 - DNA, 327 bp, Zea mays
  unsure (1)..(327): unsure at all n locations
  Clone ID: MRT4577_77540C.1
gannnnnnnnnnnantttttttttttttttttttttgggtttcgggctgggcccgaccgggaggatatatgcttattaaaagcttgacgctgaaaaaattgtatacgggggctgaaaaaactattttttggtcctttcaaaaattatggacttggtgaagggcactgggacgtacatgatatacatttatagctaccgggtcggggggtcctggtttttttgtacctgagtccaaaaaaaaggatttttatacatgtttttttaacgttccaaaaaaaaaaaaaaaaataaaaaataanaaaancccccccccctttcgggccccgg

SEQ ID NO: 160048 - DNA, 431 bp, Zea mays
  Clone ID: MRT4577_77541C.1
aattaaaacatccaactaatccatccctccccccaaaaaaaacaagggggggggggggcaaaactaaactcgactcgactccggggggaccacaaccacatttgggtggggggattcaccaaacacttgggaagggcctcgctaaagctttttttttatttaaatttcacagggtttagatcccccccaaacccccaaacctacccatattttttatttaataaatcggcgtggggtcccggtcctaacggggaataaacacaaggggacaggaggtccttattgggctgaacgatgacgtggggaaactaccccggggggggagggttgttggtttttcataaccaccaattggggatgcgcgcgggcaacaaccaaaccacgtgggggaactgccttaggaaaacccccacctttatggggaggggaaa

SEQ ID NO: 160049 - DNA, 571 bp, Zea mays
  Clone ID: MRT4577_77542C.1
ccttcttctccctgacccaagctaccaaacgattcgacctaagctcgttgcctccctttccacaacctcccctccccgcgcaagcgcactgagcagaaagaaagagatgaggtctcccgtccccgccatgctcaccgccccatcagcagcggcggccgtcgccaagccgctccccgtggctcgctccaacacgacggcggcgctccacgcgacggccagcagcaggcgggacgtcatgacgggcgtgggagccgcgctgctgatggccctgtcgccgcagcgcgcgcgtgcggcgtcggacgacgagtacctgacggagacgacggaggtgatcgggaaggtgcggtcgacgatcagcatggacaagacggaccccaaggtggcggacgcggtgacggagctccgggagatgtccaactcgtgggtggccaagtaccggcgcgagaaggcgctgctggggcggcagtcgttccgggacatgtactcggcgctcaacgccgtgtccggccactacatcagcttcggccccaccgcgcccatccccaacaagcgccgcatccgcatcctcgag

SEQ ID NO: 160050 - DNA, 682 bp, Zea mays
  Clone ID: MRT4577_77543C.1
tttggggtaccggcgccccttctcgagttttttttttttttttttttttttttttttttttttttttttttttttttttttttttttttttttttttttttgggcaaaaaaaaaacaaatccctgcccagaaaaggggcaaacccccccacaagggcctacaaaaaacatcgcctttaaaaaaaaggggagggggcccctttcctgtcccagttttataaaatcatcgggggggtccttttttaaaggccccccatagggaacttttcccgggtctattcaattacttggaaacctaaacttacgtcccaacctgaagggaaggtttttttcctgagcaatgggaatttttccaagcttgttcacaatttaaaagggggcatgcttgttttaaaatccaacaattttcaggtgaaaaccctttcatcaatgttaaaaagcattgactttttgcccttggggggccccttcagttccctcatccagaaacaaattttgaagggagggccccccctttaccccctgggggattgaaacctgttactggcatggatctttgaacaaaataaaaaaccccttggcccttttgctcttttgtataaagaaggcttgcccaaattaattaaacaggcatttccttactagaacctttggaaccccaaggcccaattcctgacctcggg

SEQ ID NO: 160051 - DNA, 267 bp, Zea mays
  Clone ID: MRT4577_77544C.1
cacacgcgtccggccaactactgctacggcggcgatatcatcatccgctgcgacgccaacggcatgggcactgcaggccgctgctctgacaacgttgccggataccctccggctggcggcgttgccgagtactggcagagcagcaagaactctggtgacgctgcttgccagaagaactgcatcgtctatactcagccttctgccttcactctgcccgcatctaagtgcactcccagcactggtagcaacgccaccggcactgtcact

SEQ ID NO: 160052 - DNA, 252 bp, Zea mays
  Clone ID: MRT4577_77545C.1
cattgggtacctcgaggccggccgggaacatattatagcacctaaacacgtcggtctcacactccctcgtcctcctgatcgccgtctgcacgatcggaggacagatgatgctgatccccgacgctcatcgctggtcatagcacctagccggctcactgagcttgcacagcctacgcgccggcgataaacagtgaggttgatctacaactagaccatgtcctccaacgtcttcgacatgtccacggtgactaa

SEQ ID NO: 160053 - DNA, 2630 bp, Zea mays
  Clone ID: MRT4577_77546C.1
ttgattgcaagaaaatggcattggcttggatggtttcaaaggagaatagctcacattgtgctggcggaattcttgccgatgatcagggccttgggaagacagtgtctactattgcccttatacaaaaacagaggatggaacagtcgaaatttatgtttgttgattcagatcgtttgaaatctgaagcactaaaccttgatgaagatgatgagggagaacaaactgttagcaatgaacctaaaaaggaccaaggcgcttgttcattgtcaacatctgctggtactagtgctgaactttttgttaatcaaccgaataatgttgtgaataaaatggttgaaaccaaagcagaacgcaagaaaaaagctaaagtttccacatcatctgcatccacctcacgttccatgacaaggccagctgcaggtactctagtagtgtgccctgctagtgttcttaagcagtggtctaacgaattaactgacaaggttagcgaaagtgctaaattatctgttttagtctaccatggtggtgcaaggaccaaagatccacgtgagctggcaaaatacgatgtagttgtcactacatatacaattgtggccaatgaagtacctaaacagatggctgatgatgacgcagatcaaaagaacagtgaagaaccctctgctagcaataaaagaaagccatcggcgaatatgcaaaccaaggctaagaaaaagaagaagaaacttaaggactcaaactttgaccttgacagtggtccaattgcaagagtgcgatggtttggggttgtgcttgatgaagctcagtcaataaaaaacttccgaactgtagtggccagagcctgttgtgggctaagagcaaagcggagatggtgcttatcaggaacacctatacaaaatgcaattgatgatctgtttagctatttccgttttttgaaatatgatccgtattgcacgtataactcgttttgcacaatgattaagcacccaattgctagagatgcaattaatggatacaagaaacttcaggctgtgctgaaggtagttctcctgcgtcgtacgaaagaaactgtgatcaatggcaaaccaataataaatttacctcctaagacaattaatctgaataaagtagatttcacacaagaggagcggtcgttttatttgatgctggaagaacgctctcggcaacaattcaaggcatttgctgcggctgggacactcaaacaaaactatgccaacatccttttaatgttgctgcgacttcggcaagcctgtgatcatcctattcttgtaaagggcaatcagtcagaatatggaggtgatggttctatagaaatggcaaagaaacttcctaaggaagtggtgatagatttgcttgcaaaactggaagtggggtcaacactttgtggcttatgcaatgatacacctgaggatgctattgtgacaatttgtggtcatgttttctgctatcaatgtatacatgaacgaataacgactgatgagaatatgtgccctgcccctaattgcagtagaacattaggtcttgaattgttattttcgtcaggagctttaaagatttgcatctctggcaaatccagttctgcagtagctagttcatcatcagataacgagtcatcttcaatcagtcaaagcagctttgtctcatccaagatacaagcagccattgatatactgaattcaatcattgtcatggatcctcttactgaaagttatacaatggaatcaagcagaagtggactaggccctgtgaaagccattgtcttttcccaatggactggcatgctggatttgctggagctttcactgaatatcaactgtatacagtacaggagactagatggaacaatgtctctcaatttaagagaaaaaaatgtgaaggattttaacactgacccagaggttagagttatgattatgtcactgaaagctggtaatcttggtctcaacatggtttctgcttgccatgtaattctccttgatctctggtggaacccttatgctgaggaccaggcagttgatagggcacacaggattgggcagactaggcctgttactgtatctcgcttgacggttaaagacactgtggaagatcgtattttagctctgcaggaggaaaagagaaccatggtgaactctgctttcggtgatgacaaagccggcggccatgcgacccggctcaccgtggaagacctgcggtacctatttaggatatgattgcgagggaactctctcaatgcctcggtcaacttgtcaggtcatgatgcgttgtaccttgtaatcgtagtccggcaaaagggcggtgtaccattgcgagggtaggctcattggtccatgtccgccacgccttgctgcagctccagttttgtggtgctcagatttctagatgggtaatctagggctagatagcatgtgtaattataaccccccaaccccccctccccggggcatggaggagagttccgcagtgccaatgctttatgatttagtgtatgtatatacatgatcaccatgtctaacttgcaatgagttgttttagctcgagatgtgagactgatactgccagcggctcagcattttgtaccttctgtgttatgtccatttgcccgtcatcag

SEQ ID NO: 160054 - DNA, 405 bp, Zea mays
  Clone ID: MRT4577_77547C.1
aacacgaaacaatgcatgggggtattttatttacacgtgcaaacggacagaatttgggggcgtttattgccgagtgacagtaaagaatttagtgatttacacaaggacaatgaacacctgacataaaaaaaactgagtgcttgaaattgtacacgagactgccaccagtgggggcaaaaaaaaacaaagacacttggagcagtaacttttttacgttaagaaccatggagataacgcagttaccccggaaatatgcctttgaacataagggcgttagcagattagctggagaagccaccaccttgggaagagttacccgccctttcagattggccagggactacataaccaactttggtcccataagtctctttggatgccacccaccgcccgcactggattttt

SEQ ID NO: 160055 - DNA, 616 bp, Zea mays
  unsure (1)..(616): unsure at all n locations
  Clone ID: MRT4577_77548C.1
ttttttttttttttttttttttttttttttttttttttttttttttttttttcgaccggaacccgggcttagcttattaaaattccgactgggcccctagggagaaaggaaacagttttatccctttattcgggcaggaattccaccccaggcagatagcaaagcttttcaggaattcggggaaacagactaggggccattaaaggccccctcggacctttaaccgcaaattcccagtagtggggcccgaataaaccgttcaaaaccgcgcggggagacccaaacctgtcgggggacggggggccaaacggggaacttgatctcaaacccgggggacggatccacgggctcggccggggccgggacaacggcggggacgggggcggctgggggccccccggggaggcggcgggttatcatgtcttccatcttcgcggggcccgcggcgaggaggccctcccccctgccggcaggggggggggggccccccccnggggggcccgncccccccgccggggcccccccccccgccccggccccccccccgnncccccccccccccccccccgccccgccccccccgcccccccgccccgccgcccccccccacacccac

SEQ ID NO: 160056 - DNA, 1482 bp, Zea mays
  Clone ID: MRT4577_77549C.1
tgggtacctcgagccggccgggaaagaaataccgtcagagcgacgttagtcggctcagctgtagtgtagttgcaggtgttcgccggcacacgcgcgtggccgcgaaccctagatgacgccggcgaacggcgccccagcgcgggcagcggaggcgggcccccacgaggtggagtcggaggccgacgcgttccggcgccaggtcgacgacctcgtctcgaagaccgacgtgctggagcggcgggtgaaagaggtggcggacttctacgatggcaaaaagcacggaagcggcgggaggaagggtggtggtggtggcaggtatggggcatcctcgaggggaatgccggaccttatgcgccagttcggcgtgcttttgaaagagatcacctctcataaagatgcatggccatttctggagccggtggatgttgtaactctacagcttcctgactatcacaacattattacccaacctatggacttctctaccatccaaaagaaaatggaaaggaaggatggtacttgttacaccaatgttagagaaatatgttctgatgttcgattaatttttgccaatgcgatgaagtacaatgatgatcaaaatgtcatccacttgatggctaaatcattgcttgagaaatttgaagagaagtggctccattttcttcctaaagttgagagtgaggaaaaaagacaaaaggaggaggaatcaaagggtgttgcagccacaaatacttctcgagaagttgcaattgtaaaattagcaaaagacactgatgatgagctaaatcagatcaacaggaagctggaggagctccggaaaatggtggttcacagatgcaggaaaatgacgacagatgagaagaggaagctgggtgcaggtatctgtcacttgtctccagatgatcttagcaaggcgctagagattgtcgcacaagacaatcctagcttccagactaaagcagaagaagtggatcttgatatggatgcccagagcgagacaactctatggaggctgaaattctttgtgagggaagcgctggaacgacaggccaacgttgcctctgggaagatggacgaaaacgccaagagaaagagggagatatgcaatgctctggccaaaaccacctcgagacggatcaagaagcagccctagccatcttccatatctttcactcgcgtcctctgattgtttagaagttctttttttgatactagccaccagctttgtgaaacgttttcctgcattttttttgtgatgtgtatatagtagtatagtgaactgtccagtccagtaacaagtgatttcgtgtgtaaccatgagctggtcgcattcgcgtcccctctgatccaacaacaaacattgtctcacaatgtgattgattgtagaagcaagcttttgtcacagggcgatgttgctcacttgtggaatcagatgatgcatacatttcgtaactgttcaaaaaaacaaaaaaaaaaaaaaaa

SEQ ID NO: 160057 - DNA, 317 bp, Zea mays
  Clone ID: MRT4577_7754C.1
tcgacgacctggacgcgttccgcaacggcaaggcctactacgcgcgcctcggccaggcgtggcagcccggctacctcctgtacgggccgccggggaccggcaagtccagtatgatcgccgccatggccaaccacctcgacttaggacgtggtacgacatcggagtcacggtcggggggatgaacagaggggctcgtgagggcctattgaggagaccagagaggcatcatcggcggcgaggagatcgactgctcgctcgacctcactggcaagcgcaagacgaagaacaagaaggaggaggacggcgagaacaagaag

SEQ ID NO: 160058 - DNA, 225 bp, Zea mays
  Clone ID: MRT4577_77550C.1
atgcagactgcaaacgttcatccggtgtgcaccggcgcgggtgcccgaagcagtggcaccacagctgccaccggtggcgcgcaactcggctcggccgactgcgggcatcggctgcaaaagcaaggagataacgcgcggcagactgcgggcgtcggctgcgcctgctggatgcatgggcagcaggcttgtggctacatgttatttttagagggcatgctcttttga

SEQ ID NO: 160059 - DNA, 415 bp, Zea mays
  Clone ID: MRT4577_77551C.1
ccggcccgggataccaccattctgcccgccacgctgttcgccactaccaagaagaacacccatatggtgtgctacctgatggacgctctgccgaggaataacttaataacattcgagatgcaagatgttctcacaccatttcgttgtcctattactgctgctcatccgcgattcaatttattacctcacatttgatatgcttctgatcgaccttcctgacatgattacctagaacttgtcaagacaagctcgtgaagaatttttattggagaagatgttagcatcttgagaacgaaaaaagaaaaaatttgatgcccatcagatacacttcttgttcacttctatctgcttctaattgcacgattggcctaatcgtgcatataggtgattcctgccggaaattggtatccgctca

SEQ ID NO: 160060 - DNA, 423 bp, Zea mays
  Clone ID: MRT4577_77552C.1
ggggcaaacagggggtttatttaaagggcacaaaaaaaccccaggggaaaaagaacccccctttgggggaaaaccaactagctcgggggtggggggggatttaaccccaaaccaaaaaaaaaccgggggtttttaaaaaaaaggggggggggacccttggtaaatttaaaccaaacttaatccggggaagggaaaaaaaacccagggggggggccaaaaaaagggaaaaaccccctaaaaaaaccccttttccctacgggcccgggggggtccattccctaaacaaaaccactggctaaaaggggccgggttatttttaaaaagggaccggggaaaaagacactttccccccccacgggtggggagccaaaaacgggttcacgttttatttcacaacccacgggggggttttttaacctttcc

SEQ ID NO: 160061 - DNA, 1964 bp, Zea mays
  Clone ID: MRT4577_77553C.1
atccctcgcgcgcggcaacccacctccgccgagtatcccgccgcccacccgctgcctcccgcatcccgcgcgcgcggcaaacaaccgccaccgagtattctgcccccgcccccacctctgtcccccacctccgtccgcccggaatccacgccagcccatcccactatcgcctctcctctcattgctctcgtgctctccacccgtttcccgcaaaaccctagctctgcgacatgcaccgcggcggcgatcgctccggcggcccctcgagcggcggagaccgctctggagcccggttccagcggggtccctcccgctggtctggcagcagcggcggcggattagggggtagcccgcccaatcgctactcctcccgcggcgcggcagatggaggtggtggagggggcggtggcagtggcggtggcgggaggttccacccttaccgtggttcttccgactattctagcggcggtggagggtacgtacagaggcggtagtggcgttggtaacgacttcggcgaccagaggcaacgttacggcggcggcactagaggcggaggccgtggggatttccaagatcatgatagtagaagtaactatgtcaaactttttgtcggatctgttccgaggacagtgactgaagaagacgttcgtcctttatttgaggaacatggagatgttcttgaagttgctctaattaaggataggaagaccggtgaacaacaaggttgttgtttcgttaaatatgctacttctgaggaggcggagagggccatcaggggtctgcacaaccactacactccacctggagtcctgggccctattcaagttagatatgctgatggtgaaagggaacgacatggggccatcgagcacaaattatttgttgcgtccctcaataagcaagcaactccaaaggagattgaagagatatttgccccatatggtcatgtggaagatgtttacattatgagagatagcgtgaagcagagccgaggttgtggctttgtcaaattctcatcaaaagaggcagcagtggaagctatgaatgcccttagtgggacttacacaatgagggggtgcgagcaaccattaatcattagatttgctgatcctaagaggcctagacctggagaatcaaggggtcgccctgcatttggaggtcctggtttcagtcctcgatcggatgcagcacttgttatcaggccaacagccaatcttgatgaatctaggggtcagcatatgcttcctgaatcttggcgtccatcaagtccaaggccaatggcacctaaccaatataataattttggatctgacaaccccttggcacttagtggtggcactgtaacatcagcagatactgctacttttcggcctccgatgttccctggaaatggccatcagacggtgccttcgtcacacatgggcatgaacactcccatggtacaagaacaccatctacgcagatcccattcaaagcacctggtccaccacaattttgctgacctgcagaatgcgctatgtctttgtttttcttgtattatcacaattgagtatctcttttgttttcaggtttctgagaggttataggagcaacaaggttgcatcttctctcagttagattggcggttgttgattttcatttcctgcgcttccattctgtccgtctcctgtggattcagtagaagactagaatggacgcgactaactgcccgctgattactggaacctaactagccacaacttcactgctacacaaggcagcaaatttggtaccaacagctgtgtttagatgatattgaccttctggatgtcctgtagttctagaacaatgagcttgtagtttcacctttgcatctgtgtgccttgattttgttgcaagaacttatataatcttataatgaattaatacaaaattctcatcctctgcctttcaaaaaaaaaaaaaaaaaaaaaaaaaaaaaaga

SEQ ID NO: 160062 - DNA, 735 bp, Zea mays
  unsure (1)..(735): unsure at all n locations
  Clone ID: MRT4577_77554C.1
ggacataagagcagaacaaaaacatgcagaattatcatccatctactctttaccctttaaaagaagctatgtaaaataaaactgaatgtggctccattgtgctctccgcatgatgtttctttgtacgcatagcactccgcaatattcaccaaaaagtaccggatcgcatcacaagcggcgggcggcaagcccaaatcgttcacaaacacgggtatacatgccgcttggcgaagaaatcagctagaaaatcctacgggatcgaggcggaggggtcacctggagatggagaaccttgaggcttgggtccacggtcggaggggaacgagactgctgcgtattttaaattttatcttttaaatgaatattctctgtattctacaaaacactctaaaagatttcatcctctatattttcttcatcaccagcaacgtcctctaaattcgatcctctatatctatagtgttaacagaattcatatactatatatttttttgtaatattcatattcatacaatttatacttacataagtaatgcaaaaacgaagtaatttttattttcgaatttgataaatttgaatatcgtattagtacgcaattgaaatgtttttacaaaaaaattgatatttcctaaatcatattttgattatgagaataatgaacttccacaatacgatattttgattatgagaaatatggacanaaccaaagntatgcaacctttttacatgctcatt

SEQ ID NO: 160063 - DNA, 347 bp, Zea mays
  unsure (1)..(347): unsure at all n locations
  Clone ID: MRT4577_77555C.1
ccaattctcacactgaagctcgcactctcgcctccagcatgaaagtctctgccgctcttctgtgcctgctgctcatagtgagggccttcattccccaaaggctcgctcagccagatgcaattaatgccccagtcacctgctgttataacttcaccaatagggagatctcagtgcataggctcgcgagctataggagaatcaccagcatcaagtgtcccaaagaagctgtgatcttcaagaccattgtggccaaggtggtctgtgctgaccccaagcagaagtgggttcaggattccatggaccacctggacaagcanacccaaactccgaagacttgtacactcact

SEQ ID NO: 160064 - DNA, 289 bp, Zea mays
  unsure (1)..(289): unsure at all n locations
  Clone ID: MRT4577_77556C.1
gncacncgtccgcggnacgtnccncncacgcgtccgggacntggggaanacgtcttnggaagataattattnggcatccttagactanganttagtnnngaaagtctgaggttgtgtangcagtgtttgnacgacaagaggtgttgaggcaattaaaaaacatccangttcagtggactgcttgagacatatacncagtattgggattcttcaatangcgaattgnaattgaacnantnagatgggganggtctgtgganaaggtgcttgaagncatnaanaaaacttg

SEQ ID NO: 160065 - DNA, 419 bp, Zea mays
  Clone ID: MRT4577_77557C.1
ggtgattacagcgacctttatttgctggcacgaatgcactactagaaatcccaaacttgagaacatatgcggggaagagccggttagcacccaaatagctcgtcgggagagaacgctagtgctgtatcgtgggctagtagactagaccaacaccttataggtcgtataacaaaataggtgccggtgcaacgctaataagagcgtacaaagctacatgatctatatttacaacgtgatacacaatgaccatcccttcattttgtacatcctatgaagacgtctatatatctaactcactttgacatatattttatttatagttcgatctgttggcactgatacttattcgtatcctcaagaaaaccaccatatactcacaatagatccttaattaaaaacaccataaaactgcgcggcga

SEQ ID NO: 160066 - DNA, 251 bp, Zea mays
  Clone ID: MRT4577_77558C.1
gtgattgttttgcagagagcgactctaacacccaggcggtggccactggtactctgtgggggggaccgtgagtagcaccacattctgacaagtgtacacatagctttcagccgggctttggacaagacacttgcgctgctacgatgggccctgtgaccctatggatgcagacgtagcgagctgatacacgagcagcaaccggcgtcgtttatgctaaccgtcctaggaaagaaccccgagcaccaagccac

SEQ ID NO: 160067 - DNA, 191 bp, Zea mays
  Clone ID: MRT4577_77559C.1
aacccctctcgagtgtcggccacatcaagggtataggctcccatcatgactatacccttccattcattaagacttgtaattctaacataagtgatactaaatcagcatcatatattgtatcggtctcgctaaggttgatgatttcgcctgattgatactacattagtgcgtgtgtgtgtgtgtgcgtgtgt

SEQ ID NO: 160068 - DNA, 289 bp, Zea mays
  Clone ID: MRT4577_7755C.1
atcgatcacgacaagatggcgtgcacagacaatgcgatgagagccttgttcctcctggtccggttttgcatcgtgcatggtgagaatgaataatcatagggcatcgttgcgaaagcgttcgggcctgggggtgtcttttacattaccaattttgggcgccttcggcaatggcatgacatgacagcacgaaagctgtgcatgatgcattggcatttgcgttcggcggctctgggtagcatacaattcttataccctatggcgactttcttgtcgtacaactcaactttac

SEQ ID NO: 160069 - DNA, 505 bp, Zea mays
  Clone ID: MRT4577_77560C.1
cccacgcgtccgggtgacattgataagaagctaaagctggctactcaaaaccttcactatgttaatgtacttccttccattgggctcaatgtctacagtatcctccagcatgacacccttgtaatgactcgggccgctatcaacagaatcgttgagcggatgcatactcccatcaaccggtagcaaggagggttctgggtcagaccactgtttcttacaaccagcaactgtgctttcgtcccctgatgaagctcgaagatttccagctgtcgtggtgctaactcggagctgcaacatgaactgtttattttctgtcagactgaaggtaccgaggtaggaggaaatgttggagcccttccgtggctccttgctcggactatggtgccctagttttgtaattcaagaataaagacacgtagctcatcattatcattgtcttatggacgcacaagatgcatgcaaaaatgaatttgctctactgcattcattgcctttccgtgctttt

SEQ ID NO: 160070 - DNA, 291 bp, Zea mays
  Clone ID: MRT4577_77561C.1
ggtgggggtttttttttttttttttttttttttttttttttttttttttttaaaccaaaacatcctggatttatttttgaaggggggaattttgaaaatttacgaacaggggggaaattgggactgggtttgagaagggaaaaaaaaaagaaaaatcaaacctcctggatttacccttgggattgggggggggccacattaagccgggaaaagaatgtgtcaaaaaaaaaatttaaaagacttttaaatgctttgggggggaaaaaatcgcgaaaattccattttttttgg

SEQ ID NO: 160071 - DNA, 261 bp, Zea mays
  Clone ID: MRT4577_77562C.1
gaactatactgaggtcgacaacgactgatcgggcaccaacgatggctgctgggctaaacaccacgaagacgccgcaggtggttgccgtgctggtggctgcggccctgctggcgtccatctatctcgcggccatcacctgtggtcaggtggggtcatcgctggctcccaccatcccttactcgactgtgagggacacctcgctccccgtctcatgctgctgcctccttaatagcctcaacagctcggctcgaaccagggcgg

SEQ ID NO: 160072 - DNA, 566 bp, Zea mays
  unsure (1)..(566): unsure at all n locations
  Clone ID: MRT4577_77563C.1
ccccgcgtccgctcctcctcgcctcctctccctagtctccacgacgccaagggagagtgacggaaagcgacgcggcgcgagcgaggagggccaaggcgaagaggggaagcaccgnaccaggacccttgttngncgncgncgnctttgatctccgngaggttgtnaggattaaatatgtggaccagnacattngttacttnntgnacgctgttggggaatgttagaacaangnaggnctnnnagacagnggtgaagagnctttngtttttaaggttnttnagggaagttangaaggttnnaagngtgaagatntntaagaaantggatgtttnngngatgggtgtatacaaggtgaagnttgttgggnntgaaggtgaagaggatgagtttgatggtgnagaagaggggtagatggttggagnagttgtagatggtggtgtggaggttgtatatttgtggtgtggtgggggttggtggatgtggggtggttaaattgtgtttggtttggttgganagttgggtggggggttttgttggtgaggggttttttttggtaggttatgagt

SEQ ID NO: 160073 - DNA, 315 bp, Zea mays
  Clone ID: MRT4577_77564C.1
gggaaaattggtttaaaaaagcacacaaatgcctggtacccccacaaaacccagctcgacactatatttgaaactgagaccacctttttgtgcttgccgacaaacctgccttacaatatggggagggaacgccaaatccaaacgtagaaacccctggcaaaactccaggccatttcctaatattgccttgggagcgaagattccttgcaaccataaacacccttagcggaaacaggcctcctgtaggactttaacttaaatccgggcccctgccacaccccctcattcgcccctgccttatttaccatgacatgc

SEQ ID NO: 160074 - DNA, 374 bp, Zea mays
  Clone ID: MRT4577_77565C.1
aaaaaaaaacggggcgggggtccattactttaaaaaaaaacgggggggggggggggttttctttggttaaaagctttacaacaaaagcgggaaaaccagaaacagccctcaaaacccccccttattggggcggaacaacacaaacaaaaagcgcggggcaaaacaaaaaaaaaccccaccatgggaaacccctataaaagcttgattaaccccaggagacccccaaaagctttttactaaaaaaaaaggcccccttaagcaaaagggttcccccccttgaggggctccccccccccccaggggaaggaaggggcgccccttccaaaggggccgaaggccccccccttaaggaaaccccccttcccccctttttt

SEQ ID NO: 160075 - DNA, 751 bp, Zea mays
  unsure (1)..(751): unsure at all n locations
  Clone ID: MRT4577_77566C.1
attcggctcgagcaagagcagcacgcatctttcttgtgattgattttaaaagcagcagacagaagagccttaactctcttcttccccaccggaaaccaccacccacctcccctcctcgatgggccacgtcctcagctgcagccgcgacggcgctgacttgttccgcgcggtgcagcacggcgacctggacgccctcctcgccgtcgacccggagctcgcccgccgcgccaccaccatatacgaccgtctgtccctgctccacatcgccgccgccaatggccagctgcaggtgctctccatgttgttgttcgatgacggtggcgccggcgggaacgtggacgtgctgaaccggaagaagcagaccccgttgatgctggcggccatgcacggcaggacggactgcgtgctcagcctgctagacgccggagcaaatatcctcatgttcgactcggtacacgcgcggacatgcctccaccacgcggcctactacggccatgcccactgcctccaagccatcctctcggccgccaagaccacgccggtggccgactcatggggcttcgcgcgcttcgtgaacgtgagggacgagcacggcgccacgccgctgcacctggcggcaaggcaggggcggncgcagtgcgtccgccacctgctccacgccggcgccatcgtctccgccccaacagcctcctacggcttccccggcagcacggcgttgcacctggctgcacgccgcggcaaactggactgc

SEQ ID NO: 160076 - DNA, 450 bp, Zea mays
  Clone ID: MRT4577_77567C.1
gggaaaaagcgagctttttaacttcagcatcctcattggttataaaagggtaattttgacgggcccccatgccccggggggctgacggggtcttttgctgacagctgggtttttaacgggcccctgcccacccactgaaggtcctgctttatttactcaaccccagcagccccagctggagatctgggttgttggtaaaaagttatcggctactggggtacataaacacaagattccccataggttactatcatggggggccactttaactgcctcaatttggtccaaatcaagatccacaaaactctttttccccaaaagtggcaaccgtcccggggtctttttgtttttgcgcttcccttccccggtggaacccgtgaagtcttcaaaaagccccgggggaaccttaacagtttccccccgccgaaaaaacctcttgtttttgccccc

SEQ ID NO: 160077 - DNA, 675 bp, Zea mays
  Clone ID: MRT4577_77568C.1
attgggaccctcgaggccggccgggaatcatgatcggtgcaaggcgagacgttggcgacataggaacaggaggcgaagaggcgacagtgcatagccccaatggtgaccctccccgtcgccttctcaccatacttctggttgcccctttggtgagggttgccattttatccattactttcttagtggctaccaggccgtttaaaaatgaccaacctcctggaagtatgatgatggatgggtcacctacacccgtcgtgaagactcgcttgtgcaacaagtacaacactgcaaagggatgcaaacgggggacaaatgctactttgcacaaggtgaaagggagcttggcaagtctatgatggacaactatatgccacctcaatcgaaccaagacccactggttattttgtgcctccacctatggctaaccctggcttggccactctaactagattcagcgcttctgccacaaccaagatcaatgttgatgcatcctttgcaggtagcatcattgggaggggtggagctaacacaaagcaaatatctttcgtcataggagccaagctggccatctgagaccatgaatcatacaccagcttgaaaacattgagcttgagggcacctttatcagatcaggaacgctagcgctatggtcagtgagttgattgtatgtgtcag

SEQ ID NO: 160078 - DNA, 538 bp, Zea mays
  unsure (1)..(538): unsure at all n locations
  Clone ID: MRT4577_77569C.1
ttggaggcaacataggatacattaaatttcaaatcaaaacccagtgcatccgagttcaggtcttcaggcttggtggttctgctttacgtcatcctgatgaacttccttggtttttcggactgtaaacatgccttcgcatccagaaacctaacaaagacaaattactgattgcatcgtatcagggacaatattgtttctaagttactgagtgtttcttcttggtccaaatcggagcttcaggttgtccaaaacacgggtaacattgagaagtcgtggatcgtcagaaggaatctctcgcgccgtcagacccttgtggtatgcctcaacagcaggaagtgttggagtgattttacggctttgcaggagatcccagacataatttgcagtcgtatatccaccagccgtttcaccggcagctgcaagtaggagaatcagttcccatcttggcattcaagaaaaaatttcnttgaagtcatcttctctatagtttcttgagcaagttgcattcctcttgggagtgtacccaatcatagctccc

SEQ ID NO: 160079 - DNA, 457 bp, Zea mays
  Clone ID: MRT4577_7756C.1
gccggccgggttgggatctatctctccctttcgaatccatcgcctcctggcttcctccctcagcaccgacaaccacgacagcgtggatgccttcttccccaatgactggtgctagtcccctgctggcgccaccggccaccgcagtggcgtgcctccacacgcagcaggggcaaaagcgcaccgacaagaacaccatagtcgtgtgggggatgagcttataaccaccgcttcttgccgaatgcagtgagatgtcaagaacaggtaccgcaggatgaggcgcttggaggatgctgtgatgagttcgtgagaggtctaggccgtcgtctcccagtcaactttgggttgctggaccgttgtatccttataatgtaattatttatttattttgtatagaactcttgttatatagtaaagatgtgacattcgatctgaaaaaaaaaaaaaaaaaaggccccta

SEQ ID NO: 160080 - DNA, 264 bp, Zea mays
  Clone ID: MRT4577_77570C.1
ggtaaagtcacttggtgctacacctggagcccctggacccccggtggaaactgcgagttcgtccccatgctctggagcggaaagcaagtcagcgacttcaagaagaacgtcgttggaaagaagttcaagcatgtcttgggattcaacgagcccgagatcagcggccagtctgagatgtccgtcggcgaagttgctccctctggaagcagtacatccagcccatggacgctattcgcgttgcacctgctgtcaccttgtctccca

SEQ ID NO: 160081 - DNA, 1916 bp, Zea mays
  Clone ID: MRT4577_77571C.1
gtgcgggaaagcagtagtggtgggcttatttgggccatataatctctagtgcatccggcccatcgacgatccgacggcggacgccttaaacccttctccttcctttggtccgcctcctccccgcccctccgcagtcgcagtgccgcagcatcgtcgccatggctctcctcaagaactccctcatgctcccggggcggttgcgccatgcggcggcggcgctcactgcgcggcgccacgcggcgacgtcgacggaagagtacgcgcgccggaactacgccgataacaactccgagtacaacacggtcatcggatcgctcgtcgctcagcgcaggccctaccttctgcgtgatgcttacgacgacatgatgcttgatggcgtgaagcctgagcgggaaacgttccacacactcatagtcggtaccatgaaaggcagccggctacaagatgcgctttacttccgtgatcagatgaaagaaatgggtttgaagcctgatgttaacctttacaacttcttgatctccacttgtggaaaatgcaagaactcagatgcagcaatcatgcttttagaagaaatgaaggcacatgatgttaagttgaaaggagaaacctacatttgtctactgaatgcacttgcatcaacagggcaaactgatcaagtttatgccatagttagtgatatgagtgctgctggacttggattaaacaagttttgttatgctggattgataactgcattcaagaacaagacaccaaccgctgaggaaactatggcgaagattcttgacttcgtcgggcagtcgaaaggttggcaatatgttgaaagagtatcaaaggacattgctgagaatataatgatgaatgtgtcagaggaagaactgtacaacctcccaacagcagaatatgtaaataggcgaggaggatttgtctttaaacaacatacagtttatcatgttgctctccaagcttgtgcagaattgcgaagcaaagagacacttgaagcacttctggaaatgttcaataaggataatagagatggatctacttatgatgcctacatggtgatgcaagctatgaggtgttacctacgatgtggagatattgattctgctgttaagatgtttgaagagtattcaagctcgaggtccccacccgctgagttgtatgcgacacttgctgagggagctatgattgggtacactccaagaggaatgcaacttgctcaagaaactatagagaagatgacttcaagaaattttttcttgaatgccaagatgggaactgatctcctacttgcagctgccggtgaaacggctggtggatatacgactgcaaattatgtctgggatctcctgcaaagccgtaaaatcactccaacacttcctgctgttgaggcataccacaagggtctgacggcgcgagagattccttctgacgatccacgacttctcaatgttacccgtgttttggacaacctgaagctccgatttggaccaagaagaaacactcagtaacttagaaacaatattgtccctgatacgatgcaatcagtaatttgtctttgttaggtttctggatgcgaaggcatgtttacagtccgaaaaaccaaggaagttcatcaggatgacgtaaagcagaaccaccaggcatttgaggggcatggcaggtgtgggaatcaaggtccggaaacggaagccagttgtttccagggttttctcgagaaatcttcacctgccaagcctgaagacctgaactcggatgcactgggttttgatttgaaatttaatgtatcctatgttgcctaccattgtttgacaaccatttatccgaacttttgatctagaagacagcgggaatatagttgtgcgcgagtcaagctgtaaaaaaaacgttttgacgcttcctctctatgtaatctt

SEQ ID NO: 160082 - DNA, 287 bp, Zea mays
  Clone ID: MRT4577_77572C.1
cgccgccacagcagtcagcagatatcagctgaccgccggccgaccgtcccacaggcgacctttccggcagagaatcaacgctcgctggcttgctaaactcattgtctgtcagagatgggacgttcggaaggggtcacgatcggatgacaacacacgtcgagaagatgacaacgacgagcagcgtcaggaacgggacatcagagtagattggttcaagtgatgttggaaagaatgtcgtcagatagtagatttacgactgggatgagaagacggttgacattaggaga

SEQ ID NO: 160083 - DNA, 350 bp, Zea mays
  Clone ID: MRT4577_77575C.1
ggaattcccggctcgacgccacgcgtccgtgaacaattgaaatgaaacgaaaaaagttttgttccaaaaaaaaaaaaaaaaaaaaaaagaaaataaaaaaaaaaaaaaaaataaaacaaacactctaaaggttccacgctttcgtacatccaaatttacattcccttcctttctatgtcatcactcttatatattgtaacctaacttcaattcacatacccatcgttatacaaaaccctgactttcaaaaccttatccttacccaacttattccccttttagccaattcccttttcaccaactagcctaataccgatcagccttgcacccatcgcccttcctaacatttc

SEQ ID NO: 160084 - DNA, 447 bp, Zea mays
  Clone ID: MRT4577_77576C.1
gggcctgttgaggaggcgcagaggctggaactgtctgtaagaaggccgattcattttagctgggctctgcatgacacgtctgaagatacgacgcgcaaggacactgcactgcactcttcaccaggattctgtttccattggctctatctgccttagtaggaagcctggcgagcttacctatgatctgggggtgttgtagtggccttcttgcaacccatagtatgttcctaacatcagtgatgagttcacactggactcatatggggaggagagcgttcctccatcatatgttatagctctgagattggtaagctatcacgatcattcggctaggttcacgtttgctctgtgttgttctggcatgtgatgactgacttcattcgcctgcgcgtcagatcttggcgacatgctcgtggaaaacacatagtggtcttagtgcatttttat

SEQ ID NO: 160085 - DNA, 628 bp, Zea mays
  Clone ID: MRT4577_77577C.1
ttttttttttttttttttatagagataaatgtcacaataacatcttattacttattacatagtgtaagtcttacaaagtaagagataaatatagaacgaactaaggtccatccttggcgccataaagtcaactaggagatgccacttagatcaaatagaactcctcattgtgcggctcctcttgaaccacctgttcttctcctgtggggggtgtgagacagcaagggtgagctcacacatgttcatcgctcaacaagttgtggggaataatgtggcatgaactcaccaaaggtgggagttcatgtgaagtgtaaggctgatcaacaaaataaaggttgaagctgagcattgcttttataagttggtcaaaattttattagcagttactaagtgtaagtaaataccaaaccataatatataatagaacaacattaataaataatcccatgcaaatgcatatgacaaattgaacttaagttccataaattaatcatgcgagagccttgagctgctcttgaccgtgagctcggctagcacaacagttttacactctgcagaggttgtaccctttacccacaagtcgtgtttcccatgtcgccagggtttgcaaggcccttagacactaccg

SEQ ID NO: 160086 - DNA, 1723 bp, Zea mays
  Clone ID: MRT4577_77578C.1
gattcggcacgacacggagaggccctcgcatcggccctggtcccggcggcagcgcccgcgtcactggattcgcaggcggtggacggcaccgccctggtctgcccgttctcgtctccgatctctgttctccgtcacgccgctgacgagacgccggccgcacccgccctgccggcgttcgagttcctctattcggggcttggggagctcggcgacctcggcacagcgacggcgccatcgaaggcggtggcggcggagttcgactgcctgccgtggtgggagggcgaggacttcgtgacagtgacaggcctcacggcgtcagccggtgcagccgtcagcgtcatataacggcgttaccttttacccccctaggtgctcgggcctcgtcgtcgtgccgtggcgccctttcggatgctcagggcgggaaacgcgtgggctgccgtgtggcggcatcgaatcggagtaaaaagctagtactagtgttgtttttttattaattattaactgactactctgctagaggctagagcagagtggttgcttgtggcggcgagtcgtatgtctaggcgtggcgggccccactgggccaggcaggttctgctttctgtgtgcgggtgccttgaaccgcacgtctctcgcgtggaaacgcagcagtgaactgtaatgtgaagctagcgattagtggcatgtgttaattggccgtcattagaactaagtaaattaggagcactaggagtcagtgtacgtttaccgtgtggcaacgatcatgcgaatctcacatcgaatcagtttccaagcacagaatatatcatcgaaagtcaaaaaaaaaaaaccccaacaagcctaagagggctcccagcgctttcttcgtgttcatggaggaatttcgcaaggagttcaaggagaagaaccctaagaacaagtctgtcgctgcggtggggaaagctgctggcgacaggtggaaatccctgagcgagtcggacaaggctccctatgtagccaaggctaacaagctcaagctcgagtacaacaaggccatcgctgcctacaacaagggcgagagcactgcagctaagaaggctcctgccaaggagggaagaggaggaagatgaagaggagtctgacaagtccaagtcggaggtcaatgacgaggatgatgaagagggtagtgaggaggatgaagatgatgacgagtgatggagctcctcgagacaatggaccgtgcttcatccaacaatggagcggctacacaaggccccgtggcgatcacaaaaaaggagcctatatccatgtactagaattattcagtttcactccacatcgtgatgttttatttttacttttgtcgtgctataacggatagcgctcctcgttggcgccactggcgggtggttctgcctctggtctggtgtgtttgtgtgtggtcacacttgccagccagcagaggcgcctgcttgtacctagattactgtttccattgtcgtcatcatcggctaacattgtcataatgtcagtttgggtaatgttagattaagtaattattgtgttctgtattcttgtttgttgcccttcttttgtgtgtttttgttattgttggtctgtttccattgttgttgctttggcattgtcagtgcccgccagccctgaaaattgccgtttgggtgggtttgcgtgtacttcgtattatgatgttgggctgcaaaaaaaaaaaaaaaaaaggccccta

SEQ ID NO: 160087 - DNA, 246 bp, Zea mays
  Clone ID: MRT4577_77579C.1
tttgaggagcccagattagacaaaccctaaggggaagattacgaacggggggggggctaccgaacccaacccaaaccaacctcatggccccgagaaagggcacaaggacaaaacggatcgggccaaggacgaaggaacagcccgcagccggacccaaaaataatgccaagggaaggaaaagaaaagaaaaccaaaccccagaagcgggagtaccgggcaaaagcaagcaaacgggggggagcccca

SEQ ID NO: 160088 - DNA, 835 bp, Zea mays
  Clone ID: MRT4577_7757C.1
gccggccgggccgggccagaagaaagattgcatcccctctccccggagcggagagccggcgggccggcctcccatcgcatggccaccgcactgacgtgacgccgccgagggattgaggacccaagacctccagctggaggaatcgggagaggaaggagcggtcgcgcgcccttcgccacgtcttgcgtcgtcggggggcccggcccttcgccgacgacgacgagcacccaccacgttgctgaggaacagagatgtcgacgacaggcgaaatcctgaggtcggagctatcttccaggacgccgccgttcggcctgaggctatggattgtcattggcatctgcatctgggtggcgatcctcttcatcataggcttcatgtgcttctggtccatataccggaggaagcccaccaagtcgtccttcgacagtaccaatgccatcccggtgtcccagatcccggacgtctccaaggagattgcggtggacgaggtgcgtgagcacgctgccgtgcagaccttccatgtgcacgagagctgccgcgcactggccgtgcaggagaagccctgcgagaaggattccgggagaatgctggggcacctggtcaggagcaagtcgagcgacgctgataatctcagccagtgcagctctgcggcgtaccagtgcgagagggctgcaagctcgtactctggcgacgagggcagctcgggcaacgccaggaggcagtatcccactgtctccgcgtctccgctggttggtctccccgagttttcgcatctcggatggggccattggtttactctcagggatttggagcatgcgaccaatcgcttctccag

SEQ ID NO: 160089 - DNA, 260 bp, Zea mays
  Clone ID: MRT4577_77580C.1
caccaggtgcactcacctgctcctgcctataagtgtgccccatcccatcccgatggtcagccagtcctgagcacctaaccatgctgggcatcactgtcctcgctgcgctcttggcctgtgcctccagctgtggggatgcccagcttcccgcgcaacctatccgcccgagtggtgggaggagaggatgctcggccccacagctggccctggcagatctccctccagtacctcaagaacgacacgtggaggcatacgtgtgg

SEQ ID NO: 160090 - DNA, 389 bp, Zea mays
  unsure (1)..(389): unsure at all n locations
  Clone ID: MRT4577_77581C.1
aattcggcacgaggcaaacaagtgccagcgccctctcgcagtcgccgcaatggagagcaccttcatcatgatcaagcctgacggcgtccagaggggcctcattggtgagatcatgagccgttttgagaagaagggcttgtacctctgggccttgngacttccaccgcgactgggtgctccggcgctgctgcggctctctcgccgtctgcttgctggcgctggctgccgtcgtcggcttcttcgtgctcgtcttctacctggcgctgcgcccctgcgggccgtccttcttcctgcgggccgtgcggctgcgctccctcggcctctgcgtcccggcgctgtccctcgggctttnggtggctttcgtgtcgcggcgcccgtgcggcgggtgg

SEQ ID NO: 160091 - DNA, 679 bp, Zea mays
  Clone ID: MRT4577_77582C.1
ccctaccagcggatcagaatctgttaagcaggagaataatgtggttggtaccgaggaagtgatactccacagtagcgatacgaaagttgagaagcattctcacattgacgatgtttgtacagaaactgagatttctttgactgataatggaatatgcgcagtagataaccacaccgatcgaactgggtgcactaagcaggaggagaggggcagccccatgaatgaagccaatgatgtttcatcacatgacattgtatttacaaggagaggtagaaaatcatgtgaggcaaagcagaggacatgtgaagaggaggcacggtttgagaagcgaatcacaaggtcagctacagttaggcagagagaagtttctgcgagctcacacaaaacttccacaaatgaggctgcactagaaggcagagggaggaagggagatattgttgctcactatacaaggaaagtaagcagtgcagtatctccaaaaggtcaccatgctgagctgggagactgtaataccagtatgccgaaacaaacagtgaaagaaacggtggttgatcgaagagactcaggtgtccctgagaatgataatcatgcgaatgtcacaaagaataaggagtcagaaaatggaaaggagatcaatttgaagacccaaccacctgtgggaattgttaagaaaacatcc

SEQ ID NO: 160092 - DNA, 296 bp, Zea mays
  Clone ID: MRT4577_77583C.1
tttcctataatctctttgactccactgactatagacgaccgtcctcgcccaccgacatcttaagccggagctgttgcaagaactgccctgccagccctccgttcctccgctcgaagcgtctgctgtttattggatgcaccggctgcatcgatggatgccattccgcccgccgtataggaccacgacgccgtagatattcgtgaagtttgggcgagcaacctggaagaggagttcacagagatcctcaccgtcgtttacgtgtacccgtacgtggccatgaacacggagttttccgg

SEQ ID NO: 160093 - DNA, 193 bp, Zea mays
  Clone ID: MRT4577_77584C.1
aattcggcacgaggctcctgcgccgagacggacctcggcttcggcgccgaatccgagactacgatctgggggagaccgcagggcacagagggagccatgactccggggccgatccgagctgtactgtcaggggctggagccatgggaggagggggaccggagggggcccagagggagggtggggactatgagt

SEQ ID NO: 160094 - DNA, 431 bp, Zea mays
  Clone ID: MRT4577_77585C.1
aaaaaaaccctttccaaaagggtttttaaaattggccaaagcccatggaaacaatccccaaagcaaaaaacccgggaccaaaaaggggggaacaaccgggggaaaaaaaacaacaccctggggggccccgaaaaaaaaaaaggggggggggaaagcaaccggggaaacaacccaggttttaccatagaaaagggccaggaacctgcccttggggggaaaaaaacccagggggggggggggcccctgggggggaaagaaaataacgggctttaaaaaaaaaacccttattggccccccccccgggcttgtttaaaaaaaggggtgggaaagaattgctaaaaaccccaaaggaaaaccccggggggggaatccccccccctgaggttgggtaagccgggcccccacggaacaaaaggcctttgttggggccc

SEQ ID NO: 160095 - DNA, 868 bp, Zea mays
  unsure (1)..(868): unsure at all n locations
  Clone ID: MRT4577_77586C.1
cgaggccggccgggagttttcacggcggttgggccccgtcaaaaatctaatcctactgtctctctgaagccggcttccttgactaatcggcggcggaatctcgcgggcgcaatttccacttggttcttggtatgttggaggttgccaccttctttctgctttgattttttcttcggcgggagcgtcgtcaacgcgacgcctcgaacgggtgcttggctggtggatctattggatttcttggcccatcgacatttgtcaccatgggcggcgtgtgttcggcggggattgcaggggacaagtcgccaacggagctctcattccgagcgatggggttcgtggtggagcaggatttcaaggccttctcagccgccggcaagaacaagaccgcgcccgtcgaggaggcggtggatcctaaccaggtgagcgatcagtcgtttcgtttctctgagaagggctcgccgccatcaacgagtggcaaggttcgtcgctcagtctccaaggaggccaagactgggaagcctaggagaagcgcctccggcaaggctggtccgagcaaggtttcagacataggcacagtgcttggtagaaagagtacctctggacttgggaaagcagtagaggttctagataatctgagtagcagcatgtcaagtttgagccctggagggggttttgtcgcaggaccaacgacaaaggggaacaaaatatcaatccttgcatttgaggttgcaaacacaatagttaagggcatgagcctcatgcagtctttgtccaaagaaagctgaaactactgcaggacatggtccttctatcagaagtgtancacgatttagtttcagcgacatggatgatctgatgagaatgctgc

SEQ ID NO: 160096 - DNA, 709 bp, Zea mays
  Clone ID: MRT4577_77587C.1
gcgactgtccacctctccgatcaatccacatcggcgcaaccattgaaaagcacgcgattcctacccgtcctgtcgccgccatcaccaccgccggtcggaggtgcctgtcgccgctgctcggctccggcccggagcgtccctccctctcctcgttccgcagttttcaacggcggttgggccccgtcaaaaatctaatcctactgtctctctgaagccggcttccttgactaatcggcggcggaatctcgcggtcttggtttggcccccttgtctggttcctcccgatcggtacttgcctggtggttgataccttctattctcttcccttgtttggtgctcaaaagggcgcaatttccacttggttcttggtatgttggaggttgccaccttctttctgctttgattttttcttcggcgggagcgtcgtcaacgcgacgcctcgaacgggtgcttggctggtggatctattggatttcttggcccatcgacatttgtcaccatgggcggcgtgtgttcggcggggattgcaggggacaagtcgccaacggagctctcattccgagcgatggggttcgtggtggagcaggatttcaaggccttctcagccgccggcaagaacaagaccgcgtccgtcgaggaggcggtggatcctaaccaggtgagcgatcagtcctttcgtttctctgagaagggctcggcgccatcaacg

SEQ ID NO: 160097 - DNA, 189 bp, Zea mays
  Clone ID: MRT4577_77588C.1
ttttatatttcttaaggcctctctatttttattcggcaggataatgtttgaacatccaagtccgcacgcaacagttcgaaaccacgggactgggaaacaggcacgtaaatgcacgcccaataaacaatagtgtgcaacgtacagtatctccagcatgcgaacactagggaccgccggaccttttacttt

SEQ ID NO: 160098 - DNA, 887 bp, Zea mays
  Clone ID: MRT4577_77589C.1
aattcggcacgaggcatccttgccgcacgccgcatcacgcccacgcccacgcccctctctcacctaaccgccctggctccctctatcgccacacgaacgccgccaacccgaacccacctctcggtgcgctccgccatgcgtccccacctccctccgctcatcatcttcctctccaccatcgtcggcatcttcacccagccactgcccctcggcacggtcgcgcccttctcagcctcggtgcagctacaaggacccaccgcgctggatgtgccccctccgctgcgtcctcaaccgtcgtggcccatcgactccaccgccgttgttggtcctccgccccaccaccttcaaccatcgcggcttccccgatgaggacgacaggaccgctacgaggacccgacgcgctggatgtgcgccctcctttgcgtcctctcggttctccctccgtcgcgccctctcgattctccctccaccacgtcgcctcccgcacccccactggctcctcaccgtggtcctccctccgccgcccagcctcccccgacgttcctccatctgtagtccttctcacgtctcctgcaatccccatccacgcacggtaataaaactccgcgcccaagccatgcccccaccccgtgacctcgcccccaacctgcctccgtctgagattatcgcattcgccctgccccctcccgagatcggcgctgccacgccgtgtcccatcctcggctcgttcctttctcgcctcacccgaaccactcctcggccttcaccaagagaccatcgccttaccccctcgactgctgcggcgctagcgcgaggctccgggccgtcagggacgggcccgacgcagggttggctgagcaggtcacagtctcaatggcgcctatggt

SEQ ID NO: 160099 - DNA, 2397 bp, Zea mays
  Clone ID: MRT4577_7758C.1
atcagtgtagtgaaactttatcgtttgctcgcttgcttgcttccctagtactgtcggcccttttctcccttcccaatccatccaccccctccctccccagcaagaaagcattgcatcccctctccccggagcggagagccggcgggccggcctcccatcgcatggccaccgcactgacgtgacgccgccgagggattgaggacccaagacctccagctggaggaatcgggagaggaaggagcggtcgcgcgcccttcgccacgtcttgcgtcgtcggggggcccggcccttcgccgacgacgacgagcacccaccacgtacgcccgccacctctccctccccttcatgccgcaccccaaaccctaatgttgctgaggaacagagatgtcgacgacaggcgaaatcctgaggtcggagctatcttccaggacgccgccgttcggcctgaggctatggattgtcattggcatctgcatctgggtggcgatcctcttcatcataggcttcatgtgcttctggtccatataccggaggaagcccaccaagtcgtccttcgacagtaccaatgacatcccggtgtcccagatcccggacgtctccaaggagattgcggtggacgaggtgcgtgagcacgctgccgtgcagaccttccatgtgcacgagagctgccgcgcgctggccgtgcaggagaagccctgcgagaaggattccgggagaatgctggggcacctggtcaggagcaagtcgagcgacgctgataatctcagccagtgcagctctgcggcgtaccagtgcgagagggctgcaagctcgtactctggcgacgagggcagctcgggcaacgccaggaggcagtatcccactgtctccgcgtctccgctggttggtctccccgagttttcgcatctcggatggggccattggtttactctcagggatttggagcatgcgaccaatcgcttctccaaggagaatgtcattggggaaggtggatatgggattgtttaccgaggtcgcctcgttaatgggaccgatgtcgcaattaaaaagctccttaataacatgggtcaggcagaaaaggagttcagggttgaggttgaggcaattgggcacgtcaggcataagaatcttgtacgccttctaggatactgtgtcgagggtatccacaggatgcttgtgtacgagtatgtgaataatgggaacttagaacagtggcttcatggtgcaatgcgtcagcacggtgttcttacttgggaggcccggatgaaagtcgttcttggaattgccaaggcgcttgcttatttacatgaagccatagaaccaaaagttgtacaccgtgatatcaaatcgagcaatatcttaattgatgaagaattcaatggcaagctttctgattttggactggccaagctcttgggtgctgggaagagccatatcacaacgcgagttatgggcacattcgggtatgtggctcccgagtatgccaatacaggtctgttaaatgagaagagcgatgtctacagttttggggtgctactactggaagcagtgactgggagggatccagttgactatggtcggcctgctaatgaggttcatctggtggagtggctgaaaatgatggttggcactagaagagccgaggaggtggtggatcctgacatggagttgaaaccagcgattcgtgctctgaagcgtgctcttctagtggcactgcgatgtgtagacccagatgctgagaaaaggcccactatgggtcaggttgttcggatgctcgaggcagaagacgtgccttcacgggaggaccgccggagccggagaggccacagcagccacgcagacaacgagtccaaggcaagttcaagcgagtttgagataagcagtgaccgaagagagtcggggccgtcatcgaggttccaggcctagagactcccagtgagagcacggcagattaccatctccaagaacccggtttcagttcagtacgccgggttatcccttaccttgcctgctcgatcatggactcagcaggtcgttcgaaatatttgggaatccgtgcggggtggggctttattggatggttggtactgatagagataggggaaggattgcatcttgtgctggagtaggtattttactcccatttccttggtggtgggcggagtcggatcgattccgtgggaggggaggttgagacttgtcgtggatctggatgtggatcctattcgtgttctgtttgcccagcagcatgtacagaaactttattattattccctggttcttggtttaggactcatcggcgagtagaaaagatgactggctatttcctcatgtcatgagtctctccaaggtcgaagcagtatatgccgttcatttaaaaaaaaaaaaaaaaaaaaa

SEQ ID NO: 160100 - DNA, 1170 bp, Zea mays
  Clone ID: MRT4577_77590C.1
attcttcttctattctattctttcaccccagaccaccgctttcctctacgagtacgtcgctaaaggaagcatcctcgacatcctgtgtagccaggaggatttcccgctggatctacgcatgaggatcgcgatcaagaccgcggaagcgttgcagtacctgcattcgtcggaaactggcgtcaccggacacggcagcgtctcggcgtccaccatactcctcgacaacaacctcgtaccgaagctcaccgagttctcgaggtcatgtacgctgttcaagaagagcgagactacttctgttgttggtgctggagtgatgatcactggcagccttctagagaaagctctgaacgacgacccgtcccgctacggctcggtgttgatgaacctggagagcgacgtgtacaggttcggcggcgtcctgatggcgctggtcagcagggacggcgacggcgaccacgacggcctcctcgccaggttcaccagagcgtacgagacggaagagaccgggagggcgttgttcgacagggacgtcataacggcggaggaagacgtcgccctgctcgacgagctggggaggctggcgctcaagtgtagcgttctggacgcggacaggatcgctgtgaggccgacgatgaaggaggtggcggatgagcttcggacgatgaggaggtcttggaaggagcgtagccgtagcaccgaggcggctgctgcgtacgtagacgtagctactgcaggtgcgggtgcggcggtggtgccggcggaggcaaggctgccgaacctgatgcgccacatgttcgggtaccgtcggatctccgttggtgatcctatacgcgtgtgctaagtaggacaccgaggtgtgtagtactgtgtagcgatgtttgcttgtctttgtctttcctgttttgttcttttttgttttaaatttatacgatgtactccctccgtttctttttatttgtcgttggatagacaaataaaaagaaacggagggagtatctgtttctagacttggatagcttgttgtgatgccggaattgtacatatatttgctaccctttctattcagacaacgttgagttgtgaagtaatagtctttgtattccgtgatcttcacaacgttgatgtaaaaattgttttttttatataaaaaaattcaaagcggcgtgatcc

SEQ ID NO: 160101 - DNA, 670 bp, Zea mays
  unsure (1)..(670): unsure at all n locations
  Clone ID: MRT4577_77591C.1
aagaccacgttcacatcaatccaccattgaccaattcctcccacaccactggccaccacaccaccacaacagcagcctttgtagcaagcacacactcgccacaatgcgcacgcccttcgtggatcctcacagcgccgccggccggctcaagcagcgcctggcaaggatcctcacgcgctccacctgcaccaccaataacgccgctgccgccagctcgggcggcacggccacggccacggccttcgtcagcctcgccaagaccaacaacgcccacaccgccgcctcctcatctcacccggagccggaagcgccgccctccccgtacttctgcacgccctgcacctacgactacgagcgccccaaggccgaccgcgggacgcgcccgcgccgcacccgcagcgcctcgctcatacacatctccgtcgactggacgggggcgggggccgcctccggccgccgctccgcccactccgacgcgccgcttctgcagcacctcttgtcggaacaggtgccggcgagggacgtcgtcggcggcacgaagcagagcaagggcggcggcaggagcaagctgacgacgacgcggtcgtctccgtcggcgtcgaggcggcactgcctcgtcgtcgtcctccttcctggggccgcgcccgcgcgcgccggnccagcagcacgc

SEQ ID NO: 160102 - DNA, 898 bp, Zea mays
  Clone ID: MRT4577_77592C.1
gagggcagattcatggaccaagatcattcgatttggctgatctttctctaagcgagtacaagtataatttagctgctgaagatcattagattgagcactaccatatgtctactatcctttgcaattgatcaagaatggtgagctattctaaggaagcatctgaacaatatacctgctgtcctggagtgtcacagatttttaatgaaccgtgctatcatacttggcaatatacataacgagatgacttaaaaactgtttggtcagtattttggttttcttgtgattctctttatgagtgggtggtacctccaaaaaaatagatgatctgttgacttatggcagtcgggcattacatttttttgcatgaaaatcgacatctgagcagtgataattttgttttgatcgcttctctattgcaagatttagatggctactatcctttgcaattgatcaagaatggtgagctattctaaggaagcttctgaacaatatacctgctgtcctagagtgtcacagatcagggttgagatgattccatcataattatacgaagatttccttagcaaggaatggtttaacaatgttgtgataaggcaagggataatgggtacttgctctgtgatgactcaaaaagaatgagactgatcgtacgtacgaggagagttcctccatagacaaagatgaaaaaagcccttgtatttgatagaatgtgctgatccattcctcaaacagtcaaaccgaatagaaatgtgaggtcggttgtgattaatcttttgatcttaggtaaggtcaaggttctatcggactgctcgctgttgcaggattgtgtagctgtcactgtgtagctccaattgagaaatattatcagtattaagctgctttgatggttgcctggtct

SEQ ID NO: 160103 - DNA, 324 bp, Zea mays
  Clone ID: MRT4577_77593C.1
agctcggaattcggctcgagggtttcactggctgtcatatccaaccatccaagacatagcggctgggcggattattatagtgagctgggggcagcagactatgcccgagggaagtaattagtgacctatcacgggccactgtcacctatcatctatgcagggacatggacgaggaccgcacggagacccggagcaccctgttgtctaacacacttcattactacgcgccagggatccatcccagatgttttctaaactacatgcttgtgcaacaaggcattgcatgtcatgcgaggtctgcagaaaacaaaatcccatggttta

SEQ ID NO: 160104 - DNA, 714 bp, Zea mays
  Clone ID: MRT4577_77594C.1
atggccataccacaggtgtacccgctattcatgacgatgggtgttgctatgggcatatgcggacttcagctcttctggaacatcaccggcaacctggaagtcaggttcggatctataatcttcactccttttgcctattcgattcttgcaagagatgtgctgttccatctagagcaggatgctaaagatggggtcgtttctgatttcctgagcctcagcacgatgttgtttccgaattttagtgcggacttgaatgggacaactggcgatatggttgattttcaatctacaggggatgtagggaatagcgcagccatcaccgagatgggcaacctggttcctgagccatcctacgaggaaatttcgatgcctggaccacagttgttgaggagacggacaaaaatgctgaggttgtgcatgctacaagattacttgtgttctgactgccaccatgtagcaacattgagattttggtgtttgaaattggaaagttgtggtctagaatcgctccatcaattagaaaactcattttggcttggttttggtgactggaaggagtctctagccagtcagagaaatattgctagttttacatataactggaacgatttacggggcatgatttatgcgttgacacaagcacctttaagtgaaacaacacaagcacctttgagtgaaacagttaggattgagaatgatattaacatgttttaa

SEQ ID NO: 160105 - DNA, 945 bp, Zea mays
  Clone ID: MRT4577_77595C.1
tttggccggggttgtgtcaacgcttaaaaagtaaaaaccctccggcggcggcggggttcctgttcgttcctccggtggaagctcccggcgctcaaatccggcgaaagaaaagaggggaaagaggcaggagccggctcaaatggacagcggaagcgattccgacggcgctcccgaggagctcaccgccgtccagggtgttgagaagcacgaagagatcagtcaagttgagaaggatagtgccatcagagtaacacgggaaggaaaggagaggaggaaacgctgggcccaacgaagaacatcctctaaaccagataagaaggcaccaaaggaagtagtagaagatgaaggtaccaaacaaagcgaggagacagatactatgcctggaatgctccccactagtgtaattgaaattctagcagctcgtgagaagcaaaccttcgcatcagattctgaggaagaaaatgtaaagcagaaggtccagaaaaggaagaagaggatgaaaactgctgggcctgaaactattctgctgaaagatgtccggtcaacacagcacgtgaagaacgcccttgatttcttggagcaaaggaaaaaacaggttccgagatcaaatgcagttttgaagaatgccagtaaggctttgcgtctcctatcttcgaaaggtaattttctaagttaaccgtgtggtaggatagcacatttttcagagtatgtgtttagaccatcatctcaacagcagatatggtcgagatactttggaccgatgtatttgaatggaatcgatctggcacgtgagatgtgatgcagtatatcctttggtgtggaagtgtgatgattagcacacgtgtgagttttagttatctatttttgtggatttgcgctgcaaatttctgaagaaaactctgaaagatctccaaattttgatagccatgtggcacttcttgtatc

SEQ ID NO: 160106 - DNA, 182 bp, Zea mays
  Clone ID: MRT4577_77596C.1
gattcacatcatttgttgacattttttttttagcagacaaaggggaagctctttaaaataaaacacgtttgggacgccgggaatttttttcacataatgggttttttgtgtgacaaacctacgggaacccggcctcttatcacaacgccaaaaacagagcccctaatttaagtgaaggggaa

SEQ ID NO: 160107 - DNA, 567 bp, Zea mays
  Clone ID: MRT4577_77597C.1
gcccggaccgcggacggccaacaagttgcagcgagcgacgtctgatgagaggactgtctattctctgtacatgagagccacacctcgataaaatacttgctgctaggaaagctggtattgaaagcatgacgagagacaccttaaaggatgatgaaaaataggcactttttggtaacgcggacgcatttgccaacaatagcaagagaaagaagaccatatccgatactgacggtgatgcagtggtatgtggataagccctccaacggggctgattaagaaactgagcttgtgacctagaaaaagtatctgactaagaaccacaagctagaggaggcacaggacgagaacggagcagcacatgctaatggtgacgctgaagacacccagactcccaagaagaagaaaaagaagagccgggttatttcagaggaagctgaacctactacagtcactgaagggaagaagaagaagaatgaagaagctgaacctaagacagccaccgaggggaagaagaaaatgcccaaggcagtcaaggctgatcaatgacaaactatttgtagtatgtca

SEQ ID NO: 160108 - DNA, 369 bp, Zea mays
  Clone ID: MRT4577_77598C.1
ggaaacaacctctcttcttttttttttctttcttctggagatatcatcggcatcggcagctaccaccatatacaaaggggggccaaacattcttcgcccattatcattaacggcatatatcccggccccaacgattttgggggggagcaatgtaaaaaaagaaacccaaaaaaaaaaaaaactggcgatcctgtaactgcagctaatcctaccccacacctggctgaaacccggtcaacaacactgggtatttttctttgctcgacgtttgctgtttacccctagcgctgggggttttacttcccttccccccctaaaagcgagccttcaaacgaaacccggagctgcaccccccccgccggcccgggc

SEQ ID NO: 160109 - DNA, 561 bp, Zea mays
  Clone ID: MRT4577_77599C.1
gcttgtcatttcgccttcgcccccacggtcccacccgcccctaccagatctgctccgccgccaccgacaccccctcctcgccttcctccggcgagctcctcgccggagcaggtacggccgccgctaccgacccatgcacccacaacagggcttactgccgcgtgctccacatccgcagcgctccccgccgatccagatccatgggtcgccccggcgcgctcctcctcaccgacgagagtggccgagctgctcgcggacgcactgccgctcgtccgagccatctacctcccgagccagctacccgcaaaagaacaacgtcgaaatacgacctcaaatggaaattgaactccctcacctccatcgacacctacatgtccttcaggtactacagtgcctcccttttgagatccacaagacatcagcacaagacagtcacgacaactccctggagatcctcatgggcgaccgcatcgagaactcagcctaccgattccgcatgtactactccgatgcacacgtcttcgtctgccgttctgcacctgtgggagccgatgccttctc

SEQ ID NO: 160110 - DNA, 394 bp, Zea mays
  unsure (1)..(394): unsure at all n locations
  Clone ID: MRT4577_7759C.1
cctcctagtagcaggcccgcccttcttttcttttattttctgggaggaggggcagaaaaatagctctaataaacaggcatagttactagccaggattttcgaagactctaatcctactcgggttatccataatatngtatgcgcaactagcagccccattagaacctggaaacttctagtaactgaacaactctaggacatatagaggagagatctagatgcaagcatgaaagccagagagacctaggttagaatataatccttccagattcaggtgcatagcactcggattcggtcagggctattttcttagggaaacaaaaaagacagacttacacatgagtagggcccgagagaaataatttgtggcaagccgtattcttgtttttcatgt

SEQ ID NO: 160111 - DNA, 468 bp, Zea mays
  Clone ID: MRT4577_775C.1
cccacgcgtccggtttgtaaggaacacaggaccttggccatgtgaaggttttgcttgaagaattgataaagcgctctactttctcctgcagatggatctttatgcatgtgacttagggatttctacgggattgacactcatgtatgctttacagacccactggagctgtattctttgcttctttgttggaggggagataatagggataagcaggggccttgctcgtccttgcagtttttttttttttttggctgatccttgctgacttggctttttttcacttttctttttcttccttgcagtaccccaactatagaggagttgtgtagtgcctatagagtttgagattttgtttttgtgtcatgcccctaatattagtacatgaatgttgtgttactatgatacttgtaagctttggtactaatgaatagtgaggtctagagctcaacattaaaaaacccccacaac

SEQ ID NO: 160112 - DNA, 393 bp, Zea mays
  Clone ID: MRT4577_77600C.1
aaccgcaaaatcaccgatatttttgaataggggtttttagggattaaaagcttgacgcactatacaactatgtatattaacttctcggcttttgaaataagaaactgagttggctagcaattgttccgattttggtctatttaaacagcctaccccaagtagcgcatttaccgagttacgaaacggaaaaatccgaggtttacggtttcgactacatttcgtttagatagttttcgagactattttgggcaacgcgaaaccggactaaatatcggatacattatttgagacaacactgggttagtcaaaatcggataaaaatttatccgatatccaaaacacagttgattttattatcgtacagagtgggctaaagaacaaatgggatcataa

SEQ ID NO: 160113 - DNA, 397 bp, Zea mays
  Clone ID: MRT4577_77601C.1
aattgttgtggttaaagtttttagccgttattttattcttttttgagccgcgcgggataaggggggaatagaggaaacaaaaggtttgaaaaaaaatgggggggaaaaaagggaagcacccaaaaaaaaaaaaagggggacccaacgaaaaaaaaaaaaaatgggggaaaacaccccaccagaaaaaaatatgcggaaaaaaaaatttgggccgaccaaagatcaaaagggcggggccacaaagtttttttatatcgggggggacacccccaaaccatactattttccgaatggaggtataggaggggggactgggtgagggaaagaaggaaacccattggtaaaaaaaaaaaaaagcattggtaataacctcaagcagccccggggggggggtaaa

SEQ ID NO: 160114 - DNA, 489 bp, Zea mays
  Clone ID: MRT4577_77602C.1
cccacgcgtccgtggttgtgatatacttgggacctgaaggctggtacaatatttgtaaggttggggtatttgaggtggacttgagcacaaaccctttcagattcactgagaccaacagcttggatggcgactgcattttcatcagcccctgcagcagcaattcattctgtgcatgtccgtatgacggagtcgaagatgatcttatctacttcattggtagcctcaaccactcaagaaatgcgtcccctttggataagtttgtgtacaacatgagggatggtacattggcgccatttgctttggaaataacagacgacgaccttcgggcaccagatggcagccggatgaatccaacatggctacttccttctgaatgaacagctgctatagatcaattctggtaattgcgctgctaccttgatgtgatgtgccatgctatttcatttggaagaactggattcaagtctatagatcaatttccattgtgct

SEQ ID NO: 160115 - DNA, 150 bp, Zea mays
  unsure (1)..(150): unsure at all n locations
  Clone ID: MRT4577_77603C.1
ccggccgggaacggagtccagtccaccagcagccaacactgaggacaaagcgaaaagaaaaaaaaagnnggaaaaggggctgggtgcgcaaaaccctangcgcagtcgcatccatcatgggcgatgggtccatcttccgtcggcggcgac

SEQ ID NO: 160116 - DNA, 761 bp, Zea mays
  Clone ID: MRT4577_77604C.1
aattcggcacgaggccggccttgtgataatcagagcacgacgacgaaaaggagccgagaagaagaagagaaagctgcagctggaggcgcaatcccggaacagctccaccacagaggatgcgctgaagctgtggcggatcgaggagagcagctcggagttcacgctgtacgacttcgccgagctggcggccgccacgggcggtttctccgacgagaacctgctcggcagaggcggcttcggccccgtctacaaggggaagctggcggacggcgccgagatcgcggtgaagcggctggcggcgcattctggacagggcctggaagagttcaagaacgagatccagctgatcgccaagctgcagcacaccaacctggtgcggctcgtcggctgctgcgtccaggaggaggagaagctgctggtgtacgagtacatgcccaaccgcagcctcaactgcttcatcttcgaccagcagcgggggccgttgctggactgggagaaacggcgccgtatcatcgagggcgtcgcgcaggggctgctctacctgcacaagcactcgcgggtgcgcatcatccaccgcgacctcaaggctagcaacatcctgctggacaaggacctcaaccccaagatctccgacttcggcatggccaggatctttggatccaacatgacggatgccaacaccaacagggtcgtcgggacatatggctacatggctcctgagtatgcttcggagggcatcttctcggtgaagtcggacgtgt

SEQ ID NO: 160117 - DNA, 473 bp, Zea mays
  unsure (1)..(473): unsure at all n locations
  Clone ID: MRT4577_77607C.1
cgggnatctgcctttgcttctgctttcttgttttcaaaagtggtcttctgcgaaaccttcgtatccgagtttttcgtgtatttttcggctgacctatggaccgcgacaagcgtcggcactgagtgtgcctcagaaggcagctcaaaaggcgttcccttcaaagggaaggagaatcattggtcatgtttgtggcgcacacaagtggggcctggcgaggacggtgctctgggtttagcttgtctgcgttgtgtctcccccatagagaatctttgtgggtttgattcagctcagcctgatctcctccgtggactccatagaattgctacccacctctaagtagttgcttgctgtgttacgacttgtctatcaacgcgacgacgacgaaacgcttagggcggttggatcacagtagaatcaatcgagaatgaattattgtgctattcaaaattaaatatcaaggaatttctttttat

SEQ ID NO: 160118 - DNA, 1911 bp, Zea mays
  Clone ID: MRT4577_77608C.1
ccgattgggtacctcggctcggggcgggcggccgggaccttgccgggtcgttgccaaatgccaacgcaggcgccgggcagtgcacgcacatggctgcgcgcgtgggcctgctcccgcacgcgatcctcgtctcctcccgagctctacccacgccccgagctcgcgtcccttatcctcttccacccgtcccttcctacctccgccacgcctcctcctccgcctcccgctcctgccgcgcgtcgccgcgttttgtcgcagtccgcgccatggcttcggggaacccctacgccgccgagctcgccgccgccaagaaggccgtcaccctcgccgccaaactctgccagacagttcaacaggatattatgcattctggcgttcaggctaaggcagacaaaagtcctgtcacagtggctgattatggatctcaaatattggtcggtttttccttaaagatggatgtatcatctggaccattttcattggtggctgaagaggactcagatgaattgagaaaagatggcgctgaagaaattttggaagatattactgaccttgtcaatgaaaccatctttgatgatggttcatataacatttcgtttacaaaggaaggtatactctctgcaattgatgatgggaagtctgagggaggtccatctggacgacattgggtgcttgatccgattgacggtactaaaggtttcttgaggggcgaccaatatgccattgcattggctctgcttgatgaaggtaaagttgttttgggtgtattggcttgtccaaatcttccattgtcatcaataaacaacatcaatggtaactcttcgggagataaagttggtgccctgttttctgctacaattggttgtggggctgaagtagagtccttagatggctctccaccacaaaagattagtgtttgctccatcgacaatcctgtcaatgcatcattttttgaatcctatgaaagtgcacactccatgcatgatttgactggctctattgcagagaaacttggtgtccaagctcctccagttagaatcgacagccaagcaaaatatggtgctctggcccgaggtgatggcgccatttacttgcgctttccacacaaaggttatagagagaaaatatgggaccatgcagcaggctcaattgtcgtgacagaagctggaggcatagtgacagatgctgcgggaaacgacttggatttctccaaagggagatttctcgatctcgacacaggcatcatgcaaccaacaagagttgatgccgtcgctcctgaaagctgtccaagaggctattaaagagacgaaccagactgcctcatgcagatagctcaattgtcgtgacagaagctggaggcatagtaacagatgctgcgggaaacgacttggatttctccaaagggagatttctggatctcgacacaggcatcatcgcaaccaacaaggagttgatgccgtcgctcctgaaagctgtccaagaggctattaaagagacgaaccaggctgcctccctcttatagctgttgtagtggtcgacaaaaaagtagttgcaaaattttcgtactggcaaacaggtgtgcatcatttctccgtggtattacagagtctagcaaatttatagcatcaacctgattggtgatcagacgtccattcgttttactgaatcaccttcttggtgcagcattgctagaagtggacaacatgaataatttgagtgagtccatagttgcctgaactcagctttggcatttgaactggttatagaaattgtgaaataattaatggatatttggaagacaaacttgaacttcagttggaatccaaatgtagcatacaaagtctgtaaaaacaagaatcccgaaacatgaaatgcatcgtgtctgaaaaaaaaaaaaaaaaaaggccccta

SEQ ID NO: 160119 - DNA, 305 bp, Zea mays
  Clone ID: MRT4577_77609C.1
attcgtctcgagcagtttttaccagcttttgtttttactccggattgatccaaggaaggctgcggggatagcatcaaggtggatgggtcaggatacaatgccgcgctcaattgatcacgttgaggctgtgacacattttgatgatgactcggactagctgcagcaatggcatcagcacattggtgcactgtgcccaaccttgaccgacatttttgacaggatgttaagcaagggaataactattaccttgtgaataaatatctaatgcttatggtcgatggtgcatcggaccaactgcttacatg

SEQ ID NO: 160120 - DNA, 350 bp, Zea mays
  Clone ID: MRT4577_7760C.1
ggttggtggtttttttttttttcacaagagaaattttgtattaaacatatccaactcatacaaggcctaagaaaagcctattcaaaatgcaagattacagaaattatttagacccaacaaggcccaaagagatttcctacagaagaagaaactagaattggtctctatctcagatcacgtgtcgtcaataggagaaagacctatacgtgtgagatgagaagcctaaaagtgaaccgacttcttcctttgtcgtccgagcaccgattccggtgaagaaggaatcacaaccgataacaatcgacatagattcttctgatttttcgccggtataaagtaatggaactccaatt

SEQ ID NO: 160121 - DNA, 248 bp, Zea mays
  Clone ID: MRT4577_77610C.1
gtggccaacgggggctatcctgatattggaaaagccaccaccggattcctttacccattaccctgcaaagaattgcccggggacctatgacatatgtttccatctaaatgacccaagccctgaaaccgctactcttccgtctacaccccaccgcacccctggcccacaggacatgaataccaagatttgacccatggggaagaccccctattgcttgtaggtgcaccggctggggcacccacttgggg

SEQ ID NO: 160122 - DNA, 1660 bp, Zea mays
  Clone ID: MRT4577_77611C.1
cttatcctcttccacccgtcccttcctacctccgccacgcctcctcctccgcctcccgctcctgccgcgcgtcgccgcgttttgtcgcagtccgcgccatggcttcggggaacccctacgccgccgagctcgccgccgccaagaaggccgtcaccctcgccgccaaactctgccagacagttcaacaggatattatgcattctggcgttcaggctaaggcagacaaaagtcctgtcacagtggctgattatggatctcaaatattggtcggtttttccttaaagatggatgtatcatctggaccattttcattggtggctgaagaggactcagatgaattgagaaaagatggcgctgaagaaattttggaagatattactgaccttgtcaatgaaaccatctttgatgatggttcatataacatttcgtttacaaaggaaggtatactctctgcaattgatgatgggaagtctgagggaggtccatctggacgacattgggtgcttgatccgattgacggtactaaaggtttcttgaggggcgaccaatatgccattgcattggctctgcttgatgaaggtaaagttgttttgggtgtattggcttgtccaaatcttccattgtcatcaataaacaacatcaatggtaactcttcgggagataaagttggtgccctgttttctgctacaattggttgtggggctcaagtagagtccttagatggctctccaccacaaaaggttatagcttttattttgatcaataatcttaagttcttaacctaccttctctcgtactaaaacattttagtttctcttgatcattatttggttataatcttcaatttatgaattttttactgactcttggtgaactttaatttagattagtgtttgctccatcgacaatcctgtcaatgcatcattttttgaatcctatgaaagtgcacactccatgcatgatttgactggctctattgcagagaaacttggtgtccaagctcctccagttagaatcgacagccaagcaaaatatggtgctctggcccgaggtgatggcgccatttacctgcgctttccacacaaaggttatagagagaaaatatgggaccatgcagcaggatcaattgtcgtgacagaagctggaggcatagtaacagatgctgcgggaaacgacttggatttctccaaagggagatttctcgatctcgacacaggcatcatcgcaaccaacaaggagttgatgccgtcgctcctgaaagctgtccaagaggctattaaagagacgaaccaggctgcctccctcttatagctgttgtagtggtcgacaaaaaagtagttgcaaaattttcgtactggcaaacaggcatcatcaagacaggcgagcgcttggtgccggtgctcttaaaggccatccaagaggttatcaaggagaaagttgagcagtcgtaatgatgaacagaaattttagttgcacgtgtgacttacatatttcagctgtaccacttttgatcagacacgttcccagtgggtgcttagcagataacagttcttttactgaatactgtaaaagccttttttttcaaaaataaactaggtttcctccgttttctttctagtgtaaaatctgtttacatcctgcggatcgatgacccgtctgc

SEQ ID NO: 160123 - DNA, 765 bp, Zea mays
  Clone ID: MRT4577_77612C.1
tggggtacccctcgggggtctgcccgggaagaagagagcgcccactcctacggctttatcttgtctagcgggaccaggtgcacgccctcccacctcctgccaccgggcggctcaaaccgaccacaccgcagctgcagctattggcggtcaatcggcgtcattgggcggagcgacccagcatgaactgcggcgtggtgagcggtggagctgtccgggagccacctggacgaggtgaagcgcatggtggcgcaggcccgctagcccgtgcgccaagatcgaggcttccacccttcgtgtgggccagctggctgccgttgcctccgccaaggacgcgtccggcgctgccggggagctaagcgaggagggccgctcctgcagcaagggcagcagggagtgtaacctttactgcatggcgcacacatggggcttatacgggcgaccacaacggtctgggggttcttccacaccgccggacctaggacgcaagatctgctacagggggacctgcaaaaccatgataccgcgggtatagtaggtgccgccggccatgtgcgcacgctcgcatgcgtagaagccgcacctgtccaagtccctgttcgtgctgggcgagttcggcggcaacgactacaacgcgcagatcttcggcggctacaccccggagcaggcgagcgggcagagcgccaccatcgtggacgccatcggcaagggcgtggagcagctcatcagcctgggcgccatgtacgtggggggtcccggggcgtgctg

SEQ ID NO: 160124 - DNA, 276 bp, Zea mays
  Clone ID: MRT4577_77613C.1
ttttacattattcccaggatggaacttgaatccggccagggacacggtgcatacacagaatacacaccatccctagactaatccaatggacatcgacaaaataccagtagtcttataacagagagagagagagagaaaaaaaaggaaaagaaatgagggcgataacgcaggacaaagctagaatagcacggcccagtttcagttcttccgtaagctgggtgattcacttgcagccgagttgaaacccggaaggatggatccgtcagaagaaggcgt

SEQ ID NO: 160125 - DNA, 185 bp, Zea mays
  Clone ID: MRT4577_77614C.1
ggcactcgtccgatggcatttggcactagagggatctgaaccctaccgggcgcccggccattctgaactgagaccggaccttctatactctgcggagacatgagtgcctggaaaactatagaggcgaaaaggtcacagtacattcatgtaatgctcaatttgagtactgtgccatatcaaagcaa

SEQ ID NO: 160126 - DNA, 299 bp, Zea mays
  Clone ID: MRT4577_77615C.1
gtaccacattgcaatataaattgggtacccaatgcaagataaattgggtaccacattgccatctgcattggagatgccaatggcaagctcatgcttgcccatgctgccagtgcacaaggaatttcagttgttgaacaaatatctggaaaggatcacatcctaaatcatttaagcattgcactggcctgttccatcaatacaattctttgcagggtgtaaacaaggggaataactattccggtgtgaataaatattttatgctgccggtcgatggtgcatggcagaactgtttacatgcc

SEQ ID NO: 160127 - DNA, 341 bp, Zea mays
  Clone ID: MRT4577_77616C.1
ttttttttttttttttttttttttgtttttttttttttttttggggtttttttttttttaggaaggaggtttttttttttttgctttttaccgaaaaaaggaaggggctccttttgtatacccccccacctttagggaaacctttttattgggataattccatcacctttttttccgggaataaagaccccggaaccccccccccaaaagtggttatcccaaacccccccgttttttcagctcccaaaacccaaaaaaccccggcctttctaaaatccaaaaaaccccaaacccctttgaaggtttcccttacaaaaagggcccccaaggggtttgggttc

SEQ ID NO: 160128 - DNA, 250 bp, Zea mays
  Clone ID: MRT4577_77617C.1
caggaagcaagttgacgctgccattggtaaagctaaagagtgtgcactggctgatccatctgagctctctacaaatgtttatgtgaatgactgcgggttggagtctattggtgttaacacgaaagaggtgagaacccttctttccttggctgggaaataaaaaaaaggggctactgttacattgccaaaaaaggtgctgcgcgtgtgtatgggcacgtcacacaccaatggtttcctcacttggggggat

SEQ ID NO: 160129 - DNA, 281 bp, Zea mays
  Clone ID: MRT4577_77618C.1
ggctgatcagacacatgctggcaagaatgtcccagtcacaagcgactctgatccacccgatctatgaagcacactgacgcgatgccctccatatgtcccaacaggttctcatgagaaaggatccagcctccaattctccagctccgagtgacaatctgtgatatcatgtcgtgcatggcagcgtgagtgtaggataataataaataagcaatattccatgcaacagtatgtcgtatgggaacatcttgattcatgagattaaatcagagtttgttcctcgt

SEQ ID NO: 160130 - DNA, 625 bp, Zea mays
  Clone ID: MRT4577_77619C.1
tcggtgatctcccatcctactaccagcatgcagacacacatctcgatcgaagcgcactagacaacgatctatacaccaatggctaccagagatactacaccctctcttgctgcttcttgacctctcagtgaagcgcaaccaacgcagttcattatctacacagaagctcacgttgatcctatcgccattattgcacagcaaactcacaccacttactttaatgggctagaaacatccaggcgtgcttgcctataagctactgctagcgctagtggccagcgccttacaacaacctattgccgcaatcgcaactacagtcgcttggcacatcataaccctacaaactcgatcgcaacgcagcaccagcaacattaggtgccatcactgagccacctgagcagtggtgaaccctgttgcctacttgcaacagcagctgctagcgtccaacccacttgctctggcgaacgaagctgcataccagccacaacaacagctgcaacagtttatgccagcgctcagtcaactaggcatggtgaaccctgccgtctacctacaactgcggtcatctagcgcgctctctgtgggcaatgcacctacgtacctagaaacaccagttgctgcaaca

SEQ ID NO: 160131 - DNA, 198 bp, Zea mays
  Clone ID: MRT4577_7761C.1
attcggctcagcgctcgccgaaatatgtctcttgaggggcagcaactggctcctcacggtatactgtggtcgtgccaaccagattcatccggtagacgataggaccgggcctgaaccggtgtgtgagaaacatccacatgagtgcatcacaccgacaccatatagtcgaccgagaacggtatcattaatggtccgtgc

SEQ ID NO: 160132 - DNA, 385 bp, Zea mays
  Clone ID: MRT4577_77620C.1
acttctttttctttttttttagaacattattcacttttattcctctattcttatgattctgtttatggcttccgtttgattctttatcgttcttgcgaaaagaaaagccagactacaagctagacaagtaggcaaaaacccgcagacatcaaagaggccacactgacttcaccccagggccacaccacccgcttggcgcaatgctccagacctcccccacatgggggccgggcataagaagcgcttgaagggcccaacacgcccaagagggagcgtgacacactttccatggcaactggccggacgggcggttaaaaggaaaaactctggagaaccccatcaaactggcgggcggtcgagcccgcctttagaggggcgaagtaaa

SEQ ID NO: 160133 - DNA, 315 bp, Zea mays
  Clone ID: MRT4577_77621C.1
cggaatatccggggggcgacccacgcgtgctataatacgaacggctacacaagcacaccactgggaacattctaaagaagcctcggtacctgctccgtcgaacccaggactacacggaaaacccgcatatgacacttaaaactctgcttccctagacagataaatggaacagaaggcaagccaaatcacatggaatggacgcacggagagcggacctttcaatcatatagacgacgacaaccattggagagaactagaacaacactcacttgcaaaagaagaggaaccttccgaggaacacgtacatcacaaatc

SEQ ID NO: 160134 - DNA, 190 bp, Zea mays
  unsure (1)..(190): unsure at all n locations
  Clone ID: MRT4577_77622C.1
aacatcttgcatcccacattctacgttatttttttttcttgccgcacagtggtctcgctgcatgcctctaaaatttcacatatgggggtacaatatgctgcaaaaaaccatattccncgcctcnaggcanaaggttgnccancaacacggacctttgngnattacataaacagaaccctattataccacc

SEQ ID NO: 160135 - DNA, 406 bp, Zea mays
  Clone ID: MRT4577_77623C.1
cccacgcgtccgccagccccagctatgcccgccgagccctcacccacggatccgaggagctcctacccctctgtcccattcgtcgctcccggccgcaccagctgtcgatgatgacgagagcccaaggatgactggcacggaatcccccgcaccatcccccatgagcggatcgatattattcgcagaggtggaccgcttcgcgggaggtgcgggctcccctccatcgtcgtcctcgtcggcccaatcgccgatcgggtcgaccccggtttctcaaactattttattacaaggacaacctacccagcgggagcaaggttctatcatgcctatggatattgctactgtgagaaacacaaatgcgaatgtggcagtgccatcatgggacgatactcttgctcaatctctt

SEQ ID NO: 160136 - DNA, 548 bp, Zea mays
  Clone ID: MRT4577_77624C.1
aacaacgttcagaagaaactggtgtagtgactggtcggatcatgtggtgctatggaacagctggtgtacctatcatactgggagacaaagatgactaaggactgggacactccagagtccattccttattcatctggcattgatacacatttactgtgatacctcagttatgcatgataggagatatcatagctcatgatgtaggtgagtactgagctctgcaaatggactccatctatcatgaagcactgaggggaacttcacgcactatgatatgagctgcagcttgctagcactttgtgatgacttgactgcggacacacaacccctagctaaagtagaccacatgctgatgaaagacgcatcaaccagaggtttaaacacacggccgccttggatgaaatggaatggctgaaagacccatgtcaattccgagagactctcagatgagagacattagtctgaatatgcactgcatgttgggagtgcagcatgatcaatattatgctggaaaccctagtggcaggacctatagtatattactgaat

SEQ ID NO: 160137 - DNA, 751 bp, Zea mays
  unsure (1)..(751): unsure at all n locations
  Clone ID: MRT4577_77625C.1
agcgaaaagaaagccgtgcgcgttttattcaagctgcaagcttttcccgaaacagaccaaaaccagctgccggccgggggcggcgcgtgggcgccctagctcacagttcaccgttcacctacgctacgccaccgagctccaaagcaaaagaacaaacaaaaacctctcgacaaaattggcccccgcgcgcgtcgcgaactcgcgatgcgcgggttctcttctcgcccgcccctgcatatgcgcctacaagtcctcggcctcggccgcggccggtgtggcggcgaaggcgagcggcttcctcgcgctggcgaccgcgatgaaggacggcagggcgtcgccggccatgacgaccacgaccttggggggctcccggtcgagcggcaccaggacccgcaccgacgccggcttctcgtcgccgccgttggccgacgacgacgacgaagaggccttgcggcgcgcgcacatgagcgcgaccagcgccaccgcgatgaggaccatcatcgtcgcgaaccccaggaagagatatggcgtcggcgtcctccacaggctcggccgcccgccgccgccgccgccagccaatagcaccgtcgtcggcgccacacctccaactctttccggcctcatttgtctctctctctctcccactccctccctctagcttagcttgctgtgttgtgctgttgtggctgcgtaatggttgcttattaattgcctttgcctttgtgtgancccggccgaacccgagggtacc

SEQ ID NO: 160138 - DNA, 301 bp, Zea mays
  Clone ID: MRT4577_77626C.1
cccacgcgtacggtagttctagatcgcgttcggacactcgcgatctagatgtgagcggggtcatacagttccagcacaacgacgaactcgacccggcgaagaagctctaccctggcggctcctactatgacacgctcgcacttggcggacgaccccgagaagaaagagcggatgcagctggccgagatcaagcacgcgcgcatggccatggtcgacttgctcggcttctccaagcaggccgtcaccatcggcaagggggcactcaacaactgggccactcaccgtagcgacccactccata

SEQ ID NO: 160139 - DNA, 537 bp, Zea mays
  Clone ID: MRT4577_77627C.1
gacggcgtcaagcacatggtcatgaccacaggcaccccgaacgcgaccgaccggggcgccgccgtcctctgcgcgagcgccttcgccgtcaaagccgcggtcgacctgccgatccaggcgcaatgcgagccgccggatgacgaccgctggttcgagcgcatgaaggcctcgggcatcgacgccctcggcatgcacctggaggccgtcacgcccgagatccgggcccggatcatgcccggcaaggcgagcgtgccactggagcggtactatacggccttcgaggcggccgttccggtcttcgggcggggccaggtctcgacctacatcctggccggcctcggcgacgcgccggaggcgatcctggagatggccgagcgcctcatcaagatgggcgtctacccgttcgtggtgccgttcgtgccgatctccggcacgccgctggagagccacccggcgcccggccccgacttcatgcacggcatcctcaaacccctcgcggacttgctggtcggcgcagatctccgcgcgaccgacatc

SEQ ID NO: 160140 - DNA, 213 bp, Zea mays
  Clone ID: MRT4577_77628C.1
ttcccttaagcagtggtaacaacgcagagtacgcggggtaacgtgtggctaaacagaacctttaatggctgcactgtggtccaactaatattgctgctacttcattgtatatgtatatatctatgttgtggcttaatatgtctgtaattatactctaaaaaaaaaaaaaaaaaaaaaaaaaaaaaaaaaggactctgcgttgttaccactgct

SEQ ID NO: 160141 - DNA, 846 bp, Zea mays
  Clone ID: MRT4577_77629C.1
ctccactccattttgtttctctctccctctagatgaagggggactctataccaagctgcttgttgcctacccttccacgcttacgctcctggcattctccggaagcctctaagaccactgcttcggccttcaaagggatggtggtggtggtgacctactcgacgtcacacaacctttctcctcatcggctgacgactgatggcaaccgagatccagtccatagacctagattaatctcccccatcctggttgctcgaccgagttgctcagatccatcgacgaagggagcgactacatcaccgccactgtcacttatccctatccacagacgcttcgtctcccaagcagtgtaggaaggggatatgtccatccgcaccgggatctctcgtaccctgttcgtctcccttcaatctgtaactcttgaggattacaacaccaaccagacgtttgaggactggtggaggaaggccaacaagagtacaatgaaggataagagaaaatgggttaactatgtcatcattttgggggattggtgcctctagatgcatagaaacagaatgttccttgatgggattagtccatccattcagagattgcagcagtatttcagtgatgagttctcctgttggctcatggcgggcgccaggagtttgggttagcttggtttccctagttccatgaggattatcggatccattccttttgatcctttgtaacctttttttgtttctgttttcttgcttggcttttgattattttctgatgttgtcttggttgtaagccctattttttcgctctctaatataaagatgtgtagcgtaaaaaaaaaaaaaaaaaaggccccta

SEQ ID NO: 160142 - DNA, 536 bp, Zea mays
  Clone ID: MRT4577_7762C.1
ggatcctctttagatccttattccttttagctgctcggttacaattggttgagttggtagtgaggttagagatgagagatctcacaccgcctgcgccgcagaccattagatttaccgtagtcgcaaagtttgccgtgatatttgccagttcagtcggtaggacgtgaattttgtgtcaagtacaatgagccaaggagtaaccaaactgaatttactgtagtgctgggaatctgcttctgtcagcctgtgactggtagattatttctcggttttctgccgttagacttccgtgtagcttataagtttttggcatacatggataagcatcaatcaatgaaacgattcacatgctgaattcatttttagcatgtaaagtttactgctttccttgactaaccattaactaattagttttgccattatgttcattctctaaggtttggttttgcacatatggtcaatagggtctggacagtggacttatgaactaactagtattgatgagatatatgtactctcattgaacatcccagcat

SEQ ID NO: 160143 - DNA, 260 bp, Zea mays
  Clone ID: MRT4577_77630C.1
ggaagaaagttattaagtcgggatggcccgccatggtccccatttcaaaaacaccgccaaacttccattcagaaacaggtcaccagcaaattttatctacttacaccaggtccaccgtttacaattgcaaatggcgccaagaaaaaaaaaatttgagccctgatcagtaaacattccttaaatagccccaaacatggtggaatttgttatgaccggccacccacgcttaaataacaccattcagcacgccaccatatttt

SEQ ID NO: 160144 - DNA, 721 bp, Zea mays
  Clone ID: MRT4577_77631C.1
tgccgaggccgaaccaccaggcgcgacgagcactcccaggattggtcgccctaccatcagcgtggtcgcggccgcgatcgggattgccgttcctcgccccgcctttctcggtcgccggcccggtctggtcgcaccgagcaatccccaccttggtgttacaatccaccatagcgacatgctcaatttcccgcaccggcccccaacaaccgcaataccagggaagcatttgcagaagaagaaagccggccagcgccccggcggtgcggctgggcaagcatcctcggtcaccaacccccaccagcacccacaaccgtggctgctgctcctccgggggctacgcccgtggtgtgtttcaactgtggcgaggaggggcattgccaagtggagtgcaagcaacccccgacgtgcttcaaatgcaagaggatggaccatccgacattgctttgcccagaccagtcgacggaggggagctcatgctctttggctatgccctggatgatttgggcttcctccagatggacttgtcggagccggcggctacaccctccctgaccgccctcgtctcggccttggggggtaagacggcctctccggcgatcatcatggacgagcttcgacacctcttccgtccggattgggattgggaggtgactccgatctccgatcacgatttcacggcagtgtacccggacctggttagcctccgctaccacactcacag

SEQ ID NO: 160145 - DNA, 493 bp, Zea mays
  Clone ID: MRT4577_77632C.1
gcacgagcaccgctaatccgacggcgctgcatagttggtttatcaagactctgtctggcgaccagctcctgtcgtttcattcacctacaaggagctctcgaactgggttctgtgggcgggccaggctaaaggatcccacccattgtcctgttgtggtagacattgatgccaatccatccccctgtgttgtataggattaacactatcattacacaagcacataggtggatgatattatagatacattccgtgtacaggtagcacctgcttttgacaggacgtgattcgtctattacataatgtagttacataaccgagtttcactggcttgctgcgagccagaaaaacggatgacctccttaaggtgtccagggtgcaaccaagtgtcttcttctcctgctgatggagcttcaattttttggtgctgagagcatgatagatcaacttacgtagcattcgcctattacaagggaggggccactaatccgacatt

SEQ ID NO: 160146 - DNA, 323 bp, Zea mays
  Clone ID: MRT4577_77633C.1
atctataggagaaccatcagcctccaattttagccagccagagaaactaataagactctggccgcctccatccgagcgaacaaaccatccgaccccgtccccaatgcaatccgtcttcgacgtaccaccaccaccgcatgagcgagatggagatgaagaggatcctcttcgccgtcctcgtcttcatcgacgcctcggccaccgtaatgctgtccttcaccgaggccttcgtcgagtgcaccccaactgcctccaagtcgttcgccgaggctaccgcttgcgctgtcgcttgcgctgccgcttgcgccgtctactctgagccc

SEQ ID NO: 160147 - DNA, 525 bp, Zea mays
  Clone ID: MRT4577_77634C.1
ttttttttttttttttgttaccaaataaaagactattacaagaaacaaaacacatgatttaaatccaaaccaataaatgcaataaacacatgatttcagccaatcgctaccaacgccatgggaaccaaagttatcaacctcattcagctacgaacgctacgagaactgtcaactcatcaacctcattcggctaccaacgacatgcgacgaacttgggctagccgcataccgtcatacgcgttctttgaacaatacatgtctatcagacaaatagaaataacggtatggaactcatgacatcagtacaacaaacctccagatccagccaacagcacgaacgactctagcaaggacctacctccaggctcagctccagcgccggacggaactcctgttgttcaaggcgacgacgagacggggacgaggcggcgacggcgagacgaggacgaggcggcgacggcgagacgaggacgaggcggcgacggcgccgtgctcagtcgcgtgcggcgagttggatttgttcca

SEQ ID NO: 160148 - DNA, 488 bp, Zea mays
  Clone ID: MRT4577_77635C.1
aacaggaaattactgttaccacttcaccacggttctggtgcattggtgagctggttgtttcaattcaagagttactcgcgaacagaagcgaaactcggaacacgcctccacgggtgggggggcgccggcggctcgggttgttacaaacaaaggggtaacccccaaacggacacaaaccacaaaaggcggaccggggaaaacaacctttacgggccggcgggaaagaccttattgacggggaaaaatggcccgaacccctttaagcccaagctggaacaggcacaagttcagaatgcttttcgggccggtcagggaggggggacccttgtgggaccccccttgggggggacccaaatcgccggtcttggccaaatggaagtttgaattgggccaaaatcttatgcctccggggcccccttaagttggggcaccttcacccttttttacacaaacggagggaaggttttggcgtgacccacaaacagggg

SEQ ID NO: 160149 - DNA, 463 bp, Zea mays
  Clone ID: MRT4577_77636C.1
ggacctttgggctgctttatgtgcttgtttatgtgcttgtttatgtgcttgctccgcgcgtagccatacccatagtcgcgaagaagatcgccctctggtcctcctcaccagcagccctaacgggtcacggcgccgcctcatttataccgggcggtacaatactaagagccgtcgtctccggccctactcaccccgccgtcctagaagtctccgaatccgccgaaaactcgggaaacactaacgatcctctcggaaagataaggtcaccttcagcgccgttcgctgtcgcatccgacgtcattcccactactcggacacccctacattctctcagaatcccggagaagtcgtagtcgtggagaagtacggtaaaatccgaaccacacagaaagcccataaacctctccgtcgcgctagcgtccactctaactgtccggacacgtcatgagtcacaccctaacgt

SEQ ID NO: 160150 - DNA, 549 bp, Zea mays
  Clone ID: MRT4577_77637C.1
ccggccgtgatcagtcaagaatgaaggacctattgcctggacacaaccagacacacatggagcaaagtcggcacgtggacactacccttcgacggcaagcactgttgactcagccacgggtttccaaccagaggtcctggctcttggatggagctgaccctgccagagggatgggagcagaaaggaagaactcagcttgtcaacctgggctcaggcaggttctgcgtcgcaaggttcatgaatgagatgtttgatccatacgggagtggatatgttttattgaccggtgtggagatcgttcctcattttgacaatctcactggtaatgacgttagtagtggcagtggagatggcagcaaagggaaacttaaactccaaataattcctcataaatcatgggtgtatatgcccaccacccccttagcgttgattcaagatgtgttctgaataagtttggggctttgcactcaacaccctgttataatgattatgtattgtgttaattattttatccaaaaaaaaaggaaaaaaaaaaaaaaaaaagcggcc

SEQ ID NO: 160151 - DNA, 1464 bp, Zea mays
  Clone ID: MRT4577_77638C.1
cattgggtacctcgaccccggccggggttctcgctacgcccctgtctctccccgccgccaccctgccccggcgccgtagagcacggcgctggcccttgtttccctcccccggccggacctcggaagtatgtctcgggccatcgaatcgacaatgaggcaatctcggcagtttgtgaatctgatcatgaccaatctttacaacggcgccaagtccctgtacttcgtggacctgaagcggcagccactatttaagacaccactgccacctacggcatctacagacggagacagatttgaaacacaagacgctttctctcagacacagccaactgaatccttggtgttggagagacttcgccttccccgtccgagcttccaattcgaaacttccactgcacaagatcgcagctggtacattaactgcttaccgctttccgatcgcgtggtgttctgctcggatcagtgtggacacaactttgtggttgatggtatcgcacgttgtcttgtaaccatgcccagcctccacaaacgtaagatgatgcccctctccatcttcatccccagcactgatgtcgaaggcggtggcagcctcttccttgtggataggtcacccggcatcactgctacaagggtggaatttgagtccttagtgtaccgcaaggcaagcttcagcaacacctactcctggcaggctcaactcctcccaccagcaccgtaccccctttacacctcctactcctggcaggctcaactcctcccaccagcaccgtaccccctttacaccaagattagctcctatgctgtgatcggtggtggttcccacatctgcttatcagtcaagaatgaaggcacctattgcctggacacaaccagacacacatggagcaaagtcggcacgtggacactacccttcgacggcaaggttgagtatgtaccggagctgaagctctggtttggcgcctctgccgatcggcagaagttggctgccactgacctctcttatttgagcagcactgttgactcagccacgggtttccaaccagaggtcctgggctcttggatggagctgaccctgccagagggatgggagcagaaaggaagaactcagcttgtcaacctgggctcaggcaggttctgcgtcgcaaggttcatgaatgagatgtttgatccatacgggagtggatatgttttattgaccggtgtggagatcgttcctcattttgacaatctcactggtaatgacgttagtagtggcagtggagatggcagcaaagggaaacttaaactccaaataattcctcataaatcatgggtgtatatgcccaccacccccttagcgttgattcaagatgtgttctgaataagtttggggctttgcactcaacaccctgttataatgattatgtattgtgttaattattttatccattgctgttgtggacttggttcatcttccttttttct

SEQ ID NO: 160152 - DNA, 214 bp, Zea mays
  Clone ID: MRT4577_77639C.1
cccccttttgggggcggctctataaaatgggagcccccccccgccagaagtacgccgcgagggggagccgcccaccggggcttccaccaccacagcacacgcgccccggagccgatacctagcgtagacaagtctctgttcaagcgatttaagagtggtctcatccggcactgcaacaagcttctatgatgtgatcgcccatttatctcaggac

SEQ ID NO: 160153 - DNA, 568 bp, Zea mays
  unsure (1)..(568): unsure at all n locations
  Clone ID: MRT4577_7763C.1
cgggatgatgatcctagagtcagttcactctagcaggattgccacatgaggaggatgctgatgagaggcgccaagatagacaatccccagtgttatgaggagcctggatgtgagtagcgaacgaggccaaagaatcaaactcctgcttacaatggcangttccatgcatcctatgattgacaaccccaactacatgggaatctggatgcctcaggagatccccaaccctagagatactttgagtcttgacaaggcctgacattttgatccaatacgctgctatcagggatctaagatctgtacaatgcaggcacggcatactgtttgaaactatattgattgatgacgatgagaaggttgccaccttcattctggagaagacctgtaagcccaagtatgatgctgagaaagatatggaaaacgctgcagaggaggctgatgctggagcagatgttatttctgaggtcctagaaaagatatttgacgtgctgtgcagcattgcatgatgttatccatgttggcaccctacagacgcaatatctattgatgttatatgagaacggagaat

SEQ ID NO: 160154 - DNA, 361 bp, Zea mays
  Clone ID: MRT4577_77640C.1
tttgtttgctgcttttgaagactgtgttttggagaaagcaaccttgctgtgaaacagtgtggagatgtaaattttataaggctgactcttactaatcactatttcccctgtggtttgttatcagtacaattctctgttgcttaatctagagctatgcacaccaaattgctgagatatttagtagctgataaagaaacctttaaaaaaaataatgtaaatgaatgaaatatagataaactatgagataaatatcattacggcatgtaatattaaattcctcctgtctcctctgtcagtttgtgatgtgattgacattttgtagctaggttaaaattattaaaaattatagaccccaaaataa

SEQ ID NO: 160155 - DNA, 1173 bp, Zea mays
  Clone ID: MRT4577_77641C.1
gcgcagacaccttttcgccaccgccccgtcctgaatctcgccccccgccgtggatctcgcgccagccatgctcgccaatctcggctatgcccgccaatttcggctagcccccgttgtaccctcgcttaccctcgcaccctctcacacatgcgcatggaagtagcctcctcgtgttggaataaaggcccccctcgctctggaaggaaggcccattcgtgctggaggaatcctcgcccaaaatccatagctgtcgcaccaccttccatccttggcagttggcacccccttcggcagcgccccccttctagcccccttccaactttgacgcccgcgtcagacggacaacgcacgatgcaagcccgagacccctccctccccacgccgccacccaccatgccctctccctcccctcacagccgtccctctccccaccccctggccccaccgcactaaacagcagcgacacacccgtccctaccccaaggaatcaagaggtcaatccccctgtgcttcgaccattctggaccgtatgagtaaagattccattgcgaaggaggtggcggaggcgcaatcggtactaacagtggacgccgtgtctgctgtattgtcaaaaacttttcatgcaaaacaaggagcggctcgttcatgtcctgaaggggattacggtcggaatagagaagtgccaagcgacaccactttttcagggaagtgttgattgtatggggagaccacaaccagttgttcctggtggaggcgtttgcagttcataggtactcctcatgactctgaattggagcgctagactggaggtcatatagaagacaagccatgttcctcagctggaggattcgacttgcttcaacaaggtcatcctggactttctcaaaaagcctaatctgtcggttaatggtagctcccaataaggacaaaggtctcgtcggagataaggagaggatttgcatttgacaccaatatgcggaacctcgtgcccctgcctcttttggctcctccttttgctctgtccgagcgatggtgcccagaaacaaaggtagcccctttttggtccgaacaatatcaatatagcccttttaataaaaaaaaaaaaaaaaaaaaaaaaaaaaaaaaaaaaaaaaaaaaaaaaaaaaaaaaaaaaaaaaaaactcgagaaggggc

SEQ ID NO: 160156 - DNA, 476 bp, Zea mays
  Clone ID: MRT4577_77642C.1
ggaaaccccatgggttattttttaacaagagcccaaaaaaactaaaactggggaattcggtccggggcgggggcggttaagttaaacccaaaagggcggggggcccaaaaccggggggggccccggggccgggggccccggccacattttttctcagcataaacaagccgcaaaggaggggctgggaccaagggccttgggggcccccccccgatggggggggaaaaatttatttttttactaccccacgggggcttgaacaggggggggaacagggcgaccacccggttggtggacccccacttgggggggacccccgagacgagcttgagaaagggggtgttaagggaaaacccggcctgggggtcaaaaagcttgacctggtgcccccggggaaggggggggaaaccaaatccccccccacggagcccatgaaccccttgggggggccctaagaagggggctaaaaaggtttt

SEQ ID NO: 160157 - DNA, 306 bp, Zea mays
  Clone ID: MRT4577_77643C.1
aacacaaaggagggcaactcaccggggacaaattaatatatggttacaggagacccaatgggctcaaccaacttgcttgtagacacacttacatgatcacaaagactgaccccaaacttgtctaaagggatggcaaactgaagaactttttttttttttttttaacaaacacacaacacaataccttttaatggcagccagctgggccttacttattattgtgaaacccccaccacaggctaaaaagataataatcatatccatggactgggatcgatttgataaacaattgcaggggttacattt

SEQ ID NO: 160158 - DNA, 217 bp, Zea mays
  Clone ID: MRT4577_77644C.1
tgttgaagagagagagagagagagagagagatgtgtgactcattaccattgccaaggactagacatcagagaggtcagccgctaatgactgccgactcccctccatcaacgctcgattgcgtctccctcgtctgctagtagaagatcatgagtgcatcctcggtggaagacacatgaggttgtgtaatcagcgcagtgggagcatctgaacaaactg

SEQ ID NO: 160159 - DNA, 420 bp, Zea mays
  Clone ID: MRT4577_77645C.1
ccggccgggcttgcaccgccagaacgacgatgatgacgtccagaagggcgccatgctccgccgccgcttgcttcaaccgctcttcctattgttgttcttcccgtgcaccgccgccgacgggggctccaacaacgaccggctgcccgttgctgcagcgggacttcttctgacgaggtgagctcggcgactgccgggacatatacctgtacagaggcgagagggcgttctgcagcgaggagtgccgttgccgccatatctctgtcagacgaggacgatgacgacactactacctgccgtcgctgggcggtgagccggaacggtactgagactgctgcacccaagttcggcatcaagcccttgctgtcaatttcacgttgcgaggcggctgtccgtcctacgggcaggcccatataccaccgc

SEQ ID NO: 160160 - DNA, 439 bp, Zea mays
  Clone ID: MRT4577_77646C.1
gggccccccaaccaaaaaaaaagggggtctggggaatatttatggggctggtctggggggggaaaatttaacattaggggcatttatgtttttagaggactttaaacattcaaaggggggggtactggggcagaatttaaaaaaacagacgaaatttttaattaaacgacattttaaaacttgggcgggggggggctttaacgcctttttacccgggaggccttttttgggttttttgaaaaaacttaaaagcccttttcaggggggggattgggaggggaaaaaaaaaacggttcgttgaaaggaaaaaggcttttgacctcaaaaggtttgcccaaagaatttgggcttgccaaagctgttaaaaaaatacgggaaactttttcccttgatatctttcctgggaggggggcccccggggaaaacatgaaaacgggtc

SEQ ID NO: 160161 - DNA, 687 bp, Zea mays
  Clone ID: MRT4577_77647C.1
atggaggagaggccatcgcccgaggcaagcgcgggcaactcgagggccgaggatgacttcaggagctgctgcggggacgaggaagagtgggaggacacggaggagtcgttcacggccggcgtcgccaagggggagctggacgaggcctcgatcgaagctaactgcctggggcagttgaggcatccaaaattggtagagttgatcgtatattgctgcgaagatgaccatcggaaggtggcggtcttctgctgctggtttttaaggtccataacagccatccacctcgcgtgctctgcaatttgtgcctatccgttcattgaagccctgtgggtgtcggccaaggagcttctcggcatcaagtctgacagcgatgaggagcagccctcggcgatgacgaagggcccaacccccatccaccagttgtctcgcactagctgtgcaacaaacctctacccatctagcgagtgggagcagatgcggaaggacaactacaagacggtcaacgtggaggagagcctccacaagaagtgcttcaacgagtatacaatacagttgattttgcaaactgagggaggtgctgggggagcaaaattttctcagtttggcgctgatttatcaagggtggaactgggattccacatcttaagtggttcgggtggaggggcagtacaatgtcatggtgattga

SEQ ID NO: 160162 - DNA, 221 bp, Zea mays
  unsure (1)..(221): unsure at all n locations
  Clone ID: MRT4577_77648C.1
atgatgatgcgttgatgncagagcacgcgtactgccgctaaacactcgtctgcatgctgctatccagcaccggcgccaaagcgacctcacgggctcatctctactccggggacagccgcatctcctttacttcccagagctcactccgtccacggcccactagctgcaatcggctagctcccgcattaagatccacaccattggagcagcactagctcaag

SEQ ID NO: 160163 - DNA, 426 bp, Zea mays
  Clone ID: MRT4577_77649C.1
ggccaaacatcatgcacaaactgcactcaacagttcatggaccaacctgcacaaaaaactactgacagaaaaatgctccaacgggagggacccttgcctatttaaatagttttccacatcaagaggattgcaaaactgggtgaagtaaccctatggagacaagtccagcactcgctaggggggaccataacttggcgcccacaggacgaatcagcatgtgttgccacccacccttcaatacctggggcagggtgactctatgtgaaccttcccacttgggttaaggcgattttaataaccgtgaccaagtcactttggatgaaagacccggcggtgtaacctaacgccccttgggcattctcgaaattgttcataatcaccttttcttccacccgagcatttttggcaataaatgcttttgtgaca

SEQ ID NO: 160164 - DNA, 379 bp, Zea mays
  Clone ID: MRT4577_7764C.1
gaggccggccgagacaccactatcgaagagccgccatccgctatgatggcatcctaccctaccaagaaggacggagatcatcctaagccgtctccgacccgtccaacgacgacctctgccgcggatgaccgggacaatgtctgggaggagaacttgtcctgagctgcggacagcacctgacgctgtgcgtttggtttgaggaacggcaagattgagctggccttgctgtcggatcgaaggtgccagctgctgcgggaccacgacagatggagaccgacgggttaccctgtgtgcaatgctggaggcgaaacctgcgcaacgtagcagaacaggccgccgagccgggaggcgttgaatcccacactaggaaagctgaaca

SEQ ID NO: 160165 - DNA, 318 bp, Zea mays
  Clone ID: MRT4577_77650C.1
cccacgcgtccggggttttacacgcaccaactaggggagccccttccgtcgcttcgcctccaacaacagcagcgccgccaccgccgccgccgccgcttgctcgccgggatcgtcgccggtggaaagcgccctggctcggttccggcgggtggtgaagccgtcgcccgtggccgccggcgtcggcgagattgtgatccgcttcaccactcagggcctggtccgcgcctccgtggcctacgcctcctccctcgtccggtatatactggtgatggttgttgtgttggtggctctggggctggctttccgcttggccgtggc

SEQ ID NO: 160166 - DNA, 596 bp, Zea mays
  unsure (1)..(596): unsure at all n locations
  Clone ID: MRT4577_77651C.1
ggccgcttttttttttttttttttggaagagcttaacatgtatcacgttcaaatgcataccggatgggcaatctacatatcaacacaaaccagcgcatgcagtgctagatgggcgttaagaaaacgacacaattgctgacatgcgacatatgactcccgacgaatccgtatttataatatgtgtatatcaagtccgattactcggctaatgaccactatatatatatccctggaagggcactgaacattgaagcttcatatgcccatgagaccctggctttcacctgaatgctgtcgtcggtgtgcacggtgctaaagcgtgaccacaccatgatgctttccaaaattatcaatgcctgggatggcggcaaccaccgtgcccatgatggagccggggccaatgaacccgatgtccgtggcctgaacagtacactgtgacaccccgtataatctacctgcgacaatgctgatacaccacggtggccatgcgttaaccagtggggcgtcatgcccgttggtggacgcaccccgngggggtggcagtataacatgcacccaacggttggcgacatgaaccgcatgcacatgcaacccaa

SEQ ID NO: 160167 - DNA, 365 bp, Zea mays
  Clone ID: MRT4577_77652C.1
cgcgacggccgcccttttttttttttttttgcaagttaaaaacatttttttaagtcagtcatgaacatggctacagtgaattgctccatcaaatgaatgcaatcggtgtcgaacgtaaactatagactgtactttttaaaaacaaaatagtactgtatccattattctacaagcgattgattaacatgtctcttaacgttcgtgttctacgctacgattgcctcgccagcaccagcgacaccggcagcgaaccggcgcacgcgaagcacgcggctgatccggcaagacctcaggcaccgccgcggcgttcgcgaaccacgggtaccggagcgcgtctgccgcggtgaggcgcctgtccggcctgc

SEQ ID NO: 160168 - DNA, 281 bp, Zea mays
  Clone ID: MRT4577_77653C.1
gccctaacatttgggccccttaggttaacggggacccccgggggaacttctacaacaacaggggcccccggggaaatttgtttgtcccgtcccgttcttaaaaaaacaacccccctttaatttcttttgggggcccaacttgacagagggtttaaaaagagtttgggaaaagttttggcccaaacaagggggggtagccgggaaacaacccccggagggccccccccggggtcccccccaagggggaaaccccccttccggggggcccctccaccccccgg

SEQ ID NO: 160169 - DNA, 349 bp, Zea mays
  unsure (1)..(349): unsure at all n locations
  Clone ID: MRT4577_77654C.1
actcgtcccaagggcaactacatcttcttgtcacacgctttcccttacacaatcctcccttctcactcagtncagtttaacaccacctttcacatccccttccccatctcctactcatacatcaatccctatatcctcccattctacacataactaaccacttcaattatgtctaacatcccactagtccgttaactctatattaccagaatacttatcctcctccccttcctctaatctattctcctatacccatccctattcacaacaaacaccctccatatgaaccaccttatttacctcataacaaacccttccacgcttcaataccactccatcataacctact

SEQ ID NO: 160170 - DNA, 272 bp, Zea mays
  unsure (1)..(272): unsure at all n locations
  Clone ID: MRT4577_77655C.1
tcgccccgcgtctccggtccccacatcctgccgccatggtgtcgcgggcccgcccccgccgcgccttgccaggcccgccaccaacggcgaggccccctccggcgcccgcgagtcgacgtcgggaggaggacacgctcgccggcgtcctccgtttttctcgcggcgtctggtcccgtcgagcctctgctccggcggctccgggcggcgtcctgcgacgccgcgccgcgcctgagggggcgtnccgtnctccgcgcgggacctgcttgagtggt

SEQ ID NO: 160171 - DNA, 841 bp, Zea mays
  Clone ID: MRT4577_77656C.1
cgcacttcttgatgaggcatgtatgttccccaagtccacacacgagacgtttgcccagaagctataccagacttttcaaaagcacaagcggtttgtgaagccgaagctatctcgtaccgattttacaatctgtcactacgccggagaggtgctgtaccagtctgatcagttccttgacaaaaacaaagactacgttgtggcggagcaccaggaactgctgagcgcttctaaatgctcgtttatctccggattgtttccgcctccgccagaggagacgtccaaatcgtccaagttctcttccattggagctcgctttaagcaacaacttcaagcccttatggacacattgaactccacagagcctcactatattagatgtgtgaagccaaacaatgtcctgaaaccagcgatctttgagaacgtcaatgtcatgcagcagttgcgctgtggtggtgtgcttgaggccatcaggatcagttgtgccgggtacccgacgcgtcgcacattctacgagtttctgcatcgtttcggaatacttgcgcctgaggccctcgaagggaatagcgatgagaaggctgcgtgcaagaggatcttggaaaagaagggtcttttaggctttcagataggtaaaacaaaagttttcttgagggccggccagatggctgagctagatgccaggaggactgaagtgctcagtgccgcggcaaagacgatccaggggaagatgcggacacacatcatgcggaagaagttcctttccttgaggaaggcgtccgtgtgtgtccaggcgatatggagaggaagactggcttgtaagctgtacgataacatgcggagggaa

SEQ ID NO: 160172 - DNA, 142 bp, Zea mays
  Clone ID: MRT4577_77657C.1
ttttctttcacgagcttgcagcgtctatgctccattgttttattggatgttcatatattacccccacagcttaaaggtgtagatgccgtgcaggcagaaccaatatggggagcacttggcgctagccaactacaagctaata

SEQ ID NO: 160173 - DNA, 420 bp, Zea mays
  Clone ID: MRT4577_77658C.1
gcaataacgagggcggccgggtcacaatatttatcaaaccactcatccgtcgatcgccaaccgtcagcaagaacatcaccaccgcccagtaataatggcgcagagcatgaggattgtggtgctggccctgctggccctgctggaggtggaggcgccagcacccgtgcacaccgcgcacgaatgatacgacgaatgctacgggcgctgcccaaacgataaaaatcaccccgcctgaaacaagaggtgcaaccagagagcgttggctccacgatatcaagaaggctggaggccaccaaaggcgccgcaccatggaaaagccagatgacactttctccttcatcgacaaaaatttccttgcaatagccaccgacaaaacaaatcctcaaattgcattcattcaaggctcgactaaaatcaatg

SEQ ID NO: 160174 - DNA, 446 bp, Zea mays
  Clone ID: MRT4577_77659C.1
attgcccttgtcgtctatcatagacacacgttaaccttggtccattactactaggaatgacccttcgtaaaccagtctttaccaaagtagaaaaactacaacccgggacacaggggcacaacttgatcgttcaagtgatgaacgtcggtgaggttatggaaaaagtgagaccgagtggtgacaaactgcaaatcgccgaagtgctacttgcagatgaaactggagcggtattatttacagcaaggaacgaacaaatcaaactttttaaaaagggagagtgtgtgaccgttcgaaacgcaaaagtcaatatggtgcgaggctttattcgtttagtagttgacaaatggggagctattaagccgcctggaccaacggaaaagttacaaggaccaccaaaagtagaaaacaatatttccaacatagaatatgaactcgtgtaagacact

SEQ ID NO: 160175 - DNA, 334 bp, Zea mays
  Clone ID: MRT4577_7765C.1
cctccattatccattcacatgttagggtattaatttgtaataccatttctctccactcgtttgaaaattcctcttccgtcgtgtgcgatgaaatctattcccagtccatgttcatcgtccgttcagttgatggcaacgactttgaagtcctcttctgttcaccccctagtttaaggcctcctcctcctctggggcggggctcttcttcaccttgagctcctccatcttgtctattgcggtcttgagctcctaccttctgttcacgttttctttcccattactccttgccgacccttattagcattaccatcatctccttgtcctccttctcctc

SEQ ID NO: 160176 - DNA, 658 bp, Zea mays
  Clone ID: MRT4577_77660C.1
acccacggtccggccgcccaccgcctacacggctacaccttcctctctccggcgacctcccgaaacagaactgactcgcatggtcttcgctccgtcgcgaggcccacgttagcggagcctcccactctctggctcaactgcctacgtctggaccagatcctccatgagctcgcgggagtgcattggtggcgcgacgcgaccaacgtcgtctcgaccctccttagcggcaaccgaagacctgaatcctacaaaggcacatgcatgtggtggccaggaggaggctcagatctggaatccagtccgaatgttcctgacaagccaactgcaacaacgattattgcttcaattttagcgatctattttttctaacttgcaaaccaacatgctcaaaattgcagtcaaattagcaatgttgtcagataccaatcctccaactctgaaattcgtgaggttgctgcaacgaccagactgaacattattcattttgtttaaaagtgtgtgctggggggggggtatgtgcttctaacacttgcatatttggatggatgatgtttatggacggatagagatgttcccctaatactttgtaccgtcaaaagatgctatggacactataatggtctattaacaagttaatacatgatttgcctactgtcag

SEQ ID NO: 160177 - DNA, 154 bp, Zea mays
  unsure (1)..(154): unsure at all n locations
  Clone ID: MRT4577_77661C.1
agagcagcagcagtgggtttgccgtatctttttttaccaatgtatgtctatatatgtaagtatcaaatctgcaatgtgttaatcaccatttnnctggggcggccgcacgagtactttacgcatcgatatgtgcagcatcaaatattccattttc

SEQ ID NO: 160178 - DNA, 1680 bp, Zea mays
  Clone ID: MRT4577_77662C.1
gaatagatgagacttttgtctaacttcaatgtaggagtttacaatgcagagaggattgagatgcattatcgatatactcctcaccagtataagttttgcctgctcgcatgaatagatgagactcaagtgtggcttcatgtgagtctaaagcaaaaaatatgcagggggaggggtatcaaaactaccttctccaagtattcttgcaacttttttattctgcccatatagtcttgatcctcaacgcacaatgaaataggatttgaatcgacacctggtccttcaaactggagcgggcctgggtttctgtagacatcttccaacaaaaagctggaagaattctgtctcaacacactaggaaaagttgagctgaatcatcagattcgggatgtagtagtagctgcttccttataaaagggggcaaaaactcaaagtgcagatgcccatggtgaaagctgagaagagatattctcaacagaaacacctttgccatggaagccatggatttcctataaacaaatagctccagtgagtaaaattataaatgggtagtcataagacgtgtaaacgtacctaaagcagagcatatagttcaggaatattctccacaagtgtctcaaataatcagatccaagcaaccatgagcatgacaaaattaagtattaggtatgtattgtttcatttgataattctaggatgtttgtacttcacatcagagttcagttgtttcaacatctttgtttctctaatgcagctactactacatcctgaatctgatgattcagctcaactttcctagattgagactgaaaagctgctagcccagttagttgagactgagatgaacagacgtttgaaggaggacacttacaaaggaaagaagtttaatgcattctgtcacttcttgggctaccaagctaggggagcactgcctgcaaagtttgattgcgattatgcctacgttttggggcatgtgtgctaccacatcatagctgccggattgaacggataacggatacatgactacagtgacaaatcttaagaatccagtgaacaagtggcgatgtggtgcgactcctatttcgtattactactttattcgcttgatgggacgcaaggcttcccatgtggcattggaatgtgctcttcaatcacatccaaacatggtcaaattttcaccattgatccaacctctgctacggcaatttccagcatcggcggtgtgctctttacaaagccttagagctgcctctcctgcaaagtctgaacttgcagagatagtcccacaagagaaatcaccaaaagattccattcaaccaatgtcaccgagtccaaggtattctacctcaagatgaagggcgactaccacaggtcaggcagagagccttggaaccgaactcttggagatggtgcctagcagggaagaggagattaagttgaaagaataaagggaggatgctttgtcgacttttgtagttaatgattatgtgagacttcagtttaagggctcaacttttactggttcttggaagtcatttagtagccctaagatttcatcagcattcttagtagtaattgctatagtatcaaatgggattgtggtatgagttgctcgagtactaagtactaacgttgttgtacattgtgaagctaagtgggtaatatcaaaagggattaagattt

SEQ ID NO: 160179 - DNA, 243 bp, Zea mays
  Clone ID: MRT4577_77663C.1
ttgttgtgcttatttttttgtttattttttatgaggtgtttatggtgccagtcctgagggcgactacaccggctaccgcgactggggcggcccggaaattgaccacctgcctccgcaaagtcgcccatggacctaagagggagggacgtgccggcggtgttaagacaggcgacgatgccggcccacgagggaagacggccgcgcctgaccaccacaccaaaaataggaccggagaacgggaag

SEQ ID NO: 160180 - DNA, 825 bp, Zea mays
  Clone ID: MRT4577_77664C.1
gccttgtgtctttactctaaatgatagtattactactttattcgcttgatgggacgcggggcttcccatgtggcattggaatgtgctcttcaatcacatccaaacatggtatgttttttccttacttgcatgtgacctgtcacatttttttctcacatggatctggaagagccgcgtgagaggaagctaaagggttctggcttaagctgtatcaggtcaaattttcaccattgatccaacctctgctacggcaatttccagcatcggcggtgtgctctttacaaagccttagagctgcctctcctgcaaagtctgaacttgcagagatagtcccacaagagaaatcaccaaaagattccattcaaccaatgtcaccgagtccaaggtattctacctcaagatgaagggcgactaccacagtcaggtgcatagaggaaggatgctgcggggagcaccatgaatccctacaaagctgctcgagtttcctctgactgttcaccattattggaagcaggtcaggcagagagccttggaaccgaactcttggagatggtgcctagcagggaagaggagattaagttgaaagaataaagggaggatgctttgtcgacttttgtagttaatgattatgtgagacttcagtttaagggctcaacttttactggttcttggaagtcatttagtagccctaagatttcatcagcattcttagtagtaattgctatagtatcaaatgggattgtggtatgagttgctcgagtactaagtactaacgttgttgtacattgtgaagctaagtgggtaatatcaaaagggattaagatt

SEQ ID NO: 160181 - DNA, 1235 bp, Zea mays
  Clone ID: MRT4577_77665C.1
gtttgggacagcatgggacaaaagaaagaagttggttatagaaagcagaagtttcatggattcacggtaaactgaaactgtcgctacaacaattcttcttgtgatcgttgctccttgccaattcatcgatctgagatgcaaactgacatcatctatgagcactgggatattcttcccccctaagcaaattaaggacccagagactaagaagcctgaggactgggatgacaaggagtacattcctgaccctgaggacaagaagccagagggctatgatggtattcccaaggaaattactgaccctgatgctaagaagcctgaggaccgggacaatgaggaagatggtgaatggactacccatttgctcgtaccattcccaaccaaaatacaagggaccatggaaacaaaagaaaatcaagaactcgaactaccagggtaaatagaaggcccatatgattgacaacctagatttcaaggatgatccatatatttatgcttttgacagcctaaaatacattggcattgagatgtggcaggttaaatgaggcactttgtttgacaacaccatcatcactgatgatcttgcgttggccaagacttttgcagaggagacatggggcaagcacaaggagatattgtgttcttatgcttggagtgaagatggttgccactctgcattagcggtgtgctctttgcaaagccttggagctgcctctcctgcaaagtctgaacttgcagagatagtcccacaagagaaatcaccaaaagcttccattcaaccaatgccaccgagtccaaggtattctacctcaagatgaagggcgactaccacaggtgcatagaggaaggatgctgcggggagcaccatgaatccctacaaagctgctcaggtttcctctgactgttcaccattattggaagcagggcaggcagagagccttggaaccgaactcttggggatggtgcctagcagggaagaggagattaagttgaaagaatacagggaggatgttgtgtcgacttttgtagttgatgattatgtgatacttcagtttaagggctcaacttttaccggttcttggaagtcatttagtagccctaagatttcatcaacattcttagtagtaattgctatagtatcaaatgggattgtggtacgagttgctcgagtactaagtactaatgttgttgtacattgtgaagctaagtgggtaatatcaaaaggattaagattt

SEQ ID NO: 160182 - DNA, 297 bp, Zea mays
  Clone ID: MRT4577_77666C.1
cgtaatgcctgtcccaggagggaatcagagctgcactctggtctccgggagctccgcgggttctgtaggccgatctgtcgccacaagctcggcttggaggggcggttcgggacaggccaagtgctcgccagcggttccgtttggttgtcgtgcaggacgaaactgatggtggagcgctgccccggtttactccggtcactagctctggggttctatatgatcggtgattagttgctctgtacagatactagccaggaggttctacgccatgaaccaaaccgagaggtggatcagaac

SEQ ID NO: 160183 - DNA, 1310 bp, Zea mays
  Clone ID: MRT4577_77667C.1
cccacgcgtccggcctccttcgtccctcgatcacaactggggctctctccactcccctcttcctcgacagatcctcaatcaagcttcatctgtgccgtcgtcggcaatggctccggccttcccacgccgccgtccaacctcccccgactctcctcctcacaccgccgccgctcccatggctcaccctccctgctcgcctccatggccacctggaggcggattcggcctccccgagtcaccgcccaacgtctcgccgcccaaccaaagcgagaaatccactgggcgaagcttctgcacctcccgaacgggggaggggaggggagcacgccagcactatgtgcctgcgggtagggtttctcccggtccgatggcgtccgccatgtcgtcgaggtcacgacccgccggccacttcggagtgttcccggtgaacgctatggccggcacgggaggcagcgacggtggggtgcagctcgcggacaagctcaagataatcaagactgacaactttgaccccgacgcctacgtgcagtccaagtgccgcgccatggacgagaaggaaataaggcacctgtgttcctacctgcaagatctaaagaaggcttctgctgaagagatgcgcagaagtgtttatgcaaattatgctgcaagattatcctacatgttgtcttgtggttcactggagaggctgctcaacatgaggaatctgaagttatggatggtgaggatgacgatgatgaagacgatgatgacgaggatgatgatgattatgatacaaagaaagacaagggaactgctggaggggaagggcaacagggaaaacgacctacaagtgccagcagcagtgagcagcggcggtgtgctctttgcaaagccttggagctgcctctcctacaaagtctgaacttgcagagatagtcccacaagagaaatcaccaaaagcttccattcaaccaatgccgccgagtccaaggtcttctacctcaagatgaagggcgactaccacaggacaggcagagagccttggaaccgaactcttggagatggtgcctagcagggaagaggagattaagttgaaagaatacagggaggatgctgtgtcgacttttgtagttgatgattatgtgagacttgagtttaagggctcaactttttccggttcttggaagtcatttagtagccctaagatttcatcaacattcttggtagtaattgctatagtatcaaatgagattgtggtacgagttgctcgagtactaacgttgttgtacattgtgaagctaagtgggtaatatcaaaagggattaagattt

SEQ ID NO: 160184 - DNA, 492 bp, Zea mays
  Clone ID: MRT4577_77668C.1
gccagccatccttaccctgcactcatgcgctagcgtgagataatgggtaaccactctggcgatgtcacctgaataatctggtgtaaggctggcctggaatctctgggtcctgatggcgttcgctttgaggctgcagctgatgcttactctaacagatctctcaagtatgcctgaaactgcccttcgagattatgaggcccagtctggaggatgacccttttgttcacaggcctttctattctctgtctgatacactgctggaccaaaatctatgcacgtgtgactgagccctacatcaagggtggctattgcacatctagcgtgacacatcgaattgccctttgaccatattcgagaataagcctgctgacatgatccttgacaagaaatttcctgggacactagatcaaagtgctggctgcctcattatctttggggatcctcatacggaggatattttacctgccactctcgaaaccatttcgcatgtcg

SEQ ID NO: 160185 - DNA, 2041 bp, Zea mays
  Clone ID: MRT4577_77669C.1
ggggggctcctctgcaggttgcgcggactgagaattcctcaagcttttgttgctacgttagggattaaaaacagaaaattgctttagtgactggtattaccagttctctttgatttttcttcagcatcttcggaggaggccttgtctcatcttaccaaaatcgctagctaggaaacacatcctcagatagaacgagttcatctgcaatgcagaacaggtcatcacacactgcgtcacctatatcccacatgagatgaaatgttgtgggtaacataaaaccttaaaaacgataacatttcatctcatagttggggagtgatttcggtaggagtagcaactgaatccgggttagagtcaaatgtgcccttctatcagaagagcttatgcattataggaagtaatgctcaaaggtgaaatagcaatgatccgcagatatgacacaaccggacgaggctttcgaaggctcaggtaattaataccgcttattttgtaatgtctgattttggtactataggagataaaaagattgatctgccttgggtgtctgaggaggagaaacatcttcacaagtccctctttgactctgctcatgaaatgcccatgaaaccaaatggtagtctgcttgttgtctactaccttcggcgttatcggtatttggaggcatatgaggttgaccgtagtcttcaaaaatttgagcaaaagatattggaaaatacaactgaagagattgcttcaaaaatcagagcaattgctcgatggagagaaagtttagttgttaaatgccttgacatgcttccggaggtccagagagagaatgtgaaagccatcaacagtggagaacaaagtcaatttgctcgaactgctcaattatcttctccagctcatgtgggcaaatcacaaagtcctgtcatggacttgagcacaacttttacgacttctcttcaaaataagtcaagcctcctccgaaaaaacaatgcattgactgattctggtggtctgatccgaagcagccgctcagaatttggtagaaaggtcccatctgttctggataccagggcatcaccccatgggccacctacatccaatatgagatcaagtgcaggggatatgttccccacagtgggccagagagttgagagtccatttttgaggggggcgaaagatatcagttctagaaaaggagaggagggattcaaagaagggattaaatatggtgatcacgatccagtgcctatgtatttgaacttaagttctggtgatacacctatgaaagactaccgaacgagtttgctgaagactgcagttaacaaaaccactatttttcaaggaaaagattctgttggaaaaggagagctccactttggttcacgtgccgagaagcctttcatcttaaatggaactggtgtaggtcaaaatggcctcgctaaggtgtctggatatgctggttttcgtgaggattacaaagtaccaactaaggagaacatcttgagctctagcaagagatcttcaatcgatggagcagaagccagcaaaggtgtgtcaaggtggagatccgacgagtctagtgaagacgaagaagagagaacaaacagggagagcggagcttctcttgttactagaaggcgacctagattttcgagaagatgatatatccacgtcctcatggatctttattaattgtttgcagggcgaggattttttttgaatatctccacagttattaccctaatgtaacaaaaaaaacgtttcatcggaaaagtgtatgtgataatcatgcataattttacactgccaaggccgagatgtgtagttcaggtgtcacacaggatgctataaaacaaaaatgagatggcataggcatgttgtattcagatagttcagttcgcgtagttgtaaaccggtgcaatagtagttgtaaaccggtgcagtagcaaaatactaccttctgtggacatgagtttgagtttgtctttttagatttgcttttaagttaatcactattgactttgatctgttttcagtggctaaattattttccccc

SEQ ID NO: 160186 - DNA, 236 bp, Zea mays
  Clone ID: MRT4577_7766C.1
attcggctcgaggaagaacaatatggttgtctttgagacgtcagccaagacagctgctgatgtaaactaactgtctgaggcaattgcagagaggttgcctaggccaacggcatcgcgaccaaacactagagtgtattggttgtaccatgtaatgcatgccaggccatatacaccggtactgtatggactacggaagaccactgatgttaagatatttaccccactctgtcatagtt

SEQ ID NO: 160187 - DNA, 197 bp, Zea mays
  Clone ID: MRT4577_77670C.1
tttgtttttttgaattcagcacagtgttcaaaggggtatctaagaagaggtgatcaacaggggttcctgtttgatccatccagcatacattgagagtgccataaacaatgtgctttcgttggaacaacaacaactggaaacgaactcatgtcattttccttataacatggcacagcctcacaccttggtctcaggtg

SEQ ID NO: 160188 - DNA, 1225 bp, Zea mays
  Clone ID: MRT4577_77671C.1
tgtcactggactacgcgctgtcgaacccgtcccacgtgggcgccgtggaccccttcaccaagctgcagtacacgagcatgctgtacgcgcaggtggacgccgtgacgttcgcggcggcgcggctgggttacggcggcgtgcccgtgcacgtgtcggagacggggtggccgtccaagggcgacgccaacgaggccggcgccacggtagagaacgcgcggcaatacaaccggaacctgctcatgcggcaggtgagcggcgagggcacgccgctgcggcccaggctccgcctcgaggtctacctcttcgcgctcttcaacgaggacatgaagcccggccccgcctccgagaggaactacggactctaccagccggacatgagcatggtctacaacgtcggactctcccagctcgccaccacgtcggccgcctccctctccctcgccacgtcgccagcagccaggaccacggatgttgggaaggactatgccggcctatgcctcgtcgccgtatctgtggccatcctgcttatcacccaacaaggatcgctcctcctgtgaccgcaaaaagcgcgcgcccgcccactgccaggcctgcagaatggcctggcttttgtggaccaaaagcctccaagaccaaaggggagacgcaccgttcaaatccaagggagaaaaaagctaggacgagggggcgatgtggaagccactatcttgaggacagaaacagcgtgtataagctatttgcgaggccattttctagcacacaccagactttattccttggttacttgcagaggagatcaggagaaggaaccaggaaaactagttcgttctgagaagatttatgccaggaggaaaaagggtggcctgcgctgcttgggagaactggcgtctccttctcagtgagaagagagctggctttattccccttgcgttgacaagcccgtggtctaggcctcttctgatgcgaattttagctgtacataccaattggttcattcgtttatttttagctccatttagcttgaccattctgccctcatcccccggggtggttggtcgaaatgagaggccagtggcccagtcatgtaaataactcgagtaaacaaatgaggcagctattgcatcttattgtaatctgtttaaaaactatgacattatgaagtcctcattgttaaagaaagatttgtttttccgctacaatgttaatagagtaaaaatgagttagc

SEQ ID NO: 160189 - DNA, 591 bp, Zea mays
  Clone ID: MRT4577_77672C.1
gggaccctcgaggccggccgggactagaatgtactatctactcctctcttgcgcaccacggtctcccgtacctgctactcgttccgcactaggaaaggaaacacttcccttcgctacggagacagacaactactcacagcaaaatggacatactgctcgattacgtctgccacctacagtgtgtgtgctctcggagaggcagacatccaccaacggtcctcgccacgtgatgtcaaacaggacacctgcctcgcacacagagtgtgactccaccatccgaaggataagatccagacggagccgccccgccaatctccacgccgacaaaccctctaagaatgtgtgttcctcatccaaagatactgcgttatataccgtaaacatggatatgtggtcgataacatgctactcccatagaccgtgagactgaagaaacgacactgccgacagtgaccaaagagcacagatgaacactgcgctagagccctagatgatgtgactgtatctgatgacattacagatataaagcagacacagcaaccagactcactggaacaaattaatgtgccgactgtgaacccccctgaactc

SEQ ID NO: 160190 - DNA, 429 bp, Zea mays
  Clone ID: MRT4577_77673C.1
tctttaaaaaacacaaaaaaaaaaaaaaactagaaaaaaggaagaaaaaaaaaaaaaaaaaaaaaaaaaaaaaaaaaaaaaaaaaaaaaaaaaaaaaaaaaagaaaataaataaaaataaaaaaaaacaataaataaaaaaaaaaatataaaagaaaaaaatggggctcgcgcttttagggtctaaggtttagtgccgggggcgcggaattataataggtttttttttgcgtcccccaaatttaacattaggtggcgtgtgtttaccaggatatgtttttggaaaacctgtggtttcccatgtttttatgcttttgaggaatctcctttttctccatttgtgttacatcaaaagaggctcttccgattgccttttccaaaaagtggcccacttgtttggtcttgggtctcccccctttaaccgggcttt

SEQ ID NO: 160191 - DNA, 551 bp, Zea mays
  Clone ID: MRT4577_77674C.1
gggagagacagtgtctgtgctatgaattatgattgttgatgcccttctcaggttcacgtacaggaataaaagacttccactgcagtagctttctggcccaacaggctacgcacgaagccgcctagcccaacaactattacatggcccacttcaacgcacgaccccgcgtctcactctcgcgtgacggctttgctgacgctgttcttcacttgtggctgctgcttcgaccacctccgggtccttgtggttgcctttgtgtagaagcggtgctgatattccccaccgcttgaaatgcggtttgtcctcaagccgttgagacgtcgcaaagctcttgactgattgttgttgctgagggtgtgtgctagtgtccagtgcactgataagccggtagaggttgactgtatgaagaagggcaagttgatctccaattgatcagaggtccccatagctgaaggcaaagccaatagctttccatctcgtccgagcatctcaatgcctcttttgtttaagtcgttagccatgagcatgccattgacactcgtgagcaatga

SEQ ID NO: 160192 - DNA, 188 bp, Zea mays
  Clone ID: MRT4577_77675C.1
ctttgattgatgtatgcgataatccgagggttgagattcacgatgagtggccatttcgttccttcagcagcaccgtggaggaacttcttcagagactatatcaagtcattcgatcctagctcgactgtcaatcaagagagataccctcgccttcaacccaaaatcgggaaagggaaagggttcttaaa

SEQ ID NO: 160193 - DNA, 777 bp, Zea mays
  Clone ID: MRT4577_77676C.1
ggaattcgcggccgcgtcgaccagaaagtcagaaatggagtaattcagttaagcccaactctatggatataaaccatttgcaagcaaagacacctaaaaggttgataacaaaagtttcctctgaagttactgaaactgaagggccagaaggtattgagaagacaaaatctgtcccagtaaagttcaaagtaggggcacctgataaatccttggagaggaacatgtcagtctccgtttcactcgtttctgataaacgtgtcatggatgttacagacagtagatctaccggaaaggtaaacaagatagtgatacctaataagatgaagtctgatgatttccctcctgacactccaaagccatctgttgtatttcggcctcctgctgaagaaaaggatgtacctcgcaaaaagatcaccatcaagcagcctaaaggcatagaccagcaaagacatgttgaatctaggagtgttcaggaacccaccagaaagacaagaaaaattgtagaattgtcgagttttgaggataaaagtagagaggatgatcattgggttggtggggaacccagccaggtgaattcctcacatgggaggaggctgggtctggaaggaaaaataagcaaagccacaatggaaaatgaaagatcctggagagattttgaggagcgaagagaaatgccacaagcaaggctctttgatgctacgatatatgcatcaagggaggaagatcatctaaaggcaaaaaagaaaaacaagaaaaagaaaaaacatgaattcaaag

SEQ ID NO: 160194 - DNA, 508 bp, Zea mays
  Clone ID: MRT4577_77677C.1
ctcgaggccggccgggatcagtattccccatcgcctccgccgccgacacggcgtatggtagtgtagttccgtatatgggttggggagagtagtatggatccgcaatgtcgacggaggaggatgttgtgggtgaagtgccggtgaccgatgtgccatgggaggtcccggaggcccaggcggacgaggagcccaaggcgaagaacgcccccaaggagaagaatgtgcctaaggagaagaagatttctcgcggtgaataagccggtggcgtgccctccctacgctgagatgattgtacaggctatcgctgccctcaatgataggaaggggtcgagctcggcgtacatcaacaagtacatccaggtgaagcatggcgacaagctcccctgcaacttctgcaaggagctcactgtgcatgtgaagaaggtcgctggcgtcggcaagctgactagggagaagaactgcttcaagatggcgtccaccgacgtcaagcccgaggccgcctagacca

SEQ ID NO: 160195 - DNA, 540 bp, Zea mays
  Clone ID: MRT4577_77678C.1
ggacgcgctggaggcggtgatcgtgacgtggaccaaggcgtttttgcacgctttcaacgtgggcctgtccacggagcacgagctctgggcgcgcgtcttcgccggccgccacgccggcgtggggcgcggcatcttcgcggacctgtcccgctgcgtcatgctgcacatgctcagcttcacggaggccgtggccatgaccaagcgcgccgcggagaagctcttcaaggtgctcgacatgtacgaggcggtccgcgacgcgtcaccggtcatcgaggccttcctctccgccgacgagccggccgccgagcacagccactccggcctggcggagctcaagtccgagatcgccgccgtgcggtcccggctcggcgagtccgccgccgccatctttcgcgagctggagagctcgatccgcgccgacgccggcaagcagacggtgccaggcggcgcggtgcacccgctgacccgctacgtgatgaactacctcaagtacgcgtgcgagtacaacagcacgctggagcaggtgttccgtgagcacca

SEQ ID NO: 160196 - DNA, 549 bp, Zea mays
  unsure (1)..(549): unsure at all n locations
  Clone ID: MRT4577_77679C.1
atcagcactggcattgccgcgacgaagatgccgaccccgaagcggggctcccctgctccatcttcggccgaggcggaggagggaggcgcgccacctgcgtctccgccggctgccacccgtggtggtcctcgtgttcctgttcgtggtcgcgccttcgctcttcttcgtcgtgcgcaatggcggtcgcggccacggccacgtagcctccggtccgattcgcgttccctcctccagagcacctgttgcttgtgtcgacgcgagttgttcaattctgcgttgccctgttcgatgagcgccgagattgggtggagctaggtggaatttgtccaggttttgggattgatgcctccagccgtagtttgatgcgacttagttggatatggggatcatctgagtagtttcagagcggtttagggcttttatattngttactggctgcgctgttgcttgatttcccgtttggatggaaccgtgtctgtggctctaaggaaatgaacctagtcaccctagggattgcaggaattattatcccctggcactcagatatta

SEQ ID NO: 160197 - DNA, 807 bp, Zea mays
  unsure (1)..(807): unsure at all n locations
  Clone ID: MRT4577_7767C.1
catgatggggctggccacgctcgaatccttggataatgccctgccctccaagcggggcctgtccagcttctacccggtcaagttcaagtcgttcacgagcctggcggnnnnnnnnnnnnnnnnnnnnnnnngggagatcgccaacccggagaacccgttcaacaagcggctgcgcgtgctgcaggcgtggtcgcggcggcgggagtcgtacagcgccctggcctccgcgtannnnnnnnnnnnnnnnnnnnnnnaccacgccgtggnnnnnnnnnnnnnnnnnnnnnnnnnnnnnnnnnnnnnnnnnnnnnnnnnnnnngaggagcnnnnnnnnnnnnnnnnnnnnnnnaggggcacgaggaaaccgcccacgttcccgtccccgcggctgagcgtgcacgtcgccgccgccggccagatggcgcggaacgggtcgtttcggtccccgaggtccttctccatgacggatctccacagcgccgccggctacgagtagnnnnnnnnnnnnnnnnnnnnnnnnnnnnagagagtgctgatgtgttctaggtgcttgttttactggtgatgtcgccactggtgctgccattaattactgctatatgatcatcattatgaatcaagatacatactgtacgtacgtagctgtagtactcnnnnnnnnncagagttaagaagaaactgcgttcttgtgcatgcttgccatcgtgtcagcctgccctggtaatgtgagcatacaaaagcggtgggcgacgagtccgaaggcctggccgacgcgatgctaccaatggcgggttaattagctgctat

SEQ ID NO: 160198 - DNA, 280 bp, Zea mays
  Clone ID: MRT4577_77680C.1
aaggtcaaacatcaaactttctaagggattcaagccatactgcgtgcaaaaaagttttgggtacaacacacaggacacaacagggtccttaaaccaacaaagccacaaccacgattcatgacacacaaaccacaaatgtttgttagacgacgacatccatatagaggtacaccacagggcaccagcagacgcagatacccaggtacagcagctgcttaaatgaaccatggcttactgaccaccacggaggtggagcaccaggtggagagtgctctccttc

SEQ ID NO: 160199 - DNA, 1511 bp, Zea mays
  Clone ID: MRT4577_77681C.1
gcgatgcaacaccttccttttcttcccttgtcaacttccccacccctaaaccaaaccagaatcgcagggtttatgacaaaccgacaagcgaaagaggataccggataccagcctatcatcatcaacaggatacaaaaaacgctaatgcgattttattaacaatgcttgcttgaacaacgcttagagcaatgatatggtatggctccattatttctctaactataacttgtttgtgttttagtggggaaagaatatctttatttattaagccagcaatcaacactcgatcggtttgccgccgaattccccggcggtgccttgttcgctgcatgcaccaacgattttgttgtaagatgtttgagaagcaagcaactgtcagcactcagcagtgccaaagaggcgcccgcctagccgcctactccatctcttgcttccctgcggcattctctcggcgcttcagatatccaaatccctcgccgcaagccttccccttcagcctgcccgccgctggcgctgcccttcttccccgcccccttcgattcggtctgcatccgtcttcattaccattcttacgctcgggcggttcgtcgtctcgagcttccttcccgggatcgacgacggcaggccgctccgcggtgatggcgggccggtcgctcgcggagcccagtcttcggtccgccactgacgacgacgtctctgccgtgccctctaccaccacgtcggctgcgcgcggtgtgtctgcccaagacgaggggccggcgagcggtgtgctggtagagtgcaggatctgtcaggaggacggcgacgaggcctgcatggaggctccttgctcctgcaagggaagcttgaagtacgcccatcgcagatgcattcagcggtggtgtgacgagaagggagacaccgtgtgtgagatatgcttgcagcaatttgtgccaaactacactgcctcttcaaagctgtttcagcgcggaagaaacacgtttttcttcagtgctcctggctacatccaagcacggccgatgcagaacgctgatcactccgctacgtcgacaggctacggacacgaccaaacgccggatcctaccggcgtactatgctgtcgcataatcgccatcgctctgatggtcctcctcgtctcccgcgacgccgtctccgtcttcctgggtgaccaagacgcctacaccgttgcagtggtcacgctgctgatgcttagaaccgcggccatcgtcattccggtctacatcatactggtggcggttaccgagctgctgcaccgacgccggcatcggcaggttgtgcacggccaggcttcagatcatgcggcagaggagcggacgcagccgcagcagcatgtcatcagcattcagtagcaggctggccatggccatccatcctggtgttcttgctgtgctgtcgtccagaattgtgttgatccttcgacgaacgactgagcttcaggtgtgacgtgacgtgccagcgaatatgatatggaagatgacttggctgtaatc

SEQ ID NO: 160200 - DNA, 379 bp, Zea mays
  Clone ID: MRT4577_77682C.1
aagaccgccgccatctcccctgttcggatttaagagacctgcgccgctcctccggccacgctagcacgccgaagtgggcgcccacaggttccatcagtaccgggaggtgggtctgcgcgctgccgaccccgaccgatgagcgccccaagcatctaccacatgaagctctgtgacactaacgaggttcacgccaagccgcaggtgtctggacttcctgagaaagctgaagaacgtgaagatgagcaatggccagttgctcgccatcaacaagtatcttcgagcgaaaccctaccaccatcaagaactaccgaatctggctgcgacaccagaccaagacgggggaccacaacttggactagcagtaccgcgatccaaccct

SEQ ID NO: 160201 - DNA, 347 bp, Zea mays
  unsure (1)..(347): unsure at all n locations
  Clone ID: MRT4577_77683C.1
cccactcgtccgaccactcgtacggtggcggctacagctgacggcacaagggtgatggcatcctctactgaggcggtggaggatactgttgtcggatctagggtgttagctgaagctacctaggctgcaccagatgatgtagtaactgatgtatgtgcccatcctgtcttctgtcagaatatcttatctatctataggattgtgataccgctcgcttctgtcaccctgctagacgtccgttctaactttggattacgtgttgtgacccctgnagtttccttagaatgctcccgctatgaaacgagacgacagaagaatgagcaaggttttcggtcgcaaatatacaa

SEQ ID NO: 160202 - DNA, 558 bp, Zea mays
  Clone ID: MRT4577_77684C.1
gcggccgggatagcaccctacctctgtacagacaccatgcgtcgaacctgtcattccgctaggaagccaccctagaccgacaccatacccatggctggctctagagcgctcttcttcgatgctgctctcctctatggcctctgcctgcgacaacgatggtggaggcaaagtacgctgatgccccctgcgacaatgacccggggcccgctgatcacgcacgatgtcgtcgtacctaacatactcggattcgtccccttcgagcacatcgtgcaggcactatcttccatggcggacgacatcgataactcgacccactaagcgaccagcacacatagactacctgcatatgctgcactccatcgaaccaaaagcgagagcactgatggctaatacagaatgctccaattgacgcatccgtgtgtgagaatactctcaccctctatctctatgcacgattaagacgcgaccccatgcacttaacatctaatagtgtctattctaggtatgaggactccataattattacatctaatacataatgtccggcccacaagctcc

SEQ ID NO: 160203 - DNA, 479 bp, Zea mays
  Clone ID: MRT4577_77685C.1
gaatagacagatattatttgaactcacctcccacaaagaggtttacagaaaaaaacgaaccattttgcggaactatatgccggcttgcccctttttttctctggatcagctctgagccctatgaactgatacctgttggtgtttcaccatatggacaaactatggcgctactctttgtgtgtgggggaatgctttaaacatgccttcagccctgggcgtgcagcacacttatgcttactgatacagagctgtgactacgaaaacaaaccatggaggtgtcccttggactcctgctggacagctgtaacctcaatcacaccgttacggtctaacttaccactgaaacacctaaatggcacaccggaaactgcaactttccatccactcttaaccagagttgaaagagacagtgttttaaatatgagccgacttcacgcctaccattaaatttatattcatcatccccaaaacatgacata

SEQ ID NO: 160204 - DNA, 286 bp, Zea mays
  Clone ID: MRT4577_77686C.1
gaacacaacagacttggattttatacaccggaaccatttagtagggggttactactacatttttactgggggctaaaagggggggccagagctggaagcaaatttggggttgttaataactactccccctaagcgtttttgtggagatcggacagcgagaaggaccttggggttttgaagctcccgaggccgccattcggccctttcttccgccgtattcaaaaaccgctgattttaaggggtggcagtgcccgcgcgtcccggacttttttttcgtggtgcgggg

SEQ ID NO: 160205 - DNA, 333 bp, Zea mays
  Clone ID: MRT4577_77687C.1
gttttctgcccggacgagcggaagaagatgtcgggatggctgccggtacgagcggctgcagaggccatggtggcggctgcagcgctgccgctgctcgtgggtggcgcgtacgcggactgctacaactactgcttcaacgactgcttgaacaaggacatgtccatgagagactactgcagctacgcctgcgacatgacctgcgcgcccgactcggcgcccctgcgccccttcgccggactccccataaactgccagctctcctgcttctgggactcctgcaaccgttaccttgcagatgccaacaacattatatgcctgcttcgggcaatgctt

SEQ ID NO: 160206 - DNA, 307 bp, Zea mays
  Clone ID: MRT4577_77688C.1
cccacgcgtccgaccactcatacacgtattcttcagaaaatatatttaaaataacttggcaccgtttcattcattcacgggatatactatttcatacaaacttacattacaactacatattctcaatcccatacccctaactttactttaaccacataacccctttaaaagcatattctcaatctccttctaatactgcataaacattcatcatgcaaatatcactttttgctacatcccattatccttaatgcatacaatcaaatctttcacttctacaaccacacttattataaaattactattc

SEQ ID NO: 160207 - DNA, 624 bp, Zea mays
  Clone ID: MRT4577_77689C.1
gggccaaaaaattccgtacaaaaaaggaaaaaaacccccggtttggggctgcccaaaaaaaaaatgccacttttttttggccccccgccaaaatttgaactttccacaaacaccagaaaagggcaaagggcccagggcttcccggtttccccttattttttttatcccccaatggtttgaaacgggggggggaaaaacccttacccttttcccttttaaaacggtctttttgaagcccggccaaaggtcaaaaggcttttttttagggggggccccccctttttggaagtaaggacaccataagggccgggggaatggggtgtttttttttcccccccgaggctgaaaaacccgattttccccccttttttttccgcccccaaggaggggttttaacccataaaaaccttccaaatctcccaaccttaacgggtaaagggggggggttaaaccccaattcccgggccaaaaaagcaaaaaaggggccccttggggttcctggcccatgggggggccccaaacttttccgggacaaaatttgcaggggaaaatttttttgcagatggcaaaaacaggctgggggtttttttggaaaggccaacagccaaattttggttccccggg

SEQ ID NO: 160208 - DNA, 208 bp, Zea mays
  Clone ID: MRT4577_7768C.1
ttttggggggtttttataaatttttctgggttttcctcacaagcagtttcaaggttcataaggaacacctccctaaaataaaagtataggcgcaactaacccccgaaggacggaagcacattcaacggacccatgtaatgagcacaaaaaactgaaggccagctttcaacggctgcggactgtaattgtcggcaaacaaacaacaacg

SEQ ID NO: 160209 - DNA, 237 bp, Zea mays
  Clone ID: MRT4577_77690C.1
tctggattaaggcagttacaagcccataacagcatctgtagcagagcactacatgctctttttgtactgtgctcttggcaacctcttgtgtgttcgttgaatggaccacttgagcagtggacagtgaacttttcatcatgttgtggtgttgattgtagaaaaagctgacccatgtttgcagctggaaatgatgttaaatgctgcttggctcaaaaataaaacgaatggggagctcaa

SEQ ID NO: 160210 - DNA, 223 bp, Zea mays
  Clone ID: MRT4577_77691C.1
cacaaacctcaataaattcctatattacaaattgggctaatctatagatccatagatgaaatactgttaatatgagtaacaagaaccaattctcctagcacaagtgtatgacaacccggataaccattgtcaattatcgaatcataggtactaacccaacaatagaattacctatccctaactcgttagcccaacacaggcgtgctttaaggaaagattaaaa

SEQ ID NO: 160211 - DNA, 317 bp, Zea mays
  Clone ID: MRT4577_77692C.1
ggccgccctttttttttttttttttttttttttttttttttaaaattttttttggcctttttcttcaatttttattttttttttttttggttttttttttttcaaaaaccacgatgggcccccaccaccttggaccaccaagggaaacaacgggccacgagaccccccccgaaaaaaataaccccctttaaaactggggggacccgggggggaaaacgaaacaaaatacttgggtttaaggggccccccccgttaagttcccccagttcccttcattgttgcctaaccccccgccgcggtttccaccacagtttccc

SEQ ID NO: 160212 - DNA, 318 bp, Zea mays
  Clone ID: MRT4577_77694C.1
gtaaaagaaatccactgctgagaaaagctgggggttatacggaaaccgagcatgcaatccgggacacgagcagaccccagaaatcggttctacgagcgatcgacatatcacacgcagataccacagcagagaagtcaagcaccccgcacccgaattacagcacatgaagtacatggaattagccccgacccaaagggcttggtgcggcgctgattctacaccaagaacactttggactgagacccagctggatctagaacgacccaagacaataaccatacgagtggtactctaatactaatggccaaggctgcacag

SEQ ID NO: 160213 - DNA, 558 bp, Zea mays
  Clone ID: MRT4577_77695C.1
acttctgactgacttctgagtgaccactgggccaccgcacggacaccagaaggaccacggaagcaccatggctgcgccagagctgcaccttactcccagatgcctcggtcacgccctgcgctcccgcgcctgccggggcgatgatcaccatgggaccaacctgcgacagagcgccccaaaggatatgccaaggacatgatacgcccctgtatctcgcaccgatctcggaccagactccgacgaaactgagcggtaactgacccgggaactacccggggaataccgcggggatatcgcgcgactctcagacgatccggagacatccgcacgtgaacgtgatctgctcgcgatgcactaccctgggcccactgtgctgccggttccctgagagcctgcgcaaaaactgcgcaaaaaccgcggagaggtcgtggatcaagggcggttcaaagaccttctccaaatcttctctgaactacctgtggaatacctgcctgaacgcacacccggagcatgctgagaatatgctggtgatatgtgcgggtcatgggctgctcatgg

SEQ ID NO: 160214 - DNA, 300 bp, Zea mays
  Clone ID: MRT4577_77696C.1
cccacgcgtccgcaactgatgagtaccgtagagaagtttgcaagattttggaggctgcctgtgattatttcctcaaatctgaggcaaatagccatgacagtgacgagattgtgatggtgtcttcaccatgaaagcctacagatgaaaaagatgtacatagtgccatgcacatatgcaagtgcagtggaaacaagtttgcaagattttgcagggtgattgtggtcacatccaaaagctggggaacagacaaccagcaatgatattgtggcaatattcaagaaaagtgcagtggaaaaccac

SEQ ID NO: 160215 - DNA, 211 bp, Zea mays
  unsure (1)..(211): unsure at all n locations
  Clone ID: MRT4577_77697C.1
cctattatttaatataatcaanttggatttttttaactttcctgcttatttactataccggtggctactaccttgcagcggggtagcccttcctatcccttgtaccttattgactcaaccacattttttccctgtttaccaccatgattgtcctaacccttcctccctcctacaactataacaataggtaacattctatcaacctcctttt

SEQ ID NO: 160216 - DNA, 108 bp, Zea mays
  unsure (1)..(108): unsure at all n locations
  Clone ID: MRT4577_77698C.1
ctcgaactatcgatacagaggagcggccgagagaggccgacgcgcaccagcagatcccaaactcaccggnngaggagggagtgngcgaaccggcggcgggcgatgggt

SEQ ID NO: 160217 - DNA, 995 bp, Zea mays
  Clone ID: MRT4577_77699C.1
tatatgattcattttattttcgtctgaaaacatagctaatatatttgtgctgaacaaatcgtttttttgctttcgtataatgatgacatttgacatactccaaacgaatggtggttttgtcacattatgactctgctgaagggttcttagtgtgcctttagcggtgcttggatgataagagaccctgatataagttatatatggaacccttagagtttcagtcacagatgatactgggaaaatcatattttcttaaaggcaaacttacaacttttaacgcttctactaaaaagaaacttctccccccccaaatgtttgctcctagttgtagatttagcttagggtgtttgtaagggttctctcccctttcttcttattattataatgatgcacaactctcctgcatgttcgagtttttttaacactggaagtcagaatggtttggcagaccatatgatttgactgtggttttcacattttcactttctataactgtttattcattgttgaatgtggaatatttttttttctttggagacatcttgtactattttccctgtccatttacagggagcgtgctcgtaagaagaaagaggaagaagagagaagaatggaaagagaaagggagaagaaagacatttggacattttttattttccaggaaagagtacgaatcggaaaagaacttcttgaagccaaaagaattgaggaacaaaatgaaaggaaacgcatgatagaattgcgaagacttgagaaagaggaggagaaaagagctagagaaaaaatccgccagaaattagaagaagataaggctgaaaggagaaggaaactaggattgccaccagaagacccagcagctgccaaaccaagtgcaccacctcctgttgaagagaagaaggtcaagaccaggtactgcaggatgatgctcatggaggatgccgtgatgggttcgtgagaagtctaggttcgtcgtctcccagtcactttgggttgct

SEQ ID NO: 160218 - DNA, 135 bp, Zea mays
  Clone ID: MRT4577_7769C.1
caccagcaaccctaccacctacacaggtccgatatactcttgctctgcctttaggagcgccaacgcatttacaggtatgtctaggctattacagtctcacgtcttaatgggctgacatcgcggcagcctcagtca

SEQ ID NO: 160219 - DNA, 228 bp, Zea mays
  Clone ID: MRT4577_776C.1
ctccaatctttctcttttcttgcaaaatgtttattataagttattggaagctcgatccagtttaagtcgatttgtacatctccttatgtactatattgctgttttcgcacacccgtattttctttactttatttttatttgattctgattaatgcgcgttctgtgcgatgctgatgattccttaccttgaaggatacatctcttttttcgttttgaggattaatcttc

SEQ ID NO: 160220 - DNA, 634 bp, Zea mays
  unsure (1)..(634): unsure at all n locations
  Clone ID: MRT4577_77700C.1
tgggaccctcgaggccggccggattcggtcgagctccaccggccaaccaacacaaccaccggcggcggcacaagggaagcgaagaggaatcaacgcgatgtctgcgaccacggcggcggtgcccttctggcgggcggccgggatgacctacatcggctactccaacatctgcgctgcgctggtacggaactgcctcaaggagcccttcaagtccgaggccgcgtcccgcgagaaggtccatttctccatctccaagtgggcggacggcaagcaggagaagcccactgtccgcacagaatccgatgaataaagctctggggccatagtggcatagtccttgctacagatgatttgaagtgttgttgcaagtttccggaacatgctatttagctggcttgattttatagtaatgctgaataataaatacttttttacggcaaaaaaaaaaaaaaaaaagcggccgcactcgccctacctgaatcagtcatgtgaacatcatggaatgcttcagttttgtacagactaaatttattgtgctgtccgacagattctatgcctggtccttaaaaataaaggaatactngaatgcagtggtttttgaaggctcaaaaaaaaaaaaaaaaaagcggccctc

SEQ ID NO: 160221 - DNA, 189 bp, Zea mays
  Clone ID: MRT4577_77701C.1
gctaccaccccaattgaaacctcattgtgcatattggctacaaagctcctagctgctggcactctaatgacatgctacaggactgtcacgcactagtttaactcccaaagacaacttggtcaaaaccagaatggatccagcggtcaggggcacgtgtgacatttattcttaacttacacaaacagcgaa

SEQ ID NO: 160222 - DNA, 592 bp, Zea mays
  Clone ID: MRT4577_77702C.1
catcttcccttttcccattctccatccacccaccggcggcggcgcaagggaagcgaagaggaagcgacgatatgtcggcgaccacggcggccgtgcccttctggcgggcagcggggatgacctacataggatactccaacatctgcgctgcgctggtccggaactgcctcaaggagcccttcaagtccgaggccgcgtcccgcgagaaggtccatttctccatctccaagtgggcggacggcaagcaagagaagcccactgtccgcacagaagatgaataaagatctggcgccatggtgacatagtccttgctacagatgatttgaagtgttgttgcaagtttctggaagttgctatttagctggcttgattttatagtcaatggtgaagaataaatactttcgcgacaattgtctttttgcaatgacgtgttattttcgttgctaattgcacttgccctacccaaatcaatcatgtgaacagcatggaatgcttcagttttgtgcaatttggtaccgactaaatttattgtggtgtccgacagattatgctgggtctttaaaaataaaggatcagtgaatgtactcgagtg

SEQ ID NO: 160223 - DNA, 1392 bp, Zea mays
  Clone ID: MRT4577_77703C.1
gactcctatagggcgattgggttcctcaaggccggccggggagtgtctcggcagcttcttcgccattcacattcggccattctccaccgtccaaccaaccaccggcggcggcacaagggaagcgaagaggaatcaacgcgatgtctgcgaccacggcggcggtgcccttctggcgggcggccgggatgacctacatcggctactccaacatctgcgctgcgctggtacggaactgcctcaaggagcccttcaagtccgaggccgcgtcccgcgagaaggtccatttctccatctccaagtggacggatggcaaacaggagaagcccactgtccgcacagaatccgatgaataaagctctggtgccatagtggcatagtccttgctacagatgatttgaagtgttgttgcaagtttccggaacatgctatttagctggcttgattttatagtcaatgctgaataataaatactttttacgacaattgtctttttcgttgctaattgcactcgccctacctgaatcaatcatgtgaacatcatggaatgcttcagttctgtacaaactaaatttgttgtgctgtccaccaaccaccggcggcggcacaagggaagcgaagaggaatcaacgcgatgtctgcgaccacggcggcggtgcccttctggcgggcggccgggatgacctacatcggctactccaacatctgcgctgcgctggtacggaactgcctcaaggagcccttcaagtccgaggccgcgtcccgcgagaaggtccatttctccatctccaagtggacggatggcaaacaggagaagcccactgtccgcacagaatccgatgaataaagctctggtgccatagtggcatagtccttgctacagatgatttgaagtgttgttgcaagtttccggaacatgctatttagctggcttgattttatagtcaatgctgaataataaatactttttacgacaaaaaaaaaaaaaaaaaagccgccgacaaaaaaaaaaaaaaaaaaaaaaaaaaaaaaatttcacattcggccattctccaccgtccaaccaaccaccggcgggggcacaagggaagcgaagaggaatcaacgcgatgtctgcgaccacggcgggggggcccttctggcgggcggccgggatgacctacatcggctactccaacatttgcgctgcgctggtacggaactgcctcaaggagcccttcaagtccgaggccgcttcccgcgagaaggtccatttttccatctccaaggggacgggtggcaaacaggagaagcccactgtccgcacagaatccgatgaataaagctctggtgccatagtggcatagtccttgctacagatgatttgaagtgttgttgcaagtttccggaacatgc

SEQ ID NO: 160224 - DNA, 447 bp, Zea mays
  unsure (1)..(447): unsure at all n locations
  Clone ID: MRT4577_77704C.1
ccccccgcccccccccccggggggggggggcccccccgccgccgcccgaggccgccggatactaggatgagtccgcngcaccnngattcccgcagcagcgcgccccctccccgcccccccacaaaccaggcacacgcngcgccacccagcggccaccaccaccaccaccaccacagcacaggcccantggcaccgctaccggtaaccatggccccccccagcgcccctgcagcggggcctcctgccctcctcgcacgcggcggcgacggcggcctcgccgtcctcccggctgcgccgcacagggcgcgcccgcgcgcccgtctccgtgccgnccggggcggccggcgggcgcaccggccccgacgcagcggctggcagcccacgccccaggattttgcgcccggcgaccgcgcccccaaggagaaccaccgggcggcgctgaacccg

SEQ ID NO: 160225 - DNA, 1175 bp, Zea mays
  Clone ID: MRT4577_77705C.1
ccggccgggatccctctcctattttgaaggcggccctcccgtacgtaagcgcacacggacacggcctctggctctggctggggctctgcacaccgccggcgcccgcccgctatttgtgtccacggcgacgatctgcagcggcgatggctcggcgacgggacgacgtagcgctggccgccatcacctttgcgatcgtcgccttgtgcgcgcggtatgcgtcggcagtgggcaccacaccccagtcatccttcagctacagggagggtgacccgaccgggcctacaaaatgggccacattgcagaaggactgggatgtctgtgacagcggcaccgagcagtccccgatcgacgtcgccaaggtggaggtctctgaggatttagacccgctgcagcagacctacgagcctggcgacgccgtcatgcacaacagactccacgatttcatgctgaactggacaggagggaacggcggcctgacaatcgaagggaagaagtacaagctgaagcaggtgcactggcacgttccctctgagcacaccgtcaacggcacccgctttgacgcggagatgcacatggtccacgaggactccaccgacgccaagtcgaaagccgtcgtcgcggtgctgttcagcgccaaagcagctgctcaagccctacttcgagaggctcgctggtaaacagaacggcacggaggaagtgaagggccccgtcgtcgatccggcagcctggatagacaaggcctctggatactacgggtacgagggctcgcttacaaccccaccctgcactcaaggagtgctttggactatcatgagcaaggtagcagatgcatccaaggaggagatccactccatcgagtcggtgaaggaggcaaatgcacggccggctcagaaaatcaacagccgcgttgttcgctactacaaagcagcaggagccacagaagcgccggcgccggcgccggcgccagaagcaacctgatcgaggagaacgttagaacagtagctcaccctcccgagagtatgggttgaaaatctttggcgaattgatgtctcgatgcaaattaaacaggcatgccatctttgtgtaaacagaaattttacacactaagttccactccctatactactaccataattttagtaatgtaaatactttgaaagaatgcttaaatataa

SEQ ID NO: 160226 - DNA, 191 bp, Zea mays
  Clone ID: MRT4577_77706C.1
cacccgagcaggacacggtctactactgcgcctacggaccctggacgccggaggactccgacaagcgcgagggcctgcagaaccggtaggagctggtgacggaggcagcaaacatcgtggggggcgcccccgcgcaattcctgccggacgggaacccccaccatatccgccgagaccggcgcacccgacct

SEQ ID NO: 160227 - DNA, 1551 bp, Zea mays
  Clone ID: MRT4577_77707C.1
cactcctatagggcgattgggatcctcgaggccggccgggacaggacacggcctctggctctggctctggctctgcacaccgccggcgcccgcccgctatttgtgtccacggcgacgatctgcagcggcgatggctcggcgacgggacgacgtagcgctggccgccatcacctttgcgatcgtcgccttgtgcgcgcggtatgcgtcggcagtgggcactctcggttacgtctgattatcgtgcagccacaccccagtcatccttcagctacagggagggtgacccgaccgggcctacaaaatgggccacattgcagaaggactgggatgtctgtgacagcggcaccgagcagtccccgatcgacgtcgccaaggtggaggtctctgaggatttagacccgctgcagcagacctacgagcctggcgacgccgtcatgcacaaccggctccacgatttcatgctgaactggacaggagggaacggcggcctgacaatcgaagggaagaagtacaagctgaagcaggtgcactggcacgttccctctgagcacaccgtcaacggcacccgctttgacgcggagatgcacatggtccacgaggactccaccgacgccaagtcgaaagccgtcgtcgcggtgctgttcagcgccaaagcaggcaagtccagcaagctgctccgcgatctcaagccctacttcgagaggctcgctggtaaacagaacggcacggaggaagtgaagggccccgtcgtcgatccggcagcctggatagacaaggcctctggatactacgggtacgagggctcgcttacaaccccaccctgcactcaaggagtgctttggactatcatgagcaaggtagcagatgcatccaaggaggagatccactccatcgagtcggtgaaggaggtacgtagctagctaggtcaccgacagaacgctgagcaaagcagagtgatcctaaaccccttgtcgtctctccttattgtttatttctcattttacgtacgtcggtggaggcaaatgcacggccggctcagaaaatcaacagccgcgttgttcgctactacaaagcagcaggagccacagaagcgccggcgccggcgccggcgccagaagcaacctgatcgaggagaacgtgagccttgaagacgtaccacgatgcttctttgttcggcttcctatatatactcgaaagctcgtgtgctgagtattgacagtttctttggtgaaacaggttagaacagtagctcaccctcccgagagtatgggttgaaaatctttggcgaattgatgtctcgatgcaaattaaacaggcatgccatctttgtgttaaataaatattaaacaaaaaaaaaaaaaaaatttattaaaaaaataactaaaataatattaatataaattatacaaaaatttttgctgggtggggggggggacctaaaacaaaaaaatattaatttttataccctgggggggccgttttatgggtataaaatttttcctcctgggctaggggagttattttcttttttatggggtcacaaaaaataat

SEQ ID NO: 160228 - DNA, 180 bp, Zea mays
  unsure (1)..(180): unsure at all n locations
  Clone ID: MRT4577_77708C.1
nacatccaggtgctcgccgtcgagtaggtcatggccctcggcctgctggtttcttactgcgtcccggctctggtgatccgctacacgatggtcgtggctgtgaacacgatcttaggccattccatcgacgtcctcctgtaccggcgggcgacggggaccctccgttctggtccgcttcgt

SEQ ID NO: 160229 - DNA, 465 bp, Zea mays
  Clone ID: MRT4577_77709C.1
aattcggcacgaggcatgcatccgcgcgcccaccgccgagcgcaaaagagctccgcccacgagcgatcaacatagggccgaaaatgccggtccaatcgtagcgtctagtgatgcacttgacacctccagctgtattgtgaaaccgacgaccgtccgcccagcatagcagccggggagtgacgtcagctcctccgacttgcgcgtgtgcacgtccgcatggaacctatgcagagccgagcaggatttcgaccgaatgctcgcgcggcagccatacaatgaacgcgcccacgaccgtgaaactagaaccatggcacgcgggccgctgtttatgacatccgcacgacgccgttcaccgagacctaagggatccgaacttcctttctggctgttataatgagaactaaacgcccggcaactgcactctcaatcggaccgcgcgctaccgcctctgctgtagattcatca

SEQ ID NO: 160230 - DNA, 262 bp, Zea mays
  Clone ID: MRT4577_7770C.1
tcgcgactcgttagctagctcttgaggcactaccttgccaaagcaatgatcagtagatgtttcgagaggatgatcagacacactgggactgcaacacagctcatacttttacgataggcaacagggctgaattttcctctttttttcgaaagcctgccagagcaatgccgagtcgaggatgaaggcctaccgttccttcacttcttttctcggagaagaaacattgacggcatctgtggaataatcctcgattaattctttt

SEQ ID NO: 160231 - DNA, 395 bp, Zea mays
  Clone ID: MRT4577_77710C.1
taaaaaaaaaaaaaaaaaaaaaaaaaaaaaaaaaaaaaaaaaaaaaaaaaaaaaaaaaaaaaaaaaaaaaaaaaaaaaaaaaaaaaaaaaaaaaaaaggggcggccggggctggcgcgttccaagtgttcccacccttcccttgcccgggctttgcccttttttttggtggccctcctagggtcccctaaattggcccgccttgtcccaccgttttcccctgggaaaacccgtggaaaccccccactgttcccccccttgttccctttcccccttttcccctttggcctatttgcgataaggcccaaagggccccccctttccacctttccacattttgattggcttttgggcccccccctgccccccctttttaggccctttaggcgggggggt

SEQ ID NO: 160232 - DNA, 500 bp, Zea mays
  unsure (1)..(500): unsure at all n locations
  Clone ID: MRT4577_77711C.1
agcagtggtaacaacgcagagtacgcggggtgatcaatccatagataccaatcgaaaataaatagacactcaaaaaaagtacatgctcaaacatcattaactaactccttatcaatctcgattcatttcaatatgaggacaagaattgaaccgattcaattaattagaatagaacaattacgcaacaaaagagaaaagaaggtatttgttgtattggcagtagatgggttttactaaatcaaaattgtgattctttagttatttattttatatttgaaattctaagaattttgactcattctaagtatttcttattgtcgagccatagtaattgcacctattaaagaaactagaagaattagggaaatgagttcaaacggaagataaaaatcggntgctaaatgaatcccaatttgttgaaacgtatttatgaganccctgtctactatttggtttgatcttgtagtcccaaagatttcataccacgacgtatctgggat

SEQ ID NO: 160233 - DNA, 264 bp, Zea mays
  Clone ID: MRT4577_77712C.1
cggaaaacccagcaccagcctgcagtggtggcgtgctcctcgcctgtgcctgagcactcatctgtggagcgcggtggttgtgcttgtgcatgcctgtgcacttgccttcaaggcagcggtccagtggaggttgcgacggtggcggtgctgttgtggcgcggcgtttcaggttcacaacggaggttggcaaggcgccaaggcctcacgctggaggtacgacgagcggtggtcaaggctagcacgaagctaattctaacctttatc

SEQ ID NO: 160234 - DNA, 321 bp, Zea mays
  Clone ID: MRT4577_77713C.1
atgcaggtggcgtgcaactacaccacgaggacgcaccccttcgacttcgacgcatccagcatggaggcccaggcccacacgtcatgtaaccggcgcgccggttactacgtgcgaaaaattgcaccaccacttgcgccaatgtcgcgccttctcgactgtggagccggtgctgcgactcaaggcaaccctgcgcatggaccaacagcgccaaccgagcacatcggtcacagggaccgagaaaggggatatttcgaaagggatccttctctacgaaggaagcgggccccaagccctcctactgatcaggggttcgaaggctag

SEQ ID NO: 160235 - DNA, 268 bp, Zea mays
  Clone ID: MRT4577_77714C.1
gggaacgagtgtggtcgtcgtgctgcgcggtcgcgtcgacgtcgaacggtgtaactccggcaatgctgtcggacggtggtgcatgagttccggtgaggctccacggatggcggacgagcgacgaacggagtgggctcggagagagcagaggagggcttcatacggcagatattcaaaaaattatcggggtcagctgaccccaaaataagggctggctccgcccctgtcaacatatcgatgcgaggaccagttatcaaggtctccttat

SEQ ID NO: 160236 - DNA, 484 bp, Zea mays
  Clone ID: MRT4577_77715C.1
ccggccgggatcgtccatacgtatgtcagtgagtggtctctactctagggccccgaaggacgatggagcgagcatatccgcgtggccttgtgccgatgtacgatatctgcaaaaggatatcgaggtactaagtcctcgagccccccggagtcgtaccaccagaacaaggaatacccgttcttcgacggctacccggcagggcatgacccgccggatcgtactacctcttccggcgcaagaggtacccgccactctgttatccgcagcagggatacccgccgtattgcgctatggcggctccacaagatctcaagagcagtactccttgctgcctggaacgatggttggctgccctctgctgttgatgactatcgcatcaccgtgttgtgacggatgcatcctcgtctcgctggacatggtggtcatgggagccaccagcttacggaacatctggaactgcgccgcgatattctagatgtgaact

SEQ ID NO: 160237 - DNA, 295 bp, Zea mays
  unsure (1)..(295): unsure at all n locations
  Clone ID: MRT4577_77716C.1
caggcatcccaatctcgcgaganccagtngcngcgacggcgcttccggcttcccttcccattggcctccgggatggcgctccgcctcnacgacgtcgcgctctgcctctccncgcngctcgcngcnngcngccggancggcggnantttcgtngccgtcgnntcnatgaggtcnggngncgtntccaccagggtggagaacaagaagccatttgctcctccgagggaggtacatgtccaggttacacattcaatgcncatctnaacaagattgaaatttcaagtcattgatgatt

SEQ ID NO: 160238 - DNA, 282 bp, Zea mays
  Clone ID: MRT4577_77717C.1
acctagaggatcccctctggatttcctttccacatggcaagaaaagggaggggaaatgttcatatgttaagcgcaaccaccgccccttattaggcctatcctgaagccaaaggaaatgagatcggaattcctcggggaattccaattccacattctcaagaaataaggaggcaaaaatgtacatatatgaatcggaattatttgatttcttaccatccacttccggaagccacatgcaatgattatccgaaaaccgtgataaatttcaatagcaccatttca

SEQ ID NO: 160239 - DNA, 136 bp, Zea mays
  Clone ID: MRT4577_77718C.1
ggctggcaccattttacaagtgttttgattgctgcaatacaaccaacttggtgggacaaatttaggagagttctaccaacagcgcattattgatggggccctatttcggatcaattatgacttatagttcagtaac

SEQ ID NO: 160240 - DNA, 537 bp, Zea mays
  Clone ID: MRT4577_77719C.1
ccggccgggaggccctcgcgtcgtttgatgcgattccggcggcgatcgtcagcgcctccaacaccacccgctcccccgtcctagcgtgcgttcgggcgatctcccctctcgcggcgggcatggctggcgttggcggcggggcgcgcagctcagacagggcgggggcggcgcgctcgcccaccaccaccaccaccaccaccaccacggcgatccagtccactccgacgccgacatcttggacaccctccgcgagtctaacatggaccccaacgagacggcgcagaagctgctgaatcaagatccatttcacgaagtgaaaagaaaaagggacaagaagaaagagagtgctggccagaagagctttgctgatagtactggacaagttgaccagaaccctcaatggatgaggccacatacccacaggatggaaaatgatcaaagaagacttcccaatcagggtcagatgtcaggcccaagtcatgaatttcgggttgtgagggacaacagatttcaacatggtgtggtggagaacagacc

SEQ ID NO: 160241 - DNA, 352 bp, Zea mays
  unsure (1)..(352): unsure at all n locations
  Clone ID: MRT4577_7771C.1
aaccagatagtccggcgtaccattgcttgcgcttcagctggacggggagtgcgcagctgcctggcacggagcagcggtgctcaaggctggtaatcttcanctgtctcgtgcaatctgccaaagacgactttggggccagggccactgtcttgttgatcaagtatcgaggtgcttgctcgctccacacatcacgcgactctcggctggggataacacaaagtgataggaaggaaacttcacactgcctgtgatcgaccaaatgggaacaacacatcgttcctataagatgtcaaaatgatcaaaccatccttgggatagaacgctgataggcgcatactagcagacatatcgt

SEQ ID NO: 160242 - DNA, 513 bp, Zea mays
  unsure (1)..(513): unsure at all n locations
  Clone ID: MRT4577_77720C.1
ggggggggggtggggaagaaatacaataatcccagggtttggaacgttgaatcccaccagaaaacacgggagcattccacagaaatacaccacacagcccttagttctaattccaatacgacattcgacaggagtacccagttagttctttataacannaaagaagagagagtaggggggggggggggggaaaagaaaagaaagggggggataacgcaggacaaagctagaatagcacgggccaatttcaggtttttcgtaagcttgttggtttacttgcagccgtgttgaacccgggacgggatggatccgttagaagcaggcgttcaggagggaggaggaggagaggggagncaagtattcttccatgaaggaagggccggtgnttttgtgctgctgtggaggcgggtgtgcgtactgcggggggtaggcctgctgtgggtaaacctggttcgggtagaccttggccggggggggggtaaaatggcgggggggtaccccggtgggggggta

SEQ ID NO: 160243 - DNA, 255 bp, Zea mays
  Clone ID: MRT4577_77721C.1
ggttgtttttttttttttttttttttttttttcctttcaggcgcggaacttccaatttgtcgccttccgctctattgcgcggatcaccttgttaaggctgcgggaaaatgtttctgttgttgcatccggccgcaagggtccttgacaaggggggggggggtatggtgaacaggaatcgggccatttgccggttccctttgagcaaacacagggccgaatttgcgtggccatggtaaacccatctattcgctgccg

SEQ ID NO: 160244 - DNA, 1819 bp, Zea mays
  Clone ID: MRT4577_77722C.1
ttcactcgtccggtcgtttgatgcgattccggcggcgatcgcgagcgcctccaccaccacccgctcccccgtcctagcgcgcgtttgggcgatctcccctctcgcggcgggcatggctggcggcggcggcggggcacgcggctccgacagggcgggggcggcgcgctctcccacaaccaccacggcgatacagtcgaccatccaatcgacagggagggtcgtcgtcggccactccgacgccgacatcttggacacccttcgcgaattccaacatggaccccaactggacggcgcataagctgctcaaccaagatccatttcatgaagtaaaaagaaaaagggccaagaagaagggatatgctggccacaagagctttgttgatgcttcacatgtgttgaggagtttttatttgacattttctttgccagattattagttagatagtgaaattgcaattctcgtttccagagtcttttagcatcgtccatgacatgcagaacgtgaatatctgcaggcttatggtcataaagatcctaatattcatacaaccaatgaggcccagctatatggactggtgtgcctaatgtacatccacaagcattagcttcctcttctcagggatacccttcagaaaatccagaagcagataatgctgtgcaagtcttcaggatgccagattctaatgttcactcacaagttctcccgtccacatctgaggccctaaatccacagatcgtgagcaacagccctgttccgatctcttcacagcagcagcatatctctcagcaacaagctgcaacacagatgtaccctcaaatgcatgtgcaacattttccaaattttatgccatatcgccaactctattcaccagtttatcccatgcctatgccaaactattcgccaaatgtcccttatccatcaaatggaaatagttatcttcaaatgcccagtggaggttcgcatttaactgcaggaagcgtaaaatatggagtttcacagtataaaccagtcccatctggtaacccttctggctacggaaattacactcatccagctggttttacaatgggttctcctggtgttattggagctgcagttggtgttgatgatgtcaataggatgaagtacaaggacaacatttatgcctcaactccacaggtcgagacatctgacatctggattcagacagctagagagatgccaccattgcaggttccttcatattacaacataccaggtcaagcaacaccaggtgcttttgtgccaaatccagcaaatgcatctttcaatgctacatctcaatcccctcatgcgcagttcccaggcttgtaccatcctcagcaacctccctctattgtaagtccgcaccccatggtgcatcaacaggtgccatcggccattggtcccaatgttggggtcggggtggcagctccaggcccgcaagttggggcatatcagcaacgacaaattggtcatatgaattggagacccagcttttgaagaaggtttcttaattatctgtaattagggggggtcacaagagcctttatgtaacatcagtaggctccttttgacgggaagcacctttgtttttagtgcagctctttctgatctatttaagctataacaaggtttttgttagcttttccttcccccaggtgaattcaatgtcccatctgaactggtatgtagattgtgatttaaacattgggcaagatctcgcacgagcaccaaggttgagtgccttccatttaaaaaaaaaaaaaaaataaaaaaaaaaaaaaaaaagcggcccgtgccttccaaaaacccacaccc

SEQ ID NO: 160245 - DNA, 3338 bp, Zea mays
  unsure (1)..(3338): unsure at all n locations
  Clone ID: MRT4577_77723C.1
ggccgcttttttttttttttttttccatccaaatgtacccagttacaaagaaccctgaccaggttatcacattgcattagattgcataacacactaaaaccctaaaatttttttcttttttcgtacataaatcagataatgaaacgaacatcagaacaaaatggaaggcactcaacctacaaatttgattaggaaacaaaacaatataacaaaatggaaggcactcaaccttgggctcgtgcgagattttgcccaatgttttaactcataatctacatcataccagttcagatgggatactgaattcacttgggggatggaaaggctaacaaaaacctcgttatagcttaaatagatcagaaagagctgcactaaaaacaaaggtgcttcctgttaaaaggagcctactgttgttacataaaggctcttgtgaccccccctaattacagataattaagaaaccttcttcaaaagctgggtctccaattcatatggccaagctgtggttgctgataagctccaacttgcgggcctggagctgccaccccaaccccaacattgggaccaatggccgatggcacctgttgatgcaccatggggtgcggacttacaatagagggaggttgctgaggatggtacaagcctgggaactgcacatgagaggattgagctgtagcattgaaagatgcatttgctggatttggcacaaaagcacctggtgttgcttgacctggtatgttgtaatatgaaggaacctgcataggtggcatctctctagcttgctgaatccagatgtcagatgtctcgacctgtggagttgaggcataaatgttgtccttgtacttcatcctattgacatcatcaacaccaactgtggctccaataacaccaggagaacccattgtaaaaccagctggatgagtgtaatttccatagccagaagggttaccagatgggagtggtttaaactgtgaaactccatacttcacgcttcctgcagttaaatgtgaacctccactgggcatctgaagataattatttccatttgatggataagggacatttggcgaatagtttggcataggcatggggtaaactggtgaatagagttgtcgatatggcatgaaatttggaaaatgttgcacatgcatttgagggtacatctgtgttgcagcttgttgctgagagatatgctgctgctgtgaagagatcggaacagggctgttgctcacgatctgtggatttagggcctcagatgtggacgggagaacttgtgagtgaacattagaatctggcatcctgaagacttgcacagcattatctgcttctggattttctgaagggtatccctgagaagaggaagctaatgcttgtggatgtacattaggctccaccagtccatatagctgggcctcattggttgtatgaatattaggatctttatgaccataagccgaaaaagcagtcaaagtcgaggtgatctgggtactgtcaccatctgctgctccaactggagtgtcgctctgaactaagcccagcccatcatcattctctacttgaccactcattcgatcactatcctcagatgggggcaaggaaatctcagccgttgatgtggacaggtgttgtgaagatctagcttgctcatccatgtcatcaggtccagcatccaaactatcacattcacttgcctgttgaactggttcttgtacatgttctggttgctcagtgtcttgtggggtcaaggcaggtacttgttccaaatccaaatcaggtgtgaaactgccaaaccttaactttgtctgctcatattctggtacacgaagatgttccggaataataacatgctccacctcatgcaagttagcttgtgaaagtttttcaggcaacccgtttacatctgttgtgttggcattttcacagttgctagctgaaggagatgcagcatcagctatactgttttctgcatcgatggtgggtgacttctttgtcaattttggcttccactccttaatagggtgtactttttggttggtagtagggccctggtgatatctgttggtattttgtgcaataaaagatctaacagtgggccttccacgaaatgttgtatcaggcctcaggttttgttgaatgtttcttgacatgaaagctgagtaacgcccagatgcccctactgaggtaaaactccccctctgaatatttgcataagaaccacctggtgcatgcatctgagaacctgaacggccagcaaattgcctagtagaattaacaactccaacatgacgttgagcaggtccaacagttccaccggcaattctaacattggctgacccatgagctgggtcagaacctggaaagtgctgctcattctgagggttcttcaaatatggcttcacatgcttctctgtagtaccttgagcatccctcttcccttgggttgtgtcagagtttgagttctgcatagcattttgatgtgtgatctggtcacctgaggttgtagcaggtgagcggtttcgactgatgtgagatctggccgtctgaggttgtagcaggtgagaggtttcgagcggactgaacaacagtgctcctaaggtggcggtgctgccgcggctgtggacctgtcgaactgttattgcccacgcgtccgcccacgcgtccgcccacgcgtccgcccgattcagacatttgtacatctgctgaacctttgtgtccgggctctggtctgttctccaccacaccatgttgaaatctgttgtccctcacaacccgaaattcatgacttgggcctgacatctgaccctgattgggaagtcttctttgatcattttccatcctgtgggtatgtggcctcatccattgagggttctggtcaacttgtccagtactatcagcaaagctcttctggccagcactctctttcttcttgtccctttttcttttcacttcgtgaaatggatcttgattcagcagcttctgcgccgtctcgttggggtccatgttagactcgcggagggtgtccaagatgtcggcgtcggagtggccgacgacgacctccttgatcgactggatggtggactggatcgccgtggtggtggtggtggtggtggtggtgggcgagcgcgccgcccccgccctgtctgagctgcgcgccccgccgccaacgccagccatgaccgccgcgagaggggagatcgcccgaacgcacgctaggacgggggagcgggtggtgttggaggcgctgacgatcgccgccggaatcgcatcaaacgacgcgagggcctgcccggccggncgggggaaagcgggttgggtttggcccgggggattccggaccg

SEQ ID NO: 160246 - DNA, 418 bp, Zea mays
  Clone ID: MRT4577_77724C.1
aaaccaaaaaaattaatgcctggggggcaattaaggggggggaaaccaacttatgggtaattaaacctaaaaaggggggggcacctgaaagcataaaaaaccgggggccaaaagggacccccagataagggtaaggcggggggggacaaaacccaaaaaccccttggacgctttaaaaaaagccacctaaagccaggggaagggctcggaaaaaaacctttggggaaacactttttttccgattaaaggggaaaaaaaggaggggtccccctccaaagccaaggaagttacttggggccaaaattcttaagggggcaaaattgttccccccccaagggaaaggggacaggcaaaaaaagatccttcccgtttttaaaaccctttcttaattggggccaaaaaagtctaaaaagggggg

SEQ ID NO: 160247 - DNA, 910 bp, Zea mays
  Clone ID: MRT4577_77725C.1
ccggccgggactcaatttcccccttcccttggaaaacccgcacccaccgagcccggccgcccccaaccaatccgaccaaaccaaaacccagacccactctcccccgaaacccagggcctccggtcgcgtggggcgattccggcggcgatcgcgagcgcctccaccaccacccgctcccccgtcctagcgcgcgtttgggcgatctcccctctcgcggcgggcatggctggcggcggcggcggggcacgcggctccgacagggcgggggcggcgcgctctcccacaaccaccacggcgatacagtcgaccatccaatcgatcaaggaggtcgtcgtcggccactccgacgccgacatcttggacaccctccgcgaatccaacatggaccccaacgagacggcgcagaagctgctcaaccaagatccatttcatgaagtaaaaagaaaaagggacaagaagaaggagagtgctggccagaagagctttgctgatagcactgcacaagttgagcaaaactcacaatggatgaagccacatacacaaaagatggaaaatgatcaaagaactcccaagcagggtcagatgtcaggccctactcgtgaatttcgggttgtgagggacaacagatttcaacatggtgtggtggagaacagaccagaattaggacacaaaggttcagcaaatgtacaaatgtctgataggagtactcttgttcagtctggtcgaaaccgctcacctgctacaacctcaggtgaccagatcacacatcaaaatgctatgcagaactccaactctgacacacccaagggaagagggatgctcaaggtactacagagaagcatgtgaagccatatttgaagaccctcagaatgagcagcactttccaggttctgacccagctcatgggtca

SEQ ID NO: 160248 - DNA, 800 bp, Zea mays
  unsure (1)..(800): unsure at all n locations
  Clone ID: MRT4577_77726C.1
tttttgtctccgttgcatggcatttgtgttgttgtatactgctcaagtactgcttatgagattgcttgaactttatcctggagcctcaagagttgtcgttggccaaagctacatctatctttctttcagtgttttgctggaactgataacgtttcgagtctgcagaagaatgaatcatagaaagttaatgtgtgcatccatggttgtggtcttgacacggcggagcggacctcgctcgggaagctgctgcagccggtagactattgattggaacttttaggtcaatccctgttttgttcccatgcttgaaattgatggtcttcattttgttggttgtgacaaaagtcaaaaccggatggaggtactaagcaaacaacctatgttattcttgggttttgaatttcttttccaaaagaacctgcttgcacatattagctgattgtggagctacaagatcccttctatgtaggtgtttagttgtggagcagattgcgggttttgaatttcttttccaaatgtcgtcttcacgcccaccgcggnaggggtggtgacccgaagagatagtggcaaaggcgtccccttgtgggctctgctcctatcttgcggtgtgaagccttttacttatgagatgagataggagtcttgggttcttatcccagcctaagggtctaccatgccccaatgctttggcccatcctgtttttgccggtaccttattttttttctgccgtggctggggtatttcgcccgcnccccccccccccncccccccctccccccccccccccgccccccccccc

SEQ ID NO: 160249 - DNA, 171 bp, Zea mays
  Clone ID: MRT4577_77727C.1
atgacgggggagaagaagatgttcacctcctacatcaagaacaaggattcccatgatacgattatttttggagatgggaatcaaggcaaggtcaaagaccactggagctactacatatggacctcttcggacccgtcgcctaccttagcatcgggggaagataaatcataa

SEQ ID NO: 160250 - DNA, 419 bp, Zea mays
  unsure (1)..(419): unsure at all n locations
  Clone ID: MRT4577_77728C.1
gggtacctcgnagccggccgggatcttcaatccagacgcgaggggagacgtcccgtgatcgtctcccttcccgtgaggtggggtcgagttgcttccaagtatctcctcgagttcctatgcctcagatttcccggatcctcacgctaggccaaggcagcgcccaccgagcgatgtcagagaatagtatgcctctacacgcttagggcgtgagccagaagccgcaagtcctctgcggtgatggcctcttctaaggacatcaagacgaggtcgccaagtggaacggtcctgacatgaggagctaactgacgaatgtaatcttgaaaagctcgtagggaagggagtacatgacagaagatgtgtctgtagactgttgatagaantttttttgaagtgtgaaagggaaatgaaggaatatgctg

SEQ ID NO: 160251 - DNA, 126 bp, Zea mays
  Clone ID: MRT4577_77729C.1
cgcggaagccggcctgctcgggctcagcctctactactgcctcttcggggggaacgcggtgctgaacgactagtactcgttatagaggcccgtcgggtcgacgcacatggacccgtgctgtgccgg

SEQ ID NO: 160252 - DNA, 292 bp, Zea mays
  Clone ID: MRT4577_7772C.1
agtttacaagacatcaaacaacatgatcttatttgagtttcgtcttgttggtgtgaacactacagggcggttcagaagcaggcttcgtgtgccctgatccagctcttttttaattatacagcaccatgcccagcaggctcagaacatgacttctcaccaactgagcatgtactgagttgattaagtattttaaaaataaaatgtgaatgatagttctatgtggttggttataccatgtcaaaccaaaaaagctgaacagtctgtcatcacagtattggtccaactcttagca

SEQ ID NO: 160253 - DNA, 2071 bp, Zea mays
  unsure (1)..(2071): unsure at all n locations
  Clone ID: MRT4577_77730C.1
anagntttatgaaggagnaggagctaataatgggcagtatggatatggtccttcaggacaaccatgtccgaacccagttgggaaatagccagcgagttcagaaacagcaatatgttgatcatagatctgggggaagttatacagatagatctgggcatcatccctctcaatatgtaaatccaactcattcccgtaaggagcatgttgcagggtttcagcaaggcaacaatagtaattttggatataatgcttcgcaggcatatcaaagcccttatttcactaggcaggctgatacacatagtacttctcacggatattccatgtacctaaatacagatgtgcaacgcctctctcatggagttcatcaagaaaaacattcacatgcacaatctgctggatcatttgggaaccatgtaaatagtgcacctcatgaatatggcaaatatcatcagtcactacaaggcaacccttcaaatgttggatcgtcttacgaagtacctagtgaagctggcagcaaacacaaatgtactgttgaagaactggagaagttttgtgatgatggcaatgtaaaagaagctctggaagttttggctatgctaaaggaaaacagaattgtgctacatgctcctcagtacttcagattgatgcaagcatgtggtgatgcaactgccctctcagaagcaagattaatacatagtcaaatatctgaatcatcacttactgttgacacagattttcaaaacaaaattctggagatgtatgctaggtgtggttctatggaagatgcaaagaagattttcagttctatggatcatcataatttgacttcttggaacactatgatctcaggttttgtgcacaatgttcttggtgaagaagcaatagatttttttgaacggtttaagcagacaggggacaagccagatcatggcatgttcagacatgttttcttggcatgtggaattttgggatctgttaatgaaggaatgttgcattttgaatccatgcagaaagattttggcatacatcccactacagagcattatgcaagcattgttactatgcttggacagtctggctacattgtcgaggcttatgaattcgtggaacggatgcctgtggaaccaagcattgaggtatgggaaaatttgatgaacatgtgtcgacttaatggctttttagagcttggagatcgttgtgctcagatcatagagtgcttggattcttctaggctgaatgaacagtctaaaatgggtctgttccctgtcgatgtgtcagatcttgcaaaggaaaaggaaaggaaaaaggcaagtgtcgccgaagctcggagcaaggtccatgaatacagagctggcgaccgatctcaccctgacactcctaagatctatgaagagctgaggtatttgttggctcacatgaaggaagctgggtatattgctgacactcgatttgttcttcacgatgttgatcaagaaaccaaagaggatgctttactggctcacagtgagaggctggctatcagttacggtcttataacaagtgctccccgctcacctattcgggttataaagaatcttcgatcctgtggggattgtcacacggctttcaagataatctcaaaacttgttggacgtcagatcattgcaagggatgcaaagaggttccaccacttcgaaaatggtgtgtgttcttgcaaagactactggtaaacaagatgaaagaaagtccacatcttggtcaatttttattggcacaagaccgctataggttgtttatgtgctgaaggtaggctgatgcctatctaacatttagttagctaatagtttcatgtgagagacatgctgtatgatgtcgtcagtgagaaacagccaaacaggtcctaagcagctctggtgttctattttgcagctcatacgttaagcctgagcttttactttaacaactgttgtctctgatttgttacttgccaccaaaataaaacagtagaatgtaactgggtagtggtcccttggcatgtaaactttgattcagctgattacaaagctttctgactgcattctggatccaaaaa

SEQ ID NO: 160254 - DNA, 363 bp, Zea mays
  Clone ID: MRT4577_77731C.1
tttctctttttttttttttttttttttttttggggtttttttttggttttttgggttttattctctttttttttttttttttcccacaacttattttgtacagaagcgggcctaaggcgggcaattttggggggaaaacccaaaaaaaacggaaaaccttaaaggtcccccccaacatattccaaggaagggaacaaaataaccccgggaaaggcccgggccttaaaacaaaaaaacttccccggggcccccccgacattaaaataaataactaagggcttggcccccccagggttttaaaaccccacaaaaaaaagggccaccttaaattaaaagtctacaaaaggcctggaaaaggaaaaa

SEQ ID NO: 160255 - DNA, 197 bp, Zea mays
  Clone ID: MRT4577_77732C.1
ctgatgtggacatgcaatgtagcaagaaggtgtagatgactaggtcgtgtggatgataccgaagatgatgcatgcgtgatgaacccggtccttgtgcatgacgtggtgtcagccgggtctcacggaagtagtaactcctgagatcctatgcttctccgttgcacgcacatcccctagtacacatgggatttagatgg

SEQ ID NO: 160256 - DNA, 398 bp, Zea mays
  Clone ID: MRT4577_77733C.1
aaactatgcagctaggtgtcttagcttgctaaaggaatgacactcatgcagtggggatctggaacctggtttattgggtgcgacccttgtcaaccgtgtaatgactgtcgtccagaacatttgcgggcttcccaaaagggatgctgactggtaagggctctgtgacccacctagaatgttgagtggggcgctcaaaccccggtctgtataggatgtgaagccctttaaactgttgacaatgacattttaccttttccataataaatattgggagtggccctttctgaatggctggtctcatgaactatacgtatctaaagctttattgatcctcaacgaaagagagggcattaacattcactatgactcatataaatgatctaagttaacatcttggt

SEQ ID NO: 160257 - DNA, 808 bp, Zea mays
  Clone ID: MRT4577_77734C.1
aggccggccgggccgggagtaaatcgccactcaacctttcgggttcaagcttccaccccaaaggaagcggcgcgtggtcgctggcgatggcggcggggactatctcccgcatccggctagagaacttcatgtgccactccagtctccacatcgagctcgacaagcacgtgaatttcatcaccggccagaacggaagcgggaagagcgccatccttacggctctctgcgtcgcctttggctgccgtgctaagaacacccagcgcgccgcctccctcaaggatttcatcaagaccggctgcagctatgcagcaattactgtggatattaataaccatggggaagatgcgtttaagcctgaagtatacggggacactattatattggaacgcaggattactgaatcagctagttctacagttttgaaggatcaacatgggaggaaggtggcacatcgcaaggatggcctaaatgaaataactgaacattttaacattgaagttgaaaacccttgtgtaattatgagtcaagacaaaagcagagagtttttacattcaggaaatgacaaggataagttcaagttcttttttaaggctactcttcttcagcaagtgaatgacttgcttgctacaataagagacaacctgaacattgcggcctctatagttgaagaactggaagcgtcaattaggccagcgcttagagaacttgatgagatccaggagaagataaagaatatggaacacattgaagaaatagcacatgagatcgaaatctgaataaaaagttggcttgggtatggggttatgat

SEQ ID NO: 160258 - DNA, 1780 bp, Zea mays
  Clone ID: MRT4577_77735C.1
gcacgagctgacgcggagcggccggacgaggacgacggcggcggcggcgtacccgaagatggcgcggccgccgatcctatccgtcgcgctgccgtctgacaccggccgtgtgctcagcatccacagtcccacaccgtccaggggtatgttggcaacaaatcggccgtctttcccctgcagctccttggctttgatgtggatccaataaactctgtacagttttctaatcatacaggatacccaacatttagaggtcaggttcttaatggcaaacagctctgggaccttattgaaggactggaggaaaatcagttgcttcattatacccatttattaacaggttatataggctcagtttcctttttagatactgtgctacaagttgttgagaaattgcgatcagttaatcctgatcttgtatatgtttgtgacccagttctaggtgatgaaggaaaactatatgttcctcaggagctaatatctgtttatcaacagaaggttgttccagttgcttcaatgcttacacctaaccaatttgaagttgaactacttactggattgaggatcacctccgaagaagatggtttgacagcttgtaataccctccacagtgccggaccacagaaggtggttataactagtgctcttattgaaggcaagctgctccttatcggaagtcacaaaaaaacagaggaacaacagccagaacaatttaagattgagataccaaagatacctgcatatttcacgggaactggagatttgacaactgctctcctactaggatggagtaataaatatcctgatagcctcgagaaagcggcagaactggcagtttccagtttgcaggcacttctgaaaagaactgtggaagactataaaatggccggcttcgacccatcgaccagcagcttagagatccggttgatccaaagccaggacgagatccgaaacccaactgttacatgcaaggctgtgaagtatggaagctgaatccatagtacccccactgacaaaggtgccaacaataatgagcagtgcctgcaccgccgataagcgggtgcacctacttccatgactcttggtcctcagttttgggatgctgattctgttacaccttagctccaaaatgagaaacaatcatatttctgaaaaaagggttatagacttatagggttatattcaggctgtgcgattgctgcagtctttgggaatgcgtggtggcctgagtgagattgtaaatggcccttgtcattgttgtcttcctcgttgtgttgttgttgctgctgctcccgctgagttgtggtggttggttgggaactctaggtatgctttgtttgaggcattacgaacatatggtgttgagatgtgctcataatgctcaacatgtcttttgagtcaagcgggtgcacctacttccatgactcttggtcctcagttttggaatgctgattctgttacactttagctccaaaatgagtagcaatcatatttctgaaaaaagggttatagacttatagggttatattcagactgtgcgattgctgcagtctttgggaatgcgtggtggcctgagtaagattgtaaatggtcctcatcattgttgtcttcctcgttgtgttgttgttgttgctgctcccgctgagttgtggtggttggttggaaactctaggtatgctttgttgaggcacattacgaacatatggtgttgagatgtgctcataatgcttattatgataagtgataattgaaaagatagttataatttaatattgacctt

SEQ ID NO: 160259 - DNA, 1013 bp, Zea mays
  unsure (1)..(1013): unsure at all n locations
  Clone ID: MRT4577_77736C.1
cagattacacgtttctttctccaggtcctccctgatgctcagcacctttcgccgcctctcttcgtaccctctcttcgtttctctcgtcttcagcctgttgaggatatcttgccttccaacacgtccatctctttccgctgatgtcatatggtgtagggctcgtgtgccacggtaactggcggcctctgcttgacaagtcgccaggcacagctcctttcatcaagcggattttctactggacctgtaccgaataggtccaatcagttcgaccacctctgcactgtgcatgacagtgtacagtcccctctgtacatctacgctgtcgacatcgacagatacttctgttgcatccctgagggcccagatggcataatttttgtagctcattatccccgcagaagtgacccttcccaaaagtccgcagatattttgtgcaaatttggcctctagttctgtctcggctgaaagttcgagtcctggctgatcattccacatctnccttgaactgggtccgaaaagcatgaggtcggaccataattctccatctccccagacccaattttcacggagaatttcagtggacggctcgggaaaaggtggattcggccgagtttttatcgccctcaagaacgacagtagtttcttttgacccagttcgtcttcccacgatattcccttcgatacatgcagaatcgaatagtacaagttccatagtgatccttntgttgtgtttnccggagcaatttctcannctgtcangggcttgcccttcgtttgctgaggtatagaggtactcgattggcacgatgagtttctccatcaaatcgtccatcgtgatttcgtccttcagaaaagatctgatgatagccgtttttcatcgcctataaaccaacgctttgcctctgcgatctgatcgagtttttctacatcgctcagatcacctcgagatgtctctcngcacttttnctgcgttttaggcttgtcttccctcattcatggtaaagagnggggtg

SEQ ID NO: 160260 - DNA, 326 bp, Zea mays
  Clone ID: MRT4577_77737C.1
gcagcagtgacagggcacgccgaagctgttcatccgatggaccttctatgacttccaggcgagcaacatgtcgctgtacgactacatcgctgtgaacgccacgaactactccatgtacctgacgtacaccacatcacgttactgcaataagcggctccgctaggcgctctgcccgatcgtcgtgcgccttacaaactgcatcatgatgcacgagctgctcatcggcgacaaggtcatcgatgtactgatcatcgagcataccctggagatcattcacctgctcaccgatgccaaccccatccaggtacctgtccacgcgatcatca

SEQ ID NO: 160261 - DNA, 260 bp, Zea mays
  Clone ID: MRT4577_77738C.1
cagctaactctactctcgctgcgcttcccctcgccgttcgtcgccatcgattgacattggtcgaacccaaccgcgcactagatagatctacgtcgaccggcggccgtgatggacgcgcgctcgctcgctcgctcgctcgtgcgtcgacatggcgaaatgcagcagcaagatccggtacatcgtgtggctgcggcatttgctgcggttgtggcggtcccgcgcggctttttgcactgcggtttttttggtgcacgtggtgt

SEQ ID NO: 160262 - DNA, 289 bp, Zea mays
  Clone ID: MRT4577_77739C.1
gggaaaattcccagggcggggaaatacaatttttatgtcaggctgtcagcctgtgtgcttgtccaacaacgggtacacatttgtttacatacccccccagtttaatttaaaggcattgggctttgggcaaaccacaaatcaagactcccaatgaaagcaaaaaattgaaaaggggaacccatcccaacatacaaatcaaatcagggcctaaaattaatataatagggcaggacacccaccgttggcaggcgtgtgggcaataaaaaagggcccaaaccaaataaaattg

SEQ ID NO: 160263 - DNA, 200 bp, Zea mays
  Clone ID: MRT4577_7773C.1
ctgactcgttggacctagtccatcttggcgttgcaagaacagcaagtggttgcccatcggctgtcgcttcctgagttagcatcagacaccagcatgacagataagatcctgatccagcatctagcaacgatgataatttcaaaacaccaggacttactaaagataacggtctcgatgatgaagggaaaggagagagtagt

SEQ ID NO: 160264 - DNA, 568 bp, Zea mays
  unsure (1)..(568): unsure at all n locations
  Clone ID: MRT4577_77740C.1
agaaaaatcgaaatttgaaaaacctccgtgccatgaaactccggttgcgatctataaaggcgcgcggaggctacgacgccgtgggaggacccaccgcgtggacctgccgcccacggacactctggacgcaggagaagaccgtccttgcgtccgaagctatctgcggctcaacccgtccccgacgcagttcgtacgactgtcgcctcaaccgtagagagcgagcatcgataggcgaaccctgtcgatacggttctgtgcctcaggctagggatcggggatctcgtattcatcatcctatgcaagattacggccctagcggcggcggctcatgacctgacacagaaccctaggccgagctctggcactggaacgtcaatcgttgaggctagcgaccgctgataaggggtcgaagcaatctggtactggagattactcttgtcgacactggcgcaagctggggatgagagccctatctttgctgtcgcttacgggacgcatgatgaggtgatggaagaggaggccttcnatgccacaaagggctgggcgagttttgtgcttacggatctca

SEQ ID NO: 160265 - DNA, 379 bp, Zea mays
  unsure (1)..(379): unsure at all n locations
  Clone ID: MRT4577_77741C.1
nnttttcattaaagaccacagcctttttaatttagggtggtttttttttaaggtacagggcccgcccccccataaaaatcacactagctggaggcaacgaaagtaacccttaatataaaaacacaaacaggtggtggaactcaacttttaaaccacataatgtgaaagacacatttacaacgtaagaatgaaaaaaaagaaaacggtaacctaaaaacttaactgcggggaattgcaacaactggacacacacacaaacattacttccttttcttttacctttttgaactgaaacacaaaagacggggagacgtgagaggttaaggaccccatattaccgaaaaaaaggacgagccgaggcactttcttcttcccccac

SEQ ID NO: 160266 - DNA, 273 bp, Zea mays
  Clone ID: MRT4577_77742C.1
tggctgtactgtccggggaagatcgagacaagccagccatagcctcatttgctgctgcggcatgagccactcatctccagggccataggatactaaccttgacgaccggtgacacctactgaccattcatgtgctcagaatcaagctgaacgctgttcacagccccattattctgcaatcattcggcactcgcctgcatacaaacagacgtattttacatggacatttaccaaccattgccatggggcatacaaacttggtcgacgagctatc

SEQ ID NO: 160267 - DNA, 315 bp, Zea mays
  Clone ID: MRT4577_77743C.1
aattcggcacgaggcctttgagttcgtcatcggcagctgaccatcatgatctccacagtgctgggacgattgcagccatgaagttttggccgcaagtggacgtgctcagcctggaacaatccgagcatggtgatcctgtgcgacaagccctgcgccggcgcacaagagcttgccgttggtgcggcggtgcctgtggctcagatccacacccgctactggctcttggctgtcgacgacacggaggcgccgacgtgtgcctgctgcggtggtgcatcctgtgtgtacctctgacctgcgatcctgacgtcttcccct

SEQ ID NO: 160268 - DNA, 397 bp, Zea mays
  Clone ID: MRT4577_77744C.1
acacatcactctcctcagatctcacagccgaaaagagaggagctttaaccgccgtctaaggtcacaggtacaggaagccatgaccaggcggtggccacctttctctgcccgtgtcgccgccgccgtgttcctgctgctgctatcccccgccgcgacctcccagctcggcctgggccccgccattgccgcctggattaacggctcgccgccgcctagccctgacgccgccgccgccgccgccgccgccgcctcgggcccgcggagccaggagtacgcggcgctgcaggcgctgaaggtggccgtcaccgacgaccccaagggagcgctcgcgtcgtggcagggcgccaatgtgtgcgcctacaagggcgtgtactgctccgcgccgcccgacggcgcc

SEQ ID NO: 160269 - DNA, 361 bp, Zea mays
  Clone ID: MRT4577_77745C.1
tgttggccgggtcggggttcatcctgtcacaaggtagagaaaatgctaaaagagagtggggtggcttgtaagataaactgaacaagaaaatttaaaagtaatgtgccgtatgaatcgctgcttgatgctagatccaactgttcaaggatatatatagtgatggttctctgtggattactttccccttgtaaatatcttgagctattgaaaggttattaggttacagggctggtgtgttcatgttaagtttcatgattatgatgtcttgtatgtgtgttaatgtccatttaagtgtctggaaatagtttataaaacgtgattggaaatataacacataaagaaaacattggtatgaccttct

SEQ ID NO: 160270 - DNA, 259 bp, Zea mays
  Clone ID: MRT4577_77746C.1
gcccccctccctaagacttggatccttttaagagggccgccgcataacccggggcgcgagcccgggcggagcggctctgagaagcaaatcttggtagagcgagcaattctacacataagaactgttgcaggcccaagaggaagataggtccatgtgatcggtacttgcacttgggtcatccggtcctaagggtcaggggaaacccggaagattgggctatctcccccatgcacccgaaagggaattaggttaagatttc

SEQ ID NO: 160271 - DNA, 333 bp, Zea mays
  Clone ID: MRT4577_77747C.1
tacgatccacagatgcactcacatacattccttggttaagatctgggttcacttgatgacatggaggttgatcagcttgagaagccaaccgattcattcttaaatcacatacgatccacaaggtcacagcatatgcttgaacagctcactgatcttcagacgtggtagcaaatgatgtgtgaagcatataacttcctaacaagaaagctggatgagaccagcatccaacttcatgtccaagtgtgcgttcacggcgccaactgattactctactaccagcggtactccttgccacagccagccccataacatgttgtcctttgattattcttt

SEQ ID NO: 160272 - DNA, 263 bp, Zea mays
  Clone ID: MRT4577_77748C.1
taagcagctcttgttttatgaagtggatgcaagtgtaaaggcgtgcgccagctaggacgaggggtgccttactgccattacatttattgtggtgcagaagctccatcacacacacgctttttcctgaagatcatcatgctcatggacagatggatcgactcggaaacatttagcaggaactgttgatgacacgaagatatgccatccaagggaatatcacttctacctttggagacactctggcatacacggaacgagcccgc

SEQ ID NO: 160273 - DNA, 221 bp, Zea mays
  unsure (1)..(221): unsure at all n locations
  Clone ID: MRT4577_77749C.1
tgcagcgttagccagtggctttcgtagaggttagctcaaagtattcagaaaagtttcataatgcgaacgagagncctttcagaactccaataaggggatctggtacgaagggtggatcggcacgaacagatgtatttggtatcaatctgcatgcattatccatatgggcagctnaatgcaggatgacntttctgaagtctattgggaaattgcnttgggaa

SEQ ID NO: 160274 - DNA, 2707 bp, Zea mays
  Clone ID: MRT4577_7774C.1
gccggcccgggcccggggtctttgaaaccaataattgaagtaatctccaaaggttcagacttcagaggtgctcttggcttcaaggggcggctgggtgagggcagagctctcaactaaatgcccaaaggatatatccagcaaaaggacagaatgaaagtggtctctatacaccttgctgctgctgttgttgctgttctacttctgttggcggcaaagcgcacccctgctattgcggttcctagccctcaatgccaatggcaatgcggcggcgttgacattgcgtttccgttcggcatcggtgacaactgctcgctatcagcaggattcaacctcagctgccaggaggtccaaagtggcgtctacaggccattccaaggtaatattgaggtgctcaacatctccttgataaatggcacggtccgggagctgaaccccgtctcgacatactgctacgactcctcctctggttccatggagcccagtacctggtcattcgacgcgagcagaaccccgtaccggttttcggacgtccagaacaagttcaccgtcatagggtgccagaccctcgcctacatcacggacaacaccgacaagagctaccagagtgggtgcgtctcgacgtgccagaatgtgtcagacctaacggacggatcctgctccggcatgggatgctgccagacagacatacccaagaagatgggcttctacaacgtaagcttcgaccctgcctccgacacaagccaaatctcacggctgggcctcggcagctgcagctatgccgtgctgatggaggcggaggagttcagcttcagcaccacgtacatcaccaacacgacagctttcaacgacaccaacagtgggagggtgccggtggtgatggactgggcgataagagatgatggcgcgccgtcgtgtgagctcgccacaaggaacgagacgggcacttacgcgtgccgcagcggcaacagcaagtgtgtggaatcccccaatgggccagggtatctgtgcaactgctccgatgggtacgaaggcaacccatatctttcagatggatgccatgatgtcgatgagtgcaagaagaacaacagtccatgcccttcagtaggaggtgtatgccacaacacggtcggagcgtacaggtgttcttgtcgagcaggaagaaagcttaacaagcaaaacaatacgtgtgaccctgataccacattaataacaggggttacaatcggcttccttgttctcgtaatcttctcctccttcggatacatgatcctccagaagagaaaactgaaccaggttaagcaagatcattttcggcagcacggaggcatgattttgttcgagaggatgagatcagaaaatggccttactttcacggtgttcagtgaagctgagcttgtaaaagctacagacagctacgacaagagcagaataattgggaagggaggccatgggacagtctacaaagggatagtcaagggcaacgtgccgatcgcgattaagcgatgtgcgcttattgacgagaggcagaagaaagagtttggtcaggagatgctgatactctcccaaatcaaccacaagaacatcgtcaagctcgagggctgttgcctcgaagtggaagttccaatgctggtctacgagttcgttccaaatggcaccctctacgaactcatccatggcaagaaccaagcgctacagatccccttcagcaccctactgaggatcgcccatgaggcagcagagggcctcagttttctgcactcgtacgcgtctcctccgatcatccatggcgacgtgaagagcgccaacatccttcttgatggcaactacatggccaaagtgtcagattttggggcctccatactagcgccgtccgacaaagagcagtatgtcacgatggttcaaggtacctgtggatacctcgaccctgaatacatgcagacatgccaactgactgagaagagtgacgtctacagcttcggcgtcatccttcttgaggtcctcaccggccaagagcctctcaagttggatgggcctgagacgcagagaagcttgtcatcgaagttcctgtccgctatgaaggagaacaatcttgatgcgatcttgccgagccacgtgaatggtggacaagagagcaatgaattgatcagagggctcgcacagctagccaagcagtgcttggacatgtgtggctgcaacagaccatccatgaaggaggttgccgatgagcttggtagattgaggaagctttcgctgcatccttgggtacagatcaatgcagagatgatagagtctcaaagccttcttagtgggacaacgactgctagctttgaaatagaagttggtacaactgggtatcctacacaggaagctgagaacctgcccatgaacccaagaagttcgtactatgcgaggtaggtgattagcgtatgttgttgtgtactccgttgaaatttctgctgctaggataactgcaagctagcagttctgctatcaaagatatactgcatattgacacaaagctctgccgcctatctttagccattcaagtatgtatatgtgtttctgcggagcacgtctgcaacatatataatacggtctttttttaaggtggtgctcttagttaatactccttgacaataaattatatagcttatttctttagataagtttatacacctgaaacattatcggaaaaaaaaaaaaaaaa

SEQ ID NO: 160275 - DNA, 783 bp, Zea mays
  Clone ID: MRT4577_77750C.1
ccgggacttcccgtgtttctaactccggtggctccaccaccagcaacccgtgcagcgagcccaccccgacctggctgacaaatgtgtactagcatcttctggctttcagggtgatattaaggctctgcacaagaacctagctgccagagaattgctataccaacaccagcataacaaaaggatgagctgccctgccatggcacagctcctctccaataccctgtactacaagcgcttcttcccatattacgccttcaatgtgctcggtgggcttgacagcgaggggaaagggtgtgttttcacctatgatgcagtaggttcctatgagagaactggttatagtgctcagggaacgggatctactttgattatgccagtcctggacaatcaactaaaatcaccaagtcctctattgctccctgccaaggatgctgtcacaccattgtcggagtcagaggccatcgatctagttaaggatgtgtttgcatctgcaactgagagagacatctacactggagacaagttggaaattgtagtcatcaacaaagtcgggactaagcgcgagtacatcgacctgaggaaggactaagccaacgcttcagttgtgctgcagctgtcatttgcttcggacttgtttcctagtctggagatttatgtctaaagccgttgctttcatagaaacatatgttattacttgcatatgacctgtaccagggttcagtcagcttgttttttttttgttgaaacaaattgcttggatattgaagcgtacttactggcgca

SEQ ID NO: 160276 - DNA, 412 bp, Zea mays
  Clone ID: MRT4577_77751C.1
acaaagaaaaccgatgcaagggccgcctgtatggctatgggctatggcacatgaccacgtctgacacctcctggcccgcctaaactacaatctaataaactctttatgctccgggggcctttacagcaactgcactaccccccctttaattgaatgttctacacctacacccaggcattatgggagcataaacagaaaggtttaggccaccctaaccgcccccttgaccccgatactgaaactgttttcaaggtggaccttttcatggagcacccccaccgacggcttgtgcataatggaaacgaacttgttgaagtctatgcgcccgtcctgcaccagcaggtccataccatttcaaacccaggaattagacctgaacaacatacaactgggaccctggaggagggggggc

SEQ ID NO: 160277 - DNA, 1126 bp, Zea mays
  unsure (1)..(1126): unsure at all n locations
  Clone ID: MRT4577_77752C.1
ngattcanaaaaaaaaaaaaaaaaaaaaaaaaaaaaaacttccggccgtgtttctaactccggtggctccaccactagcaacccgtgcagcgagcccaccccgaccactgccatgtcgaggcgcggcgactgggtctacgagaacaacggcgggacctgcgtggccatcgccggcgccgattactgtgtcgtcgcggcggacacccgcctctctgtcggatacagcatcctcacgcgcgaccactctaagatctgcgacctggctgacaaatgtgtactagcatcttctggctttcagggtgatattaaagctctgcacaagaacctagctgccagagaattgctgtaccaacaccagcataacaaaaggatgagctgccctgccatggcacagctcctctccaataccctgtactacaagcgcttcttcccatattacgccttcaatgtgctcgggaaagggtgtgttttcacctatgatgcagtaggttcctatgagagaactggttatagtgctcagggaacgggatctactttgattatgccagtcctggacaatcaactaaaatcaccaagtcctctattgctccctgccagggatgctgtcacaccattgtcggagtcagaggccatcgatctagttaaggatgtgtttgcatctgcaactgagagagacatctacactggagacaagttggaaattgtagtcatcaacaaagtcgggactaagcgcgagtacatcgacctgaggaaggactaagccaacgcttcagttgtgctgcagctgtcatttgcttcggacttgtttcctagtctggagatttatgtctaaagccgttgctttcatagaaacatatgttattacttgcatatgacctgtaccagggttcagtcagcttgttttttttttgttgaaacaaattgcttggatattgaagcgtacttactggcggaaaggctatatttggttggtagctttacatcaatggcctcatccgaaatgtcacaatcacaagcctctgtatctcttctactcattcggattcgaattgccttttgtctttaaagatctttaacttctatgtagtacctccattntaaattatatgatgttttagtttctttt

SEQ ID NO: 160278 - DNA, 963 bp, Zea mays
  unsure (1)..(963): unsure at all n locations
  Clone ID: MRT4577_77753C.1
cattgggtacctcgntgtcggccgggcttacctcgcctgctggccgtatcctatgtgttccctaacgagggtctgtttggtcctgcaggacctgcgtggccatcgccggcgccgattactgtgtcgtcgcggcggacacccgcctctctgtcggatacagcatcctcacgcgcgaccactctaagatctgcgacctggctgacaaatgtgtactagcatcttctggctttcagggtgatattaaagctctgcacaagaacctagctgccagagaattgctataccaacaccagcataacaaaaggatgagctgccctgccatggcacagctcctctccaataccctgtactacaagcgcttcttcccatattacgccttcaatgtgctcggtgggcttgacagcgaggggaaagggtgtgttttcacctatgatgcagtaggttcctatgagagaactggttatagtgctcagggaacgggatctactttgattatgccagtcctggacaatcaactaaaatcaccaagtcctctattgctccctgccagggatgctgtcacaccattgtcggagtcagaggccatcgatctagttaaggatgtgtttgcatctgcaactgagagagacatctacactggagacaagttggaaattgtagtcattaacaaagtcggtactaagcgcgagtatatcgacctgagaaaggattaagccaacgcttcagttgtgctgcagctgtcatttgctttgaactttttttcctagtctggtgatttatgtctaaagctgttgcttcataggaacacttgtgtttacttgcatatgtaatgtacggtatgtaccaggattcagtgagttttttttctgttgaaacaaattgcttggatactgaagcacttgtatttattgtcgggaatgtctattttggggtgtttggtaatttagggaccaaaaaaagaag

SEQ ID NO: 160279 - DNA, 580 bp, Zea mays
  unsure (1)..(580): unsure at all n locations
  Clone ID: MRT4577_77754C.1
caccacaacagcgaaggagaaagcagaccaaccnagccacccagggagaaagaggccaaaagggaggggagaggggcgncanggcnnccaaagncgcttccaggagggccgnnccncnagnncgcgcccnggagaaagcaancgcagcgnccnccgcncccgggaccggcnccgcccncaggccggnggcagncgccggcggccggcgcggcnacaacaccggcgcnccgcnccgacgccacgagggggccgagncggaagacgaaagcgnccgcgagnacgaagggcggcacggcggccgggaccacgcngngcccagccngnncncaganannnnccgngaaccgcnaagngcgccgcacagcannggccgccngcngaaccnngnggacgacnnggcggnggcggcgccaggncgngcggngcgccgnggcnggaacgcgaaggaggacgaggaggcgcngcaccngagggnggacaagccacgcccggggaaggagcacgacaaggcgngggcggagcagaacagcccggcgaacaagggcgagggcgagaaggagganagcgaggacgaggccgc

SEQ ID NO: 160280 - DNA, 1346 bp, Zea mays
  Clone ID: MRT4577_77755C.1
cgagccggcatgtccttttggctgtttggttatttttgagttcatgcggtctttatttatttccatgtacccagtacccaccttgtaccatgcatgttccttatgatacactcacctctttttgttaaaaaaaaaaaaaaaaaaaaaaattcacgaaagccggcgtcagctgctcctccacttcctgtgtttttaactccggtggctccaccacccgcaacccgtgcagcgagcccaccccgaccactgccatgtcgaggcgcggcgactgggtctacgagaacaacggcgggacctgcgtggccatcgccggcgccgattactgtgtcgtcgcggcggacacccgcctctctgtcggatacagcatcctcacgcgcgaccactctaagatctgcgacctggctgacaaatgtgtactagcatcttctggctttcagggtgatattaaggctctgcacaagaacctagctgccagagaattgctataccaacaccagcataacaaaaggatgagctgccctgccatggcacagctcctctccaataccctgtactacaagcgcttcttcccatattacgccttcaatgtgctcggtgggcttgacagcgaggggaaagtttgttgctttactttctcacatttattggtggaacactcaagtaagcatgttgtgcacctgcacagggaaagggtgtgttttcacctatgatgcagtaggttcctatgagagaactggttatagtgctcagggaacgggatctactttgattatgccagtcctggacaatcaactaaaatcaccaagtcctctattgctccctgccagggatgctgtcacaccattgtcggagtcagaggccatcgatctagttaaggatgtgtttgcatctgcaactgagagagacatctacactggagacaagttggaaattgtagtcatcaacaaagtcgggactaagcgcgagtacatcgacctgaggaaggactaagccaacgcttcagttgtgctgcagctgtcatttgcttcggacttgtttcctagtctggggatttatgtctaaagccgttgctttcatagaaacatatgttattacttgcatatgtcctgtaccagggttcagtcagcttgttttttttttgttgaaacaaattgcttggatattgaagcggtacttactggcggaaagtctatatttggttgggagcttaacattaatggcctcatccgaaatgtcacaatcacaagtctctttatatctcttctactcattcggattcgaataaaaaaaaaaaaataaagatctttaacttttatgtagtaaaaaaaaaaaaaaaaaaaaaaaaa

SEQ ID NO: 160281 - DNA, 300 bp, Zea mays
  Clone ID: MRT4577_77756C.1
aattcggcacgaggcggcgatgggaggcgtcatcgacgttctcgccccctcatgttgatgaagtggcgcgccgcggagattccttgaccgatttctcgcctggaagacagagtctgccatctgcgtggctggtcatagcggtgagcaaggaacgactaagtgcgcccctccgcccttcggctcgtcgcggcgccttgcgtccgcgggtggagttccttcgcctggttcaagctaattcggatcttccctctcatcctgccagattattctttgctggccttctccgttctatgctgtcag

SEQ ID NO: 160282 - DNA, 1360 bp, Zea mays
  Clone ID: MRT4577_77757C.1
caaaccacctcggccggtcggcccacgggccacgactcaaaaaaggatcaaggtgggagaaacaaaacacaaggcggcgtccgcagcttccccactccacgttccgtgtttccgactccggtgactccaccaccagcaacccgtgcagcgagcgcactccgaccatcgccatgtcgaggcgcggcgactgggtctacgagaacaacggcgggacctgcgtggccatcgccggcgctgattactgtgtcgtcgctgcggacacccgcctctctgtaggatacagtatcctcacgcgtgatcactccaagatctgcgaccttattgacactactgtgtggaggttgctaagctttctttgattattatgtactttatgagaaagatggttatcagctactccctccatttcaaattggctgacaaatgtgtactggcatcttctggctttcaaggtgatattaaggctctgcagaagaacctagctgccagagaattgctgtaccaacaccagcataataaaaggatgagctgccccgccatggcacagctcctctccaataccctgtactacaagcgattcttcccatattacgccttcaatgtgctcggtgggcttgacagcgaggggaaaggatgcgttttcacctatgatgcagtaggttcctatgagagaaccggttacagtgctcagggaacgggatctactttgatcatgccagtcctggacaatcaactaaaatcaccaagtcctctattactccctgtcagggatgctgtcacaccattgtcggagtcagaggccatcgatctagttaaggacgtgttcgcatctgcaactgagagagacatctacactggagacaagttggaaattgtagtcattaacaaggccggtactatgcgcgagtatatcgacctgagaaaggattaagccaacacttcagttgtgctgcagctgtcatttgctttgaactttttttcctagtctggtgatttatgtctaaagctgttgcttcataggaacacttgtgtttacttgcatatgtaatgtacggtatgtaccaggattcagtgagttttttttctgttgaaacaaattgcttgggtaaaaaaaaaaaaaaaaaaaaaaaaaaaaaaaaaaaaaaaaaaaaaaaaaaaaaaaaaaaaaaaaaaaaaaaaaaaaaaaaaaaaaaaaaaccccaaaaaaaaaaaaaaaaaaaggggggggcccctttaaaggaaccaaatttaacgacccggggatggaaaattaaaattttttttttggggcccccaaattaaatttaatgggccggtttttaaaaacgggggaacggaaaaaccctggggttacccaaat

SEQ ID NO: 160283 - DNA, 1719 bp, Zea mays
  Clone ID: MRT4577_77758C.1
atgacagatttaaagagctatttcagtcaagcttctagtggaagtagaccaagcactcgcgctagtggagtttgcaatgaacccggaatacaagttgaagttcaagagaataatagtgaagatgccaatggtgaaaatatttatggtcaagtcgaaggtataaatcagttcaacccagatcacattatttctgatccgggactttgtattccaatcgattattttgctcctaataatagagatgatgttagaagggctttcatagctaaaggtccgactcaaccaattggtcataactttcctcagtcacatgacaaaaggagctttcaaaaacattggtttagacaacatagttggttggaatatagtgtggagaagaataaggcttattgcttctattgttacctttttaagcacgatcgaatggatgataaatttttccatgatgcatttacaaaagttggcttctcacaatggagaaatgtttatacggcatttccaaaacgtgttggtgggcctaatagcatacacaatactgcagcaacagcattccatgatttttgtaaccaaaggtcaagtgttagtcataaggttgcaaattatagtaaagaagcattggtcaaatatgagacacggttggaaacttccttaagtattgttagtcttcttgcattgcaagctgaatcattccggggacatgatgagactagtacttccttaaacaaagagaattttttagaatttcttgattggtacaaacaaaggaatgaagaggtgagaagagcttttgatgagttgtgtcccaaaaatgataagatgatttcggggacgattcaaaaagaacttgcaaactgttgtgcagaaacagtcacacgtgcaattaaagaagaaatggaggattgtttattctctattcttgttgatgaatcccgtgatatatcggttaaagaacaaatgactattgttgtgagatttgtcaataaacagggtgaagtaataggaagatttttgggcatcaagcatgtcaaggacacaacatcagaatcattgaagaaagcattagttgagatgatcctccgtatcacaaatgagctttctcttctcttgcaaagaaaggatcaaaatgttgtcgaagccatgtctctggttgttgatgtgagaacacgtttgataaatttgagaaatgatgattgggagccattgttggaagaagccacaacattctgccttgcaaatgatatcccaataccaaatatgagtgatgttgtaccacgatttggtcgatcaaggaaaggtgggagaaataatattaccacagagcatttttatcgtgttgataccttctatgctattatagattctgtcaccacagagtttgatcatcactttaatgagctatctcaagagttgctcactataaaagatcaactaagaacttttattattcatgtacgaaaaattgaagagttcaaagcttgttgtgatcttgctagtctatcgaagagaatggttgagcttgagaggcatattgtgtttccactggtatatcgacttattgagttagcattgttgttaccggtggcgactgcaacaatggaaagggccttctcagctacgaagattattaagactgagttgcacaacaagatgtccaatggttggttaaatgacttgatgattttattcgctatatggcatttggttgtaaatggattgtaa

SEQ ID NO: 160284 - DNA, 231 bp, Zea mays
  Clone ID: MRT4577_77759C.1
atggagacggattttccatatcttcttgcgcctaatctgctgacgggagggaagggagcggatctggtgatccgtggtaacgtagttctcaataggataaatggggacaagaatggagactgtgttgtttgtcatcgatccaccacagcaggcccactaccctaccgtgctttatgggccggctcttatttatgcgcttatgcaacacggtggcttcgaaactgtgtttag

SEQ ID NO: 160285 - DNA, 516 bp, Zea mays
  Clone ID: MRT4577_7775C.1
cactcccgaccgagactgagccgctgctgatatggtgatgtcgaacgccgtctaatcttccaacgacgccaagaccagataagtctactagaagcacttttcgatcggcaaaacgtggaaggtctcttggaatgagcatgacccgacgagcgcgagccatggggagcattggcgtgccatcgcatgcgagcagcatctccgacgatcgcagccccgacatgcagaagcgaaaggtgatgaacatcgtgctcctctgcggcatctcgatgcacaccgttttgataagaaatcattagggtgtcttcttcaaaactgacgacgacggtaactgctgcgtcgggacctaagacaaggacatagatgcacaaagagagcacagggtacaaccaggtcaatacataccgagctaacgaacgtacgatcgtgtactggctaaacgatgaccccaggtacgtgtgggtgaagcaccaaaaaacgcgatgcagctactaaatcaacatggtgcgaactcacctc

SEQ ID NO: 160286 - DNA, 455 bp, Zea mays
  Clone ID: MRT4577_77760C.1
tcttggctgtagccatgcgccagcgaaaagctttgatctaggcgaaagttttttagacccaaaaagattgtggtatcgatgaaaccatggtttaaaatacaaattttctaagtagtcttccaaactcctttttttgtctaaaataccatatatcctcaaataccatagtattgtcttcgaactagaaaaatactatggttgcaaacggaccctgatatgttgtcatacttaagacatgttctaaacctttaaaactaataattagcatctagctaagagatttagaatgagtcagataatagaacaattaattattagttatatctcttaaatagctattagttgttaactgctctaacccagctaaaaccatctaacaatttattagctgactaataattagctctagaagtctaaaacgatctaaatttagaatgaaaccaatagtatttagt

SEQ ID NO: 160287 - DNA, 206 bp, Zea mays
  Clone ID: MRT4577_77761C.1
tatctatctccttgctctcatccaaatcattcacgtcttcatttcaatccaggggtatggttatccttgggacgcggttcacctgtgctcattttacagccgccctccgcccaacagcagtgcacaccattctctcaactcggatccccaagccctggccttcagctcttgccacgggatacattctctgttaggacctacacccg

SEQ ID NO: 160288 - DNA, 557 bp, Zea mays
  Clone ID: MRT4577_77762C.1
ggacaaaaggacgggatttttcctggccaaaaggggaaacaacaaaactccccccatgttaggtttcttgggccccgcgctccaaaaaatttacctaaaaaaaacatatttttttggggcccaacaaacttaaaaaagggggggggggggcacattgggcgggtcccaaaaccaatcgggggggccgttttgaaacgaaggaggggggcataaaaaaccattgccactcatattggggttaaaaggaacctgccccccaaaagggttggacccccttgaccttgactgtttgggggttaaaaatggggagctcccatcgttaaacccggggggggaaaaaaaaagcccatggccccttggcaaaccaatcgcataaaaatccagggggtttccccccctttttactgcctttgggaaaaggggtatcccccccaaagttttgaaagcttgttgaaggaccttgaaattttcacgaatcggctccctttttagggttatccaatcaggttctttgaacaagccttccaaaaaatcatttctataaagttttgttaaaa

SEQ ID NO: 160289 - DNA, 291 bp, Zea mays
  Clone ID: MRT4577_77763C.1
agcaaatccagtgggtccgtactcatctgcttcacctacgcgctccggatacgggggaacggtgctctggcaaccgggctgaagatgtctaatcttcctcttcaaatcgacacataaaggatgcagattagtttggttcgcgacaaatttattttggtcggagtagacccgtccattaactaattattcgtactggatttaaggggctactattttgaaggtgtcttctccaggaaatggtcacatccctaaacgaactggaattgaagtcgccatttaatgctggtacct

SEQ ID NO: 160290 - DNA, 411 bp, Zea mays
  Clone ID: MRT4577_77764C.1
cccacgcgtccgcccacgcgtccggaaggagatcccatctgaggtggtttatgagggtgagaaggttagtattatctatgccatcagggtagagttcctatcgtttataatgctatgaatgttagtatgttacactttaaaattaatgttgcctcaatgcctttgtcaccttggtgctatgttgatgttcctccttgatatgccattggtaaaactcaagaaccaggtatccctgcatattcctccttgaaattctgggctccaaaatctttgtaagttgtctctatcacccttgctgccatgtcagcagaggatctcacattcaaatctttaatgcttaagaaggatattaattggtctatcataaaaaaattgtgctcctgaaataacaccttgatttccttggcaagc

SEQ ID NO: 160291 - DNA, 480 bp, Zea mays
  Clone ID: MRT4577_77765C.1
atctagggggggacaggcaaacctaaggggggcgctcggccgctcccaaccccagcctgagatgtgctctgctctgcttctagccatggcggccctaaacggtcttgctcccgctgctgctctccctcttcctaggctcacattgctgtacccaagcggcacaatgccaagacctacggtgctggaggcgcgtataccccaccacccgagctcgcagacccaagagaagtcatacttctccccagccctgatcaactacacagaaccgtcacgagaagcggatgaagggcacaaacgtagtggccgcgtatgccaacgcactaactgccatcacctgccccgactcgaccatcaacactctgacgggcatatccgagcatgtctacctaccgagcttccacgccagcgcccgtgcgcccgagctcgactacttccacggctgtgcgttcgtggcggagtctgtgttcacacccatctacc

SEQ ID NO: 160292 - DNA, 368 bp, Zea mays
  Clone ID: MRT4577_77766C.1
tcccaacccaattctctaagccacaaggatggcccacacaccattgttccattcaaaccaatttgcggtttaaccccacaagcttctgcaagtggctctgcccctgcaggtgccttcaccgccaagaattccccctgaaaccccccacgcgtgacacacctagggtctgaacattccctgtcatcgagggctcacttgtagatccccaccaggaaaaggccatatagaagcgcggagccccccgggatgctgcagacccccgagaagcaccccgccggttcaagcccgtacgccaatgacgcaggtatcatcagcttgcgccttccaccaacaagcatgggcggcacaccggcgccgccactgatccc

SEQ ID NO: 160293 - DNA, 473 bp, Zea mays
  Clone ID: MRT4577_77767C.1
gattacctaacaccttttatttatttgttttgtaagttggggaccgaagagaagggggcacataactaaataagcatccagggttggacccctgtagttaaaaactcaacagaaaaacaaggaccaaatggcccttgaaggatgtccagggaagcggttcacggggggggtcaaaactggcaggtaaaattaaacccaaaaggccaaaagggcttcccggggggggcaaagaaggccaggtaaaactaaagaggcacatcccctaggtttaaccccttggaggacttggggaacaaggacttgggaatgggcggggtgacacccccccctgcgaaggggcccttgatgaggggggacaattcttgtttccaagaaggggtatgccgaaatggggaggggggaatcacttaaacttaagaaccttggtagaattccaaagcaggttcaaaacctggagggtaaaattcccaaag

SEQ ID NO: 160294 - DNA, 272 bp, Zea mays
  Clone ID: MRT4577_77768C.1
gctgacggggcgttttttattggggcgccacaacctttggcaggcatacccacatgatgtcaccaggaagttccccaaacaaagcattacactcaaaccttatttatacaccgcatattaccactttcaggatatcgtttacaaccaaacaatctaaccagggacacagtaactgcaggttcataagcccttattcagacagggcctttacagtttgacgccaggaacatgaacccacttcagctgcaccacaatgaggccacttttgacct

SEQ ID NO: 160295 - DNA, 366 bp, Zea mays
  unsure (1)..(366): unsure at all n locations
  Clone ID: MRT4577_77769C.1
gaaaaaggtgatcaacctcctttgtattttgcagctgatgatcttggatacgaggcagcattttttgttgggcggctngngatgggcgccttcaggatagctttggaaagcatcttcaatgaaataaatgatcatccactgaagtatacatcttatgggaaacctaatccatttgtgttcaagaatgcagcaaacatacttgaaaaacttgttatgagtatgtatcctaattcacagacaccaatggaaggaaaagattatcagttttcaactatttacatggttggagataatcctaaagtggatatcaatggagctatgaaagctggccacccatggtcatctgttcttacaaagacgggtgtt

SEQ ID NO: 160296 - DNA, 398 bp, Zea mays
  Clone ID: MRT4577_7776C.1
gttcttgaatattaaaccggccctattggtttaactgtttttatgaccaggctccgccaatctcgggcctcctgtggttagttccacaatggaacgacacttaagtgttacatctgaccagcagatggggtatagaaggcccactcttgtatctaaagttaaaatgaaaccaaatacaccttccaatcacacaaacttgtacataataccgtcacactgtgcaacaacatggtgcgaaaatggttgaaaccataacgaaaagaaaatctttggggtaatgaactaaccccaacacaaacgtgtgatatgcctacaatacaaatcctaatgcccgctacagtgtttcggtatcatggagataccacacttatggccaagtatatatatccatatctgtg

SEQ ID NO: 160297 - DNA, 473 bp, Zea mays
  unsure (1)..(473): unsure at all n locations
  Clone ID: MRT4577_77770C.1
gtccggaattcccgggtcgacccacgcgtccggcaggcgcacggggcggggacaggcgacagcggcgcggaacgcagagcggcgggagaggagcttgggctcctggtctccgctgccgccatggctaccgtggacctggagaaactgcggatgtcgggggctggcaaggccattggagtgctgaccagcggcggtgatgcgcaaggtatgaatgctgctgtcagggctgtgacccgtatgggcatatatgtgggggccaaagtcttcctcatctatgagggctacgagggccttgtggaaggaggcgagaacatcaagccagccaactggctcagcggttccgatatcatgcagctgggtggcaccattattggcagtgcccgctgtaaggccttcactacgagggaaggccgcctggctgcaggctacactctgctccgacgcggcgtnaccaacctgtgtgtcatcggtgg

SEQ ID NO: 160298 - DNA, 536 bp, Zea mays
  Clone ID: MRT4577_77771C.1
tcgggtacatttctcaaacaaacaaacaggaacaaacataaaataaaaaaaaaattaaaaaaaaaaatatataaaaaaaaaaaaaaaaaatcctttttttaaaaatattaaaaatattttttgttcttgcccggggggcctttttaaaggggggatttttgcggttttccttccccttgggggccgtttggccttccttttggggggcccttttcgccttttggggggtggttttccatttcattggccgggtttttccaccgccgggcttgggaaaacccttgggtttccccatttttttcgctttgcggcccttccccttttccccggttggtttttttccaaaggggcccgccccgttcgcctttcccaccattggccccccctgtttggcaattggcccccccttttgggggcccttttaccccggggggggtgggggttccgcccagggtgccctttccttttgccgggcccttagcccccgtttttttggtttttttcccttcttttttcgccccttttgccggttttcc

SEQ ID NO: 160299 - DNA, 509 bp, Zea mays
  Clone ID: MRT4577_77772C.1
ttggccggggctattcgtgtcctggtatccgtagtgagcttgttccttccaggcaaccaaaaagctagttgccccgtcgctcagaggaagaagagagcagaggagggtggctcgtacgaagcagaccgctcagcaagtccacgggaggtaaggaccctcagacgcagctcgccaccaatgcggcgaggaagtaagtgcttattactggatgtttaaagaagcgggagagttacaatacccactccgttgagcctctcgagatctgtaggtgccatgaagagcactgacaatgctgatctctgacgatgcccttgcggaaagtgatgcgtgagttcgggctggtctttacacagacgtgagactacagagcatgccgtgttaggtcttactctgtgccacatactatacttatgaactgtctttagctacgattttctataagtcgttctcgatcagctctgtgttgcatgttggctactcttcaacttatattctgttatgcttggttt

SEQ ID NO: 160300 - DNA, 248 bp, Zea mays
  Clone ID: MRT4577_77773C.1
tcgaaccacaaaccctatcttcgctcgttgcggaggtggcggccagccgcccatggcgaagtctctgcgatccagaggcgagaagcggctatcgacgttgcgcctgcagatagcgaaaccgttctacaacaagaaggtggccgttaagctcgccgcgcaggctcgctgccctagctgctgtcccgctcccaagtactctggcccccgtgatgctaggatgtgggaacctttctcgcagctagcttagg

SEQ ID NO: 160301 - DNA, 1098 bp, Zea mays
  unsure (1)..(1098): unsure at all n locations
  Clone ID: MRT4577_77774C.1
cccggaggtgggactgggaggcaccgtgtcgtcgtcgtcccctttcccttctctactccgccgccgctcgctcgccggtgaagagcaaatgctgctgctgttacggcagcggctctgttggcgccgcgtatctccgacttacctcgcgcctttgtaggatctgtggagactcgtgagtacgtgacccccacggtggatgaggataggcgggcctcgtccggcagcctgtgctctctgggacgggaggcagagctggcaccagggttatgtccactgtccaccttcgaatgttgacattacattacatgtctacactttcaaatttaagagagagcacgaattgaggccggcccaggtgaacgctgctgaagctgctgctcaattaaaactaggggaacagatggggatgaagcgcgagcaagaaagaaagaaaggctgcacaactggcactgtatgaagaagactgttgatattgacaacagtcaacagccactttctgaagggcctggagaacttgtgccaaaagtaacaatggaagtttgttcatgggattgagttgacacagggcttagggagcccactgactggaggcacttagcttggaggcctgttcatgaagaaagatatcgaggaagacgtcgaacatgaaatggaggacagcgtgtcaacctaccagaatgctgatgtcggggaaggagagatcagctgctgtcaatagtgtacctctctctattccaactgtgaacctgggattctatgatcatgtgcgtgctatgtaacctatgctgccactgtgcaacgtcacaagtcagcacatgctgcacgcctgcactaggatgtctagcgtatgctggacagctggagtacaatagttgggcgttgctgtctgtttttgtggttgtcatgtacagatgtgctagtgctaatgtatggttgtaggtgttccaggtctgtgtaaactggacatcctgtaaagaaggtaaaaaaaaaacaaagaatagtgagatatccatctatactatagttattatgtattccatgtatgtggtttagaagaaaaaaaaaaaaaaaaaagcggccctcngagctcccagcttt

SEQ ID NO: 160302 - DNA, 368 bp, Zea mays
  Clone ID: MRT4577_77775C.1
ccccttcccaatgcttgcacagatatgcatattctggggaagctgctgacgatcactatgatgaatcgcaatctctgaccacttgatatggcgaactagggatgggaaagattgaccaggacagaagtgctggtgccagtatagctttgcgcttataagctgaggctgaggaggacaagcggggatcaccattgcttgttcctgatgcccgctatgtcccaaactcagtcaatattgcgcaccagccatattgcgcgattacttcttctacaagctacatgagagtgatgaacaagtgctcgctattgtgcacatgctaactgtatttgatagtgacggattaggatttctaatccagaggctacaaa

SEQ ID NO: 160303 - DNA, 694 bp, Zea mays
  unsure (1)..(694): unsure at all n locations
  Clone ID: MRT4577_77776C.1
ctttcaaattaaagaaccgaatgggccggcccggtgaacgctgctgaagctgctgctcaattaaaactaggggaacagatggggatgaagcgcgagcaagaaagaaagaaagactgcacaactggcactgtgtatgatactttctgctcaccattttcttgcctgaaaaaaaatgatatgcttgatgtcacgttatggttatttatgatgaagaagatgaagaagactgttgatattgacaacagtcaacagccactttctgaagggcctggagaacttgtgccaaaagtaacaatggaagtttgttcatgggattgggttgacacagggcttagggagcccactgactggagacacttagcttggaggcctgttcatgaagaaagatatcgagaaagacgtcgaacatgaaatggaggacagcgtgtcaacctaccaaatgctgatgtcggggaaggagagatcagctgctgtcaatagtgtacctctctctattccaactgtgaacctgggattctatgatcatgtgcgtgctatgtaacctatgctgccactgtgcaacgtcacaagtcagcacatgctgcacgcctgcactaggatgtctagcgtatgctggacagntggagtacaatagtgggcgttgctgtctgtttttgtgggtggcatgtacagatgtgctagtgctaatggtatg

SEQ ID NO: 160304 - DNA, 222 bp, Zea mays
  unsure (1)..(222): unsure at all n locations
  Clone ID: MRT4577_77777C.1
ncggccgggagatcctacgaatgcgagcccgtccaacacttgaggcctcgagcccgcctctccctcctcttcctctcacaccaccggnatacccatgggcgaagtacgngcgagggcgaccaagcggtgngatccgtggagagagcgcgcccgatggcaccaacgtccacaaatgggcacttggggcggagcgcgacttgcatccgagtggtccccgcgcgc

SEQ ID NO: 160305 - DNA, 367 bp, Zea mays
  Clone ID: MRT4577_77778C.1
ggatgtacgagcgaggattgaggccctggggggaaaggtcatccaatggaatggctaccgggtctccggtatacttgctatgtcaagatcgattggggaccggtatctgaagccgttcgtgattccaaaaccagaggtcacggtcgttcccagggcgaaagatgacgactgtctcatcctcgcaagcgatgggctgtgggatgtggtgacgaacgaagaggcatggccaaagaactgctgctaggtgctagctggtcgtccgcacgagacttgaccggcccacagttttttttttgggtccgttgggcgtcaagaattgtacatgtatatatggtagatgcgttttccgtggagggttatggcgctc

SEQ ID NO: 160306 - DNA, 851 bp, Zea mays
  Clone ID: MRT4577_77779C.1
ggtccggaattcccgggtcgacccacgcgtccgttcagcctgacaggaaggatgaacgagcgaggattgaggccctggggggaaaggtcatccaatggaatggctaccgggtctccggtatacttgctatgtcaagatcgattggggaccggtatctgaagccgttcgtgattccaaaaccagaggtcacggtggttcccagggcgaaagatgacgactgtctcatcctcgcaagcgatgggctgtgggatgtggtgacgaacgaagaggcgtgcaaagctgcgcgccggcaaatccaagtgtggcacaagaacaacggtgccgctggcgcatcgtggtcgttgtgcgacgagggtgatggatccaccaccgaccccgctgcccaagccgcagcggattatctcgtgagggtcgcgctgaagaagggtaccgaggacaacgtcaccgtcatcgtggttgacctgaaacctcgaaagaaaagctcaggagcaactcgtagcatcgggcgtgctgggtccatcacagtagagctgagctgaccatggcatggccaaagaactgctgctaggtgctagctggtcgtccgcacgagacttgaccggcccacagttttttttttgggtccgttgggcgtcaagaattgtacatgtatatatggtagatgcgttttccgtggagggttatggcgctcaaccccgctcttgtttctgttggctaaaaatctctccaatcggcatctctaccttgagcccccctggcacttagtatgcccctaatgctgtatgatagccgagcttgtaaagagccatgcggctgcactaaaattaacgcgctgttaccttcatgattcc

SEQ ID NO: 160307 - DNA, 259 bp, Zea mays
  Clone ID: MRT4577_7777C.1
atatcaacctttattgttgcatagacagcatctacaccctgacgaggcgggtcagacaacttttctgctaaaaagacccttattgactagcagaaccatatctccgtattcttcaggggaaaacatgacctttattacaaaaggtgtcatatgaccccaccagtactgtaacaaggatggatcaggaggctcatccttgaactccttaggcatcattgctaatgcttttcatccctggcctccctatcctttcttgata

SEQ ID NO: 160308 - DNA, 365 bp, Zea mays
  Clone ID: MRT4577_77780C.1
tggaattctcgacctcactactctatatcggctcatcatgtgagagtgtgccagtacgacagcacacgcaatggacactctagctctgatgactataccttcctctgtccccgacgtcggcgctcactacctcgctctcacggtatcgtacccgcgccttgaataacttgcgacttataaatgtaccttatatcactggtatcttgcattgattcatatactctataattataaggttcccttgaatgagcctgcataattgaacggcttcctctgaatgacttgcgcgtcacgaattctgccaaagaaatttatgtaacatacatgttatctagcaacgtcgatccatagtgcgtattattcgg

SEQ ID NO: 160309 - DNA, 1931 bp, Zea mays
  Clone ID: MRT4577_77781C.1
cgagggacgactgacgagtctgggagacctgcccgctacggcgagccccccgggccaatcgcctcctcgcacctcgctcgcttcttccccttctccctcctctgtcctttcacacgtactccagcttgctcttttcctcctcccttcggccctcgcccatccgcctctctccccacgcgcgcgcgcatcgccctcccacagtccccccccccccctcctcatcacccacccctagcaataccacactcctactgcaagacccgcccgcccaccgcttcctcgcatctcgggcgcgtgcctgcctgctctcgcggacgtggtggtggttctccggcgccgtggtgggcgggggacgagcgggtgggggaccggcgggtatttttggttgctgtggtttcgtgatggcggcggcggcgatctgcgtggaggacgaggcggcgtgcgccgccgcggaatgcgcggggatcgggaatctggatctcgctgccgccggcgccggggctggcggcaagaggagcgtctatctcatggactgcgcgccggtctggggctgcgcgtccacgcgcggccgcagcaccgagatggaggacgcctgcgccgcggccccgcgcttcgcggacgtgccggtgcgcctgctcgccagccgccgggacctcgaccgtctgggcctcgacgctgacacgctccgcctgccggcgcacctgttcggcgtcttcgacggccacggcggcgccgaggtggccagctactgccgggagaggctccaggtgctcctgaggcaggaactgaggctgctcagcaaggatttgggggagacaagcgaggccgacatgaaggagcactgggacgagctgttcaccaggtgtttccagaggctggatgacgaagtgtcggggcaggcgagcaggctcgtcggtggcgtccaggagacacggccggtggccgccgagaacgtcggctccactgcggttgtcgccgtcgtgtgctcctcccatgtggtggtcgccaactgcggggattcgcgtgttgttctctgccgcggaaaggagcccttagagctgtcgattgatcataagcctgacaggaatgtagcacgagcgaggattgaggccctggggggaaaggtcatccaatggaatggctaccgtgtctccggtatacttgctatgtcaagatcgattggggaccagtatctgaagccgttcgtgattccaaaaccagaggtcacggtggttcccagggcgaaagatgacgactgtctcatcctcgcaagcgatgggctgtgggatgtggtgacgaacgaggaggcgtgcaaaactgcgcgccggcaaatccaagtgtggcacaagaacaacggtgccgctggcgcatcgtggtcgttgtgcgacgagggtgatggatccaccgaccccgctgcccaagccgcagcggattatctcgagagggtcgcgctgaagaagggtggcgaggacaacgtcaccgtcatcgtggttgacttgaaacctcgaaagaaaagctcaggagcaactcgtagcatcgggcgtgctgggtccatcacagtagagctgagctgaccatggcatgtccaaagaactcctgctagctggtcgtccgcacgagacttgaccggcccacagttttttttttggtccgttgggcgtcaaggattgtacatgtatatatggtagatgcgttttccatagagggttatggcgctcaacccctctctggtttctggtggccaaaatactctccaatcggcatctctaccttgagccctcctggcacttagtatgtctgtatgattgtcgaccttgtaaagagccaagcggctgagacggtcactaaaattaacgcgttgttaccttcacgattcaaaaaaaaaaaaaaaaaaaaaaaaaaaaaaagtactctgcgttgttaccactgct

SEQ ID NO: 160310 - DNA, 494 bp, Zea mays
  Clone ID: MRT4577_77782C.1
acaccatcttggacgcctgcattggcacataacagctacctacgaccactacagcagctcgggctaaccttccttgctacttacagtaacaaccagcagtttctttcatccaaccgactacactgaacgctgtcggttatttattggaaccaccatcaccaaccatccagccagctaccggctacctacaccaacaacaacttttcttattaacccaagtgagcgtactgcactcctgtgtatatacagagcagcaaacactaataccatatacacatctatgtggagagcaccgcgctctttttgtgacacacacacaggtggtggctttctaccaacactgtgcggataaccgcgaccctcttacacaagtaccacaagcggtgatctttgcccatcgcgctgagacagacccagcggtctactaccaacacacaatagtgggggcgccctcttagagatcgcatgagtaatagaacacaataataaagttt

SEQ ID NO: 160311 - DNA, 161 bp, Zea mays
  Clone ID: MRT4577_77783C.1
tcctgcaggctccggtgcggaactcccgggtcgacccatgcgtccgactggctctagctcgctagcggccgatgtacaggatccaatcttaccttcgcttgcatgccacgtcatagctattctatagggtcacctaagttgaataaactgtccgctgctcc

SEQ ID NO: 160312 - DNA, 377 bp, Zea mays
  Clone ID: MRT4577_77784C.1
tgtgtttgaaggggcggtaggcgctcatcatccacctccgccgcaccgcggcggtgtcgccaggcgccagcaggtccaccacgtccgccgcgccgctccgagccgccagcgcgcggtcgtcctcggcgccccagcacgcgtccgcgtcgcacagcgccaccttcccgacgcggacgcctcgctgctccagctcccgggcgaggtggtacgccaccaggccgccgtagttggcgcccacgaggtgcacggtccggccgccgaggcccgggacgtggccgccgcccgcgagcagcgcggcgagcgcggcggcctggaacgcgtcggaccgcgcgggcgcgcgcgtggcggacgcgccgaaaaagagcagcgccggcacc

SEQ ID NO: 160313 - DNA, 545 bp, Zea mays
  Clone ID: MRT4577_77785C.1
cttccttcttccccgcggaggacggagcagagcagagcgacgcagcgagcacagccgccatggaccgcgtgcagctcgtgctcctgggcctccccatcctcctcttctgctccgacgtcgtcacgctcttcgcgccgcagccgccggcggcccccaagccccaccgccatccccaggcggcctccggcgccttccagcctggcgactcctcccccgacgccgccgattccgcgcagttgacggaggcgcaggtggatggaccaggctccggcaccaccgtcgagctgaagttctgcgcatcctgctcctacaagggaaatgcgatgaccatgaagcgcatgctggatacctcatttcctgggattcatgtcgtcttggaaaactaccctccacccttcccaaaacgcgccctcggcaaaatggtgccttttgttcaagttggagcgatagcaacattaatggctggtgatcagattttccctagatttggaatggtaccaccctccgtggcactattcactgcgtgctaataggtttggaaccat

SEQ ID NO: 160314 - DNA, 464 bp, Zea mays
  Clone ID: MRT4577_77786C.1
gggaaaaaaccatgggcccaggccttataacactgacgaccccgggacataaaagggccacatggccgggttggtcttattacaggcccgagcataacgttgctactataaaaaccaggcctgatgcaccccatgcctgaaaccactggtttataggaaaaccaggattatactgggtttagcacagccacaccctggtttcaagccccactactaggagtataaaattggagggaaaaaagcagggagcccaccccaaccgagcacaagcagggggcctgccactgccaggctttcccgccgccctttttataaacaaacaacagggggggctggcctaacaacgccgggcgggtaacgcgggggggggggggtttttgacgtcctcgagcgggcggaaccacaccttttggtccaaaaccgggcctcctgaagaatccgcgcccggggtccggggcgccacc

SEQ ID NO: 160315 - DNA, 442 bp, Zea mays
  Clone ID: MRT4577_77787C.1
gccttcttcagtcatgggtcggtggaacgtgtgggtggcacatttgttgcaactgtcagaaacctggccgccatatgtgctacacatgctcctttacattctgcatgacatgcttgaaggaagccatgattaactgtgtgagtaaataataagggcttatgtgatgcatgcatgaacactgggatgatcattgagaatagagaggaggctgcggacccagaggaggtggattttgatgacaatagcaattactggtgtttgttcaaggactattggataaactataagacaaacttgacgacgacagttgaggaaatatcagcagacatatctccaaagagtggagagatacactgatactaatgatgaagctaattcagagagttcatcagggcgctcattagggagcaatacatcaagcaatacataaaagggcggccgc

SEQ ID NO: 160316 - DNA, 399 bp, Zea mays
  Clone ID: MRT4577_77788C.1
gttgcctgcagtttccatgcagagcacaaaagatcagctacccagagaagcaatggcgatgggtcctgcattctgcgtcgcgctgctgctgatgctggctaccgccgctgccaaccaagcggcgccgccccacgccgtcacgtcgtgcacctgcaccactgaccttcatcgactcctcccgtgcctgccctagatagagggcaccgtcaccgtgccgggggacacatggtgcgccaacctgggcagtatggctcacgacgagccgaactgcctgtgtcaagctctcaacaaccccagcacggaccacgtctgcaccaacagagacgctcgtgatggccatgcctagaatctgcagctaaagactcctgccgacaccggctcctgcgcaggaggctgtct

SEQ ID NO: 160317 - DNA, 400 bp, Zea mays
  Clone ID: MRT4577_77789C.1
gcagcaaagggatccaagaattgatcggtctcattggaatgatgatgacagaagtaagagacaattgctcctttggataattagaccttgggatcccggactgcattacatggcatgtggttgcttggggacaagcaacatttcgacggggcggtaatgtaacatccggattctgtgatatgtgtggtctgcctgaactctgaagacggtgtgcaagtataggtaaatgaagtctgaacttctgaagattttgatgagcaagctgattgggccatattagttgtgggccggaataccggtgtgtattcatataagtactaagaccatgtactcgaacagcagaaaggaaatattctagactttggttaccaaacaaagcatcttaagttgctttttgggg

SEQ ID NO: 160318 - DNA, 2666 bp, Zea mays
  Clone ID: MRT4577_7778C.1
gccgcattcagctcctcgttttttctctctcctctcttcgtccccgcgtggagaaggagagagagaaacaggggagcgcccccccactcctcttcgctgccaagaaaccaccattcctaacggatttctacccagtcttctttaggatttccgattcggttctccggtgagagggtgggaattttattttcctccgctgcaaccggtgcaaacatttcgaatccctccattgcattcctctccgtgcaatcggccattcatatgttccttggctgcattgaggcatcggtacgcgaattttgatgtgagctgaccagacatggctgcgaaagacggctcgggatcacaggatctgggggggcacacgttctggcccatgctgtcctacgcttgcggcgagctgtgtgtgatcgtactgctctacgtgtctgccctggcgtcctatgcggccacgaggctggcgcgcgtctgcgggctccggccgccctgcatcctgtgcgggaggctggaccacgccctccacgggaagccatggttctcttcggacttggtctgtgccgcgcatcggtctgagatctcgtctctggctcactgcaagacccatgaccagcttgttgcatgctccggcgatctctctcggcctacatcggccaggtcaagaaggttgtgttcttgttcggatccactcaagaatgctcgcggcgcgcagaagcattctgaagcagccaatgctgtggagtgttgggatagcagtgtacctgcagatcatccaaatgagaagacttttgtggtgggtattgaggaagtccatgaatcagatggttcgccaggctcgcatggacaatctacaaaggacagcgccccttctgcgaacggtggtggggcagcaaagagcaactacatatcgcccgcaccaacacgcatcgctgtcgaccgcaacggcagtgtgaagaatgcttccgtcgctagggccaacttgacatctcctcggccatcagagatcatctctgccagggacagcaattccacgacccagcaagaagtgaaggcgctcctctctcagatgtcatctgtgcggggcctcgatggttcttccagtgaaggatctcctagccccggtaccagcgctccgaacgaagagagcaaccctgcgactgcgagcaagaggccgtatctcgagaggaactactccgtgctggaaccttcagaagggagccagctcgccgacgacgtggaaggggaaagctctctcgagaacgtgaagaaacagcttgagctcaacaagaaggcaatggccgctctttacaaggagcttgaggaagaacggagcgcttcggcggtcgcggctagccagacgatggccatgatcaataggctgcaggaggagaaggctgcaatgcagatggaggctctgcagtacctgaggatgatggaacagcaggctgaccacgaccacctggcgattcaggacctgcacgatttgcttacggagagggagaaagagttgcttgacttggacgctgagctcgcgcactgcaggaggctcctgcagaacgatccgttcaacggcgacggacgtaataatggcgctgacacagtgaacacaacgattgacggcagaaatccggcggcgatcgaatgcttggatggcgcggaccttgtggggagcgccatgtcgcttttcgaagacgagaaggcgttcattttggagtccttgagcagactggaggaaaaccttggcattttcacaaacaggcttgcttccggtgacgccagaggtagtcaagaagacgtgctgtttgaagagcatgagcatacaacagctgatgggtctccttccaacggtgacaagttgagcggcgtagcgaatcttaaggctgggatttctctgctcaatataagactgagggcacttgaagatgaccaggagtttctcaagcaggtgttgagttccctccaatgcggtagtgatggactgcagtgtatacaggagataagcggccatctagcagagttgcgaagagttgtaactcgctaaggaaaatggttttgccccgagtccacactgttaggtcatcgtgaggtcttctcatgcagcagactaacgagggtgcttccagtgagtgcccacaatcccatctatctgaagatggatgccgttgcaggaaatacccatgctcttcacttctgatcgggctcaacagcagaccaaaattttccatctcttgcacttgagttcctcatcgacatttgcagactactgaagcagatggaactctaaaagaagtgctgaaagagacgaaccatctcttgtatgtgatatggtggttgttgagaaagtaggagcaagcctgtaactgtagatgtaaccaaccttgatggttcctgccaaggaggagttaaattgtacatgatatatgcagttgacgtaaagtcagcgaatatctccttattctgggatgcaaggtgtcatgacaatcaaatttccttgtctccaaccttccaaatttccaccggctggcgttctgtagcttaacactccttgatggactaaacatcacctttaaatcacttgaaagatatcagtccactaaaaaaaaaaaaaaaaaaaaaaaaaaaaaaaaaaaaaaaaaaaaaaaaaaaaaaaaaaaaaaaaaaaaaaaccc

SEQ ID NO: 160319 - DNA, 775 bp, Zea mays
  Clone ID: MRT4577_77790C.1
aatccgtccacatttcgagcttagatcacttaccaatctacttaggccctgttcggcactggcccagctccgcagaatacgaggatctgcggagtacctcttcggccactccataattttaaactgtagctccggccgctccgggagagagtcgaggagtggagagcctccgaacgggcctttagtagacatccttgcttctgaagattcatggcgatggggtctttcctgatccctatatccctgctggttctcgccgcgagctcggccgtggcccagctggagatgggatactaccgcaagtcatgcccggacgtggaggcgatagtccgcgaggagatggtgaagatcatctccgccgcgcccagcctcgccggcccgctcctccgccttcatttccacgactgctttgtcaggggctgtgacgcgtctgtgctgctggactccaccaagggcaacctggcagagagggacgccaagcccaacaagagcctgcggggattcggctccgtggagcgggtgaaggccaagctcgaggccgcatggcccgggcgttgtgtcctgcgccgacgtactcacgctcatggccccgcgacgccgtcgtcctggccaagggaccctcctggcccgtggcgctcggcaaggagagacggcagcgtgtccactgccacggaggcgagcgacgagctgccacctccccttcggcgacgtccctctggctcacccggatcttcgccctcaaggggctcgactcaagggactcgtcgtcctctcc

SEQ ID NO: 160320 - DNA, 287 bp, Zea mays
  Clone ID: MRT4577_77791C.1
gggattgggcattttttacctaaaaaaacaaacaaaaaaaccaacaaacttacaaaaaaacataaaacaatttcctcatgcataaaaacatcatccaccattccaatacctaaatatctcatataaccatgcattaatcccatgataaatcgcctcttaaaacaaatatactcattcttcaatctaaataaactactttcgtactcctaaaccatcgcaccaaaaaatgattacctcctccccaacttgcaatttactcccaattgtgccataaacctaaattcaac

SEQ ID NO: 160321 - DNA, 1019 bp, Zea mays
  Clone ID: MRT4577_77792C.1
cttgaggatcttagtaaacggatcctagagagaaagatcaatgaggagaagaccatctgggagaagcaccaagagaaaatgaaagagaaaaggaagggtaggaagaggggactaaaggacgaagatgatgataaccactacatcagcgatgatgagcctgagaatgatgatgatttctttgcagatgaacagtctgatgaagaacctaagccgagcaaaagcaagaaacacaaggcaaaggcaaaaggcgaagcaaagaggaaaggaaatgatgggaccacagatgagcatttggaacaagaagcaaccaaagatgagttggagctcttggttgctggtgaccaggatactgccaatggtgcaaagggttataacttgaagcgtaaaaagggcaagaagggcaaagaggaatctgctgatgacaaacttcctgacattgaccttagcaaggatgagaggttctcagcaatgtttacttcccacttgttcgcattggatccaactgatccccagtacaagaggagtgccgccttcatgcgaaagcaagctgggaagccaggggtacatgggggcaaatcaagcagagaacctccgctggagggttcgtctctgggaggtacagtaccacctgacgatgctgttactaacaatgatggtcagaaacctgatggttcagccacagagaagctgcaaattttgtctgctgtcaagtctctcaagcgaaaccttggtgcattcaaaaactcaaagacaggtgaccgataaaaagagcatcatttttgttccggctattacacttaatcagtgaaatccctttgttggaaaatggtctcagttatatagtcttcgagatagtttcatggttatgtatgcttatctctgattctgtagacacgcgtccaatctttggattttcagttttgacactatccagattccagaatccaattgagggcctgttttcatttctagtgagataattggtttaatttatcaatttagtcacagcgcttttgaat

SEQ ID NO: 160322 - DNA, 229 bp, Zea mays
  Clone ID: MRT4577_77793C.1
acgcgccgctttgaactagatctcgttgaacattgctttccgaataactgcaacccacgacgggttgcgtactatccggaggcgtggggggttctcactgggagagatattgacactaacgctgacaatctaaaaagcacgctaaatctttgtcctggatacatggggcgctacaaagactctttggcttaagaaacggcatttgagtacgctcagcttgccaagaaac

SEQ ID NO: 160323 - DNA, 231 bp, Zea mays
  Clone ID: MRT4577_77794C.1
tgcgcctggcagctcatgattcagcaaaagaattcatcccgaccgtctgtttggaccatgtgtgaaaatatgggtgctcagaatattgtgttagatgcagaccgatgttagactgggagatacacctgagattattacatgtgaaactgtctgcatggattaattattagagaacagagtgaagtttatgatgatgatgctgccttgatgtagatgggagtttaaagacag

SEQ ID NO: 160324 - DNA, 247 bp, Zea mays
  Clone ID: MRT4577_77795C.1
gcctgaggttgtcgagaagcttgtggcaatgcgggaaggcattccaaaaaaggaagcgaaggaggtaaggtcacaacagatctcacattgtatgcatctgtggtgctgctctgttttcatgaacctatgaacggtcaactgtggtccaacagaaggccgctttgtgcttattgacagatcaggttttttttcccgtatgcttattactagtattccggtcataagattcttactcccagttcgtttc

SEQ ID NO: 160325 - DNA, 882 bp, Zea mays
  Clone ID: MRT4577_77796C.1
ttgggtacctcgaggccggccggggtcgttttctatagtggtgagtattcccgcctaatatgacttctccatcttcagagaagcgacccctgcattcgcgtcttgatactccgatgcgtgctcgattctttgaagctatcgatcggcgcggtgataggactaagcaagacatctacagtgatttcaacatcctaaaagccaccgcctttcgactcctccagcagcgcaatcaatacgggaacctagctgaccgctgctcaaaacttcgtcaatacaaaaaggaacacagggtcattgacttaggccgtccgtgaaagcatccagagaagactacacagcaaaaacgcaatgctacacaacagattactcgaacgaaaagattaccacaagtagaacaccagatttcacattccagtagtactattgaatcatacaacgtcttactccatacccctactactactcacaacccctccccatctccaacccacctaccaagcccccggcgaactcgccacaatctgcgccgcaacctcgcaatcctcaccctgcggcaccaccaccccataccccacattctgcgcacacgccgtaaacccatacacaccgccataaaacccactcccatcgggactcgccttctgcagcaccgccgtcaacggatccacactcgccgacgggcctagcgtcacattgcccgtcctaaacgtcggcaccgccgtagcattcgtaaagtaaaacgtactcctctggcactttgggtttatcaaactcgccgtattcgccaggatccagggctgattgatgatgcgtttccactgggcgagtgtgtaccgcggcgatgcttgggtggcctcgtttacgaattcaggtcaatggctt

SEQ ID NO: 160326 - DNA, 1602 bp, Zea mays
  unsure (1)..(1602): unsure at all n locations
  Clone ID: MRT4577_77797C.1
caccgggccggaaaacccggggcgaccgacgcgnccgcccacgcattcggttcgaggtttaatacacatgcttctcaagctgaggtattctctgatatccaacctctgatcagatcagttcttgatgggtttaatgtgtgcatttttgcctatggtcaaactggatccggaaagacttacacaatgagtgggccaggcacatcaaaagaagattggggtgttaactatcgagctttaaatgacttgttcgacatctctctaagtagaaggaatgctttctcatatgaggtgggagtgcagatggttgagatttataacgagcaagtgcgggatcttttatcaaatgatattgcacaaaaaagacttggaatttggagtacatctcagcctaacggacttgttgtccctgatgcaagtttacatccagtcaaatcaacattggatgtgctagagttgatggaaattgggcaaacaaatagagcagttggatcgacagctctgaatgaaaggagcagtcgatctcacagcattctaactgtgcatgttagaggggtggatctgaagaatggatctacttccagaggatgtctacatctaattgatcttgctgggagtgaaagagttgagcgatctgaagcaattggagatagattaaaagaagcacagtatattaacaaatccctctctgctcttggtgatgtgattttttctttggcacagaaaaatgcccatgttccttatcgaaacagcaagctgactcaagttctacagagctctttaggtgggcaagcaaagacactgatgtttgttcaaattaatccggatactggatcatattcagaaacaataagcactttgaagtttgctgaaagggtttctggagttgagttaggtgctgcaagaagtaacaaagagggtaaagatataaaagagctgctagaacaggtttcatctctgaaagacacaatatcacggaaagatatggaaatcgatcaactcctgaagaacaaagccaaatctccaggttcatcaatagatagaaatgacagtcgccaacagatccggcgactatcagggactggatcaagtgaagccgaatgtgaagataacatgtctgatgatggctgctcagtagcaggaaccgagtattcagtaggtggtgcttcagaggcgacagcagaacggatgcagaaggccccatcaaggatagccaggctattccacacaaagaatggacagcctgcaaactccaaaccaaaaccaagggagtctgctctgaaaccaccaggtcgcacgacatctacaggaggaagccaggcgacaggaggatctttagtgaaaccccctaagaggcggtagagaaataaagattccatcatctaggatttgccatgttgatgggggtatgtgacgatgtcactgtaacgggttcacttgtcatcaccatgatgagcagccgactgtaggctggatgttgtatgagctggacgccatgaggttggtttctcagccctgctgaccatcacgttagttatcgactatgttactgaccctcaaaaaaaaaaaaaaaataaaaaaaaaaaaaaaaaaaaaaaaaaaaaa

SEQ ID NO: 160327 - DNA, 993 bp, Zea mays
  Clone ID: MRT4577_77798C.1
ttgcgatttggatccatcccacgtttcctcctccggcctccggtcacgactcgatctcccgttccaaccacgccatggcagccgccgcctccggatccgccactggcggcgggtcgcggcttgtggatcgctgcatcgacgcggcagcgcgcggtcccgccactgtggaggcctggcgccggcagcgccgctccctggagcgcctcccggccccgctcgccgacgcgctcttacgccgcctcgctgcgcgtcgccttctcttcccctccctcctcgaggtgtttggccggtcagtagaggaggttgatctgagtggatttctttctgtgaattccgagtggttggcataccttggctccttcaggtaccttagggctctgaagttggcggactgcaagaacatcaacaatgacgctgtctggtcgctctctggaatgaacacattaaaggagctggacttgtcaaggtgcaaaaagatttctgatgctggcatcaaacatatagtgaccattgaaagcttagagaagctacacttatctgagactgaattgactgacaatggagtgatgctcatttcttcactgacaaatctaagtttccttgatctaggtggaattctcatgacagacaaaaccctacagtctttacaggtattgacaaaacttgagcatcttgatatatggggtagtgaaactacaaatgagggagcttctgctctgaaatcctttgcaaagctgctatccttggaatctgtgcgttgacacgtgtcaaccatttatcaattcctccaaccacaagctatctaaatatgagcaactgcgaaattcattctatttgtgatgtggattctgaagttcctgttccactagaaaactttattgcctctgcagctacctttggcactgttgataaagtattacctaccattcaaccacgctcactgatacattgggacttgtctaactcacgttaagcacttagacttcttggaaa

SEQ ID NO: 160328 - DNA, 882 bp, Zea mays
  Clone ID: MRT4577_77799C.1
cggacgcgtgggcggacgcgtgggcttatcgaaacagcaagctgactcaagttctacagagctctttaggcggacaagcaaagacactgatgtttgttcaaattaatccggatactgaatcatattcagaaacaataagcactttgaagtttgctgaaagggtttctggagttgagttaggtgctgcaagaagtaacaaagaggctaaagatataaaagagctgctagaacaggtttcatatctgaaagacacaatatcacggaaagatatggaaatcgatcaactcctgaaggacaaagccaagtctccaagttcatcaacagatataaatgacagtagccaacagatccgacgactatcaggggctgctggatcaggcgaggccgaatgcaaagataacatgtctgatgatggctgctcagtggcaggaaccgagtgttctgtaggtggtgcttcagaggcgacagcagaacgaatgcagaaggccccatcaaggataggcaggctgtttctcacaaagaatgggcagcctgcaaattcgaagccaaaaccaagggagtctgccctgaaaccgtcaggtcgcacgacatctacaggaagccaggcgacaggaggaggatcttcagtgaaacccccgaagaggcggtagagaaataaagagcatctggggtttgtcatgttgatggctgatgcaatgcgtgggcgtttgtaaaccgactcggagattgcgctgctgaaacactacggtcaacgggttggtgcgatgcaagggtatgtcactgtaacggtttcacttgtaaacggtctgttgagtatgatggtgagcagccggcttttggtgggaaatgttgttgcgacagcgcaaaaaaaaaaaagcggcc

SEQ ID NO: 160329 - DNA, 651 bp, Zea mays
  Clone ID: MRT4577_7779C.1
taccggtacagcctcccggtcgacccacgctccgcggacgcgtgggctttttttttttttttatattggaagacaccaaacagcattcgactcgggttaccagttgttacaagatgttcataaacaaccagcatctaaacaaaacaccacagctaaaccggacctccctaacttggaacctctcctactagacctcaggaaacaggaatcgcagatcaacatagagatcaaaagacagaacaaggataacagaacgtccttcaacaccctacccaaagagctaagtaaacaggaacgaacttcaagcagcaacatccgaagccttctcacatgttggtcatcaacctcgagaaacaaataacagacactagaacaacctagcttcctagaactctttgatcctctccatcaacctggccaaatcttcctggagctccaccgctgatatctgcagcttctgccattgtttcacatagcccacgaccaccagcctacccgagaagacggttgaaggagaggacgctggaggagggccagccacgtgcgacctgaacggctcggcggcgctccgcggtggcgcggttgcgtcagcggccaagggaggacggtagcggttcggtgggtgtgagcagggtgcagctcgtgcctaag

SEQ ID NO: 160330 - DNA, 452 bp, Zea mays
  unsure (1)..(452): unsure at all n locations
  Clone ID: MRT4577_777C.1
gcgtttttactcctcgcctcctccctccccctccctcctcgacgccggacagncaggaagntngaagatccagcagccatgggcaaggagaagatccacatcagcattgtggacattggacatgtcgactctggaaagtcaaccacgactggccacctcatctacaagcttggaggcaatgacaagcgcgtgatcgacaggccccagaaggaagccgccgacatgacacacaggtctttcacgctcgcctgtgtgcttgtccagctccccgctgaccgcgccacaggtatcaccattgatattgctctgcggcacgcccagaccaccaaccacccccgcactgccattgatgcccctcgaccaccgtgcatttcatccagaacatgatcactggtacctcccacgctgattgcgctgcgccttaccatcgactccaccaccggtgctcctga

SEQ ID NO: 160331 - DNA, 541 bp, Zea mays
  Clone ID: MRT4577_77800C.1
cggatggattgcgtgtttttaatacacgtgcttctcaagttgaagtattctctgatatccagcctctgatcagatcagttcttgatgggtttaatgtgtgcatttttgcctatggtcaaactggttcaggaaagacttacacaatgagtgggccaggcacatcaaaagaagattggggtgttaactatcgagctttaaatgacttgttttatatctctctaagtagaaggaatgctttctcatatgaggtgggagtgcagatggttgagatttacaacgaacaagtgcgggatcttttatcaaatgatattgcacaaaaaagatatcctccccccccaccaaaaaatgtttactttatattacaatatctctcatgattgcatctttactacttgcatactaacagacatgcccagaaaacaaaacatgttgttcttgacaaaaagaaacacttggaatttggagtacatctcagcctaaaggacttgttgtccctgatgcaagtttacatccagtccaactcaacattggatgtgctaga

SEQ ID NO: 160332 - DNA, 302 bp, Zea mays
  Clone ID: MRT4577_77801C.1
tttttttttttttttttttttttttttttttttttttttttttttttttttttttttttttttttttttttttttttttttttttttttttttttttgaggtcccaccggccgggaaatcccagcccaagggaagggccccgggggaggattcgggcccaaccgggtacatccttagctacgggacaaacatttgccggggcaacggttttaggaacctttgccaagccaaaactattaaggttttcaccaaattttgggttaaaatttaggcaaccggcaaaatttccgggcgcttgatcc

SEQ ID NO: 160333 - DNA, 727 bp, Zea mays
  unsure (1)..(727): unsure at all n locations
  Clone ID: MRT4577_77802C.1
agttgagttaggtgctgcaagaagtaacanagagggtaaagatataaaagagctgctagaacaggtttcatctctgaaagacacaatatcacggaaagatatggaaatcgatcaactcctgaagaacaaagccaaatctccaggttcatcaatagatagaaatgacagtcgccaacagatccgacgactatcagggactggatcaagtgaagccgaatgtgaagataacatgtctgatgatggctgctcagtagcaggaaccgagtattcagtaggtgctgcttcagaggcgacagcagaacggatgcagaaggccccatcaaggatagccaggctattccacacaaagaatggacagcctgcaaactccaaaccaaaaccaagggagtctgctctgaaaccaccaggtcgcacgacatctacaggaggaagccaggcgacaggaggatctttagtgaaaccccctaagaggcggtagagaaataaagattccatcatctaggatttgccatgttgatggctgatgctatgcgtctaaagcccactcggagattgtgctgaaagacaacgggtggtgcgatgtaagggtatgtgacgtatgtccctgtaacgggttcacttgtcatcaccatgatgagcagccgactgtaggctggatgttgtatgagctgctggacgccatgaggttggtttctcagccctgctgcccctcccgttagttttgcct

SEQ ID NO: 160334 - DNA, 264 bp, Zea mays
  unsure (1)..(264): unsure at all n locations
  Clone ID: MRT4577_77803C.1
ctcctntgcctgctgggggcgggggggccgccagtccctcggtggcctgcggctgtttctgnccctcctcctcccgcctttgtgcggcngcgcgcgnttccttttttttttttccttnccctgaggcatctttttggtttgtctgggttccctccntgctggctcgttttctgagtcggtggataaacgatgctcctcctttggaatctggatcgctgtttgttggtgttgcttttcgcggctctctcgttcatttggtttgtt

SEQ ID NO: 160335 - DNA, 344 bp, Zea mays
  unsure (1)..(344): unsure at all n locations
  Clone ID: MRT4577_77804C.1
cgcaccacatgaatgatgtgaaatgatctatacccgtgaatctcaggctcagtgtagaatgcttccttctcggagncaccgcatgacgccctcgagggggagctcgaagcacggtgggttnnnnnnnacnaagccgtacttcatctactccttcactgaactgctgtctgctgcatgaacccacatagttatatccccggtcactcatcatnannanncggtcagagagggggcgactccacctctgcgccacctgaggcgacagcgtaggaaggcccagctgaaactccgccaggcacgcacaataaccatcagagcgctggcgatatcgcacatctcctact

SEQ ID NO: 160336 - DNA, 451 bp, Zea mays
  Clone ID: MRT4577_77805C.1
attctaccctcaactacagcgagcgcccttcggttcctccgcctcggcccatccacccacgtcgacgacgagctctcccctctcgtcccgtgtcctccccctcgcgacgccaccgccgtgtcgccggtcgccggctcgccgccccaggtaggacgtagctagtcaccccgcctggccccgatggctgaggagctggtgctcgacacggcgatccgggactgggtcctcatcccgctctccgtggtcatggtgctcatcggcgtgctccgctacttcgtctccaagctcatgcgctccccgccgtcggcctccccctcccccgaccccaagaccgtcaaggaggggcaggtcgtcatcagggcgaggaacctgaggaacggcgcgcagttcatcccggccaaggccttcaaagtccgcaagctttattacaccaacggggaagccggattgc

SEQ ID NO: 160337 - DNA, 699 bp, Zea mays
  Clone ID: MRT4577_77806C.1
cccacgcgtccgctcaagttgaagtattctctgatatccagcctctgatcagatcagttcttgatgggtttaatgtgtgcatttttgcctatggtcaaactggttcaggaaagacttacacaatgagtgggccaggcacatcaaaagaagattggggtgttaactatcgagctttaaatgacttgttttatatctctctaagtaggaagaatgctttctcatatgaagggggagtgcaaatggttgagatttacaacgaacaagtgcgggatcttttatcaaatgatattgcacaaaaaagacttggaatttggagtacatctcagcctaacggacttgttgtccctgatgcaagtttacatccagtcaaatcaacattggatgtgctagagttgatggaaattgggcaaacaaatagagcagttggatcgacagctctgaatgaaaggagcagtcgatctcacagcattctaactgtgcatgttagaggggtggatttgaagaatggatctacttccagaggatgtctacatctgattgatcttgctgggagtgaaagagttgagcgatctgaagcaattggagatagattaaaagaagcacagtatattaacaaatccctctctgctctgggtgatgtgatttttgctttggcacagaaaaatgctcatgttccttatcgaaacagcaagctgactc

SEQ ID NO: 160338 - DNA, 627 bp, Zea mays
  Clone ID: MRT4577_77807C.1
catagcaacccttataaaccccttcccaagcgggtgacagaaaaaaggtgcccacgaaatgctgatcacgggggacgctgcagttggaatgggcatgtgggacttttgcacgagattctggggtgcgctctaaacccccaaggtatgtcagacctgtactaacagaaatagaaatgcggggggttttggacattttgtagctatatatatatatgtgtgtgttttgttttatgttttaaagagaagggaaagagttgggctggcctcgtttacaggtgagaaaaatggagcaggagcagcatgcagatgcccttgtacagataatctgcgcctacccagtttttatttttttttaaaaaaaaacgcgaacaagttcacacccgcactccattttgatgttcgtttctggacgaaggatagaagagaaggtgcgttctagtgtgacaagtatggctctgtagagtactgttgttttgttgtactgcactagccccagtatattgtctctgttttattctttgggtacgaatcgattctttcatcttgaaacaattgtgttacgccttgttgtaaaaaaaagtgccctggccgatgtaacggatgcaattgtacgtgttcttcaggtct

SEQ ID NO: 160339 - DNA, 111 bp, Zea mays
  Clone ID: MRT4577_77808C.1
gcttggcagaaacggaacggaatgccagatcctagctgccttgttggtttgaaggatttccatctttttacaagatgagaagttacagttcatctgccctgttcagatgaa

SEQ ID NO: 160340 - DNA, 315 bp, Zea mays
  Clone ID: MRT4577_77809C.1
taggcatatctagcaatatgaggcctcatgggtctttacaccccatgtctaacttaaggcgctagtgggggattatatgcattgtatccgatttgatgaatctgatgttcagccccattatgtgcttgtactaaaaaatcctcaggctgaaattttgaaggcacatattgaaaatgaacggacttgtgatgacaatgagatctagtgtatgagacataaacacccttttgtgttcgaacgttcaacttgactggatcatgacaaattcgtatatctacagtgctgaccacgaacaaatgcaggcgtgtcacacga

SEQ ID NO: 160341 - DNA, 258 bp, Zea mays
  unsure (1)..(258): unsure at all n locations
  Clone ID: MRT4577_7780C.1
gntaaccaaagctacacttcatagaggttatcacaggggactttgccaatgaacgtgagattggtaaaggttcttttggggtagtttataagggagtgcttcaaaatggagaagtggttgcggtcaaaaggcttttggtagttgcaaaaactaatctggataagcaatatctgaatgaagtatctagtctgattgatctcaaccatagaaatatagggaagctatttgggtattgtaatgaaatacaacgggaaactg

SEQ ID NO: 160342 - DNA, 694 bp, Zea mays
  unsure (1)..(694): unsure at all n locations
  Clone ID: MRT4577_77810C.1
naaacgctagcgctattccaccgataccagttcagctcgacgccgcgcgtgagaagcaggagcaggaggggtgccgggtgggctgggctgcgctcgcggtacgcgcacacctgtatctgcgcccgttccgcatgaaggggtacgtctagatcaccatctacatctacatctacaagatcgggaactacgtctacgtcaaggtgaacggggccggccacaaggggatggcgaacaagtactaccactgccgcaccggtcgcgtctggaacgggaccaagcgcgccatcggcgtcgagataaacatgcacgtgaatgggagtatcatcatgaagcggatgcatgtccgtgtggagcatgtgcatgcgcaccggtgcacataagagttacgcctgaggaaggtgaagaatgaccaggtgaaggcggatgcaaaggagcgcggggaggtcatgagcaccaagaggcagacgctgggccccaagcctggctttatggttgaggggactaccattgagatcgtgactgccattccgtacgatgtggacaatgatcataatggcgaggactaggactgtgtttgggctttctacctgtactacatctgcgtcactgtagcgcgaacaatttcgctcacactgagcatgagcatgaacctatagcgagtgcatgttgaaagttgttcccgttcctgtgtatg

SEQ ID NO: 160343 - DNA, 879 bp, Zea mays
  Clone ID: MRT4577_77811C.1
cgggagactagtattcatgcacttcgggtcgagcaccctttcccaccttgatctttaggcaggttgaccaagtcccaactagccagccgaagtcgcgaagctgcacgcacacacacatggcgcatgccaccacaggcatggcatcaggcgggcggagcattcgtctggccggcgttagacatgacgcggccgagatcaagccggagacggctcgtcgcctcttctcaccaccacagccgctgcctcccagtggccaggatactaggatgcgctcgtgaagactttccaatacgttgaatcaaagataggcgggaaagactgtcaaggcaaagatctgggaacatcgctgttatgatggtcggtaacaagtcggacttgaaccaccttaggtcggtccccgaggaagacagacagccaggcattttcgttcggagaaggaaggcctgtccttcctcgagacatctgcccctggaggggggcaataaacgtcgagaaggcgttccacaccacaccatcttgagcgagatccatcagacgttaagcaagaaggcgctccccgcgcaacagtccgcatccgccaacgggcgctcgatgcacggaaccaaccaccattaacgtcgccgaatcgtccccccccgcaaaaaggctcgcgtgctgttctagctgcaaagacctgctcccgatcccaacggaacaaatgcaggtttccctgcgtgtagggtgtagatccctttgcattatctgcctgcccccgaaagccagtaattgaccggtggttcgattttttgtcacaaggaacttcttcctctagccccgtatcctataccacatgtaccctgtcaaaccgagcaaagggtgttcctgttgcatttgttgtct

SEQ ID NO: 160344 - DNA, 599 bp, Zea mays
  unsure (1)..(599): unsure at all n locations
  Clone ID: MRT4577_77812C.1
ccggccgggtttataacattactgtttttgaaatagttagttccattgaaaaagccagacttatgtccttgcaactgtttttgaaatcattagttccattaaaaaaaggcagactcatgtccttgcaagttgcaaggcatgaacccatgcatgtcaccagtacttgggttggcaaggcatcaaattttgtatgtaatcagctgggcagtgttttacttgtgtcacttggttaccttttcttctcttgaatgccaagaaagaagagggggggggggnggggggccaggtnccctacacaccagaacagactagatatcacctgctgcccaaaaacatgacccctactgaactgttttaacccagcagatcatcaacccggaggaaggtaagagctttggctccagccaaagaccgcatcaccgcctcctccttagcagccctaagagcaacaaccaaactaggattacaaccatcaaacacacatattcctatgcttccagatggtctaggctcccaagatcaccaaagaatttaagccttttctcacttgatcatccacccgagagctgctattcttccatcaatactaaaggccaaat

SEQ ID NO: 160345 - DNA, 641 bp, Zea mays
  Clone ID: MRT4577_77813C.1
ccggccgggactacacagctctctatgcagcacagcgttagccgtccccaactggcatctcgtgctgcggagctcgatcgtggatgcactaccggcgcttacagctgctatgaagaaatgggaagatgagaatcgacctgattcctcggcacatgacactctgactgacacatcacgaggagggctcaccaggaggccccgagcctgccccggaggcagcctccatagcagatgggatggctcggtaacacccctgcatgcgcgagtcatcaagggagccttacatgggagttctgctatgatcccttgaggactaggatctgatccggagaatctgcttcgaaacgtagaagtacagctgcggcactgacgagatgctatgctcagagcaaccatgatcatcatcccgtgagcttctgactgagatacctgtccgctacacagccttctggtaaaccgtccgacagccgcactaattgacggacaccacaacgctgttcatgatcgaactcatactcaacggctgggccgaggccccacgatcgcctgacatcatcaagtccgggaccgactacactgaccccctcttacccatctacaagcttacgtgcaccgacggctgagaacctgccggtcatctg

SEQ ID NO: 160346 - DNA, 1405 bp, Zea mays
  Clone ID: MRT4577_77814C.1
ggccgggacacacccagaccgaacctccctctccccccctctctctctctctctctctctctctctgctccaccgccgtccgactccgaccgcagcccaactcctgctgacttcaacatccatccccccgccattcgcgcaaggattactcctccctagctccctccctacttgttgctgatccctcctccccccttcccctcccaccaccaccaacaatctaggcagcctccgccaatcaaacaataatggcgtcgatccgccggccgcactcgcccgccaagcagcacctgctgcgccaccaccaccccttcgccacgtcctccccgccctcctcgccgctccgccactcctcgacatcctcctccccacgcacccaccaccacctcgccggcggctacccgcaccccttcctcttcttcacgcgccgcccgctcccgcgcttcgccgccttcttcctcctcggctccttcctcggcctcctccacttcctctcccacctcccccaccagaccccgcacctccgcccggcgacctccagccccgccgtcatcccccgccaccagctccccatcgtccgcctcaacaaccacgacgacgacgacgacgaaagcaacagcaagctgctcgtcgtcgtcacgcccacgcgcgcgcgcgccgcgcaggcgtactacctcagccggctgggccacacgctgcgcctcgtccacccgcccctgctctggctcgtcgtcgaggccggcaaccccacgcccgaggccgccgccgcgctgcgggggaccaccgtaatgcaccgctacgtcggctgctgcgacaacctcaacgcctccgcctccgacgacgcgctccgcttccgcccgcaccagatgaacgccgcgctcgagctcctcgagaaccaccgcatcgacgccattgtctatttcgccgacgaggagggcgtctactccctcgacctcttcaaacgtctgcgccaagtcaggaggttcggcgcatggcctgtgccagtgatctccgagaacagaaaggatggtgttggtgtggtgctggaaggccctgtgtgcaaacagaaccaagtcgtgggatggcacacaagcgagcatgccagcaagctccgtagattccatgttgcaatgtcgggttttgcattcaacagcaccatgctctgggaccccaggctccgctcccatttggcatggaattcaatccggcatccagacacagcgaaacaaggcttccaagcaacaaccacgttcgtggagcagctagtggaggatgagagccagatggaaggcatacccgctgactgctcccaaataatgaactggcatgtgccggctgggtactgagttctcgcctatcccagaggatggcgagttgggacgaatctggatgtggtcattcctct

SEQ ID NO: 160347 - DNA, 252 bp, Zea mays
  Clone ID: MRT4577_77816C.1
gcacatgcaaatagaatttagatcttcctgcttcactttcatgtgtatttatctttcaaatgctatatggatccgttccacatgcaattagccttgcatccaattctcattataaaaaacccaattatgtccactgctaatacaactcatattattcacatgatttctactaccaatcataataaaatattttaaatcataacttcattcaatcaatcataatctgtttctatcaaacaaaacatacacact

SEQ ID NO: 160348 - DNA, 3886 bp, Zea mays
  Clone ID: MRT4577_77817C.1
gcgtttggttttttttttttgaaaaaaagactgctttttatttcaccaattaccagtatgaacccggaggagcttctgcatcttccaacagagcacattttaataattttcaacagaattaaaatggcttcaaagagaagcagaaagtaactccacctatagtaatcacatcactaccaaaaagaaaatctccagcccaaccgacaagaaatcccaccgtttcccttgcatcgcagttaaaatgcatccaaagagaagcagaaagtaactccacttatagtgatctcattaccaaaaaactgcaaatgtccaacccatccgacaataaatcccaccgtttcccttgcacctctgttgcagcacatctcaaaccatatttcgaatacaagacagacaatatacactctatcaaaaccatgtgtggtgacagcctccagttcgttgaagcaaacaatgcattcacaaagtaccccaccagaaaaagatacgacataaagaattggctgataaaacatcaagaaaaataacaaacccccaccttgcagcgacagaaaaaacaactatgtcgacaagatggactgtagcagtagctgttgctgcggttgcaagttggaaaacgtcgatgcaagaaaatcaggaggcaaagtctgctggaaacgcctcaagacattcaccatcctgtttctagtttcatcagtggcaagttctgttccattgcacaaaacctctgcaaaaattgaaacaattttaggaagatactgactgtgaggcccaagaatttcagcatccgacctctccaccatggagcaaagctgtccatgtacaactttagcttcaaccttgtcgtcttttataggcaagcagctaagccaggctggaacaacctgagctgcatcaataccatcccgatgaaattggcatatttttccaagcgccgaaacagcattgtcatatgccatgatattatcaggaagtcgtgcatcaggatgccttataacattgtttaattttgataaggcctctcctactagagggcgaaaaacatgaccaccaaactcggcacatacacccacaccatagacagcagcctgccgaacatctgaattttcatcgtttgatgcctccaaaaggaaaggaaggtatgtgtcataatacttcagagctgattcacggcattgctctgcaacatcatcaaaaatacagatagctatccttctctcttcaggtgttttatcttttcccaacattggtgtaatgtacatagagagctcttcaaaaaacggcaagaaagaacctttgaaggttttaatcaaattccctaggcatcatcagatccttgagcctgccctttctcaacagccaattttgctgagcgtagaagttccggcatggccgcaacagcagctctcctgacttcctcatggaagtaaaacttcagcagaggaaccaacgttggggcaacctgatcaatccatgggaagaaaccctccttaagctcatcagcataacagcacagcatgttgcaagctgttgctttctcttccagcacactagttcgaattcctattcttttgtcaccaagtgtaattgtttcaatgctatcgtcatctgatgcaatatcgtcatctgattcagctgaagtaactgtaacatcaggcttgagttgagcagactgaagcagtggaggcataacaacactcatgtaaggaaggaaatcctgtccaagacatttgcatagcctagcccaagcctgcaacatgtagctggtaattggatcatcagtttccattggagctccttgcaaagccataagtacttccataacctgccttgcgtcgtctctgaacttgtccttacccacagccattcctaccaaacttatacactccatggacttggcacggagcatcctattggacttatcagttgcatgcatcaagatagattttaggtatggcatgacagcatcatagtatttcttgaagtgatccaaaaggtctgggagcaccagggaggtgcgctcgaggtggcagagcgctgcactggcagctactggaggagtaggtgctcgagattctatttgctgtgatgaatctgctactgacgctaaagctgtcaatgctccctcctgcaccatttgctttccattctgaagaagaacaagtaatttgttcacaattccatccaggtaaggcgtcaaaatttccggtgtacaattctcactaaaattcaaaatcgctgaagcagcatgtgcctgaactcgtggattctggaaatcatccatagcattggccaatgcaggcagcacctgctggtggtaatgaacttgaagatctgggcccaaatccgtagaaagctgaccgatggcattgatagcagcccatctcacacgtgggtggggatgttgaaatccattcaatatcatcgaaacgacttgttccaaatttttaagcataacctttgcacatccttccgcaatctgtgcaagtgtaatgagcgcagcatggtgcttctgccactcagcagaagacaggtactgtggtagcagctcagaagcaattggtacaattgcgttcccaccaatggcgatggaaaggcggtcaaggcactcctgcgccactccatagttgttcccttcccctgcgtcctcatcttcagtttcagcagagtgccaagcagggtcatcctcgacatcaagcagcatctgcatcagcactgcaaacagcctaccaacaaactgcgggagtcgccgcatcattcctggtgcacgctctctagcctcagctagagtaatcacaaactccaccgccaagtgtctggtcccatcttccagctgtgtagcctcagcaacttgcaacattgcccctaccacatcagcaatctgcctcctcaggaaccttggctcggcgccagcgagctccaccagcagctccagtgcctcctgcgcagagacttcctggccagagtttaggcaatcagtgagcgccctcatcattgctgggagcaaatcctgcatcttatccctgtcggagttggttggcaggcactgaacaaggttgactgcggcacccagggccgcaatccgaacatcaggagacgtgggatgcgccagggctgaggcgaggaggttgtggatagtcatgagatggtcgaggagagattctgcgatgtaatccgccagcctcgcgaagatgagcagcgctgactcctgaaggttgtgcgcatcaggccccgacgcggcgcggaagaggaacggcagcagctcgggccaggcgttctcaggcagcagcgaggccgcgagctcagagatagcgtcgcagaccttcttggcgatgggcttgggaggatcggactggagcgcggagaggaggtgcgccttgagcgcggcctgccccgcgggggagagctgcggccagagcggcgccggaggcgtggcgttgttggaggacgcgtcggaggacggggccggggagaggaccttgcggaggaggacccccgccatggcgcgcaggtcggcgggggtggtgggcgtcgccagcgaggtggcgagccgcagcgcgaggggctccgggtgcgaggcccggaggcggtggaaggcggcctcggcggcggaacggtcggcgttggaggacgacatgagcgtcgagagcagcgcgtcgaacgccgccgggtcaccccccagcagcgcggcggccgcggcctggtcctcggcggacgccatcggatcggaaccgaatccggaacgagcgcggcggcggctagggtttgagggagagagggttgaactggtggtggcggcgggaaggggcctcgtgccgaatttggaaagggaagttagagagagagagactcgggcgttgggcttaatatttcctcgtgccgaata

SEQ ID NO: 160349 - DNA, 1312 bp, Zea mays
  unsure (1)..(1312): unsure at all n locations
  Clone ID: MRT4577_77818C.1
ggnggtttggaaagataagacggctttttatttcaccaattaccagtatgaacccggaggagcttctgcatcttccaacagagcacattttaataattttcaacagaattaaaatggcttcaaagagaagcagaaagtaactccacttatagtgatctcattaccaaaaaactgcaaatgtccaacccatccgacaataaatcccaccgtttcccttgcacctctgttgcagcacatctcaaaccatatttcgaatacaagacagacaatatacactctatcaaaaccatgtgtggtgacagcctccagttcgttgaagcaaacaatgcattcacaaagtaccccaccagaaaaagatacgacataaagaattggctgataaaacatcaagaaaaataacaaacccccaccttgcagcgacagaaaaaacaactatgtcgacaagatggactgtagcagtagctggtgctgcggttgcaagttggaaaacgtcgatgcaagaaaatcaggaggcaaagtctgctggaaacgcctcaagacattcaccatcctgtttctagtttcatcagtggcaagttctgttccattgcacaaaacctctctccaccatggagcaaagctgtccatgtacaactttagcttcaaccttgtcgtcttttataggcaagcagctaagccaggctggaacaacctgagctgcatcaataccatcccgatgaaattggcatatttttccaagcgccgaaacagcattgtcatatgccatgatattatcaggaagtcgtgcatcaggatgccttataacattgtttaattttgataaggcctctcctactagagggcgaaaaacatgaccaccaaactcggcacatacacccacaccatagacagcagcctgccgaacatctgaattttcatcgtttgatgcctccaaaaggaaaggaaggtatgtgtcataatacttcagagctgattcacggcattgctctgcaacatcatcaaaaatacagatagctatccttctctcttcaggtgttttatcttttcccaacattggtgtaatgtacatagagagctcttcaaaaaacggcaagaaagaacctttgaaggttttaatcaaagtccctaggcactcactgacctgatcaattaacctcctacctgttcattctcttctttgagtagctctccttcatcagcatcaaaatcttccgcttttgttctctccgaccgttctcttttcagggtggcactgcctataatgacgtttttaatctcatctatgatagctcgtaccggacgcgtgggtgga

SEQ ID NO: 160350 - DNA, 464 bp, Zea mays
  unsure (1)..(464): unsure at all n locations
  Clone ID: MRT4577_77819C.1
cttgtggtttatttgcagggaaaagataaaacacctgaagagagaaggatagctatctgtatttttgatgatgttgcagagcaatgccgtgaatcagctctgaagtattatgacacataccttcctttccttttggaggcatcaaacgatgaaaattcagatgttcggcaggtctgtttttgttctgtcatgttcccttgacctattcacccttttttacttggtcaacttgaacactgatgtagtgatgaatcttttcttcatttaggctgctgtctatggtgtgggtgtatgtgccgagtntggtggtcatgtttntcgccctctagtaggagaaggcctatcaaaataaaacaatgttataaggcatcctgatgcacgacttcctgataatatcatggcatatgacaatgctgtttcggcgcttggaaaaaatatgccaattcatcgggatggtattgatg

SEQ ID NO: 160351 - DNA, 1303 bp, Zea mays
  Clone ID: MRT4577_7781C.1
tcggaaagattgcagttctccaactaggaagatggcacaacttatgtcgacaccatattgaggttgacagtactgaatttttggaaggactgcagtcatccaatcagttgaaatatctttgtctgaggggcatctctagaatcattgaacttcctgcttccattggtggactctcgaatcttaggatcttggaccttcatgcctgtcacaaccttgagagactgagtactagcatcacgtatcttcagatgctcacccaccttgatgtgtcagagtgctacttgctggaaggcatgccaaggggtattggcttgcttactgaactccaagtgctcaaagggtttgtcattggtggttcaactggcaattacaattgccgggtagcagagttggctaggctggacaaactgaagaagctgaccatatatattggaagcaaagttgcagtgacagaaaatgaactgaatgagcttgagaacatcaaaggcctttgcgtgctgaaaattacatgggctgtatcactttcaaagaaagaacgagtccatcaaacttctgattctacaccattgataacttcactctccctacctctaaatctcgaaaagctagacctgtgctgcttccctggagagaaggtgccagattggttaagtccgagtaagctgttgagactgaagagactctacttcactggaggaatgctaagaacttttggaaacaaaaacatgttagaggtgtggagcgttgaggttttgcgcctgaaattcttgaatgatttatcagtacaatggacccaggtgcatgaaatatttccaaagctgacctttctggaggtcttcagatgtaggaagctagaatccttcccttgcgataaggatggggtgtggatgaaccatgatacgaaggatagcagaaagtagaaggcaggaatgaatcaattgagctttcattattactttggctgtgtcaccagctttgccccatcgtcagcaacaacacctgaacgacaacttatcccggatgtgcaacatggatatcatgactgttgtctgttgagccttaatagtcaaggcggttccaatctcattttctatctcaccttctattttaaaattcactttgcaaacaacgtctacagtaaaacaatattttatacggtcatatacacgatttcttgggtacatcctaactgttcgttcttgtcttgctggtagctatgcaattatatatttaagccttgttcagttattcatgttccatgtggattggataagattgggaaaaaatataaagtattttgact

SEQ ID NO: 160352 - DNA, 1847 bp, Zea mays
  Clone ID: MRT4577_77820C.1
attcggctcgagattgaatggatttcaacatccccacccacgtgtgagatgggctgctatcaatgccatcggtcagctttctacggatttgggcccagatcttcaagttcattaccaccagcaggtgctgcctgcattggccaatgctatggatgatttccagaatccacgagttcaggcacatgctgcttcagcgattttgaattttagtgagaattgtacaccggaaattttgacgccttacctggatggaattgtgaacaaattacttgttcttcttcagaatggaaagcaaatggtgcaggagggagcattgacagctttagcgtcagtagcagattcatcacaggatcacttcaagaaatactatgatgctgtcatgccatacctaaaatctatcttgatgcatgcaactgataagtccaataggatgctccgtgccaagtccatggagtgtataagtttggtaggaatggctgtgggtaaggacaagttcagagacgacgcaaggcaggttatggaagtacttatggctttgcaaggagctccaatggaaactgatgatccaattaccagctacatgttgcaggcttgggctaggctatgcaaatgtcttggacaggatttccttccttacatgagtgttgttatgcctccactgcttcagtctgctcaactcaagcctgatgttacagttacttcagctgaatcagatgacgatattgcatcagatgacgatagcattgaaacaattacacttggtgacaaaagaataggaattcgaactagtgtgctggaagagaaagcaacagcttgcaacatgctgtgctgttatgctgatgagcttaaggagggtttcttcccatggattgatcaggttgccccaacgttggttcctctgctgaagttttacttccatgaggaagtcaggagagctgctgttgcggccatgccggaacttctacgctcagcaaaattggctgttgagaaagggcaggctcaaggacgtgatgagtcttatgtcaaacagttgtctgactacataattgcagcacttgttgaagcactgcacaaggagccagaaacagaaatgtgctcatccatgctggattctttaaacgagtgtatgcagctttcgggtcttttgcttgatgaagcccaagaaggcatagaggggcgcctttaccgctgtgatgttgaatgctcgtgttcagtagatctttcgcggtgtagtgtcgtcgttgttattggaactggttagtagatctgtgcattgtggttgaaacgtgattccctgatttcagaaatctaatttgcaatttgggtgcacaaaaaaaaaaaaaaaaaaaaaaaaaaaaaaaaaaaaaaaaaaaaaaaaaaaaaaaaaaaaaaaaaaaaaaaaaaaaaaccgaaaaaaaaaaaaaaaaaaaaattaaaaaaaaaaaaaaaaaaaaaaaggtccttggcccgaaaccaccttaagggaaaattttgaaaatttcaataaaattgggggccgttgaacattgctttaaaaggcccaaattccccttaaagggaggggaataaaaataaatgggccgtgttttaaaaaggtggaaatgggaaaaaccttgggttaaccaaattaaatgcctttgaaaaaaatccccttttcccaagttgggtaaaaaccaaaaagccccgaacaaatcccctttccaaaaatttgccaaccctaaatggcaaaggaacccccctttaacgggccaataaaccccggggggtggggggttaaccccaagggtaaccgttaatttggcaaggcccttaggccccgttcttttcgtttttttcctttctttttt

SEQ ID NO: 160353 - DNA, 419 bp, Zea mays
  unsure (1)..(419): unsure at all n locations
  Clone ID: MRT4577_77821C.1
gagccaggaggaacagagccgggnncgagcgnccagncncgccggaccnccgacnggcggncgcngcnancncncgggnaccgcggncncnngcgcgccccncnccanncgcncccacncaccggcnngggggaaggaaggangnggnagggagcccggngaccggggggggcgnggcgcngcggnngncgcaaggcgngnccgcnggcgcanccangggcgcnanggccacagcgnacggcnncnccaacnacacggcnnncngcnacnnganngcnncaaggggcccacaacnnncnnngccgccacncagcgccgcgcccgcgnnnccnnncncnncgcnnccaagaaggcgaagcgagggcgnnggaggccggcnggnaacaagnnccggagggcaccggggccaccagnggcag

SEQ ID NO: 160354 - DNA, 294 bp, Zea mays
  Clone ID: MRT4577_77822C.1
aagccactcttaaacccccgcttgcagaacctggtgggtgctccccgccgcctgctggactcgcaccgatggcgaaggaaccaatgcgcgtgctcgtcactggcgccgcaggacaaataggatatgccctggttcccatgattgctaggggtgttatgcttggtgcagaccagcctgttattctgaacatgcttgacatttcgccagcagctgaagcccctaatggtgttaagatcgactgggttgatgctgcgattactattctgaagggagtagttgctacaactgatgttg

SEQ ID NO: 160355 - DNA, 281 bp, Zea mays
  Clone ID: MRT4577_77823C.1
gtggcattttcgttggtggtgttcagttgtcgcggttgctggtcatgaacagccaagatgctgcggaatctgctggctcttcgtcagattgggcagaggacgataagcactgcttctcgcaggcattttaaaaatagagttccggagaagcaaaaatgttccaggaggatgatgaaattccactgtatctaaagggtggggtagctgatgccctcctgtatagagccaccatgattcttacagttggtggaacagcatatgccatatatgagctggctgtg

SEQ ID NO: 160356 - DNA, 632 bp, Zea mays
  Clone ID: MRT4577_77824C.1
cgaggccggccgggttgccattacaacgcagagaactcagagctcttcacgtctcctgccaccatcgaccttcaagtctcgctacgtaacattcgaataaaaaaacgagccgcaatgtcgagcagcaccatggccttctcctccacgtgcttctccggctaggccgcgaatgagccgtctcactccgccttcggcgaggcccgtgtgctattgctcaaaactccttggaaggtcaactcggcgctcctatccggcagcctgtgctacgtgccctaccgggtgctgaacctggcgcccacttgcccgtctacgccgaccaagctacactgacgggtcgagcttctccgggtgcactacgtggtgaggacactcgtcgaggctgatcggtgtgacctgttctacgttcgtcaagaaccgcaagctggaggtgatcctctcctcatggcccatggtgtgcgcgttcggatgctctttctcggagttgatctcccgctacgcgcgtaaagttcggcgagtgcgtgcggttcaaggcctgctcctgtcttcggcgaggcgtactggactacctcgtgatcacgattctcatcttcgagcagagtatcctcgccatgtggctctgctggatctggctc

SEQ ID NO: 160357 - DNA, 1770 bp, Zea mays
  Clone ID: MRT4577_77825C.1
gcagttagtaagtttttaatattgtgtatagggcctgaaatctgaaaactggggacgtctgtaatcatgtgaaaaattcgtacaggtaaaatatgttagtggctcctatgatagggtggaaggatttgagttattaaataaggcaatctctgagtatgaaacttcaaaaaacaatgactcgggaagctaccgcagattattttatttggcattgcctccatcagtctacccatcagtatgcaaaatgataagatcatattgcatgagtccatcttcacacaccggttggacaagggttattgttgaaaagccctttggaaaggatttgaacactgcagaggaactgagtgctgaacttgggcagctgtttcaagaagaacaactctatagaattgaccactatttaggaaaagagcttgtccaaaacttgcttgtgcttcgttttgcaaaccgcttatttttgcctctctggaaccgtgataacatagctaacgtacagatcgtatttaaggaggactttggaactgaaggacgtggaggatattttgatcaatatggtatcattcgtgatatcattcagaaccacttgttgcaggtaaatatatcttatgaacttcttttgtcgttggtttatgagtgattttccaaacacgtactttttgacttgaatctagactctagaggagtacttgtttagggtggggattgggtacagtccaatataatgcatgattatttggtaatatgattaatactttgtttcatcaccaatctagtgctaatcttctgagcagacacagcagatacctgtaattacattcctcatatatatagcaatgttttgttctggagagagctctggtatgactgtcgctctgattttgcaggtcttctgtttggtggctatggaaaagcctgtctctcttaaacccgagcacattagagatgaaaaagtcaaggttctgcaatcggtggagcctataaagcatgaagaggtagtcatcggacaatatgatggctacaaggatgaccctactgtgccagatgactccaacactcctacttttgcatctgttgtactgagggtacacaacgaaagatgggagggggttccattcatcctcaaggctggcaaagcactaaattcgaggaaagcagagatacgtgtacagttcaaggatgcacctggtgacatttttagatgcaagaaacaaggcaggaatgagtttgtcatacgcctgcagccatcagaagccatgtacatgaaactaacggtcaaaaaacccggactggaaatggcaaccgaacaaagcgaactggatctatcgtatgggatgcggtacaatggcgtcaaaatcccagaagcatacgagcgtctcatcttggatacgataagaggagaccagcagcacttcgttcgccgagatgagctgagggccgcatgggaaatcttcactcctttgcttcacgacatcgatggtggcaagctcaggtccgttccgtacaagccgggaacccgaggaccgcaggaagccgacgagttgagcaggaggatggggtatgtgcagacccatgggtatgtatgggttccgccgaccctttctaaggtttagctgtttgattatcagctgccgtgtaaccacagaatgacagaacgcggggaagatccctttgtaatacgtgggtcgtgtaataagagaaacttctgcttgttgtgagagtgaccctttacggtattggaataaaaaaagaatgtgatgttattatctc

SEQ ID NO: 160358 - DNA, 676 bp, Zea mays
  unsure (1)..(676): unsure at all n locations
  Clone ID: MRT4577_77826C.1
ggccgggacacaatncattagcagctccagtaagcctgcttatttctttcactctcactggcgctgcgctcgctgctgggttcgatttcatctctaatgaggagaggaagggcatgatgtttatcgagagcttccacaggaagagcccgcacatgcaggacgggccgatggagatcgaaggggagtaccgacccgacactacggagcttgcacacgagggcgaggacagtgcctacgctgggttgtccaccccaaggacgtcaagtacaacttcagcaccataaccgacgttcgcaaggtcgtggtgaagcttgagcagaggagaggcaacaacagcaacacgctgactgatggtgacatcgacaacatgaagggtagctcatgggcgaacaaggacaaggcgcatcaagacagctactgcagttccctcacccagggctctcagcattacagcctacagctgcagcgtggaagagagctatgcgcaactcaagagccttctttgcatagtgaaccgagacgacattgtgcctgcaggctgaggcactagcagcatgaacctggccgactacatgaccagggccaaagcgctggatatagacctgcacaagctagctacgccctacatggagtccatggtgacacttaccggcgtgtatgatccgaacttgatcgt

SEQ ID NO: 160359 - DNA, 500 bp, Zea mays
  Clone ID: MRT4577_77827C.1
gacaggggaacaatatttctataatcataggccaaacacagctgagaacaaagaaccttgcttattcttttctacattcgatctataatgggaagcaaccacaacaaacaacagggtaccaacacctaatacaaagtgagaacggacactaacacggagacagaagggaacgggaacacgagactatagatagataatataactctacctaagtcagtatggcccaatacataaataattccagcacacgcaatcaccggctgcggacccgcaaccaccactttttcgctggactgtcgaaatccaaagcacactgcacacttcgtggaagtcatgtttgctcaaagcgacacacactgcaccggcagcataaacgtcccctttgggcccagcaccaaaatcgttgtcaatttcctgatcatcacaccatggcacccaagatcaactttatgttattgagaccagtcgtgaataactgccaagtgtccaccacatgaaca

SEQ ID NO: 160360 - DNA, 2311 bp, Zea mays
  unsure (1)..(2311): unsure at all n locations
  Clone ID: MRT4577_77828C.1
tcgagccgggccccgggggggtcgggccccagtgcgatccctccctcccactccacccatcattacaaatccccctccctccgtaaacggcggtcgcgaagtcaaatctcacctcaccagtggctgccttctccgctccgcgctgcgcctcccccaaagcttcagtggctgctgcgacccttctgttctccgctcttggtcttgggtgatcgccggcggtacttgtagcgggcctttgtaggtatttatctgagggaagaagaaactatacaattcatcatgtcaggagggtcgtctgaatcttccccgttatctggacaaaatagccttagttctctatcaatttccaaggacaatgaactatcttcagagtctggctgcttgtccattgttgtactaggcgcttctggagaccttgctaagaagaaaactttcccagcgctctttcaccttttccagcagggatttctgcaatctggagaagtccatatatttgggtacgcaagatcaaatctttctgatgatggattaagagaacgcattcgtggatacctcaagggagcttcagatgaacatctttctcagtttttgcagttagtaaaatatgttagtggctcctatgatagggtggaaggatttgagttattaaataaggcaatctctgagtatgaaacttcaaaaaacaatgactcgggaagctaccgcagattattttatttggcattgcctccatcagtctacccatcagtatgcaaaatgataagatcatattgcatgagtccatcttcacacaccggttggacaagggttattgttgaaaagccctttggaaaggatttgaacactgcagaggaactgagtgctgaacttgggcagctgtttcaagaagaacaactctatagaattgaccactatttaggaaaagagcttgtccaaaacttgcttgtgcttcgttttgcaaaccgcttatttttgcctctctggaaccgtgataacatagctaacgtacagatcgtatttaaggaagactttggaactgaaggacgtggaggatattttgatcaatatggtatcattcgtgatatcattcagaaccacttgttgcaggtcttctgtttggtggctatggaaaagcctgtctctcttaaacccgagcacattagagatgaaaaagtcaaggttctgcaatcggtggagcctataaagcatgaagaggtagtcatcggacaatatgatggctacaaggatgaccctactgtgccagatgactccaacacccctacttttgcatctgttgtactgagggtacacaacgaaagatgggagggggttccattcatcctcaaggctggcaaagcactaaattcgaggaaagcagagatacgtgtacagttcaaggatgctcctggtgacatttttagatgcaagaaacaaggcaggaatgagtttgtcatacgcctgcagccatcagaagccatgtacatgaaactaacggtcaaaaaacccggactggaaatggcaaccgaacaaagcgaactggatctatcgtatgggatgcggtacaatggcgtcaaaatcccagaagcatacgagcgtctcatcttggatacgataagaggagaccagcagcacttcgttcgccgagatgagctgagggccgcatgggaaatcttcactcctttgcttcacgacatcgatggtggcaagctcaggtccgttccgtacaagccgggaacccgaggaccgcaggaagccgacgagttgagcaggaggatggggtatgtgcagacccatgggtatgtatgggttccgccgaccctttctaaggtttagctgtttgattatcagctgccgtgtaaccacagaatgacagaaagcggggaagatccctttgtaatacgtgggtcgtgtaataagagaaacttctgcttgttgtttgagtgaccctttacggtattggaataaaaaaagaatgtgatgttattatctcaaaaaaaaaaaaaaaaaaaaaaagtccgcccgcagtttctgaaggcacaccaaaacgatgagacctgtagacagtactctagtctctagtccacgaagtcctcgtacttgtgttggctggccctcgactagcgtgttgtagcacactagcgccacagtaatcgagagtgctctcccaggtcgaggttagtgtggcggagcagccggggcgttagaatctgaggaggtggtggtgctggtggtggcgacgtcgcgtccagcccgctcgccatgctccgcggatgtgagagtgaccctttacggtattggaatgnttcgatta

SEQ ID NO: 160361 - DNA, 447 bp, Zea mays
  Clone ID: MRT4577_77829C.1
gacggggctctgggttgggtgcgggggtgctggcggaggaactccacctcccggagttgtgggcgcctcccccaggcctgcgatcacgcggttgcgatgggactgtcgatttgagacggtgaggacgccgggagggacgcgccgccccctcgcgacctgccttggccggcggggccccggcgccgacgaccgccgtgtccctcggaatcataggcgaagcgggagaaggaagcgaaagccattgagaaaccggctggtcatcatgctccggagaacgttggggagtcagacagaacgcggcgggctgagatgatgctgggccggacattccgggtacttttggtcctactggttatagcttatgccactactttaggcaatggcaacgaaggcagcaagggtggggagttgtccctgcgatcatacaagctctttccatttcccccc

SEQ ID NO: 160362 - DNA, 761 bp, Zea mays
  unsure (1)..(761): unsure at all n locations
  Clone ID: MRT4577_7782C.1
ccggccggaattcttaacaaccatcactcttttttttgttccacccaaggatttccgtacaacatcggtcgccatgggtcaaggtcgccgtatgaagaagcagggtattcctgagcccctcgacgaatcgctggtaacgaggaagcgcaaagatgcgcctgcgcctgccgaaccagagcgcaagaagagaagtaggacagctgcgagggaagctagagaggccaaggcgaaggctcaaccaaagacaagagtcgctggaaagcccgtaaagacagctgctgctattgtcaatggagcaaaggccaaagcaaaggccgcaaaggctgctccgcctcgaccgtccgatgacgaagacgacgaggatctttccgaagacgactctgaaatgatggatgattccgatattaacgttaccgggctcgatgcgctcggtagcgcgtctgaaggcgaagagtcaatcgacgaagacgaattcgattcggatattgtagactcagataccgacatcaggaagggcgctgcgatgtggtcggaagacgaagacgagtcggatgccgaggagaagcttacggcagctaacatcgctggattgtccaggaagctggatgagcaaaaagcgattgaagaggccgaggcgcaagctgaattggaagagaatatgcagaccaacattgntggtgagaggccgaagattcttgnagacgaggaggacgaagatggcaggccgatcacgaacctcgtcaccaggacatccaattgct

SEQ ID NO: 160363 - DNA, 228 bp, Zea mays
  Clone ID: MRT4577_77830C.1
aagcagtggaacaactcagatacgcgggctacgccaaactattttaactcgtactacatggtcacccgtcatagtagttagcatgcatgggttgcgtgcaaaaagaaaaaaaaaaaaaaaaaaaaaaaaaaaaaaaaaaaaaaaaaaaaaaaaaaaaaaaaaaacaaaaaaaggaggggagggaaaaaaaaaaaaatactttgccttttttaccactgcttaagggga

SEQ ID NO: 160364 - DNA, 403 bp, Zea mays
  Clone ID: MRT4577_77831C.1
gcgatctagacaatcctgcattgactctctctgtaactgaatacagtgtattggtgctagtgggtacccagtggttatgagtctattttttggttcattctataccactttttttgataaatggattggtttccattaaatgagttttgagtcaacccacaaacctagagaaaactcttgtattcctaatcaacagaataaataaagtatttatcactttcctacaatgctcctattgtacatttataagattattatgtgtctaacataaaaagctcaagcactttgcgaacttggaaaattacataccttcatctcttatgtattttgagtgtgtaggaacccattattagaccaactccagcagcctccgctccgcatccctaaagtaaggtccttcctc

SEQ ID NO: 160365 - DNA, 361 bp, Zea mays
  Clone ID: MRT4577_77832C.1
cacacactgcagaaggagcgaacttcacaagacgtaccattaccagtatccaaatgacaattttatcactgaagtgcgggcaatcccgatggcaggtgaatttgaacattaagcatgggccatcaaacttattcaccattattcattttggaaggcattaccaagcccttaaaaggtcttttagagggcaggggtgtccccaacctattgggttgcccgcaaagggttaaatccccagtagccaggagtagtagtagtttgccaatcaacaaggtttacttaggggcaggggagaacttgttaactgcaggcctgatctcaggaggtttgtcgtgcacaaagcttctttagccatgcatgg

SEQ ID NO: 160366 - DNA, 174 bp, Zea mays
  Clone ID: MRT4577_77833C.1
aagacgcgtgagcggacgcgtgggaaaaaaaaaaccgcccgaactaagcacaaagaattgactgaaagaaagggctgacgtccctagaggatttaacttaacgtacgcttgcatgcaaattgttacgccttcaaaaatgccaccaaacttcatttcacggcccatctttttaca

SEQ ID NO: 160367 - DNA, 818 bp, Zea mays
  unsure (1)..(818): unsure at all n locations
  Clone ID: MRT4577_77834C.1
tcttcgtaggctctattaggatgctcggaacaagctaagagggcaaaagtttgatcttttgcttgctatactgccagagaaaaatggcagcttatatggtaattccaaaaggatctgcgaaacagagattggtatcatgtcgcagtgttgcttggataaaaatgttagaagtgcaggccctgcatattttgctaatgttgctattaagatcaatgccaagtttggaggaagaaacttagaatttgctaatcccaaagaaagcttaccgagtgttacaattgaaccaacaattatatttggtgctgatgtcactcaccctgtcgctctagatgataccgccccttccattgcttctgtataaacttgtcatcgtggctggggacgaaacgggtgaaactgagtttgttatgtttggccggataacacagcatgtcagcatctcgtgcggaaaacggttgcagcggtgtatgccctgtcaatagcatcagcggtgtattccctacaaaatctgacaatagcatcggcggtgtatgccctatcaccggcaaggatcatggtagcaacctcaaggaaagtcgtgatcatggtgaagaaaagggcaagggtccttgtgtggtaccagcaaaatgcccatttggttatgactccnacacttccaagctaggtctacttagctccactgtctgccagacactngctcatganagtagaanatggaatgtatatcatgcttttaagacagtccactatgtggtgccgatatagaattcaagctcttgttcaccgattcattgatggtcatgccagaaatcagcgat

SEQ ID NO: 160368 - DNA, 2219 bp, Zea mays
  Clone ID: MRT4577_77835C.1
ggacatcgtctgaaaaatcatgaatgtgctcttgctcgcacactagtttcaggatatcagatccgccgcagactacttttaactggcactccaatccaaaatagcctacaagaactgtggtctttgcttaactttattctgcccaatatttttaattcatctcagaattttgaggaatggtttaatgcaccatttgcatgtgatgttagtcttaatgatgaggaacagctattaatcatacatcgtctgcatcaagttttgcgtccatttttgctgaggaggaaaaaagatgaagtggaaaaatatctccctgtcaaaacacaagtaattctcaagtgtgatatgtctgcttggcaaaaagcatactatgaacaagtcacaagcagggaaaaggttgcactaggatttgggctcagatcaaaggctctgcagaatctgtcaatgcaacttaggaaatgttgcaaccacccctatctatttgtagagcactacaacatgtaccagcgggaggaaattgttagagcatcagggaagtttgaattgcttgatcgtctacttccaaaactgcagagagctggtcacagggttctgcttttctctcagatgacgaaactgcttgatgttttagaaatatatttgcaaatgtacaatttcaagtacatgaggcttgatggatccacgaagactgaagaacgagggaggttactggcagattttaataagaaggattcggaatatttcatgtttctcctcagcacacgtgctggaggacttgggttgaacttgcagacggcggacactgtcattatatttgatagtgactggaaccctcaaatggaccaacaagctgaagaccgtgcccatcgtatagggcagaagaatgaagtgcgtgtgtttgttcttgttagtgtcggctccattgaagaagagatcctggaccgtgcaaaacaaaagatgggtatcgatgcaaaagttatccaggctgggttgtttaacacaacttccacagcacaggacagacgagcattgctgcaggagatccttaggagggggacaagctcgctgggaacagatatccccagtgagcgcgagataaatcgtttggctgcacgaactgatgaagaattctggttgtttgagaagatggatgaagaaaggaggcttagagaaaactacaaatctagacttatggatgggaatgaggttccagattgggtattcgccaacaatgatttacccaagagaaccgtggcagatgagttccagaatataatggtcggtgcgaagcgacgtagaaaggaggttgtctattcagactctttcggtgatcagtggatgaaatccgatgagggatttgaagacattccaaaggcgactcagaggtcgaagaagactgcttactcatctgacatccaagttgagtttagtgaaaggaggaaaagacctaggtctgtagaaaacagcgcagacggtgtgagcaacccgacgtggacgcctgacaaaggaagggctggagtttcatcatacagcaaggacgagactgaagatgatggcgaagacgaagtcattactagcggcttacaaaagggaaacagtttcacatggaataccctaggaagaagaaggtcaagccacttcagttcgtcatcggactcgagagggcgcccaacattctaatggcaacatacatgaatgttatggcctcgacctgttggttgatggaatacccttgtagagcagggctgcgactatgactgagtaccttcaagcttatgaactttattaggattactagtatactgtatggacttgttggcatgaatttgtaactcctttaaatattaattgtttaaacaactggtggtgtttgctatcataccgcgccaacatgtttttatttttttgctaatcaaagtttttgtggccaggttttattggtgtcgggttgcattgcaatggctgttcatccggttagcagtcttcggctaatgcctgtccagattttactggtttatatggcaagcaaaactggactaggtgctatctgatgtgcttcccccaaggcaagtcctcaaacaagggtcatcttttattgtgtaaagctagtaaagttggctctgtgtatctatatgcccttacatagcctgatagccccccgataaatacgtaaaaatagctttgtgcaaaaataatttctttttgagttttcccctttaatt

SEQ ID NO: 160369 - DNA, 371 bp, Zea mays
  Clone ID: MRT4577_77836C.1
ttggtgatccgcagcggcgggtcccggaggtagagccgggcttcttcggtggcgttccaacggtacgcgccacagggcgcagcccaacacccataaggcgtggtcgtggaggagccacgggtgcacgcttgctgacgttacagcgacaagcggtaggcggtctggagcagcacgcggaccgctgagttgagcgccaggacgatcacgttggaccccaccgccttgatggggatcggctgcggcagcgtcacgtagagtatccagttgaacgacttcgatgggtgcgccgtcttcagcgtcgagttgagccccatctagagggagcccaggtgcagcgagacgggcagcaccatggacacggtgatgatgga

SEQ ID NO: 160370 - DNA, 3050 bp, Zea mays
  Clone ID: MRT4577_77837C.1
gtcctggcatggcatgttcgggcacgtcaacgtatctcacggcaagagaaaaataggattaatcttctgaaaactggtgatcaagaagcatatatgaggatggttgaagagagcaagaatgaacgcttgaaaatgctccttgataaaacaaatgagcttcttgaaggaattggaaaagctgtacagcgacaaaaagatgctgaacatgttagtaagccagaaggagggagtgaagtgccaaaagggtcagaatctgaggattgttctcaaatttcgggcatcaagagtgaatcagctgaggagtctacttcagatgacgatggagacctccctggccctgcagatgaaagtaaattcaatgcaggacgtagacttgatgttactgttcattctattgaagaaaaggtaacagaacaaccatctgctctcgaaggtggtgaattgagaccatatcagctagaaggtctccaatggatgctttctctatttaacaacaatttgaatggcattctggctgatgaaatgggtttggggaagacaattcaaaccatagctttgatcgcttatctgttggaaaagaaggaggttgcaggaccacacttaataattgctccaaaagcagtattaccaaattggtctaatgaattcaaaacttgggctcccagcattgggacaattctttatgatggccgtccagaggaaaggaggctgttaagggataagaattttgacggagagcaatttaatgttttgctcacacattatgacctgatactgaaagataagaagttcctaaagaaggttcactggcattatttgattgttgatgaaggacatcgtctgaaaaatcatgaatgcgctcttgctcgcacactagtttctggatataagatccgccgcagactacttttaactggcactccaatccaaaatagcctacaagaactgtggtctttgcttaactttattctgcccaatatttttaattcatctcagaattttgaggaatggtttaatgcaccatttgcatgtgatgttagtcttaatgatgaggaacagctattaatcatacatcgtctgcatcaagttttgcgtccatttttgctgaggaggaaaaaagatgaagtggaaaaatatctccctgtcaaaacacaagtaattctcaagtgtgatatgtctgcttggcaaaaagcatactatgaacaagtcacaagcagggaaaaggttgcactaggatatgggctcagaaagaaggctctgcaaaatctgtcaatgcaacttaggaagtgttgcaatcatccctacctattcgtagagcattataacatgtaccagcgggaggaaatagttagagcatcagggaagtttgaattgcttgatcgtctacttccaaaactgcagagagctggtcacagggttctgcttttctctcagatgacgaaactgcttgatgttttagaaatatatttgcaaatgtacaatttcaagtacatgaggcttgatggatccacgaagactgaagaacgagggaggttactggcagattttaataagaaggattcggaatatttcatgtttctcctcagcacacgtgctggaggacttgggttgaacttgcagacggcggacactgtcattatatttgatagtgactggaaccctcaaatggaccaacaagctgaagaccgtgcccatcgtatagggcagaagaatgaagtgcgtgtgtttgttcttgttagtgtcggctccattgaagaagagatcctggaccgtgcaaaacaaaagatgggtatcgatgcaaaagttatccaggctgggttgtttaacacgacctccacagcacaggacaggcgagcattgctgcaggagatactcaggagaggaacaagctcactgggaacggatatccccagtgaacgtgagataaaccgcttggctgctcgaaacgatgaagaattccggttgtttgagaagatggatgaagaaaggaggctaagggagaactacaaatctagacttatggatggaaatgaggtcccaaattgggtgtttgccaatgataatgaaaccttacgcaagaaaaccgtggcagatgaattccggaatataattgttggttcaaagagacgtagaaaggaggttgtctattcggactcttttggtgatcagtggatgaaatccgacgagggatttgaagagattgcaaagatgactccaagggtgaagcgaactgcttattcgcctgacattcaagttgagtacaatgaaaggaggaaaaggcccaagtctgtggaaaacagcgcagatggcgcaagcaacccaacacggacacccgacaaaggaagggctggagtttcatcatacagcaaggatgagaccgaagatgatggtgaagacgaagtcatcaccagtggcttacagaagggtaacagtttcacatggaagacccttggaagaaaaaggtcaagccacttaagttcgtcgtcggactcaaaagggcgaccaccattctaatgtcagttgccttgatgcttttgctcgatgaagcccttctaataatggagtacccctggaggctagcagcgctaccatttcgaaagtaccttgaacctataaacttcaggatggaggctgtagctagcaggactaccattttgaaagtacattgaagctataaacttcagaattagtaatttactctggacttgttgccatgaattcgtaactcaaacgaacttaaattgcgttacagttcaagcctattttgggggtaaaggttattggtaaatagctggtgatggcttgccctgaatttgggctgtcttgtctgcacattccgttgagcagtcttcggctaatgcctgtccagattttactggtttatatggcaagcaaaactgtactaggtgctatttgatgtgcttccaccgaggcaagtcctcaaacaagtgtcatcttttattgtgtatagctagtagagttggctctgtggaaaaaaaaaaaaaaaaaaaaaaaaaaaaaaaaaaaaaaaaaaaaaaaaaaaaaaaaat

SEQ ID NO: 160371 - DNA, 384 bp, Zea mays
  Clone ID: MRT4577_77838C.1
atggaacgcacagtggtgtactatcaattgctgccaagatattttgcttaatggtgcgggataggtccttgtgcaagtgttgctactgagtgccagtttcagcaccaatgctcatatgctctctatagcatacgcattcttatgcgcatacctcgataccaatgcgcgtacttcaatgataagagcacgttagtgtgcaaaccctacaggattgcactggtaatatcaccaagcatcgtaccattaagacccgtgttcctccaactaaattaaaccctatgacagcaggtaccgatggatcattatacgccactaaacatttgtgcacacaatttacgacggcttgtgctagcaaaccttgctgcatactttgatcaacatcaa

SEQ ID NO: 160372 - DNA, 533 bp, Zea mays
  unsure (1)..(533): unsure at all n locations
  Clone ID: MRT4577_77839C.1
gcgggatagtggttcgatggcgcgctacaaaatcgtgtgtagggcgagtggcgagacaacatcaaagcaaggcgcgagcgtggattatgccccatgccatgcagcgccgtcaggggcgcgcaaggccncccactgcccgtatcgtcgcacatagagacgggccaagccgtactccggcgcgcgtgggaactcggacccggcggcgtgtggcaccaggacggcaaccaccggcagcatggaccacctggttctggacggaggccctggtatgggtggccgtcagctccagactgcgagggaggagcacaagaccgagggcatcctgcatcggtccggcagctccagctccagctcgtcggaggactacggcatgggcggaaggaggaagaagggaatcaaggggaagatcaaagagaagctggccgggggccacaaggacgaccagcacgccacggggacgaccggcggggcctatgggcagcagggacacacccggcagcgcctacgggcaggagggacacaccgggggggcc

SEQ ID NO: 160373 - DNA, 310 bp, Zea mays
  Clone ID: MRT4577_7783C.1
gcagaatcaacactacttgaagaaccatagcgtgggtcctcaaattgctctggttcttcaagtagtgttgattctgcatcatcatagaaaggcatatgtccagcacgaaaatgaggacccatgctatgatccagatgcaattgcattacttgggccagtttcagaatctctagataacttcccgtcggacttagattgtggatttttctcgagtgatgttgctaaagagtcacatgggaggccttcaccaattgagtctcctctctcaagatctcgtacggttgaagaaaagcctatcgagcccccacac

SEQ ID NO: 160374 - DNA, 196 bp, Zea mays
  Clone ID: MRT4577_77840C.1
ctttggccccacgcacattttggtcgagttctaccttaccattctcatcctcatctactgagaccagaaccaccgccccattggatccatccactgaatgcccgcaagcgcaccaccatgcatgtacccctgcgagcccttaacctttctctacctatgcatacatcctgttctgggaggaacgtggccaggtacc

SEQ ID NO: 160375 - DNA, 612 bp, Zea mays
  Clone ID: MRT4577_77841C.1
aattcggcacgagggttagactcagcagcggagaacaaagtcaagctcatgcagggtgctggtaacatagtgaagacttttgagaggcagctggtgcaagggaaaaggaatgactttgtttatgggcccttccaccctgctggtgcaaagaaacacgaaactgatgatcaaactgttaagcagcaggagaggaagaacattcaggactgggaaaaccttgctgtgtccttccgtccacaatatcagaatcaagcactgaatgatctttttggtcattatgtggaagcatggaaatcatggtacgtggatcttacccaggaaacggcatcatgaagcagaatgttggcagggaaccaccctgtacaagatggaataaaaacacgaaggcaattttgtctttcgactgtatttactcgaatgctagaagtgaggccattttttcataaggaaaaaggcagggaaaatgggaaatcgatcgagttatcaaattgttgctagtggactattctggagtcaatcgagttgtcaccaaaggtttaccgtttcctcgtctctggtatccgcttcgttgtatatcatacagctttagttgttgggtacggtacgaggagc

SEQ ID NO: 160376 - DNA, 1011 bp, Zea mays
  Clone ID: MRT4577_77842C.1
cggacgcgtgggcgccctaggtattgatacacgggccagcgaacccccttccccctcacccacctggtaggccgcgccgccgaaatcgactccagggagtttgcaatcggggtagagtgacgtctgggtgtgggagatgggcgccgccgcgatcagatcaatcctatggtggcggtgtggagtcctctgagtcatgcccgtgtgccttgccatgttgtgcgcaacgcatgcgtggctttgcttggggggactcatgcttggtgtatggaggagttgctcactggagcaatggtggcgtcatggatccgctcctcgccgaggccggcatcacccgaacgacaatccatggatatcgtatcaaagattgtgcaggtcccgaaaataactgggaaggctgtctgtgttctctcagtgtttggggccgttcaggattgctatctgctccactctgctgtcatcttaaatcacaagggtcctttagaaatcattcgtgtgtttggatccattttgacatttgatagtcctggatttgggtgcttatctgcgactcttgcttgtggtgattgttctcttgtcagtggcattgcagttggacctctcatagctgcaacaccggtgcaggaagaaagaggcataagtgaataacgatgcacgagacgaacacgaggcgaagaggccacaaaagagacgatgtcagcggaagaggcgaagaggccacgagacccacgagacgccgcagcggcagtagtctgcagcaaggagcgcttaagtacgggattgcagcgaggtgcgacagagaaagagagaaaaccttgggtttcctggtcagcgaggtgcattttattttagaagtactataaatttaaattagggttggaaatggatgtttggtgatccgaattattcgtattcgtactcactaaaactgctaatatggatatccgtatccgtattcgatttcaatatgtttgtcaaatggatgtattcgaattcgatttatagacttttctc

SEQ ID NO: 160377 - DNA, 1611 bp, Zea mays
  Clone ID: MRT4577_77843C.1
gcacgagccctcccagctcgcgcgccctcgatggatgcctccgccgccacccccgcccccgggccttccttctctggcgccgagtcctccgcggccgccgcccagccgccggcggaggctccgcagttgcgcgtccacggcgccggcagcggcagcggcgtcgcgcgagcctgccgccaccacgcgtacagccgcaagcagaagtcgctcggccttctctgctccaacttcgtggcgctgtacgaccgggaggacgtggaggtgattgggctggacgacgcggccaagcgtctcggcgtcgagcgacgccggatctacgacatagtcaacgttctcgagagcgtcgggattcttgtgcggagggccaagaatcggtatacatggctcggattcgggggagtccctgctgcgctgaaagaactcaaggagagggcgctaaggaagatgtccggatcaccggtgttactgtcaatggaggactcgtctactgccaacttatcagatgatgaggatgatgaaaaattgggcgatgctgatgaagatgctgagagcgagaagctcagccaacctgttgacaatacgtctgataagcctgacgcacccagctgccgccttagatctgatcatcggaaggagaagtcccccgacagcaacgctcagaattttgtcaagctcttcctcaacatggaggttgggacaatctcacttgacgaagctgcaaggcttctccttggagagggacatgcagacagcaacatgagaacagccaaagttcgtcgattgtatgacattgccaatgtgctgtcttctttgaacctcattgagaagacgcagcaagcagacacaagaaaacctgcattccggtggctaggccaggcaaagcgaaagcaagataacaatgtcatggtttctgtacctccatcgatgaaggcaatgcccaataagagagcatttggtactgatcttacaaacattgacaataagcgaggcaagttagactcagcagcggagaacaaagtcaagctcatgcagggtgctggtaacatagtgaagacttttgagaggcagctggtgcaagggaaaaggagtgactttgtttatgggcccttccaccctgctggtgcaaagaaacacgaaactgatgatcaaactgttaagcagcaggagaggaagaacattcaggactgggaaaaccttgctgtgtccttccgtccacaatatcagaatcaagcactgaatgatctttttggtcattatgtggaagcatggaaatcatggtacgtggatcttacccaggaaacggcatcatgaagcagaatgttggcaggtcagttgtaacttgtaagccgtttccagtagttagatcaactgagttgttgatgcttgcttagggaaccaccctgtacaagatggaataaaaacacgaaggcaattttgtctttcgactgtatttactcgaatgctagaagtgaggccattttttcataaggaaaaaggcagggaaaatggggaatcgatcgagttatcaaattgttgctagtggactattctggagtcaaccgagttgtcccccaaccaaaaaaaaaaaaaaaaaaaaaaaaaaaaagaaag

SEQ ID NO: 160378 - DNA, 143 bp, Zea mays
  unsure (1)..(143): unsure at all n locations
  Clone ID: MRT4577_77844C.1
tggtcgctgcggtccggtccggtaccgggtgcccagctcggcactattacaagcaaggctgaatgggagcacactaaccatcactggctaaatactgcacaacatatacataattacatataacacctnnncannttctttct

SEQ ID NO: 160379 - DNA, 482 bp, Zea mays
  Clone ID: MRT4577_77845C.1
gttggtttggtttttttttttttttttttttttgggttttttttttttttttttttttttttttttttttttgcttagatggggtccggcttcaaaaagaaagcaactgggggaaaaaaacccccgggggcccaacaacccaaaggggaaagggggggggggggcaaagtctttaaaccccaaggcctaaggcccaacaggggccctgggtttcccggcccccaaaattaatttccgccggggacaaaacggggggggggccccccagggcgggggatcccccttgcggggggcttgccctggggtttttgggttcccggggccttgttgacaaagggccggtccgccaccaagaagggccgcaggaatctatccccaaaagggtttcccgggaggaccccacccaaagggcgggccacagtccggggggtccaaaggacccggggcccttgggacccaggagccctcaagtgagggagccc

SEQ ID NO: 160380 - DNA, 351 bp, Zea mays
  unsure (1)..(351): unsure at all n locations
  Clone ID: MRT4577_77846C.1
gcttcttcgtcgccaagcaggnagttcacctcgctcggtgtgcagtgagcgactagattgttgactgcataacaaaacccatcgtcgtcggatcggagatgatgagttccgtcgtcgtggatgctgctgcatcaccaccactgggtcttcagaccattagctttatctactccagagcgcagaagaacccgatcgacaccatgagggtgttgctcggtggcgtggctctcctggctctcgctgcgagcgccaccttcacgcatacaagcggcggctgtgggtgccagccaccgccgccggtttatttaccgccgccggtgcatctgccacctccggttcacctgccacctc

SEQ ID NO: 160381 - DNA, 331 bp, Zea mays
  Clone ID: MRT4577_77847C.1
cgctcacgttcgggcactcacagtcaaaactacttctactcaatcacgacacaagctgagcaggagtcatggaccccagtgaggtcggtagctaagcaaatcagggggcagttgtactcaatgtatgactccagaagaagaagaaggagctaagctacgataaggacttgctgcaattcctggtcaggcgattcggacgctacgtaacgatggggctgtacacgcaactggtgtacacaggagacatgctatatcaagacgtcgaggttatgaacgtcttctacgaaatgcaagagctggtattaaactcgaggatgatcaacatgaagac

SEQ ID NO: 160382 - DNA, 635 bp, Zea mays
  Clone ID: MRT4577_77848C.1
tgtttttttttttttttttcttttttttttttttttttttttttttttttttttttttttttttttttttttttttttttttttttttttttgaaaaaaaaatggcccacctgacaaacaaaggggcaactctatacccataaaagcttttgggttgcgaggtcccccccttacaggaagggggcgggggtttggaaatcaaagtctcaatccaaagcaatttgggggaaaaatcccccctttccaagaataatgaatttcttcaaaatgaaagggaaaaacttcacccgatcccgattggaagggcccggaaacaaacactggttttgtttgacaacctatttctccatttaagcccccccggaaccgaatttttttccgaaaaaaaggatttggggctggttatacccaaaaagcacaacaaatcctgtaatgggcccaaaaaggtttgcaccagcccccttgaacaggaactggggcccttcttttttaaaaaactgtttgaacccgtccaaggagctcttgtacttgacagcctcaccagaggacaataacaaccttttaagaacggtttccatgggggaaaatgcaaaacccaccccatttgtgatcagccaacccaaagggaagctggc

SEQ ID NO: 160383 - DNA, 847 bp, Zea mays
  Clone ID: MRT4577_77849C.1
attgggtacctcgaggccggccgggaaaaatgccttttttgcgatgcaagtggaggaaagatgatgaaattaaaggacgttgacgtagcatgcatcgccatagtgggatttgaaaaaaagaggtttatgtcgggccgaaggtacatgtgcgtactccgtccgtcgctatttaagtgtggcccgtgacaatcatgccaatcatctccctccaccccgactcctactggatttatagaaaaatatttacggcgatttatatctccgaataaacatattattaaagccaacaaactatctaattaagggtactgattatctactggtactgattatatactgtaaatctccgcacaacataggtaaaaaaaagataattagttcttcaccttttctttttcaagaggaagtttttaccatgctacagttgttggacagatcaataattgggtttgggcatgcaggtgagagcctgcacacgcctttcctgagcccatacctcaaggcgctgggcgcggatttcagcaacggcgtgaacttcgccatcggcggctcgacggcgacgccggggggctctcccttctcgctggacgtgcagctccatcagtggctctacctcagggccaggtccatggagatgatcaacctaggtctgtcaactgtggagtagcttagcttttgttaagtagcagtaaatttggtgtgagacctgttaattaattatcgatgtgtgttggcttggggggcggcatgcaggacagagccctccatcgatcgcgaaggatcccgaaggccatctacacatcgacatcgggcagaacgacgtgtctgcttacatgcacctgcccta

SEQ ID NO: 160384 - DNA, 359 bp, Zea mays
  Clone ID: MRT4577_7784C.1
cccacgcgtccgaaaaaaaaaaaaaaaaaaatacataaagacctacaactaacaacgataaggaggagctaaactcgactaacctcgacataaaccttatcgtccgtccctaccatgaatgaaatcctgcacatccatggcggtcagtgcgggatccagatcagggccaagttatggcaagtgatctgccacgagcatccaaattgaccacacgggcaaacacggcggtgactccgacctacagctcgggcgcataaacatctactacaatgaggcctactggcgcagaagccttccgcgcgccgcgctcatagaactcgagcactgcaacatgcacttggtacgctccctacactacg

SEQ ID NO: 160385 - DNA, 2067 bp, Zea mays
  unsure (1)..(2067): unsure at all n locations
  Clone ID: MRT4577_77850C.1
ggaacaggcaaagttggattcatgtttgccccgacgctggccggacgcgtgggtaatttgggatccatcggaatatataatcttgttaagtatgacatttctgttgtgagagcattcaatccagtgtatatatatgtgtttttcgagacaaacggcattaaggcgtggtcagctcttggtggttgtgtcttgtgcatcacaggagctgaagcaatgtttgctgatttgggccatttctctgtcaaatcaatacaggtagcatttaccgccgtcngtattcccctgcctgctaattgcttacatggggcaagctgcttttttgatgaaaaacccacttgttgtagaaagaatattctatgattctgtaccaggggttttattttggccagtatttgtgattgctacacttgcagctatgattgccagccaagctatgatatctgcaacattctcttgcataaagcaggccatggctcttggctgcttccctaggattaagataatccatacttccaagaaagtgatgggccagatttacatacctgtgatgaattggtttctaatggtcatgtgcatcatcatcgtggcaacttttaggagtaccaatgatattgccaatgcatacggcattgctgaagttggcgtcatgatggttagcactgcactggtgactttggtgatgcttcttatatggcaaaccaacttgttccttgtgctatgcttccctattctttttggtgcagtagagtttgtttacttaactgccgttctgtcaaagatacaagaaggggggtggttgccgctggctttctcatcactgtttctctgcataatgtacacatggaactacggaagtgtactgaagtaccagagcgagatgcgcggcaagatatccctggacttcattcttgatctgggagccacacttggcaccgtaagagttccaggcattggactcgtgtacaacgagctggtccagggaatcccatcgatctttggccagctattagtcacacttccagcgatgcactctacaattgtctttgtttgcataaagtatgttcctgtcccttatgtccctcttgaagaaaggttcttgttccgaagggttgggcagaaggactaccacatgttccgcagtgttgcacgctatggttacaaggacgttaggaaagaagaccatggcttctttgagcaacttctggttgagagcctggaaaaatttctcaggagggaagcccaggaaattgcgctggaggcgagcacaatggaggcagagcgtgatgacatatctgttgtatccgaggtgcctcagactcctgcaggtgacggggacctgcaaactccactgctttctgaccagagatcaggcgataacaacaggatggccgccacagatggaagcgaccctgtgctcccctccagctccatgtctttagaagaagatcctggcttagagtacgagctgtctgctctgagagaagccatggcctctgggtttacgtatctcctagcacacggagatgtgagggcgaggaaggaatcagtcttcacgaagaagttcgtcatcaactatttctatgcgttcctcaggaggaactgcagggccggcactgcaaccctgaaggtcccccattcgaacatcatgcgtgttggtatgacgtacatggtctgactgggactctgctactgttgcgtcacaggactgtaccacgaatcttgtatggactggtgctgcaccagctcgtagtttaggggctgtactgtggtaccgattacattcattgctgcctctggccatctgcccggaatttgtcacagaaatgactgtatttgttcgatgtgtgattccttccgcctttggtcgtcatgtggtctgtatgatatatgtggatactgtatctgtatgaacaggtatttgtgcaaatgctccttgcatttgttgccccctcaaataatgcagtggggggtaaatgccaaatattgggcttggctccccacatgctaagctgtactgtacataataataaaaaaatttcagtttcatgtgtccgacatcttattgag

SEQ ID NO: 160386 - DNA, 579 bp, Zea mays
  Clone ID: MRT4577_77851C.1
cctgacttcgcgaatctcacctggtgggctagctcactcactcgattgcccgcaatctcccgaatcgctttattgctccctgtccgattacctccaatcaggcaggggcagcctcacggtcacaatacactagcctctactgctctaagcttccacacgatgacgttctgatgtgaggacgatacacaccggacccggcgatggggttgagggctatcctccgcaccatgttcgtagctagcgagagccgaaccgagcacgcgacatgggggaagaccctacagctggggctatgtgactcatacggtgcacggggcccaccagtctgtgactcagggttacatactggctaggggcatgggcgggctgaactgcatggccagtaagacaatcaccgcagacagttaccaacgggctgatctacttctccgcgaccaaacaacctttaggacaacgacacctacgtgtgcggcttcaacgggctcgcgtacgacggaaacgacgtgcacgcgctgttctagcttacgctactatgccagagctgatacgacaagcgtagggtgcactctcactacgacc

SEQ ID NO: 160387 - DNA, 474 bp, Zea mays
  Clone ID: MRT4577_77852C.1
gaccctccgaggctggccgggctcgttgaagcctagggttgggcggagcaccttttttatcgctagatgctggccaccatttacggtataccacccgcgcgtgcaatgtgactgtacaatagcaccagagcatgttgagcaccaccatcacgaaggaccttgatgacacagacgagctcaagggctgacgggagaggcaggacgacacgatcggaaagaggcgagtcgatcgcggactggatcgttcaaggtctatctgggactgttgcacaccaattacataaggaactggatcataatcgctttcaatcgtaaagcggacgtctaagacatctttgatgcaccaggtatggtaggtgatgctcatgcgtcagataatgggacttacgtagtgaacctgcagcctgcagtcatgaccgtgccatcagttgccaacactgatgctagagagactgggcttaataaggatgtgat

SEQ ID NO: 160388 - DNA, 636 bp, Zea mays
  Clone ID: MRT4577_77853C.1
ttgggtacctcgaggccggccggggttttcttcggtcgcggatcctattgccctcgagcctccgtcctccggcgctgcaccgagtgaccggcctgccgtcacctgagggatacactcagccaccgccatgacgcaaatgccctgtcgggcgaaggatatctcttcatcgcgagctgacgaattacaggaactctcgtccgatctggctcacgatcggataccacctacgaggaggtagatgattaccaacgttgccattaaggtccatatgtcgacgaagattgtggttgtgctccgagaccataacgtgatcccggttgtcgagagagagaatggaacttagattgtccgcatactcgaggctcgcatgggtatggagacgataatgccggaagagctctacttcctctcttattaaggacgagacgatcaagaagcatctggagaagatctggacggccaaggactccaaattcagactcctttcttgctgagagcatgatccaccgtcttgcccgctactacgagcgcacgaagaagctcccacccaactggaagtactgagtcaaccacggtatagcactctggtggcctaagagatatcctctgatggcttgagcgttaacacctatgagc

SEQ ID NO: 160389 - DNA, 955 bp, Zea mays
  Clone ID: MRT4577_77854C.1
ccggccggggagatctggttcaccggcagactgctgcatctgctgttaagcacatggctctaggtgttgctggcttgggttgtgaggatgctcttgttcatctgcttaactatgtttggcccaacatatttgagacatctccccacgttataaatgctgtcatggaggcaattgaggggatgagggtcgcactaggtgcggctgtgattttaaattattgcctgcaaggtctcttccatccagcaaggaaagtacgagaagtgtattggaagatatacaactctttgtacatcggcgcgcaggatgcacttgttgcttcttatcctgccctggaagacgatggggataacatctttagtcgtccagtgttggcaatgtttgtctgattaacgtgagtcttccttactcccaaatttgtttacaatgatattaacacatctgttttgagttttttttctgtatccttagatcgtagagtgtaaatgttttgggctgctggtcgtacacacttgactgtttggggcacttgctaccatttcagcaagcattatcaaccagtagttgatctgtatatgtgtttactttgtcttctgttttctcctgctccttatctatgcaaaggaagaatctgatatacaaaaaaaaaaaaaaaaaaggggcggccgcattgacaggctggatgtccatgtacatgtatcttcatccatattcttgtgaagcttgaactgcgtggtatctgagttagagcttgcatatacaagttacctcttgtgatgcatgtaattgaatttgcatctgtttctgtatttgcaggattgttccttccgaagggggtgcacaatgtttaggaattgttattatggtttactgtaatgcaactctaaatcactatcgtaatctgatctactaaccatttgggaaatgttctgttttcagggtagtccgtgttgaagct

SEQ ID NO: 160390 - DNA, 116 bp, Zea mays
  unsure (1)..(116): unsure at all n locations
  Clone ID: MRT4577_77855C.1
atatgtaagattatgtaatannnnntggttaacaaaacatgtgagctgtcctatccatcaaaagaacaacatctccagcatgtgcctctgacctctagcacttttcttatgttatg

SEQ ID NO: 160391 - DNA, 306 bp, Zea mays
  Clone ID: MRT4577_77856C.1
tctcgacccacgcatccactcacacttacaatccattttcatcatatatctaactatcactatttcagttacatttgacatgcataaatacttcaattgatcatatacaatcaactacaacaacatcaactacatgatatttcattacaaatacttcatgtaagaatatcaccttcatatcatcttataaatatcttcttatttaaaactattattaatgccaacatacaacctcatcaccaaactttcaatatttaattctatccataaatttccatactctttactcctttacaattcctacca

SEQ ID NO: 160392 - DNA, 781 bp, Zea mays
  Clone ID: MRT4577_77857C.1
cattgggtacctcgaggccggccgggaaacctgcctccgccgcctcgcgattgccccccctcgcttcctaccatgtcgttgcgctccgatccgaaaatgtagcgatggttttgcgtttttgttgttctttgttggtgatctgatgatgggtgcagagatgtcgtcgccattcctgacaaggaagatcttgaagaagcgcgtcaaacagttcagcatcgacgtgctgcagtggacggcaagcggatatccgtcacatcgattctgatgtacgcgatgcgcgctctacacaagatcagaaggtcaaaggtactctgaccatcctctcagtttgtaggctcgaatcgaatcctgctcagagcttagctgcactcggttcaaccctaatccctcccaacctaggccttgtttgaatgcaatctacttgtttgagtggattaggttggattttagttagggtggaaattaaactaaattccaccccatccaaaagagggctcatgtggatagctcagccaaacaacccgccctcgaagggttcactgtcttgtattggacaggttacaatctgtacactgacatagtcctggttttcatatcttagttctgaaatgaaacccgtggccttagttgcaaacggtatcaatgtgaatcttgctttctattgccatgtgtcgcttgagtaactttattgtgcctttaaccttgttgagtaattccttatgttgtgaaatctgaaatgtgaagacggtgtttcccaaaaaaaaaaaaaaaaaaagcgggc

SEQ ID NO: 160393 - DNA, 449 bp, Zea mays
  Clone ID: MRT4577_77858C.1
acgacgcgaatacaaacaggctttaaaaaacatgaccaaaattgttccggggaaacccttaaagggggggaagggaaacaaaaatttttaaaccagcccaaaccttaaccagttcatagcaggatttcccagatcaacatagacctccaattcgggggctaaacagctttggataaagcacactcacttgaagcatttcgggtaaagcaaggcccccccctaaaaggggtcctgggccccgatcatgggattgacaccctccttttgggcctcataaaaaatgtcgaccttggcccactcggaaagctccatgtcataaaccccatccattacaaacttgggaaccccctggccacggaaaaaccaaaggcccttcaacttgaagggggggtaaaaacctaccacgagcattttgccaaaggggtacttgggggacaggtccatcccgt

SEQ ID NO: 160394 - DNA, 996 bp, Zea mays
  Clone ID: MRT4577_77859C.1
ccggccttggcccggcccatccagtagaagactagaagaggacggtgggaaagaggggtccaagaagcagggcacggcaccagacgcgcccatggaccccaccggcgtcgacggcgattccgcggcggcgagggggagcggaggcggaggcgaggggggacaggggccggccggtgggcggttggcgcggtgtgtggggggctggtctactaccactgcgcggtacggcgagccagcgcggtgtcccttgcagcagacgtgctcctcgtcctcctctgctcgctctccatcctcggcctcctcttccgccacctccacatctcggtgcctgtggatcctcttgaatggcagatctctcaggagatggcaaatagcatagttgcatctttagccaatacagtaggagctgctgagtctgtattaagggtggctgcaactggacatgacaagaagctgtttttcaaggtggtttctacattgtattttctagcagctttgggaagggtggtgtcaggcgctgccgttgcgtatgctgccctatgcatcttctgcctctacatgtttgcacaaagcaccgatctgtttgatcagctcccttcttgggtccctgtgggtagggattctttgggcggtactcaggataccgcgtgattttccacatgtacatggattgcagagtttttcttctcttccactgtctgtatatggtcttgcaggctaatagcttgaactatagcatctatctctgcccccacggtattacaactgtacccagtgtttagcaatggagtaatgatctttgtatatatatatatatatatattgcaacttgctagatgccagtgatgcaccctgtatgttttcggagctcattgcagatctctctggcttgacatggttgttggtcgtgagattttgtgatggtgtgttttgcctgtaatctaaatatctaataaagatctgtctttcatcaaaaaaaaaaaaaaaaaagcggcc

SEQ ID NO: 160395 - DNA, 1292 bp, Zea mays
  Clone ID: MRT4577_7785C.1
cggctcgagcccgaaccattcaggaaaccttacagtggactttcttcagatagtatgatgtgccaagaaggaaaaccccaggctgccgttgataaaactcttgacagcaaggttttcaaaggatgggttgaaactgacaatccgtggacatctgatgacgagactgataataatgagatgacttacgtgaatcttcaactgaatcctgaacgatacactggctatactggtgattcagcaagaagaatatgggatgctatttacaaagagaactgtccaaaatatccctctgaagaactgtgccatgagaagaaggcattgtacaagcttatttcaggattgcactcctcaatttcagtgcatattgcttatgattaccttcttgatgaatctactaactcatggggacaaaatcttcctttgttgtatgaccgcgtcctgaagtacccagaacgtgtccagaatctgtacttcacctacctgtttgttcttcgggccgtgacaaaggcagcaaattatcttgagcaggctgagtacaataccggcaatcctgaagacgacttgaaaacagaatctcttgtgaagcagttgctttacaattccaagttaagatctgcatgtccattgccttttgatgaagccaaactttggcaaggcgaaaatggtcctgagctaaagcaagagattcagaagcaatttagaaacattagtgcaattatggactgtgttggatgcgagaagtgccgactgtggggaaagctccaagttcatggtcttggaactgcactgaaaattcttttctctgttgatggggacagccatatgaatcagccattgcagctgcagcgaaatgaggtcattgcattgttcaatcttctgaacaggctctcagagtctgtcaaatttgtacatgaaaaaggatcatcaattgaagaagtcattgaggaacagatcccttcaacggttcaaaagagtgtttccatgccgaatcttaaactggacttcctctgagatgtatgagagtaatttgtagttatacaagattgcaatgacatgctggaagattaacatagacatgtacggatataacgaaagattaacatgtgctggaagcagtttcatacatacttgtgttgcagctgtatttaagagaatgagagatacagatacttttgagctaaatgcgatgacacagttaacatagcccccccgcacctcaaacttttccgtgtattgggttcctccgctgtaaatcaaaggatgtcacccctctgcactcgccatgatcaaga

SEQ ID NO: 160396 - DNA, 725 bp, Zea mays
  unsure (1)..(725): unsure at all n locations
  Clone ID: MRT4577_77860C.1
aattcggcactcggcacgaggaggggacgaagagggagagggaactgggacttgccgcccccgcctccgaattccccactcctccaccaccgccaccactcaccccttgctccgctcggcctcctgaatccggcgtcgtcaagcaaccccactccttctgccgttatcagaaccctaaccgatcaatccgtccgattcccagctgccggtttcgcgttgggagcgccggagcaggggaggggcggagggtcggatcggcagccgcaggagcattgagcgatggctgccgtgtaggatgcagctggactccgccggccgccgcctagctgctgctgttgttgctgaagttccgatgcttcagcaaccgcgatcttaataggagcggagggtggagtaccggtggagtgggccgggcggctggttgatctccgtgagctccagcgcctacgcactgggaggtggggaggtgattgccggaggcgtatggaggaacctgggagggagggggattcccccgggccgccgtgggcgccaagtgagtcctcagctttccgggcgttcgttacggcggtgggggagcgggcggtggcgtcgccttcaggctcggacaatggggattccgtctgctcaagcaacctncgcgccgtcaggaagagaccttttgttgcagattaaccacatatatcatccaaacttttgaaaatgcgcatcctgagtttaagtac

SEQ ID NO: 160397 - DNA, 658 bp, Zea mays
  unsure (1)..(658): unsure at all n locations
  Clone ID: MRT4577_77861C.1
cctccgcatctcggtgcctgtggatcctcttgaatggcagatctctcaggagatggcaaatagcatagttgcatctttagccaatacagtaggagctgctgagtctgtattaagggtggctgcaactggacatgacaagaagctgnnnnncaaggtggtttctacattgtattttctagcagctttgggaagggtggtgtcaggcgctgccgttgcgtatgctggtaataacacagcaagctaactcttcccctgatgtcctgttctccatttgttgtgtatatgctttgttgaaacnnnnncctatatgagaaattaagccctaatnnnnnnnnnnnnnnnnnnnnnnnnnnnnnnnnnnnnnnnnnagccctatgcatcttctgcctctacatgtttgcacaaagcaccgatctgtttgatcagctcccttcttgggtccctgtgggtagggattctttgggcggtactcaggataccgcgtgattttccacatgtacatggattgcagagnnnnncttctcttccactgtctgtatatggtcttgcaggctaatagcttgaactatagcatctatctctgnnnnnacggtattacaactgacccagtgtttagcaatggagtaatgatctttgtatatatatatgacacgttgca

SEQ ID NO: 160398 - DNA, 544 bp, Zea mays
  Clone ID: MRT4577_77862C.1
ccggccggggtttgtgttgcgtctgcaggctgtgctctcgccaccacgtggtctgtgccgcgtttgtgttgtcgcctgcgttgcgtgctggtcattggcaacttgcttatctttccccgattcggtagtttcctggccccgtatctactactgcgtgagtaacaagagactgtttcaccttgatggattcttcagacgagacaaatgaagtacccgttgataatagccaattggacaagcattcaacagttgatgatgaatcatctcttgatggaaaaatagatgagcataccagacttcctatacatcctattgaagaagatatatctggaacaaagataaattatctagcgccaatagatgaatgcaaatttgcattacatcataataaaccaaaaaaggacatgacaactgtaattgttcaagaaggtattacaatcgtgtattagttaactctactattactatttgatcagttcgtatgttttaaataaactaattaacttcgaccattctatgcaaaaaaaaaaaaaaaaaagcggcc

SEQ ID NO: 160399 - DNA, 561 bp, Zea mays
  Clone ID: MRT4577_77863C.1
ccgcacacccaagcgcgtcgagttttctacaccaccggagctcatggaggagctggtggatgctgagtatgatgtgggtgatcctctccgattccgcatcgtcgacagtgtgctgggtgctgcctctccacctggactagcaccacgcgttctggacagcggcgacctgctgttcactacggcggaggagcccacgacgttcaaggaggctgagcagagcccatgttggcgaagggcgatgctcgaggagatgaagtcgatcgaggaaaacaagacttggaacctcgtcgaccttccagctggccacaaacccatcggcttgaaatgggttttcaaggtgaagcgcgatgagcacgggaacatcgtcaagtataaggcgcgattggtggcaaaggggtatgttcaacagcaaggtattgattttactgaagtgtttgctcccgtggcgcggctggagtccgtttgcttgttgcatgctgtggtagcacatgaaggatgggaggtccaccacatggatgtaaagagcgctttcttgaatggtgatctgctggaggaggttta

SEQ ID NO: 160400 - DNA, 522 bp, Zea mays
  Clone ID: MRT4577_77864C.1
tttggggttttttttttttttttttttttttttttttttttttttttttttttttttttttttttttttttttttttttttgttttttttttttttttgtttttttttttgtttgtgtgttcttctttttcttttgtttttgagttttaggggggggtgggggctcgttttttggggggcgcgggggggcaccagggaattctggccagttccccagggggatttcgcttttgaataaagggggggggttgggggcggggaacaaagggggactttattgtttttggggggaatttgcttactggctaaggaaacctaacggtttcggcgcggtgcctttatttactccgctggcgctccccacggggggtggcaaatcgattagggggaggggggttttgtttttttttttcgggggggaagccctgggctttccttgaactaagggtaggtgtctcagggggggagggggggccttctttttggctccccgggggggttttttttctaaagggggggggg

SEQ ID NO: 160401 - DNA, 449 bp, Zea mays
  Clone ID: MRT4577_77865C.1
gactcagagcgagggcgaactcattcactttatacaaaaaaacatgactcaccgctgtagatacaatgaatgtatatggacataatctggcaccactcaacaatacactcttaccaagatgcttatagctagactcatgttcgtacatgatttctgtgttaacactagcacggataaactggtatccaagcacatacttgactatctgacccgctgccgttggcctatctgctaatctgaactatacatcttggggtaagccacaatgacgcacctctggacggactctttgatgggctcttgcgtaatcgtggtcctcatccaaagtgtcgctggacacaagatcgacgcctatcgtcaacatgatagtgatcttcttgatgcacgctacaacaagcacaagctttgatgctactgaacccagaccctccatgtggacactgcggaca

SEQ ID NO: 160402 - DNA, 367 bp, Zea mays
  Clone ID: MRT4577_77866C.1
cccgggccggccgccctttttttcttttattaatctcttaaacccccttacggaaatgttcaaggctgaggtcacaaacccccaggtccactttatgttcaaaaactttcatccaggcacaaagctgttttcaaataacataaaacctttattacataacattgggttccaaaaactaaataattaaggaaaagggggtccgacaaccattagatgaccgtgaaaagtctagtcgatctcctgcagaaaggccccggaggcggagccaccaccgggggcggaaacgacctcttaggcaataaacttgcccttatccttgtggggggggcggccccgggccttgcggtcgaggagcgccttacggtcc

SEQ ID NO: 160403 - DNA, 321 bp, Zea mays
  Clone ID: MRT4577_77867C.1
tcagatacctagctacattcaacatctagttagcgtacagaacatcaactatcagtgtggggaccaattctaaggatgggccgcaccaacaccacagcacgagtattgcgcttcgtcagtggcgttccccctctcaattgctacagaatgcctactactgtcagacggcatgccctcgcctctcacagatcatgacccttcgaagcttagcctacagtactactccaagacttgccccatcgtgcaacaccacgtccatactgatatagactacgctgaacgctcctacacgctctacaccatactcattctcctactcca

SEQ ID NO: 160404 - DNA, 256 bp, Zea mays
  unsure (1)..(256): unsure at all n locations
  Clone ID: MRT4577_77868C.1
gtcacatatacaaagcctgtcaaacaacaaacacaccgagagagggaggtctancatgtcctcctaactacgccagatatatcctatagactagctagctgacagatagactagatagatcagactcatcatgtctcagccaagaatattatcatggcaggacggggccggttcactgttggtcacctgggtacgggcaatgactgcgccacgctgcgcctccgcggccggcgagatcctcggcaccgcatgttcg

SEQ ID NO: 160405 - DNA, 545 bp, Zea mays
  Clone ID: MRT4577_77869C.1
ccggggccgcctccaccctctccctaccacgaagttgctcgttatatacgcgccacggcgccatcgacctcgttgttcgcgtctgcgccatcgtcctcgccctgaactcacccacgctgtcgtccattatttaccacgagaggcccaatccaggatgagtggtcccagcagccgccgactcgagcggacccacgccgccacggccgcgatagacctctgctcctcatggaatgagcaaccactagctccgatgaagtggcgctaccactgcatatcgcctggttcactctaagcaatgccagcatgatggacgagagatgagactggatagggatccgaggaggttgttggtatttggtagatgtcgtgcagttgaaacgttcgacatgatgcagcaccgacagacgtctggatggatacacatgcaatatgttcgatgaaatgcatgttcgagatgctgtgacatagaaatccatcctcacctccgtctttgtatttgatttgatatgtaacctcgaagatagcagcaacttgtgtttcttgag

SEQ ID NO: 160406 - DNA, 666 bp, Zea mays
  Clone ID: MRT4577_7786C.1
attgggtacctcgaggccggccgggtacccttcttgatgaatctactaactcagcagcagattatcttgagcaggctgagtacaatactggcaatcctgaagatgacttgaaaacagaatctcttgtgaagcaattgctttacaattccaagttaagatctgcatgtccattgccttttgatgaagccaaactctggcaaggtgaaaatggtcctgagctaaagcaagagattcagaagcaatttagaaacattagtgcaattatggactgtgttggatgcgagaagtgccgactgtggggaaagctccaagttcttggccttggaactgctctgaaaattcttttctctgttgatggagatagccatttgaatcagccgttgcagctgcagcgaaatgaggtcattgcattgttcaatcttctgaacaggctctcagagtctgtcaaatttgtacatgaaaaaggatcatcagtcgaagaagtcatcaacgaacagagcccttcaactgttcaaaagggtgcttccaagacgaatcttaaactggacttcctctgagatgtaagggtgtaatttgtagttacagaaggacacgctggaaaattaacatatatatgcacggatataccgaaaaaaaaaaaaaaaaaggccgtacgtaccttgttgc

SEQ ID NO: 160407 - DNA, 351 bp, Zea mays
  Clone ID: MRT4577_77870C.1
ggcgccaccagggaccacccggtggcgaacccgttcgggccggacagccctgaactgggctcggtggacttcccgccggtcctcgtggtggtggccggcctcgacctgctgcgcgaccgagccgtcgactacgccgagcggttggcagcggcgggtaaacccgtggagctcgccgagttcgccgccgcggcccatggcttttacctgcacgagccgggctccgaggcgaccggcgagctgatacgggccgtgggccggttcgtcgacagctgcgtgtcagcgtccgaggtgctgcttgattagctgtttgcatgagtgcaatttggcttcgtatatttctatcgtacgtgt

SEQ ID NO: 160408 - DNA, 324 bp, Zea mays
  unsure (1)..(324): unsure at all n locations
  Clone ID: MRT4577_77871C.1
tacgcggcacgcgccttttnncttctttgggaagactccgtacacgctcacattgcgggtngctttgactgaagagtcgggacttggtgaaccgctattcgagtggattgcagttggtggaatgactaatacatacatttacaactgccaactgggagggcagacgagaatgaaacattatgagttacgattggggagaacgaggagtgagatgacttacattaagggcatggcgcgcacagccaacattgcaatgccaagacctgttgtgccatctgcaggaacgagtccgtgatctatcactgggaggaggcacgtgtaagg

SEQ ID NO: 160409 - DNA, 2307 bp, Zea mays
  Clone ID: MRT4577_77872C.1
cacaattatagaacttccagtggcctgtgccatacttatatgcttgtttgcgctgcaacactacggcacacacaaagttgggtttctttttgcaccaatcgtatgcatctggcttgtctgcataagtgcgattggcctctacaatatcatccgttgggatccccatgtttatcgagccctctcgccatactacatgtatcaattcctcaggaagactcaaactggtggctggatgtcactgggtggaatccttctttgtgtaacaggctctgaagctatgtatgcagatcttggacatttttcgcaatcatcaatccagattgcatttatatccgtggtttatcctgcacttgtattggcttatatgggacaagcggcttttatttcacaacatcacagctttgagagcagttatcatattggattttatgtgtcagtaccagaaacactcagatggcctgttctggtgattgctatactagcagctgtagttgggagtcaggcaattattactggaaccttttcaatcatcaaacagtgctcttcattaagttgtttccctggagtgaagattgtgcacacatcctcaacactgcatggtcagatatacataccagaaatcaattggatgctgatgatactctgcctggctgttactattggtttcagagacacaaaacacttggcaaatgcacaagggttggcagtaataactgtcatgcttgttaccacttgcttaatgtcactcgttattgttctttgctggaacaagagtatcttccttgcccttggtttcctacttttctttggcacgatcgaagtaatctacttctcagcttcccttgtcaagtttcatgaaggtgcttgggttcctattagtctctccttcatatttatggtgatcatgagtgtctggcactatggcacaataaagaagtacgagttcgatgtgcaaaacaaggtttcagtaaactggctcttaaaccttggcccttcactgggcattgtacgagttcgaggcattggactaatacatacagaactaatgtctggaatcccagctatcttctcccactttgtcaccaatctgcctgcgtttcaccaggtactggtattcctatgtgtcaaatcagttcctgtgccacatgtgcaaccggaggaacgatttctggtgggtcgcattggtccaaaagagtataggctatacagggtcattgtcagatatggttatcgcgatgtgcagaaggatgacctggagttcgagaaggagctagtcagcaacattgcagagttcatccgcagcagtggggaatatgacaagaatggcttcgtggaggacacagataagcccttgcccttcgagaagctgtccaccatcagtactggaatcaatatgttggaagaggatggagaagttgatgcatatgtatcccctcataaggagatagacccacacaatgcagcacccaagcgaaagaaagccaggttcatgataccaaagagtgctcaggtggacagtgaggtgcgccgcgagctgcaggagctcatggacgctagggaggcaggcatgtccttcatcctggggcactcgtacatgaaggcgaagagcgggtcgagtttcataaagcggattgtgataaacttcttctacgagttcttgaggaagaacagccgtggccctgcatacgccgcaaacataccccatgcctccactctggaggtaggaatggtctaccaggtctgacaacagttagcagctgtgtaaaggtagagagatgagacgacgcctgtcagccccacctgtatatataccacttgttgctgccgataccgttaacacaatcacaggatgacacgagtagtgagtgacccttgagcacagccaatgctgaggaagcagctgaagatgagatcatctgtggagagcccagccagaagtatgcattttttgtttgtagagccttttgttgtgccggtagttgttaagtttcgtatgtttgctgctgttgtttagtttcgtacttgtgagctgtaattgtctgtaagagtgactagcaaaatactgtagcatttttgacgttcagcggcctctgtagttctgtcacttgtctataattgaggtggactgtataggtagcagctaaacattctagtaggggctgatgtcgttgggccgcctgtattatagactgggccgtaaagcacagcttctttggggcctaagaacgtctggaagacaaaccacaaaggaaaaaatgtctctcttgtacctaaaaaaaaaaagggggtcacatttttagtcggcga

SEQ ID NO: 160410 - DNA, 317 bp, Zea mays
  Clone ID: MRT4577_77873C.1
acacccttccggcggtccgggcccttcccaaggtataggtatgaggataagaagaagaacctttggaaggcgccgcttggaactggccggcccaatttattaaggtctggatgggatgtatatatatattaatctaaacttatatggattcctgaggttaaaaaatttaaaaaaaatataaaatatgggtggcctctttatagattctcaactttatttcccctttcattcatacatatattttctttataggtttcatctatattataatttttgtcttttttttttcaactttttaattggaaaactcttttttt

SEQ ID NO: 160411 - DNA, 446 bp, Zea mays
  Clone ID: MRT4577_77874C.1
aggcttccgccaacgcttcggccaacccttccgccaacgcttccgagacaattccggagacctacgtcctgaggcccttaataaactaacatgcgatggaataaacagggggtggccacttccattagatttccagggattaatgtttgcccgcaattagggaaatttgtcagacctaaccattggtgggggcaatgtaccgaactggggtttttgggccataattgtcagttaacaatggtaggaggcttcctaatttgtgctgtttaagaccaatggcaatgctacttggtctaaggggtgttacccaggttctttctgggaactttagttggctggatccttatggtaatgtggcgaatatgggaccataatatgttttaaaaaaaaaaaataaatataaataattattataaataaaaaaaaaaaaggggcggccgttttag

SEQ ID NO: 160412 - DNA, 361 bp, Zea mays
  Clone ID: MRT4577_77875C.1
gtctaggaagggctttaacctctgcctatcttatggctgtggtggcctcatgagcccttgctctgagcacatgatgaatgctcatggtgccaggctttatatggtgctgtgatgaagggatttaccacctaggctgacatgacctggagagaccctgctcatgctgtggcagatgaaggctcccagaccataatggctccagacattgacgcttctggctgtaagcgcaccacagctgcgctgaatgaggctcgcagcgccatggaaggcctttattatggagatgaccgggacaaggaatccatagaggagtgatgatgccatgctgaagacattgtaaaggagttcccagatgtctaaa

SEQ ID NO: 160413 - DNA, 249 bp, Zea mays
  Clone ID: MRT4577_77876C.1
tgttcgcgggcggcacgcggacgtcggggtcggcctggagtgggggatgtcggagctgatgcgcaaccccccggtgatgaacaagatgcacgcgctgatcagggaggcgtttcgtggcaacaccgctgtcacggtggccgacctgtaggcgagccacctccagtacctgcaccatgatgatctacgaggtcctccggatccatcctccgataccgtctgctgttgcccctggtccggtagaccatccac

SEQ ID NO: 160414 - DNA, 417 bp, Zea mays
  Clone ID: MRT4577_77877C.1
gccacgcgtccgatgtgaaaatccttaaacccatccattatgttgtcaaagcacgagctaaaatgggggagaggggaaactatgatccttctatgagatgggcactgagaagctcctctgagcagatactggttctcccaacggaatcaagggacatgcttccagacatcaccttattaggaacagttcgtcacacacttactttgtcagattagatgaggactagcatatctactggaagaggaaggagctgatattatccataccgagggtggcaaatgttctagcccgcctgaacctggattgcgtggattagaatgaaaaggcaaaaccaacactgcgtggagcatacttacatctctcgggctgctagtattccactgttgtgcttgtcacggttaacctcggtgactgcac

SEQ ID NO: 160415 - DNA, 378 bp, Zea mays
  Clone ID: MRT4577_77878C.1
gttgttatgggtggccgcagggctccaatcaccacctgcatgggcgcgccttttgtgccacaagatcaagaggtcttccttccaaatgtctaacagagggagggccgcaccatcaccttctaagagtgtggagggattgagattgatgagaactgggacaaggataagactatggaccttcctgctgagaacccaatgaccaatgattcatgtgctccttggaaagcaacctcttcatggggggcacgcgggaaagagggtgacttcattaaatgagtgctcgccgttaacaatagacttggattagtcaatacgggcgatgaatcctaccaccatggtgaaagggcagccctaaacaatggacatgtcaggatgact

SEQ ID NO: 160416 - DNA, 462 bp, Zea mays
  unsure (1)..(462): unsure at all n locations
  Clone ID: MRT4577_77879C.1
gttcagctcttcttgacttgcactgaggtaggtcgggacggaagctggcaacgaccatgcctgccgtctcggccgccgcctgctgcgccgccacaaccccggcaaacgaggtcgcggaggacctcctcggctacctccgcgttctcagagacggcaccatactccggtccccgccggagccgttggtctacccagccaccttccccggcagccacccctccatgcactggaaggaggccggctacgacaagcccaacaacctgcgcatccgcgtgtacaggccaatgaccccgccgggggcgaagaagaagctcccggagcacgtccacttgcacggcggcggctactgcctggggtcgtgcacgtgggccaacgcncaggagatctgcctaccgctggcccgggaagccggcgccggngtgctctcccngggctaccgcctggcccacgagcaccgcctcc

SEQ ID NO: 160417 - DNA, 332 bp, Zea mays
  Clone ID: MRT4577_7787C.1
aaaaggaaaaaaaaaaacctttttttatataaataaaacatttttaagttttgaaaaacttgcttttaatttgtaaaaaaaaaactttttaaaaaagtttccctacacccaaaacctaaaaaactaaattacaggtaaaatgggtcctaaaaaaaccacttgttttttaacttaattaaaaagaatcgccttgttaatcaaaggattaaaccatgtcccccattttttatttttttacaccaccttttccttatataaaccaactctcttaaatttgaacacctttgttaagttccccggtttttttaaaaccttctaagaatttacctaat

SEQ ID NO: 160418 - DNA, 477 bp, Zea mays
  unsure (1)..(477): unsure at all n locations
  Clone ID: MRT4577_77880C.1
gggtacccctcggggcccggccggagnccgcgccggagccacatatacgccgacgtgcgcgtgccttctgggtgggtgacgcgcgcctacgggccggcagacgtgcgggggccgacgaccactccgacgatgacacgacctgcggacctgcgacgccgcggtctgccgacttctctctacgcaggatcgatgctgaactacatccctccggcgactctgtcacgacgaccagcgtacggaggcaccctacgatcgctatgggccccgcgcattaccagcctacgtgtgagcggacgttacggcgacggcgcacgtcggggcggacgtgcccgatggacacgctgaagctgtacgcgtgcgtgggcgcgctgagcgggctgatccacctggtgatcgggcaggaggccaggtccaagtgctgcccgctggtgcagggggaggcggacctggacgcggtgctgtgccggtgaaccagca

SEQ ID NO: 160419 - DNA, 455 bp, Zea mays
  unsure (1)..(455): unsure at all n locations
  Clone ID: MRT4577_77881C.1
gcggggaaatggaaaggaataatatatagggaaaaaggatgtttggaaaaaaaaaaaaaaaaaaaaaaaaaaaaaaaaaaaaaaaaaaaaaaaaaaaaaaaaaaataaaaaaaaaaaaaaaaaaaaaaaaaaaaaaaaaaaaaaaaaaaaaaaaaaaaaaccctccccaagacccccccccggccaggccccccggttaattccccagttccccccaccagttcccccaatgggcaacaaaaccccctattgaccccccctataggctaaaccaaacccttcaaaaaaccctttaacaaaaaccttttccccaattccaacaccaattcttggcacatttaaccttacaaaccatccaaacaaacctttgagcaccaantttggccccccttttacccacctatccgaaaaaaaccccgttttcaacctccaacaacaactgttaaaatccaacc

SEQ ID NO: 160420 - DNA, 900 bp, Zea mays
  Clone ID: MRT4577_77882C.1
caggagcagcaaaccaatcaagaagcccccacgtccaccaccgacgacgaagacgacagcgtcatgggcaacagcttgcggtgctgcctggcctgcatggtcccctgcggcgccctggacgtggtccgcgtcgtgcacctcagcgggcgcgtcgacgagttcagctgcccggtggccgcggcaaccgtgctcgccgcgaaccccgcccacacgctcaccacggcgtggtccccctccggcgcgccagggtgcggctcccggaagctcgccatcgtgtcgcccgactccgacctcaagcgcggccgcatctacttcctcatcccgtccgcgaccctgcccgccgaccggaggagcaagaagcagagcagcaagcggccgagccagagccagagccagagccagagccgcctccgccaccacgccaagaagcagagcgccggtggcacggcggagcaggacaactacctgagggagctgctctccgaaaaggccgcgtcgggcggcggtcaccggaggcggcgcagcggcgcccgcgtcggcgtgtggaggccgcggctcgagagcatcgtcgaggaggcctccgactagatcgacggcggctccaagagctctcggtcttatattcttttggttttccttctgatctgccgatgcgaacaccacgacgatcggtcgaggaccgagtctccggcaggctctcgcctcacgatcccccctcgacactgtgttgcgttgtgtccagggatgagcggtcttagctcgggagatgagggggaaaactgtgacaaaaataactgcttatagcagcaccaacctgtacaggaagattttgttcagttcatccaaaatttcaaacacatttctcggttgtccaaaaaaaaaaaaaaaaaaagggcggcc

SEQ ID NO: 160421 - DNA, 301 bp, Zea mays
  Clone ID: MRT4577_77883C.1
ctgactcgtacgctgatgactactgtgatttccacctacatcttccctgtaaggtggagggtcatctagaccacgaccaactccacgtcagcctaggccgtaaccgaacacgtcaccgagctcaacactgacatcttcattcctatcttctaggctatcggcaacaccgccgtcgacctcgacatgtacatcgacttgtacaccccatgctacgtgccgggtaccatgattccttacattttccataagatcctcgacatcatcttcctcatgctgtacttcaaccagtactacatgcctc

SEQ ID NO: 160422 - DNA, 318 bp, Zea mays
  Clone ID: MRT4577_77884C.1
attcccttctcgacgcactcaatcgcccactccttctctctatccttccacactttatatctcctctactacaaagcatctttgggcacctttctaatcttttaacatatttgccatcccatccaaactcctcatcttacaatttcttcctcacatatcattcctgctataccctgccttccaacctatattatagacttatccccactttcaacctactgactatgttaaataacgtcaaaaccacttctatctcacttacacctctattctcccacttatcctacaactttctaatcattttacacaatcttacta

SEQ ID NO: 160423 - DNA, 597 bp, Zea mays
  Clone ID: MRT4577_77885C.1
tttccccccaacgtccatgcaattagtcgctctctccctcccttgcgagctcccttccggacacacgtagatcaacacaaccatgccccatcaccaacaccggggagcccaaggaggagaacgttacccttgtcaccactgtgcgctgaatgagactgtgtctttgtggttgctcacatctttgaatcctaccacgacatcttccttcatgactatgatttgtctgatgatcaaaatgtgtttcaaatcactggcgactggtacgttaaagtggatctggatgatgctgcctccttatgctgatatgctctgctgctccacatgtgtgaacagacgtgtgcaaagagctcgtgatcaccgtattgtgcattagaaattcctgactgtgtcaggaaaccatactcatatacccactggaccatggtgctcacttctgctactcaggagatctatgcgtcgttctgggatgaataattgtacgctctcgagatgttacccctgatcccactgacgagtactctatgaaacgatgtaggagagttaaagaggttgaacgcgtgtatacttgctatttgccatcactttgctatggcctct

SEQ ID NO: 160424 - DNA, 275 bp, Zea mays
  unsure (1)..(275): unsure at all n locations
  Clone ID: MRT4577_77886C.1
ttncgatcggccgcccttttttttntntttttatcaggnagttcctttntttgaaacgcgctgctaatgcaggctacgggttacnggtttannannattcanaaccncggccatgtggataccacgtcgntgcnntttttttggccccancanacnagtntgagcgtatgnagatcganttgnangcacgcntggtgcactccgccccnaggagggcaangcntaatatcctcatnagctctagttgtatctttggccgnaanacgctncagcgg

SEQ ID NO: 160425 - DNA, 231 bp, Zea mays
  Clone ID: MRT4577_77887C.1
tttccacgcgtccgcccacgcgtccgtgagttgtttgcggggatcactgatgagactgagcccgttgcgcagacaaataccacggaggaattggaggagtttgatgtgtttggcaatggaggtggcttggagcttaatatttgtacttgtgtatgatgtatcacattttggttttcgtaattttcatgattttgtcttacttttttttagttcacttttttttatttattt

SEQ ID NO: 160426 - DNA, 429 bp, Zea mays
  Clone ID: MRT4577_77888C.1
gggaaaacgcccccttttttttcagtggcttttttgggccaagaagaaaagggggcaaaaaggcttttgatcacaaaataaaaaaacaccccccctccggggggaaattggtaaagggcaagaccccccgggacatttgggacgggcctgggttatgggttaaaaactgggggaaatccccccttttggggatggggctttatctcccgcttgggggccccccccaattgggttgaggcctcggcccaggtttttttaatttggggggcccaaatttgaggggggagcccctttttgatttttttaaggaggggaaaccccctaacctggaagggtccatttgggacccccaccctaaaagggggggggccccaccttttgggggggggtccccttggggggaccttcccggccttggaaaaatttccc

SEQ ID NO: 160427 - DNA, 1140 bp, Zea mays
  Clone ID: MRT4577_77889C.1
cattgggtacctcgaggccggccgggaatcccaacgatcccccaaacttcgcgacgcgcacaccagctcgccgtcggacgcaagcgctcacaggctgctgctgctccgtctcccgggcgccagctctgactccggacgcgttacttgaaggcatccatggcgcgcgtgctctgctcccggtcagcggtcctggcgcgccgcctcggggcccagccccagcccggcgtggttctgagccgccggcacaaccacactcgccggcgcgcggtgaaggttcttgaagaggacgccgcggggccttctgcacctgcgacggacgcctccgagcagtcccggcggttggaggaggcgatcgacagcgccatggcgcggatggccgagcccgactgggcgcccttccggcccgggacatcctacttcgctccgccccggcccgccggcgcggccctgggggttctcgcgcttatcggccacgctggcgggttcatgggctcctcggcagcgccgaggcggggactctctgccgacgaggcccgcgccgtcgccgcctcctcccgcgggtacccgtgctcgacctacttcatcgaaggctgctttccagatgaagtggagatcccaaatatggatgccaatcaagttcaagaggaatgaatggatgagctatgttattgcactggatgaagggggtctggaaaaggtgtcactttcatgtcatttagtggtgtcatgaagtaatgaattcgtgagctacttgtgggcaaatccagtgccgaaggctccccacatgagtaccttctggagaaagggctccccagctgctgcgaacccacgacctcagacagctcccatcactgcatcaggcctgaccttctgaatttgtgagctactgtataaaataaaattgtcctgaattcatgtgatcttgtaataagactagtcttaaataaaaactacgatttcaccgtcttctctatgctatccggcatctggaatgtatgatggtaaacatgctctcatattagctgatatggtgtacaactcaaaactgtgtattatattaacatttcagatcataatagtttccaaatgtgagcaaaaaaaaaaaaaaaaaaaaaaaagggcggccgccaccgcggtgga

SEQ ID NO: 160428 - DNA, 1307 bp, Zea mays
  Clone ID: MRT4577_7788C.1
cttcatacttctcaagtgaatctacagacgcctaaaattatgatgagaaaaaggcactcacatagcaccacaatcattttttttctcaaaaaaggtacgcataaaacaaaacatcaaagtggctgcaaaagtctatttatataaaaatctcctacatcacatttgcttatggtttacatgttcggtcaattgcatgaccgttcgctagaagcaagttataataaaatcagagttaaataactgcggtccctgacatgatgcatcattatcaagcaaagtaaattgataatgacaagtgcatttaccccaaaacaaaatctagcctggctctgacctgcaccactttcaatagcctgatgaaactcacttattgaagccattacatgatggcacctctgaggggaccgtgatgaaggtaaggcccaacatattctacttttggcttgtccctgaacctgatgacccctagcagtcccattgcagaatcctgaatcaatatcagactggaacatgtccacaaaaatcactgcagctccttaaagcatttttgcctctgcaggtctttgcgatgggggatcacgctcgccgagcgtagccatcaagatctcgaggcccttgtcgtagtaggcgatggacctgcaggtcttggcacctaagcatgtactgcgtatcgctgaactacacctagactgagaaagcggcgagggaccactcctcgtccctctggtgaggctcgacaagctgcagctggtggtggtcgtcaccgctgggtgcacaggcgttggtctcggcctcgccgttgacaggagactctggcggtggcacgacgtacgcaacgacacaatcgaggacagggatggaaggggagatgcacggacgatgggagcatctagacggagaaggtggctcctcggccctctggttaggctcggcaagctggaactgttggtggtcgtcgctgccggctgcataggcctcgtcctcgccgccgacatgtgtttttagcggcagcgtgatgcccgcaacagcacgctcgaggacggccatgaaaggggagatacatgggcgacaggaccatctagccggaggaggaggcgagggaccactcgtcggccctctgatggtcgtcgtcgccagttgcacaggccttggattcaggctcgccgtcagcaggcgcctctggcgacggtgtgacgcctgcagcggctcgctcgaggacgaggatggaaggggaggtaagggacggcaggagcaaggagggagagagcatctgatgcgtttccgttctcgagccgctcgagccgaat

SEQ ID NO: 160429 - DNA, 861 bp, Zea mays
  Clone ID: MRT4577_77890C.1
gccgagcccgactgggcgcccttccggcccgggacatcctacttcgctccgccccggcccgccggcgcggccctgggggttctcgcgcttatcggccacgctggcgggttcatgggctcctcggcagcgccgaggcggggactctctgccgacgaggcccgcgccgtcgccgcctcctcccgcggttacccgtgctcgacctatttcatcgaaggtatctgactatttgggatctccatttcgctattcggatgtgctcaattctgaactgaaacgcgtgcataagaacttctagaaatcagaacaatttcgagacattttatcgttatgctttgtttctgcaaggagagattgcgtataatatgttggatgtattgcatcgagcctttaggccttgtttggttatttcaattcgatgtggattgaactgattgagttgtattttgacttgctatggatctaaacctactcaatccatatggaacaagcctttagagagaatatataggaatacacgacttgaagacaagaaggctatcctagagataaggaagattatcttagatacaaggaatgttatcttagatacaaggaaggttatccaggattataatcaatcctaaaccaatcatattagtagttgtctaatatattctaacatgcccaatatactctgacagtttatatagcatctaccttacacggagtatcgacatatatgcaggctgctttccagatgaagtggagatcccaaatatggatgccaatcaagttcaagaggaatgaatggatgagctatgttattgcactggatgaagggggtctggaaaaggtgtcactttcatgtcatttagtggtgtc

SEQ ID NO: 160430 - DNA, 205 bp, Zea mays
  Clone ID: MRT4577_77891C.1
aacacaaggtttttgcacattgttttatttcatatcacattgaccggttcaacccacggttcattagaaaacacaggcacgaaggtagaacttaaacctatgcctaaattaactacgcaaactttaggttctttgtaagcacctgactggatattaaacaacagatcccatgaagacacgccgactagttgtacaccatatactt

SEQ ID NO: 160431 - DNA, 318 bp, Zea mays
  Clone ID: MRT4577_77892C.1
cagatgttgtttgccgcgcgcacgtccacggcggcatttggatgacacctacgggtagcacatgcttccggagtccctgtgccgcccgtggccgcaccatgacgacgcaccgtgccctaactggagctggcgggggcggaggcctacgcggacaatacggagctcgtggaggccgctccggcagggcgggcctacacctaccaagggctggtgggagacgtggggcagcttcgctagggcgctgtggtccatgggagtccgctggggccacgtacctaatggtccagctctccaacctggcggggtaccccaaggtga

SEQ ID NO: 160432 - DNA, 311 bp, Zea mays
  Clone ID: MRT4577_77893C.1
tcgataaacttgatatctaattcggctcgacgccggttggggtggtattttcggccaccctgctatctaattcggctcgacgccggttggggtggtatttcgcgccgcccagctcggtgcgccaccgaacagtgtccggtgtgccgccacgtcatcctcctgttagggcttggagctagtcgaccgttggaggctttgtcctcatgcggcaccggacagtccggtgcccctctgacttctgctctgacatctgaattcaactgttcacctttccagagtcgaccgttgcgcgcagatagtcgttgctccgc

SEQ ID NO: 160433 - DNA, 804 bp, Zea mays
  Clone ID: MRT4577_77894C.1
cttctctgtctctctctcctccgcgtgcgctccctcactcttctcccatccgtctaatggaggccctcgccggcgccgccgcctcgtccgcgctcctcccggccttccccgcccaccagcctcactcccgcgtggcgctccgcgcccgcccctgcgggcccatccgcgcggccggcggcggcggaggcaaggacgacgccgccaagccgaacgggacccccgtcgtcaagtcgaaggttgatccaagtcaaaatggagctctcggtccggtcgcaactgacaagtcacgcacgacctcatcaaccaattcaactcccgactcaagcggatccagagctggcttgttcagaacccctatatctggtggtgtgcagagcgcaacttttgcccatggtttacctccaccggctttggctgttcgcaatttaatggaacaggcgcgatttgctcacctatgcactgtcatgtctggcatgcatcatcgacgtgctggatatccatttggttcacttgttgactttgctaatgactcaatgggccacccaatattttctctgtcacccttagcaatccacaccagaaacttgctctctgatccaagatgcacacttgttgtccaggtacctggatggagtggattgtctaatgctcgtgtcacaatatttggtgatgtctaccctttgtcagctgaacaacaggaatgggcacataagcaatatgttgcaaaacatcaacaattggcgtctcaacagtggggaaatttttactactaccggatgcagaatatcagcgacatatatttta

SEQ ID NO: 160434 - DNA, 416 bp, Zea mays
  Clone ID: MRT4577_77895C.1
tccaaatcgcgaaaccccagccgctcctcgatggcggcctggagccggcgcgacgggatggggggcgggaactacgccaggcagatggcgatgtgcttgagcatgattgcctccggcatcgggatggagaccggcggaattaagttgctcgatagaatgactgaagactctgacaaggaggagcacctggggccactgcatgatgcggcaagggcaggtaaaatggatgtttgcaaacacctggtggagaatcttgggtttgatgtcgatgttcgtgctaatgatggttcggggaagactcctttgacttgtgcagtgtcatgtggcaaagtaattgctgtgaggtatcttattgccatgggtgcagatcttgaaaaacaagatgctattggctttactcctctgcactatgctgg

SEQ ID NO: 160435 - DNA, 587 bp, Zea mays
  unsure (1)..(587): unsure at all n locations
  Clone ID: MRT4577_77896C.1
ccacgcgnccgccagccgctcctccaggcggcctggagccggcgcgacgggatggggggcgggaactacgccaggcagatggcgatgtgcttgagcatgattgcctccggcatcgggatggagaccggcggaattagttccgagatggtggaccagatgaagcgcaacgtagcgtcgtccgattgtgacgggagcaacgttatggagttgctcgatagaatgactgaagactctgacaaggaggagcacctggggccactgcatgatgcggcaagggcaggtaaaatggatgtttgcaaacacctggtggagaatcttgggtttgatgtcgatgttcgtgctaatgatgnttcggggaagactcctttgacttgtgcagtgtcatgtggcaaagtaattgctgtgaggtatcttattgccatgggtgcagatcttgaaaaacaagatgctatttgctttactcctctgcactatgctgccaaacgagggtacagtgnacttagcatgtngttgctctctagaggagctaatgttgnatgtggattcttctggagggacaccactacatggtttctgctgcttgtgga

SEQ ID NO: 160436 - DNA, 1061 bp, Zea mays
  Clone ID: MRT4577_77897C.1
gctgatttggttgcggatttcttagatgtggggtcttactgaccgaattatccatccacgggtggtctgtttgattaggttccctctcttctccgcgcatgcgtgcggggtcgaaaggtagggttcataccccaaagtttgtcattggggacaacaccagcggcggcgatggactacaccaacgccatccacatcatcccacccatggcctccgacgcacggaccaacgcggcggcgtccccgggcgaggaccccgacatctgggccaccgagaaagactaccgccagtggagtgccgaccagggctacaatgaccggaacccctcctcgcgggcggggagcgagcagccgccgccgggcaagaaggctcacggcgggggcggcagcagcgatagcggcggcggtggcagcacgagcaagtcagcgccattggcaagatgttcttcaagaccaagctctgctgcaagttccgggccgggacctgcccctacgtcaccaactgcaacttcgcccatggcatggaggagctctgcaagccgccgcccaactggcaggagattgtggccacccacgaggatgccaccacgaagcagggagaggagcaccagatccccattatgacatccagaagtgtcatcgctggagacgatggcggcggcggcagggcatacaagggtcgccactgcaagaagttctacactgaagagggctgcccctatggcgacacatgcaccttcctgcacgatgagcagtccaaggcacgggagagcgtcgccatcagtctcttgccgacgattggtggtggcggatacaatgctgcctctgccagcggatcgatggcgcaaaattcttccaattggaagacaaggatctgtaacaagtgggagatgactggatactgtccgtttgggagcaaatgccactttgctcatggatctactgtaatacccaatttgtaaacaatctaaagagagtagatctcattatgtgtttttgccctatactcattgtaacctggtgataaccatatatataaagagaacaaataactaataacacct

SEQ ID NO: 160437 - DNA, 347 bp, Zea mays
  Clone ID: MRT4577_77898C.1
aaccaggcaaaaccaaaaaaaagttgctagcataaaaggaagcccatcaggccacaaaatctaatctactatcaacaaaaacaacaaactccggggcgacaatcagccaaagggaggcatgtacccaccaaaagcctaaaatttgcccacccaacccagggactacggggaccgggccagaaaagccagggaccccaacttatgccccggtgctccaagcttaagggggcatttccacggggtatccaccaggccaaacggggggattaaaaaaacctgaggggcccgaggcacgtccctaattccacgagggaaaaggcagggcccaaaggccctcccctttccga

SEQ ID NO: 160438 - DNA, 415 bp, Zea mays
  Clone ID: MRT4577_77899C.1
cccaaccaggacagcgtccacagaaagaagaaagagcacagagagtggagtagtggacagacgcggggagctctgcgtctctacgagcgcccatcctccgtccgcgccaccgccgcgcccatatccttcgccccgccccgacgtggcgcgtctgcctccaccgccgttccgccccaccgccgcatcccaactcgagttgaacattgaagtgactccgactttaatcctcactggatttggtgcttttattgctttatggatcctatcttctgttgttgctgcagttgattcagtccccctgctcccaaaattgctggaattaataggaactgcttacacaatttggttcatcgcacggtatctccttttcaaggaaagcagagatgaactgtttgcaaagttcgaagatctcaaa

SEQ ID NO: 160439 - DNA, 608 bp, Zea mays
  Clone ID: MRT4577_7789C.1
ggaacggcagaccgtagtcccgcccatcaagcgtcacccctagtcgaattccggactgtcaaacgtccgccactggctgcgattcttggtaactcgcggtggggtcacgttcctcattaccccctttcccgtgccctacgaagcattacgcactcaggtcaccaaccgctaggacgtgttctggcgagaacaaagaccaccgaggagcctcaacccacccacatcacccactccccatcaggcgggggtaaacgaagggactccacccccctttcagtatcgaactcctgtgaaagcctctcgtaggtggtgaaaccaggacaacgagagtgaggtaacggttaagtgagtccgggagtaggaacaacccatctaagagggagagtaggaaggtcccgaaaacgagggaggaagtaaggtttttgttggaacgcaacaacatctccatgttgagtgaacaacagtgctaagtgttggaagaaaagcccagctgtttgtacctgtggtgtcaaagtaagtacaactccatgttaagggtaaacccgatccgaggtgacgaaccagaaaggtccctagtagacctagttagggaacacgctcgcgaggag

SEQ ID NO: 160440 - DNA, 332 bp, Zea mays
  Clone ID: MRT4577_778C.1
attcggctcgagcggatctaaggtttctttgcggcaaggcaagactggtggtgggacagtatttaatgagggtcggtgggagaaacaccatatggctgggcaatatcttttgactgaaagcactgggatgagcaggagaacggttggactgagtggtgctcttgctagcccagaggggcatagaataggaggagcattggtaggactcataaccaaaaaagggagcagttcaaggagatcaaatgggagacctactgtgatgaaacaaagaatggatcctagacacatggatcacggacctgtagaagacatgtggacagcaggtgttcaaa

SEQ ID NO: 160441 - DNA, 1042 bp, Zea mays
  Clone ID: MRT4577_77900C.1
ggccggcccgggacagttttcagtactcctgtatgtcctcatcccccattcctcctcgcggctcatagaaacctcaaaacccaaccaggacagcgtccacagaaagaagagagagcacatagagtggagtggtggacagaccatggagctctgcgtctctacacccccatcctccgtccgcgccaccgccgcgcccatatccttcgccccgccccgacgtggcgcgtctgcctccaccgccgttccgccccaccgccgcatcccaactcgaggctggcgctgcgccagcgcggccgtgcctggcccggtgccctccgaagagccggcatccgcctcctacgccgtcgtcgtcacggacaagcccgatacgcctgccgacgacaagaccgaggaggttagcgccgcgcctagtggctccgcggaggcgcctatggcagagctggtgccgtcagaggcgtcatcatccccagatgatggcggcctggatgagattctaagcaagttgattcagtccccctgctcccaaaattgctggaattaataggaactgcttacacaatttggttcatcgcacggtatctccttttcaaggaaagcagagatgacctgtttgcaaagttcgaagatctcaaacagaggattatttgatctatcgtcgaccttttgccacgtgtttaggctttacagccagcttattattaggtttttttctccctttcgtttgaaatattactggatgggtaaagaaggtcatgtatctaaattctcctcagggcttgttcggttctaccccaatctatatggattgaggggattgagatggtttcaatccctagtaagtcaaaatctcccccaatccgtatcaatctcctccaatccatatggattgaaaataaccaaacaagccctcatgcggtctgttatcagaccccctaagttcggctagtgcgcttcttcaggtcactatggattttttttactcaatcctacgtgtatattgtagagtaaagctttaaaatggtgaatacggttagtatcttcc

SEQ ID NO: 160442 - DNA, 1047 bp, Zea mays
  unsure (1)..(1047): unsure at all n locations
  Clone ID: MRT4577_77901C.1
aattcttgggttgacccacgcgtccggggtggacagaccatggagctctgcgtctctacacccccatctccgtccgcgccaccgccgcgcccatatccttcgccccgccccgacgtggcgcgtctgcctccaccgccgttccgccccaccgccgcatcccaactcgaggctggcgctgcgccagcgcggccgtgcctggcccggtgccctccgaagagccggcatccgcctcctacgccgtcgtcgtctcggacaagcccgatacgcctgccgacgacaaggccgaggaggttagcgccgcgcctagtggctccgcggaggcgcctatggcagagctagtgccgtcagaggcgtccccgtccccagatgatggcggcctggatgagattctaagcaagttgaacattgaagtgtctccaactttaatcctcactggatttggtgcttttattgctttatggatcctatcttctgttgttgctgcagttgattcagtccccctgctcccaaaattgctggaattaataggaactgcttacacaatttggttcatcgcacggtatctccttttcaaggaaagcagagatgacctgtttgcaaagttcgaagatctcaaacagaggattatttgatctatcgtcgaccttttgccacgtgtttaggctttacagccagcttattattaggtttttttctccctttcgtttgaatattactggatgggtaaagaaggtcatgtatctaaattgtctcctcagggcttgttcggttctactccaatctatatggattgaggggattgagatggtttcaatcactagtaagtcaaaatctctccaatccgtatcaatcccttccaatccatatggattgaaaataaccgaacaagccctcatggggtctgactagtgcgcttcttgaggtcactatgaatttttttactcaatcctatgtgtatattgtagagtaaacctttgaaatggtgaatacggttagtatcttcccactccgtgtggacagaagtgtaacgngccggatttcttggaa

SEQ ID NO: 160443 - DNA, 484 bp, Zea mays
  Clone ID: MRT4577_77902C.1
aggaaacctcaaaagtgtagcacagagagtggagtagtggacagaccatggagctctgcgtctctacacccccatcctccgtccgcgccaccgccgcgccccgacgtggcgcgtctgcctccactgccgttccgccccaccgccgcatcccaactcgaggctggcgctgcgccagcgcggccgtgcctggcccggtgccctccgaagagccggcatccgcctcctacgccgtcgtcgtcacggacaagcccgatacgcctgccgacgacaaggccgaggtggttagcgccgcgcctcgtggctccgcggttgctcctattgcagttctggcgccttcagaggcttcatcttccctttctatttttccctgtctcattttcctcccggttttccttcctcttttctctcttttccctttcccctctcttttcccctttgtttttcttttccctccccccccttttttccccccctttttcccccc

SEQ ID NO: 160444 - DNA, 397 bp, Zea mays
  Clone ID: MRT4577_77903C.1
cggacgcgtggggaaaacccaacctgctgatgtcgcggtgaccatcaggtgcctccttctctatctctctctggtaactgtgcgcattaaggctatctatcagggcgaatgctgtgcttaattgtaggtggtcactggtcagctgtagttgttccataatatagtaactgtcatcagaacatccacttcgcccatttcattcattcatccattccttcgttcatttttgtttggcatcaacctcatctcatctgaaccgagcgcggttgctggccaacccatctttatctcccattccatcgattgattaaacggaatctgccagcgcgacgggcactttaggcgaccaagaccaaccacccgctcttgatagctcgtcgtcgcatccgcatactac

SEQ ID NO: 160445 - DNA, 1199 bp, Zea mays
  Clone ID: MRT4577_77904C.1
cctcgaggccggccgggaccaaattacagccaggcaagggagccgtgagtcgtcggaactcggacgtcagtacgtcacacaaactgccgagccgttgtggggcgagcaggaaacggactgcaggagcaggactgcaggagcaccaggagccttggaggtgcactccaccagtaggagtacttcctcaagtcctcatcccccattcctcctcgcggctcatagaaacctcaaaacccaaccaggacagcgtccacagaaagaagaaagagcacagagagtggagtagtggacagaccatggagctctgcgtctctacacccccatcctccgtccgcgccaccgccgcgcccatatccttcgccccgccccgacgtggcgcgtctgcctccaccgccgttccgccccaccgccgcatcccaactcgagtctggcgctgcgccagcgcggccgtgcctggcccggtgccctccgaagagccggcatccgcctcctacgccgtcgtcgtcacggacaagcccgatacgcctgccgacgacaaggccgaggaggttagcgccgcgcctagtggctccgcggaggcgcctatggcagagctggtgccgtcagaggcgtcatcatccccagatgatggcggcctggatgagattctaagcaagttgaacattgaagtgactccgactttaatcctcactggatttggtgcttttattgctttatggatcctatcttctgttgttgctgcagttgattcagtccccctgctcccaaaattgctggaattaataggaactgcttacacaatttggttcatcgcacggtatctccttttcaaggaaagcagagatgaactgtttgcaaagttcgaagatctcaaacagaggattatttgatctatcgtcgaccttttgccacgtgtttaggctttacagccagcttattattaggttttctccctttcgtttgaaatatttctgaatgggtaaagaaggtcatgtatctaaattgtctcctcatggggtctgttaattgttatcagaccccaagttcggctagtgcgcttcttcaggtcaatatggattttttttttactcaatcctatgtgtatactgtcgagtaaagctttaaaaaggtgaagtacggttagtatcttacttcttcccactcctatgcaagtttcggactcctatttgctactgtcc

SEQ ID NO: 160446 - DNA, 351 bp, Zea mays
  Clone ID: MRT4577_77905C.1
aaacaccatgtttcaattttcacatgtagaattgagggcatctcaagtaaattgggtatgaagaaggcgctacagctgctggattacctgaacccgacggagctgaagatgacgctcaatacgatcaaggccttcatgccgatcgtcttcgtaagggaggcacgacacctggatgtatcatttgggagcaaactttaaacgtctacctcttttaactaagaggtatcattttcttccaaagacacgaaagtatgacacattgggtttgttaccggttagaagctcgtaagacgtcttcttgaggaggggatgaagatagagtcaatttatggcatggcaagccgtatttac

SEQ ID NO: 160447 - DNA, 640 bp, Zea mays
  Clone ID: MRT4577_77906C.1
aggcgccccccgggaagaaacccaaggcggagaaacgggtcccccctggcaagtcccctcccaagaaaggcggcgagggcaaaaggggcaaaaaaaagggcaaaaaaagcgtggagacctccaagatttccattttcaaggtgtttaagcaggtgcccccggacattggcatttcctccaaggccatgtccatcatgaactccttcattaacgatatttttgagaagctccctgttgaggcccccaagctcgcgcgctataacaaaaagcctcccctcccctcccgtgagatccagacctccgtgggcctcgtccttcccggggagctcgccaagcaccccgtttccgagggccccaaggccgtccccaagttcccctcggcctagggtgggcggcccccccttgcaggattttttcctgggttcccgtttcttgctgtagttaggggctgctgcccgctgggttctatgtatgttatctatctgtctgtagcaactgtgttatctgataggaccgtaatggtgcttattcaacccagctatatgtttctatgtgaatcatctctctatcggttgttgagtaactttatattgtgatgaagatgtgaatgtgatttataaaatgcgtcagtttctacggt

SEQ ID NO: 160448 - DNA, 165 bp, Zea mays
  Clone ID: MRT4577_77907C.1
cccatgcgttcgaatatggctcgcacgaaccttatgctcgagttccgttacatgcaagggattgtattgaacacgagagtaggtgactccatgttggactagtatgtaaagcgcgctaacaggtatggagggatggactagactctggtgatactactcaacttc

SEQ ID NO: 160449 - DNA, 270 bp, Zea mays
  Clone ID: MRT4577_77908C.1
acccctctcctccctgcgatctctagctgccatggcaatggcagtctaaacttcctcgccgagccgagcccgccctctccacactagctccgttggcctacctcgaacctgcactcctgcactcgacgtcgtcttgccgaaggagcttctgtcgccatccaccatgctgtgacacgccgagcgtccgcattgttctcctcgacgtccgagctctgcccgagaaatcgggccgatcgtggagtctgagggaactgcaggagaggaccctga

SEQ ID NO: 160450 - DNA, 390 bp, Zea mays
  Clone ID: MRT4577_77909C.1
gcagagcgagaggagttcaaacaatcaaagagggaatttaaattgtaagatattgagatattggagtcaaacacaagatagcaatgtgatgcgattgtagagatccctcatgactcatgatgtcatgatcaataataaaaataattaaaatacgaacacaacatttaggattatgagaggcggtcagcaagtgtattctaactggctagacttaaagatcaccttcaacatgtgttttgaataggatgtaccatctatgtataaatgggggttgtgtctgtctcttgttatgatttttcactacacgacagtatagtagaaaggatttctgtcaccattatttatggaccacgtaaacatacttttttagtttagattcttatgttgggc

SEQ ID NO: 160451 - DNA, 173 bp, Zea mays
  Clone ID: MRT4577_7790C.1
gagagaaagaaaaatatccccataccctagtctccagatctcgatggcgaaccctagagtcttctgttacatgaccgttggcggctccccgccggtccggatcgtgttggatctgcacgccaacgaggagccctagaccgtggatatcttactcgcgctgtgcacggacaaga

SEQ ID NO: 160452 - DNA, 1601 bp, Zea mays
  Clone ID: MRT4577_77910C.1
cgaggatccccacctccaggctaagattgtttcagcactgcattcctctccgatcggtggtcactctggtgtgccggttacctacagccgtgtcaaaagcatatttgcgtggaagaatatgaagtcgttcgtccgttcatttgtgcagcaatgtcagatttgcctgcaagccaaacctgacagggcagcttatcctggtaagctccaaccattacctgttccaccctctgcctggcacaccatctccatggatttcgtggaagggttacctcgttctggctcgtgggactgcatccttgttgttgttgacaagttctccaaatttggccattttgttccattatctcatccatatacagcacactctgttgcgcagctgttcctatctcacatatacaggctccatggttttccagcggccattgtatctgacagagaccccatcttcaccagcgccttttggcgtcagctgttccaactggctggtacggaattacgcctcagttcctcctatcacccccagtcagatggtcagacagagcgtctgaaccaatgcttggaaacgttcctgcgatgctttgtcagcgcgtgtcctaaaaagtggtcctcttggctgccagcagctgaatattggtatacacaagtctgcattcagctttgggttgttctccgtttgaagtgctttatgccgcaagccacgttccttgggtctttcttttgatgctgctgccccagttgccctgtcagcctggttacaagaaagatctgtgatgcaaaatctcatccaccagcaccttattcgcgcccaaactcggatgaaaaaacaggcagataaacaccgctctgaacgctccttctcagttggcgattgggtttacatgaagctccaaccctacgtccagtcttcagtgcttccacgtgcccaccaaaaactcagttacaagttctttggcccttatcgagtggccaacagggtcggttcagtggcctaccgattggaactcccaaattccagcaggattcatcccgtcgttcatgtctcccaactgaagctggcaaaaggtttctcgggctctgctacttcttccttaccggatgaactgccagagttcagcataccactccgtattttgcagactcgtggctttgctaaaggtaaacgctttgtgaaacaggttctggtgcagtggtccaaccttcctactgagttagccacatgggaagaccaagacaacctgaggcaatgttatccttttgctcctgcttgggggcaagcaggattccaagggggggaaaatgtcaacaatgagagtatggattcccctacagtcagccgaggcgtaccaaacggcgaaccggaagcagctccagttgtccgcacacgccgtgtctgtcgcgccaacgtccgtcagcaaggaccagagtgggtgcagtgagtcggcatattggtgttgggtctgagcctgcgtgctcccgtgcgtaagtggctgtcttaagtactagcgtagccgaaagagacggtatgcattttgtaaggaaaacttagtatcctggaatagaactcctctggttctcctaaaaaaaaaaaaaaaaaacccggt

SEQ ID NO: 160453 - DNA, 749 bp, Zea mays
  unsure (1)..(749): unsure at all n locations
  Clone ID: MRT4577_77911C.1
ttttcttggaaggaccattcagccgagctactcaaattttaaccgctggtatgttgcttggatttgctttgcatccctgtaccatcttcctagcttccagtcaatgggggttgatatgcgcatgnnnnnnnnnnnnnnnnnnnnnnnnnnnnnnnnnnnnnnnnnnnnnnnnnnnnnnnnnnnnnnnnnnnnnnnnnnnnnnnnnnnnnnnnnnnnnnnnnnnnnnnnnnnnnnnnnnnnnnggnnnnnnnngnnnngaacctctcgcttttcttgacaatatatttctcctcagtgcttttcatcattgcctttcatatcatatttattggtctctggtacattgggttggttgcacgcttggcaggaacgaggccaggcgtatggacaattctccagaactgtacagtaatcagcattgcatgttgtgtgttctacagtcattgtgggaatcttgctgtgcacaagagcaaatcttttggtagtagttctgatcccaatttgcttgcttttcttaaaaatgaaaacgggagtacctggatatcaaattttctccgtatgaatcagttgaaagatgagatatgttcgtcttggtttgctcctgttggatctgcaagtgactatcctattctggcaaaatgggttatctacggngagttagtttgcagcggatcctgtgctggcccatcggatgaaatctctcctttgtactcattatgggctacatttgttggcctctatatcgctaa

SEQ ID NO: 160454 - DNA, 284 bp, Zea mays
  Clone ID: MRT4577_77912C.1
aaggaccatccaggagcacggaattctaatcgaacagaaacatcacgtcttccaccactagtactggttttttgggcacatcatgggatcttatacgcggttaacccttcacataaagaattttattcagcaataacaatagggcctaccaaagcgcttttttgtaaccaatcacacttacgccacgaataacagatggcataaagccatacacgtccaaaccagatgccacaccgccaaaccgactgcagttcagcaggtgcatatgcactgaggattatgct

SEQ ID NO: 160455 - DNA, 665 bp, Zea mays
  Clone ID: MRT4577_77913C.1
gaggtatcctgccctgcagttcctcctcggcggaaaccaagaccctagctctcgtcatcgtcgtcgtcggcggcggcggcgaccgcggcggatccgacagccagccctcgtcgcaggataaggatatccatcgcatcgcatggcagccgggccgccatgccgtcgtccagctcccaagacggcgtacctccttatgttctccagatccggaaccgtgcggatggtgttcggggttcggcgaccggaaagaaaaacgttttggcccgggtatacagcgtcttctgttactctttcctcccatattatggttcgtttatttgaccctgcagctggactgtgaggagcctatatattctatattcattgtatgcatccatattccatgcaatcatgtcactttacatttcccccatcatgcagtcttgacataaggttggagagttggaatgactactcaagacgtcggttagcaatggactgttcggttagcactggattaaaaaggattgaaggaaattaaattactaacaaattaaatttcttgttagtaaaaaataattagaagaggatttaatcacttaaccttaatcctcttcgatctaagaatttactgtccatgatcttcacgcgatgcttgtgttgatgccctcagtctcagctacgta

SEQ ID NO: 160456 - DNA, 580 bp, Zea mays
  Clone ID: MRT4577_77914C.1
atccactaccacatcgctctccgaaataaggtatttacaccgatgctgctatctacgagccctactctgccacacgggatcgcaatatgaacgatgcctgcccgcgctataccaggctcacgaagcgacaagcgcgacgaggctccgaagccgaagcgtgcagctgccaatccgaaggcgcgcaccgctggcgcctcccacccggcttacttccagatgatcaaggaggctatcacggcagaaaaggagaggatcgcttccagactctcaagcgcatcgacaaggaagtgggggacaaggacgatgaactctctgccggccaatttaaaaaagatgctttccatccaactccgagtgcactaagctaagggcaagctcgggaaggccaaggcgttcggacaagctctcggacgccgcctagaatgcatcccccaagaccaaggctaaaacgaggaaagccgccgctgctaagaacaccgcccccaagtgcggcaaggacgacgccgacaagtcaaagaacgaacgggttgccaagataaagaaggtcgctgatgctgagaccaagggctgagagcccgac

SEQ ID NO: 160457 - DNA, 3435 bp, Zea mays
  Clone ID: MRT4577_77915C.1
ctcatccaacctcaagcttttactggagttcgcagtgctgctgcagcagcagcacacgcagcttcgtagcatcaggccagggcgtgggactcggaagagacgccaccatcggaggagctctctcctcgctgaacatcatttgagatggcagaggcagcactccttgctctctcgaagattgggtcctatttgggaggagaagcggctaccttcattgcaaccaaattttctaatttgatcgagctaccaaatactgtgaggcgtattcggagggaacttctgatgatgaacatctttatacgtaagacaggtgcatcctatctcagtgacgagctcctcaaggcttggatcacagaagtgagaatactggcctaccgtgtcgagaacataatggacaacttttcataccactctcttcaattcaagcaagaccctaaagggaaaaggttggcgaatggattaagctacggtctagtgtttagtgggattgctgctgatctagctcagatagagaaggaaatagagcatgtttcgaagttgaagaatctctggttgaactcagtccatgagcttcttcatactcaagttagcagtgctgaacagcaattccctcaatacagtttgccccaaattctaaaagatgaaaacctggtggggttaaaggaagaaagagagcagttaaaggaatggttgattcccaatgcacctgtcaacatgacaaatataccagctctcaaggtggtaactttgtcgggtatgggtgggatgggaaagaccaccctgctcactagtgtgtatgataagctgaaagatatcttcgaaatccatgcttggctcactgtctcacagacatacagaagtgtcgatactttgctgaaggagctactaaagattgttagtgcctctgagcacacaactcttgttaacaatgactatcagaaggaagtgattgtaccagttgatattgatataagagacaagaaacagctgaaaccagatgtcatcgacaagatgggcatcttagacttgaagagtactttaaaagcagtcctgaaacataagagatatattgttgtgttagatgatgtatggaatcgtcgtgttcacgatggaataagcgatgtgtttgaagattgtgggaaggaaagtcgcattgtcatcacaacaaggaaacaagatgtagctgcacttgccacaccaggttaccagctcaacctaaacccattagatatcaaagatgctctccagcttttctgtacaaaagcttttcccaacaaaaaccactttgattggacatcagtacttcttgaacatgctaaagatatgatgaagagatatgaaggtcttccattggaaaagtgcccactcgagcttcaagagcttgctactcatattgtaaggaaatgtgaggacttctcagtgtcaaagtgtccatctgagcttcaggatcttgcaacttataccgtaaacaaatttaagggattctcactatcagcatgcccatcagagcttcagaatcttgctactgatattgtaaaccattgtgaggatttacctctggtgaagtgtccatcagaacttcaggagattgctattgacattgtaaagaaatgtaggggtttgccgctggctattgtatcagtaggcagtaggttgtcttcaagaaagcaaatagtgccagtttggaggcagatgtgcaatgaacttccttgtgagctggaaaaagatgaccaggttcgaggaattctaaatcttagctactatgacttgccaagtgatcttcgaaactgcttcctgtactgcagcctgtttccggaagattaccacttctcaaaggacgatcttgtgcgactgtgggttgctgaaggatttgttgaaaagaaaggggacagcactcctgaggaggtagcagagggctatcttactgagctgatccaccgtaatatgctgcaacttgtggaaaatgatgagcttggcagggtgaacacatgcaaaatgcatgacattttaagagagttggcccttcacatctctaaagccgaaatgtttggtacagtaaatgattttggtgcaatggtgcagatggacacagatgttcgtcgcatatcttcatatggatggaagaagatgaaaaaaaataaatccaagttgaaatttccgcacctccgaaccctgatggcaagtgataccattgtggactatgtaccatcaatactatctgaatccaagtaccttactgtccttgagctccagaattctgatttccaggcactgcctacatctataggaaatctctttaatctgaaatacattggcctaagaaatacaagaataacgtcactgccagactccattaagaatctctccaatcttcaaactcttgatgtcaaatcaactagtataaaagctctgccacctggtatagtgaacctcactaagctaaggcaccttcttgctgacaaatttgctgataagaaccagtcagagtttcggtactttgtcggagtggacgctccagaagggctttcgaaccttgaagagttacagactcttgagactgtgcaagcaagcatggacttaccggaacaacttgataaccttttgcaactaaggagcctgtgggtagataacatcacttctgcccactgtgcagggctttttgctaccttatcaactatgccacttctttccagtttgcttctatctgcagctgatgaaaaggagacacctctcttgaaccatttcaatccgacttgcacgaagctccacaagctaattgtgagaggattgtggtctctaacaggttgtccgatacttcagaaccatggcaggtatctcaagtatcttgccctaagcagatgccattttgtaggagacccgctggtggttctagcatctactgtaccgaacatcacatatctgagacttaacaatatacctagtccacctactttggaccttctggaaggatccttcccacaactgaagacgctagttttgaagaacatgaatgatgtcagccttctgaaaattagtagcggtgcacttccagtcatagaatgtctatatatcacatcactgcccaaattgcagacagtccctcgaggcatcaaatccttgagctccttgaaaaagctctggctgctgggtctccacagtaacttcaaggctcgatgggacatggagggaatgcagaaggatctacagcatgttctggagatacgtacctaacagcagaagctttgtttttgtgtttgtcaaacgtgattgctctttctgtagtaaaagtgtcctagaatgcaactgtatccacttcaaaatccatcaagtttgcagttagacattagggattggtgcatttgtggatcatttgtcagatgattgtttccgaaataataattccgaaaacatggtttactaaaatgcaaaaaaaaa

SEQ ID NO: 160458 - DNA, 274 bp, Zea mays
  unsure (1)..(274): unsure at all n locations
  Clone ID: MRT4577_77916C.1
gcgacccacgcatcggcgatgcggaacgccntaagggcatgaacggtagaaactggacggtcgaatcataccgtggcgagagcccagaccagggaggccgtggaggctgctgacgacgtacaaatcttgacgttgaagttgattctacggcagttagcaggcaccgtgatgccagtcagatctactgtgtgaagaaccctatctactttttcaacgatagctacgaaggtggtttttgcgtttactggaaattgaaccaacacatatgctacag

SEQ ID NO: 160459 - DNA, 176 bp, Zea mays
  Clone ID: MRT4577_77917C.1
catggccgtctccggcttcaccgtctcctttctcgcctgcgccttcctggccagtcgaggggcgttgtgcaccagctacacgctaggcagccgagtgtcagataggaaccccatcattagcaggaacctgtagaggaatggcttgatcacatgcatgacattttcctgggactggc

SEQ ID NO: 160460 - DNA, 426 bp, Zea mays
  Clone ID: MRT4577_77918C.1
aaaaaaaaaaaggggcccttcaaacccccaaaaactcaagggcaagttcccccaggggcataacaaaccgattggcctggaaacctggttatcgacccccctgaaacccgaaagggcaataccccccccccttatggaaaactttgcaacttataaacaaatttacggggagctaaagcgcctttgggggggggataaggggcccaaatggccctaattataaacccctgccgagcatgaccccaaagggtaaaacctttgggccataattgacttgggcagaaaaaaatgggccaaattctcccttgcgcgaatccttgaaaagggaaccaccccttgcattgggggccaacatttggaaaacaacccaaaaaaaagccccctcaagggcgaggaaagcgggccccccaaaaaagccggttttgg

SEQ ID NO: 160461 - DNA, 372 bp, Zea mays
  Clone ID: MRT4577_77919C.1
gcttcctattattttatacataggcctttcctaattatctcagtcacctaaaaacaatgcatatctagttcgtgtcatgatacggattccggagttcctgaatgccggtgaagagttgtggggttgtgacatggaggtgttcacgaagcagtagagcctagagtagaggaggaactgaggaaggtacagggacaaagtagctatccaagaggttgctgcctgatggtgacgtgaacagtgaactgcagcgatcgaaaatgttggccgttcgaacaccacaagttttttttttttgcttgatcaaaaatgtttccttcttgattggatgcgaatacgtgattctgtgcgctacaagcgtcatcggaggcccat

SEQ ID NO: 160462 - DNA, 448 bp, Zea mays
  Clone ID: MRT4577_7791C.1
ggaaaacacaaagggaacctttgggcactttttcctgaaaataagggaccccttcaaaaggggcctcacaaaccttggtttcacatccctcacaaaaggggcctaaaaagggccctcccggccctatgttcccaaacaaaggggctcgggttttccgggacccccccctatttttggggggaaaaaaaaaaccccccaaaataaattggtttaccaaagagggggtttatgggccagccaaacccttttcgaaccccccttaaaaatttggggggggtttttttttggaaacccggaaaaaccaacccggaatttttaaaggggagccttggagccccccccccccaaccggtaaacccccattttttttacccttcctttccaggccgccgggtcccagttggaattttttttttttggcggaaccccaacgcggggggggggcccg

SEQ ID NO: 160463 - DNA, 305 bp, Zea mays
  Clone ID: MRT4577_77921C.1
aagctcggaattcggctctaggggagagcgagaacgtttatttgaacatggagaccttcaaaaacctggtggggcttaacaccacaccggggcattaacctcgccagagacagccccccattcctaacaaggtccgcaacacttaccggcagaccccaggcaagacatacccattctgccattttcacatcccagactgaccctggccgattgtggactaacaacagcacaggatgactgcctccaccttgatcagctgcatatttgcagagggaggagaagaaagcgtagaatgccatcaagga

SEQ ID NO: 160464 - DNA, 221 bp, Zea mays
  Clone ID: MRT4577_77922C.1
gggggcaaacaatttcaccaaatttaagggttgattgctttcagcagtttttaaaccaacttggccagccacaaacacttattttatttaaccgatggcgaccttacagtaacattttgtttttcccggggcaactaaaatagattttcataggtgatccattaaaaccaccagcagtttaactgacagacttacactcaaagagtttcaatttcccaact

SEQ ID NO: 160465 - DNA, 226 bp, Zea mays
  unsure (1)..(226): unsure at all n locations
  Clone ID: MRT4577_77923C.1
acatgtactcaggcgggggtttaattctatatttgaggtgtaacatttaagggatttacactggccacaaaagcctgcagacttcgaccgctgatccgtcgccaacttatcacggtttgccagtttcatcaacacaactnacaatttcatggatgacccacgcgccagatcgacttcggtctcctagcccttcgggtgacgggcaaaagcggtcatgcttttacgc

SEQ ID NO: 160466 - DNA, 627 bp, Zea mays
  Clone ID: MRT4577_77924C.1
atgtcaacgccatccgtaccattctcatgataaggacccggacctactcatcacccaggggggcgtacctagctccatccggcggaagcgcatcagctcagagacgacgacggagcagcagcatctcgtcgatcgcagctgcagcgccgccgccggcggcatggccgctgctttcgagcccacaccgaatatctcagaacaaccggagcaccgcccggcgaccaacaaaggcacgctggtcttcagctacacctgcgtcggcctcacgggcacagcgctcgtcgccgacctcctcttctactgctaccaccagctgctccgcagacgggcgccagtcaccgccgccgccgccgccggagcagcagccgagaccaataatccaccagggtcggaaggacaccatgtcgggggcgtggacatcagcaagcttcctggcttcgcgtacgccgcgacgtcgtcaaggcgcaggagaaacggcggcgacggggcgcactgctccgtgtgcctcggcgcggtgacaagacgcgagatgctgcggcggctgcccctgtgcaagcacctgtaccacgtggagtgcatcgacatgagtctggagtcgcacgcgacgtgaccgctctgccgatctga

SEQ ID NO: 160467 - DNA, 1402 bp, Zea mays
  Clone ID: MRT4577_77925C.1
attgggacctcgagccggccgggaaactggtgtcccgccctcacgatgagccaggccctcacgatgagctaaccacaagtccacaaccctagtcgaagtcagccgcccgccgcccccaagccgcagcccgccgccccaagccgcaggaacgccaccacccaccgccgactgcagcttccggctccggcgtgcgctcagctcaactgctccaagcctccagctctcgcttgccgcccagctaccacccgtcaggccccatcccctcaactgctccaagcctccagcttcctggtgttgtgctacaaggtgatgtcgatggatggtgcagtttgcttgctgagattttgatatttgccatcagcaagaaacagacagaactaccctactgctgcgtgaagacgatggagtggccaccgccgtcgacgtcaccatcgccgtcgctggtggtgcgcagccccaggcaaacagtcagcctgatccgcaaccggcgaccccatcgtgactgggccccctcatcgaggtctccctctttcgccgcccgtgaccatggccccaagccgtcggaggtgtacggcttcgttggatccatcaccaccgtcattgccaccgccgtgtacctcgcctgggcatacacgcccgagcccgtcctccagtcactcggcatcacctactaccctagcaagtactgggcactggcggtgccatcgttcgtggttgtgaccgtggtgctgtccatgggcatctacatgggcctcaacttcgctgccactcctcctccgacttccttcagcactatcttcgatgaaaagagtagggagcacacagccttttctcctgcaactgaggatgagaggcccatcgaacccatctcagacatcggtattgatcggatcaacagtcttatgtttggtgatagatgatttcccccggtggaatatgagtttaccatggagcgccggattggaaacagatgcaaacgcgaaggaagatttccatgtcagctgaactttgtttggcagtccagctagagttatcggtactcgctatgtcgcgcgcgttcgacgactactatattaaggattatgctgtcatctcgcgacgttcgacatcaatgaccactcatcggccgtcttaacttctccacagagcagcaagcgaaggcgtaaccttagctttactacacgatctgcaagagtaggcagccaaaatggagtccaaatgttgagcccctcggaaatcccacaaagggactgggtcccctctgactacaacttcggagccgccacttcagcgcaccaaatcgaaggtgcttggaatgaagatggaaagggggaaagcaactgggatcacttctgccacaaccatccggaaaggatactggacggtagcaatccacacattg

SEQ ID NO: 160468 - DNA, 397 bp, Zea mays
  Clone ID: MRT4577_77926C.1
ggtatcggaaaacttggactggaaaccaaaagggaggacctgatctatccgggttacgacaccaagttcacgaggggaagggaaggcggggagacgaccgccccccgacgagcggggcgcgaggagaggagccccagcccgcgatcccgccccaacaacgcacccaacacgaccccacgctcgcacccaatccgcccagcccggggcccgcagcgctgggccccgcccggccagggcgccccgaacacggggcccggaacactgggcgggggggggacgggaagacggccaaagaccgaatgccgaaacccgaacagcacgaggggacggccccccggggggcggcgagcgaggggggggcaaaggaaacagaccacagccaaatattggccgcgcc

SEQ ID NO: 160469 - DNA, 525 bp, Zea mays
  unsure (1)..(525): unsure at all n locations
  Clone ID: MRT4577_77927C.1
tgattacagnagnagggaggacaagggaacaaaccaggtcctaaattcaccatgggatgtatgctacgatcccgcagaggaggccgtgtatattgcaatggctgggcaacaccagatctggaagcacaatttacatgatggaataaccaaagttattagcggtgatggctatgagaggaatctgaatggctcaagaaatgcatgagttacttgttgctgatagtgaaagtagttccattcgagttgttaatctgaagacaggaggctcaagattgctggctggaggagatccagtatttccagaaaatttgtttaggtttggagattatgacgggactggctcagatgtgctacttcaacatcccttgggtgttgtttatgccaatgacaatcaagtatatatagctgattcctacaaccataagataaaaaagttagatcccgtcacaagaaaagttacaactattgctgnaacggngagtgcaggatacagggatggtccaggcttgacagctcaactttctg

SEQ ID NO: 160470 - DNA, 513 bp, Zea mays
  Clone ID: MRT4577_77928C.1
acaagctttttttttttttttttttttttttttttttttttttttttttttttttagaaaaagaaaatatccaacacccctggggaccaaaaacacataataagggggggaagggacctcttattggtggggggcaacaccccgggcgcgaccccacggggggggaaaaccacaacaccggggggcgctacaaggggggacccgcgcgccaccaaaggcggggtaaaaaaaggcaaagctggctcccgggagaaaaagttatccgcccacaaaaccccacaaaaaaaaagccgggagcaaaaaaagagaaccccggggcgcccaaggagggagacaaaccacaattatgggggggcgcacaccggcccctctacaaaaaaaaaaaacgtgccccccgccctaataaaaaaaacaacaccccgcggggggaggggggttgagaaaagggcgctcctccgcgttctcgattaaagacacggggcgcgctggcggtctgcggcggggagcgggatc

SEQ ID NO: 160471 - DNA, 2067 bp, Zea mays
  Clone ID: MRT4577_77929C.1
cggacgcgtggggttctgcgctgcagggtgactcacccggttgtaaatgatggtgacatgtacttgtggagagaactgggggtgaactcttggcctacatttgttcttattggacccaacggagaggttctagcacagatatcaggtgaaggtcatagaaaggatctggatgaagtagttggtgcagcactggaattttatgaagagaagaaactattacaaaatgacccccttcccttggcattggaaaaagacaaggatagtcgtttactaacttcgcctctcaaatttcctgggaaacttgctgttgatgtgcaaaacaatcgattattcatatcagacagtaatcataatcgaattgtggtgaccaacttggaagggcagttcatataccaagttgggagttctgaggaaggattgcttgatggcccatttgatgctgccctatttaaccgccctcaagtattgcttacaattcaaaaaggaatatcttatacgttgcagacactgagaaccacgctctgcgagaaattaattttgtggacgagactgtgagaacactagctggaaatgggacgaaaggatctgattacagaggaggaggacaaggaacaaaccaggtcctaaattcaccatgggatgtatgctacgatcccgcagaggaggccgtgtatattgcaatggctgggcaacaccagatctggaagcacaatttacatgatggaataaccaaagttattagcggtgatggctatgagaggaatctgaatggctcaagcgccaccagcacatcgtttgcacagccttctgggatttcattagcttttgaaatgcatgagttacttgttgctgatagtgaaagtagttccattcgagttgttaatctgaagacaggaggctcaagattgctggctggaggagatccagtatttccagaaaatttgtttaggtttggagattatgacgggactggctcagatgtgctacttcaacatcccttgggtgttgtttatgccaatgacaatcaagtatatatagctgattcctacaaccataagataaaaaagttagatcccgtcacaagaaaagttacaactattgctggaacggggagtgcaggatacagggatggtccaggcttgacagctcaactttctgaaccagcaggacttgttgaagttggagatggaaggcttcttgtagcagatacaaacaacaacgcaatcagatatataactcttagtgacaaaggtgctgaggtgaagacactagagttgatcggagtacaaccgccatcaccaaaaccgaaggtgttgaaacgcctaagacggcggttatcggcagatacagatgttattaatgtcgatggtggttcttcaaaggaaggattcttgtctcttgcagttacagtacctgatggttaccatttctccaaggaagcccgcagtaaatttgatgtggaaacagagccgcctaatgcagttgagattgaaccagcgaacggttttctaaactcggaagggctggcatcactgaagttcagaaggatatcatcatccttgtcaatgggaaggataaactgcaaggtttactactgtaaagaagatgaagtttgtctctaccaatcgattgcttttgatgtcaaattccgtgaagaggcggaaccgaacccagcacaaattacgctatcctatactgtttcgccaagagataattcaggtagcacacaactactggctgctagaaagaatgccaaggtgtagtcagactcacggtgatttttttttacttgcatcattgtattgattgtcaatttggccccaggcccacaatggcaagtgtttcaagattgacttctcctgtatgttgtatagcgacatgttgcttgtaacccagcttcattgtctcccctcagcacaacagtattaatggagtagtttattgtcagttcattggttgcttggaacaccgtatggagtccatttgttggaaccctgttaaccctaatgattgatgaatcgaacaatttattccaaaaaaaaaaaaaaaaaaaaaaaaaaaaaaaaa

SEQ ID NO: 160472 - DNA, 1070 bp, Zea mays
  unsure (1)..(1070): unsure at all n locations
  Clone ID: MRT4577_7792C.1
cattgggaccctcgaggccgggccgcgtcatttcctcctgagccagatctgtcatttcctcctgagccagatcgtgcgagccccttcggttactggtcgtccgcaggcggcaggcgaacccctctccctccctgcgatctcttagctactcatggcaatggcagtcttaacttcctcgccgagccgcgcccgccctctccacacgagctccgctggcctacctcgtccctgcactcctgcactcgtcgtcgtcttgccgaaggagcttttgtcgccatccaccatgctgcgacacgccgagcgtcgtcattgttctcctcgccgtccgagctctgcccgaggttgtccacattgcaaccactgctcaggagaagacgaagtcgtggaaggagacttccaggagttccaagactacgacgagtttttaggtgtgggttggcggcaacccccagtcagctgcttgtgaaggccttatctttactgcgtttcgctagcactttgatttaactgttaagttgatgactatgtggatgtctatgactctgtgatgtaataagttaatactcttttatgcgattattcgagcactgtgcgatgatgttcatttatgacctcgtcccgtacgtccattctgatcctgctacgtcccaagtttacttttaaaaaaaaccaccacggccctccagcccaagcgtcgtcattgttctcctcnccgtccaagctctgcccnaaatatcggcccgttcntgaagtctaagggaattgcagganaggaccctaaggaccancagcttggtgaaggttgtccacattgcaaccactgctcaggagaagacgaagtcgtggaaggagacttccaggagttccaaaactacgacgagttttaggtgtgggttggcgncaacccccagtcagctgcttgtgaaggccttatctttactgcgtttcgctagcactttgatttaactgttaagttgatgactatgtggatgtctatgactctgtgatgtaataagttaatactcttttatgttattattcgagcactgtgcgatgatgttcatttatgt

SEQ ID NO: 160473 - DNA, 328 bp, Zea mays
  Clone ID: MRT4577_77930C.1
gcacccggtatccctgctccttttccttggcggacgaacggggctccctccggcgactggggtgctccctctagccatcgactacctcacagatccctgtaagccggaccccattacccttctcggatagctgtgcccctaccgacaggacttcacgggagcaagcctggggttgatcggaggactcggcatggatcggtgcacgaaaccacgcccaggacttctcacagatcacactggaccgagcgctgagcgcctggaacttccctgttcatgcgcgagttaggtggaccggagctctccgtcgtgcgttgaacatcgctgtgct

SEQ ID NO: 160474 - DNA, 117 bp, Zea mays
  Clone ID: MRT4577_77931C.1
atggcgctcgcgcaaggccgctcgctctgtcccgcgtggacgcttgtaaccccctactgcaagcgcacccgacctgggcgcggggctaacacgaaggccgtgggttccacattgtaa

SEQ ID NO: 160475 - DNA, 583 bp, Zea mays
  Clone ID: MRT4577_77932C.1
aaactgcggatagagcagcgagccatcgacacgatcgcgagcgcaagcacgtacgttgtcggaagctctggttataagaagcaccagtgcctgatcgatggagtgccaggctctcctctccggccggaagctgctgggccgccccgtgcagtcgtccggctctaggtcgacggcgaggaaggccgcccttcgtcgtcaggtgcagctccagccctccagacaagcaaggtgccgacaggcagatgagggtcgcgtccaaccagttcctctcctacctcgatgggacgctgcccggcgactatggcttcgagccgctgggactctcggacccggagggtgaccggtccgcttcatcgagaccaagtggctggtctatgtggaggtgatcaacgggcgctacgtcatgctgggcgcggtggtggtcatcgacccggagatcttcggtgagatggggatcatccccccggagaccgcgatgtcgtgattctagaaggacgtcatcccacccgtattgacctacaagtactgtgtcgactcctacacgctcttcggcttcaacatgaagctcatgtacttcgccgag

SEQ ID NO: 160476 - DNA, 585 bp, Zea mays
  Clone ID: MRT4577_77933C.1
ccccgcgtccgaccgctgctgctattgcctatggtcttgacaagaaggcaaccagcgtcggtgagaagatgtcctcatctttaacccgagggctctccggaggctgaggacctcttgtgagagggccaagagaactctgtcttccactgcccagaccaccattgagattgactcgctgtacgagggcattgacttctactccaccatcacccgtgccaggtttgaggagctcaacatggacctgttcaggaagtgcatggagcctgttgagaaatgcctgagggatgccaagatggacaagagcagcgtccatgatgttgtccttgttggtggctccactaggatccccagggtgcagcagctgctccaggacttcttcaacggcaaggagctgtgcaagaacatcaatcctgatgaggccgttgcctatggtgctgctgtccaggctgctatcctcagtggtgagggcaacgagaaggtgcaggacctgcttctgcttgacgtcactcctctctctctgggtctggagactgccggaggagtgatgaccgtccttatcccgaggaacaccaccatccccaccaa

SEQ ID NO: 160477 - DNA, 167 bp, Zea mays
  Clone ID: MRT4577_77934C.1
aagggcggccgaccttttgttttgaacaaggtgtatgcctcctccgatgagaataactagatcatgtaccatttgcagttcaaatgccatgggcctatctaaatatttgtgttgatgatgccagtggcaatttaccatgcatagcatattgtgggtagcacttatgg

SEQ ID NO: 160478 - DNA, 395 bp, Zea mays
  Clone ID: MRT4577_77935C.1
tttaaaatgcaaaggcttccaattaaatcttcttaccttgatggacaggtactctaacaaacacagaaactttatggtcctaatttctccacaccaaacggacgccacctggttaccgacaccttgcatacctaagggacacaaccttcatggtgaggggctcaaaaccaaaactgcctgcctaactgcatgtctttcaagcgggggataaataagccaaaccaatccgccattagcaaaaacatcctgtgagacctaatgccaagccgactggggtgcctatgggtatatggggtaaatgctggcgttgtgacccagtaacacctttacattgagaacccggaaagaacgtctcttgactaggaactccagctcgaaagagtgaaccctgcccg

SEQ ID NO: 160479 - DNA, 749 bp, Zea mays
  Clone ID: MRT4577_77936C.1
ctctcgacccctagtcccctgctccattctcagccgccgccaatcccttcccgtgctccgcaaccgctgagtgagaagaagagatggccggcaagggcgatggcccggctatcggcatcgatctcggcacgacgtactcttgcgtcggcgtgtggcagcacgaccgcgtcgagatcattgccaacgaccagggtaaccgcaccacgccctcgtacgtcgccttcaccgactccgagcgcctcatcggagatgcggccaagaaccaggtcgccatgaaccccatcaacaccgtctttgatgccaagcgtctcatcggcaggtcaaggccacagctggtgacacccatcttggtggtgaggactttgacaacaggatggtcgaccacttcgtccaggagttcaagaggaagaacaagaaggatatcactggcaaccccagggctctccggaggctgaggaccgcttgtgagagggcgaagaggactctgtcttccactgcccagaccacgattgagattgactcgctgtatgagggcatcgacttctactccaccatcacccgtgccaggtttgaggagctcaacatggacctgttcaggaagtgcatggagcctgttgagaagtgcctgagggatgccaagatggacaagagcaccgtccatgacgttgtaccttgttggtggctccactaggatccccagggtgcagcaactgctccaggacttcttcacgggcaaggagctgtgcaag

SEQ ID NO: 160480 - DNA, 4556 bp, Zea mays
  Clone ID: MRT4577_77937C.1
taggggccttttttttttttttttttaccgaaaagaagaataccgtatcacttaaggtttgccagtagccgcgataacattgaaccgaccgactatcacgaggtccaaaaaaaaaaaaataaccaccacaaaagtaccaaccaaccacaaataaagtttaagcccgacacaccgcaccaactgacgataactctcggcagcaactgggccagccagcaactgcagcacactcaagactgacaacaaaccgcttagtccacctcctcgatcttggggccaggcgccgccgctgccggcaggggcgtcctcgtccatgccgccagcgccgccccatgtcttcacccgcgccctggtacatcttggcgatgatggggttgcagaggctctccagctccttcatcttgtcctcgaactcgtccgcctcggcgagctggttggcgtccagccagctgatggccgcgtcgatggcgtcctcgatcttcttcttgtcatcggccggcagcttggacgcaatcttctcgtccttgatcgtgttgcgcatgttgtaggagtagttctccagcgagttcttggcctccaccttcttcttgtgctcctcatcctcagacttgtacttctcagcgtcctgaaccatcttctcgatctcctccttggagagacggcccttgtcgttggtgattgtgatcttgttcttctgccccgttgtcttgtcctcggcagacacgttcaggatgccgttggcgtcgatgtcaaagcacacggtgatctgtggcacaccacggggtgcaggggggatgccggagagctcgaacttgcccagcaggttgttgtcgcgtgtccgggtcctctcaccctcgtagacctggatcaggacaccgggctggttgtccgagtaggtggagaatacctgctccttcttggtggggatggtggtgttcctcgggatcagcactgtcataactcctccagcagtctccagacccagggacagaggggtgacgtccagcagaagcaggtcctgcaccttctcattgccctcaccgctcaggatggcagcctggacagcagcaccataggcgacagcctcatcggggttgatgttcttgcacagctccttgccgttgaagaagtcctggagcagttgctgcaccctggggatcctagtggagccaccaacaagtacaacgtcatggacggtgctcttgtccatcttggcatccctcaggcacttctcaacaggctccatgcacttcctgaacaggtccatgttgagctcctcaaacctggcacgggtgatggtggagtagaagtcgatgccctcatacagcgagtcaatctcaatcgtggtctgggcggtggaagacagagtcctcttcgccctctcacaagcggtcctcagcctccggagagccctggggttgccagtgatatccttcttgttcttcctcttgaactcctggacgaagtggttgaccatcctgttgtcaaagtcctcaccaccaagatgggtgtcaccagctgtggccttgacctcaaagattccttcctcaatggtgaggagggagacatcaaaggtaccacctccaagatcaaagatgaggacattcttctcaccaacactggaagccttcttgtcaagaccataagcaattgcagctgctgttggctcattgatgatacgcatcacattaaggccagcaatgacaccagcatcctttgtggcctgcctctgggaatcattgaagtaagcagggactgtgacaacagcattcttaatagttactcctaggtaagcctcggcgatctcacgcatcttgatgaggaccatggaagaaatttcttcagctgaaaactgcttctcctcacccttgtactgcactacaatcataggcttgtctgcggggccaggaataaccttgtacggccacatcttaatatcactctggacaggggcatcagcaaaccttctgccaataagacgcttcgcatcgaagacggtgttgatggggttcatggcgacctggttcttggcggcatctccgatgaggcgctcggagtcggtgaaggcgacgtacgagggcgtggtgcggttgccctggtcgttggcgatgatctcgacgcggtcgtgctgccacacgccgacgcacgagtaggtggtgccgagatcgatgccgatggccggcccctcgcccttggccggccatctcttcttctcactcagcggttgcggagcacgggaagggattggcggcggctgagaatggagcaggggactagggtttcgagagttttttttttttttttttttaccgaaaagaagaattaccgtatcacttaaggtttgccagtagccgcgataacatggaaccgaccgactatcacgaggtccaaaaaaaaaataaccaccacaaaagtaccagcccaccacaaataaagtttaagcggacacaccgcaccgaccgacgacgataactcgcggcagcgactgggccagccagcaactgcagcacgctcaagactgacaacaaaccgcttagtccacctcctcgatcttggggccagggccgccgctgccagcgggggcgtcctcgtccatgccgccagcgccgcccatgtcttcacccgcgccctggtacatcttggcgatgatggggttgcagaggctctccagctccttcatcttgtcctcgaactcgtccgcctcggcgagctggttggcgtccagccagctgatggccgcgtcgatggcgtcctcgatcttcttcttgtcatcggccggcagcttggacgcaatcttctcgtccttgatcgtgttgcgcatgttgtaggagtagttctccagcgagttcttggcctccaccttcttcttgtgctcctcatcctcagacttgtacttctcagcgtcctgaaccatcttctcgatctcctccttggagagacggcccttgtcgttggtgattgtgatcttgttcttctgccccgttgtcttgtcctcggcagacacgttcaggatgccgttggcgtcgatgtcaaagcacacggtgatctgtggcacaccacggggtgcaggggggatgccggagagctcgaacttgcccagcaggttgttgtcgcgtgtccgggtcctctcaccctcgtagacctggatcaggacaccgggctggttgtccgagtaggtggagaatacctgctccttcttggtggggatggtggtgttcctcgggatcagcactgtcataactcctccagcagtctccagacccagggacagaggggtgacgtccagcagaagcaggtcctgcaccttctcattgccctcaccgctcaggatggcagcctggacagcagcaccataggcgacagcctcatcggggttgatgttcttgcacagctccttgccgttgaagaagtcctggagcagttgctgcaccctggggatcctagtggagccaccaacaagtacaacgtcatggacggtgctcttgtccatcttggcatccctcaggcacttctcaacaggctccatgcacttcctgaacaggtccatgttgagctcctcaaacctggcacgggtgatagtggagtagaagtcgatgccctcatacagcgagtcaatctcaattgtggtctgagcagtggaagacagagtcctcttcgccctctcacaagcggtcctcagcctccggagagccctggggttgccagtgatatccttcttgttcttcctcttgaactcctggacgaagtggttgaccatcctgttgtcaaagtcctcaccaccaagacgggtgtcaccagctgtggccttgacctcaaagattccttcctcaatggtgaggagggagacatcaaaggtaccacctccaagatcaaagatgaggacattcttctcaccgacactggtagccttcttgtcaagaccataggcgatagctgcagctgttggctcgttgatgatacgctgcacattaaggccagcaatcaccccagcatcctttgtggcctgcctctgtgagtcattgaagtaggcagggactgtgaccacagcattcttgatcgtgctaccaaggtaagcttcagcaatctcacgcatcttgataagaaccatagaggagatctcttcagctgcaaactgcttctcctcacccttgtgctggacaacaatcattggcttctcaccaggcccagaaatgaccttgaagggccacagcttgatatcactctggacagacgcatcactgaacctcctgccgatgagacgcttggcatcaaagacggtgttgatggggttcatggcgacctggttcttggccgcatctccgatgaggcgctcggagtcggtgaaggcgacgtacgagggcgtggtgcggttaccctggtcgttggcaatgatctcgacgcggtcgtgctgccacacgccgacgcaagagtacgtcgtgccgagatcgatgccgatagccgggccatcgcccttgccggccatctcttcttctcactcagcggttgcggagcacgggaagggattggcggcggctgagaatggagcaggggactag

SEQ ID NO: 160481 - DNA, 5155 bp, Zea mays
  unsure (1)..(5155): unsure at all n locations
  Clone ID: MRT4577_77938C.1
acgaaaccgaaccagaataccgtattacttaaaacgcgtgccacgataatattgttcaccaacaaaaggttctaacgcggatacaccgcgacgacgacgataaatcgagcagcgactgggccagccagccactgcagcagacacacgagactgacacaaaccgcttagtccacctcctcgatcttggggccagggccaccgcttccagccggagcgtcctcgtccatgccgccggcgcctcccatgtcggcacccgcgccctggtacattttggcgatgatggggttgcaaaggctctccagctccttcatcttgtcatcgaactcgtccgcctcggcgagctggttggcgtccagccagctgatggccgcgtcgatggcgtcctcgatcttcttcttgtcgtcggcagccagcttggacgcgatcttctcgtccttgatcgtgttgcgcatgttgtaggcgtagttctccagcgagttcttggactccaccttcttcttgtgctcctcgtcctccgacttgtacttctccgcgtcctgcaccatcttctcgatctcctccttggacagacggcccttgtcgttggtgattgtgatcttgttcttctgccccgtcgtcttgtcctcggcagacacgttcaggatgccgttggcgtcgatgtcgaagcagaccgtgatctgtggcacaccacggggagccggtgggatgccggagagctcgaacttgcccagcaggttgttgtcgcgggtccgggtcctctcaccctcgtacacctggatcagcacaccaggctggttgtccgagtaggtggagaatacctgctccttcttggtggggatggtggtgttcctcgggataaggacggtcatcactcctccggcagtctccagacccagagagagaggagtgacgtccagcagaagcaggtcctgcaccttctcgttgccctcaccactgaggatagcagcctggacagcagcaccataggcaacggcctcatcaggattgatgttcttgcacagctccttgccgttgaagaagtcctggagcagctgctgcaccctggggatcctagtggagccaccaacaaggacaacatcatggacgctgctcttgtccatcttggcatccctcaggcatttctcaacaggctccatgctcttcctgaacaggtccatgttgagctcctcaaacctggcacgggtgatggtggagtagaagtcaatgccctcgtacagcgagtcaatctcaatggtggtctgggcagtggaagacagagttctcttggccctctcacaagaggtcctcagcctccggagagccctggggttgccagtgatnnnnnnnnnnnnnnnnnnnnnnaactcctggacgaagtggttgaccatcctgttgtcaaagtcctcaccaccaagatgggtgtcaccagctgtggccttgacctcaaagattccttcctcaatggtgaggagggagacatcaaaggtaccacctccaagatcaaagatgaggacattcttctcaccgacactggtagccttcttgtcaagaccataggcgatagctgcagctgttggctcgttgatgatacgcagcacattaaggccagcaatcaccccagcatcctttgtggcctgcctctgtgagtcattgaagtaggcagggactgtgaccacagcattcttgatcgtgctaccaaggtaagcttcagcaatctcacgcatcttgatgagaaccatagaggagatctcttcggctgcaaactgtttctcctnnnnnttgtgctgaacaactatcattggcttctcaccgggcccaggaatgaccttgaagggccacagcttaatatcactctggacagaggcatcactaaacctcctgccaatgagacgcttggcatcaaagacggtgttgatggggttcatggcgacctggttcttggccgcatctccgatgaggcgctcggagtcggtgaaggcgacgtacgagggtgtggtgcggttaccctggtcgttggcgatgatctcgacacggtcgtgctgccacacgccgacgcaagagtacgtcgtgccgagatcgatgccgattgccggcccatcacccttgccggccatctcttctcgctctcagcagaggtggcggagcacgggatgggattggcggtggcggtgaacgggaggggattggcggcggcgggagaagtaacagagggctaggggtcgtgccgctctcgagagtcttctnnnnnnagactagccgagctcaatgagtaaacggtctgctgtatgagataactttattgacacctgccacatatttcatagatgtcttgtcggagaaaacaaaaacacaactgatccatcaaacacaaaattcttcaatagtgcacattccgcaccgatagcaaatcagagtcatccaccatcaaggcattattaaccaatcacgctaagatttattgcgactggccttctcctcgataccagactgcgaaaatctcttcctcaggacctcaaggacttgttccatctttacatccttgactctgagcagcaccatagcgtggtacagcagatcagccatctccgaagctgcacgagattggtcctcgttctcaagcagcgtttgaattagctcaccagcttcttcacgtattttcgagcaaagtagctggttatcaaggagtagctttttcgtccatgatggcttgccacctccatcagtaactttctcctcgtggcgtctactaattgtatcttcaagtgagtatagggttgtcataacctgcctgccttcattgggctttgaactttgtagagcatcataaactgaagtataataacacgtttctgctcctgtatggcaggtaggtccatctggctttccaaggtatattatagagtcatggtcacagtctaggaaaatgtcatgcacattaatgaagttcatggatgtctcccctttcgtccacaaggaagaccgtgaccggctaaagaatgtagctttcctggttgatatagtttttgcaagggcttctttattagcaaaaccctgcataagaatggctccagtatccacattttgtgcaatggcaacagccaaccctttgctgtcccacttcacactgtctagcaatgtgtcaacctgattttttatccagcacaataataaacttatgttaggcttcaatgatagtgggaacaataaaaaaacatagtctccttccattaaaacagatgcaaaatttgtagcagagctactgcaaagattcaattagccatagttcttactaatgccagagtctacactggaaagatactgacatttaaaaggctagaagaatatatctgcatgtacaaggaaatacatagatgaatcctaaaccctctgaacaagcacaagatataactacctaaagcaattacatacacttcaccagtactcgtatgttttagaaactgcagtataaaaaggtatattttgtgagaaattgtatcttagttttaattaagcaaaaaaaggcaggttcaatactccgttatttttctctaaactttgtggcaaaattagctccacaacacccaaaagtgacacttttgtgaaacaatacagctatagggatatgtctaaaaaaatggaagcactatacacagtgaaagaatacagctaattgcaccattcttaatgcattaggtagcagcaactagcataccaacttactaagcctccatcactaccagattataaacaatggataggataaatcaggactaactctgcacttcaacttctaattgagcattctaatttctaaggaatgaagaccaacacaaatgaaaatgtgtgtggggtggggacagacacgctctgctttctggctaacattaagtgcctacaacccatatgtaaatcaaaatgtgagatgtcaagttgcaaaatctgaagtgccaagaaacaagaggcaaatcctcaaaattcagacacaaaatgctgccaaaaaagattcaggaaaaccaaaccatgtgttcatgacacaagttactcaattagatgcctccacaatgagcaactcaagaatgcctcactgaatgcttcgctgtaataattttatccgtgatgataccagatgtttattttgagtctttgatcaaataaagggaaatacaaaccaagaaaatacatgttttcaacatatacaaagggctatttagagataatgcagaaaatgtgagtatcagtgacacaaataaagactgatgactgccttctgcaatggaccatacaacattgatgcggctaaaatcattcaatcatattacaggaacactatatagtatcaccactaatggtaatggacaagataaagtgctagcaacataacaagtcaaacaagaccatttggtgtttcatccatacaaattacttatctgtgttccatgatgaagtctgcacttcattggcctaatgtttaacacttgataaagcatacatagacatagatatgcatctaattgcacaagtttcatggtgcatccagatagttggctgcaagcaatgtactagcaacataatttattgaaacactattatggcatgccattttaattagcatagacagagcaaggtatgaggtatgagctatccaaatcgagaggcaataagagatgtctttgctgcaactccccttgagtgcaaataaaacctcacaacactaatggtggatcctcatccagggcttgtatccatcatgtggcagtgtggcactcctcgcccctagcagggcacttaaggctcggaacggattaccgccccagtggcttacagtccgctccaatccccaacaaatttggtcctaagtaataagaaataagagagaaacaaatttcgttaggagaaggaaaactccaaacctcggtgtcgacggttatagctcctgccacagactgcggggagctcgacactacggagactgccgggtacggctccctgcgccgccacccaggggccgaagccgctgccgagcgaaaattggggaaggatacaccgctagaggagaatcccgcgcggcacgctgaggaggacacgggcgcgtgtgttggtgcggccgccgccatcggaaccccgagtgtgtgtgttccgctcctcgtgacgtgac

SEQ ID NO: 160482 - DNA, 2251 bp, Zea mays
  Clone ID: MRT4577_77939C.1
ggctctcgaaaccctagtcctctgttacttctcccgccgccgccaatcccctcccgttctccgccaccgccaatcccctcccgtcctccgccacctctgctgagagcgagaagagatggccggcaagggtgatgggccggcaatcggcatcgatctcggcacgacctactcttgcgtcggtgtgtggcagcacgaccgtgtcgagatcatcgccaacgaccagggtaaccgcaccacaccctcgtacgtcgccttcaccgactccgagcgcctcatcggagatgcggccaagaaccaggtcgccatgaaccccatcaacaccgtctttgatgccaagcgtctcattggcaggaggtttagtgatgcctctgtccagagtgatattaagctgtggcccttcaaggtcattcctgggcccggtgagaagccaatgatagttgttcagcacaagggggaggagaaacagtttgcagccgaagagatctcctccatggttctcatcaagatgcgtgagatcgctgaagcttaccttggcagcacgatcaagaatgctgttgtcacggtccctgcctacttcaacgactcacagaggcaggccacgaaggatgctggggtgattgctggcctcaatgtgctgcgtatcatcaatgagccaaccgctgctgctattgcctatggtcttgacaagaaggcaaccagcgtcggtgagaagaatgtcctcatctttgaccttggaggtggtaccttcgatgtctccctccttactattgaggaaggtatctttgaggtcaaggccacagctggcgacacccatcttgggggtgaggactttgacaacaggatggtcaaccactttgtccaggagttcaagaggaagaacaagaaggatatcactggcaacccgagggctctccggaggctgaggacctcttgtgagagggccaagagaactctgtcttccactgcccagaccaccattgagattgactcgctgtacgagggcattgacttctactccaccatcacccgtgccaggtttgaggagctcaacatggacctgttcaggaagtgcatggagcctgttgagaaatgcctgagggatgccaagatggacaagagcagcgtccatgatgttgtccttgttggtggctccactaggatccccagggtgcagcagctgctccaggacttcttcaacggcaaggagctgtgcaagaacatcaatcctgatgaggccgttgcctatggtgctgctgtccaggctgctatcctcagtggtgagggcaacgagaaggtgcaggacctgcttctgcttgacgtcactcctctctctctgggtctggagactgccggaggagtgatgaccgtccttatcccgaggaacaccaccatccccaccaagaaggagcaggtgttctccacctactcggacaaccagcctggtgtgttgatccaggtgtacgagggcgagaggacccggacccgcgacaacaacctgcttgggaagttcgagctctccggcatcccaccggctccccgtggtgtcccccagatcacggtctgcttcgacatcgacgccaacggcatcctgaacgtgtctgccgaggacaagacgacggggcagaagaacaagattaccatcaccaacgacaagggccgtctgtccaaggaggagatcgagaagatggtgcaggacgcggagaagtacaagtccgaggacgaggagcacaagaagaaggtggagtccaagaactcgctggagaactacgcctacaacatgcgcaacacgatcaaggacgagaagatcgcgtccaagctggctgccgacgacaagaagaagatcgaggacgccatcgacgcggccatcagctggctggacgccaaccagctcgccgaggcggacgagttcgatgacaagatgaaggagctggagagcctttgcaaccccatcatcgccaagatgtaccagggcgcgggtgccgacatgggaggctccggcggcatggacgaggacgctccggctggaagcggtggccctggccccaagatcgaggaggtggactaagcggtttgtgtcagtctcgtgtgtctgctgcagtggctggctggcccagtcgctgctcgatttatcgtcgtcgtcgcggtgtatccgcgttagaaccttttgttggtgaacaatattatcgtggcacgcgttttaagtaatacggtattctggttcggtttcgtattgctgtttcttttctgcttt

SEQ ID NO: 160483 - DNA, 417 bp, Zea mays
  Clone ID: MRT4577_7793C.1
atgacgagatcaaggtgcgacctcttgttgctgatcctcgcctgctcgatcttcagcgagccacagctgcccagatatattgaggagtgggtcagagttttctatgccacaatatggatagacccagatcatcagtggatgaggttcagcctgcagtttggtttctattgcccagctcctgaggacatagctccaactccagcattagatatcagggttgaggatgagaccatcagaaagtttgaggatcagggtgcagttgctgatacttcttccgatgatgatgaggatctggggattccgccaccacctcctgttgggggccttcggcttccgaaggtaactttggattcgaatcggtatcacagtggaagaagcccaaagaatacgaaggttgacacagcgccgaagctgtaa

SEQ ID NO: 160484 - DNA, 403 bp, Zea mays
  Clone ID: MRT4577_77940C.1
aggccaagccctttatataactatcaccttttacggggccaaggccaaccaatcaagccaaggagggttgaaaaaaaatttgaaaaaccagggggcacaaaaaaaagggggcccccccatggggccccaacaaacaaagggggggggggcataatttgaaaaaaaaacccccccctgcaaattcgccaccccttttttgaaaaaagaaggggacataacttgaaactaggcaacgaagaggaacttggaaaccctaaaaacccttcctgggaaaaaagggggggccaaactcaagggacccccccttaaaaatccccatttgggggaaaaggcccaaagagggtaggagggaccctcctaatcaaaaactattctttctttgagggggggaaaccaccttgat

SEQ ID NO: 160485 - DNA, 2390 bp, Zea mays
  Clone ID: MRT4577_77941C.1
gccggccgggcttcgaaactctcgaaaccctagtcctctgttacttctccctccgccgccactcccctcccattcaccgccaccgccaattccataccgtgctccgccacctctgctgagagcgagaagagatggcaggcaagggtgatgggccggcaatcggcatcgatctcggcacgacgtactcttgcgtcggcgtctggcagcacgaccgtgtcgagatcatcgccaacgaccagggtaaccgcaccacaccctcgtacgtcgccttcaccgactccgagcgcctcatcggagatgcggccaagaaccaggtcgccatgaaccccatcaacaccgtctttgatgccaagcgtctcattggcaggaggtttagtgactcctctgtccagagtgatattaagctgtggcccttcaaggtcattcctgggcccggtgagaagccaatgatagttgttcagcacaagggggaggagaaacagtttgcagccgaagagatctcctctatggttctcatcaagatgcgtgagatcgctgaagcttaccttggcagcacgatcaagaatgctgttgtcacggtccctgcctacttcaacgactcgcagaggcaggccacaaaggatgctggggtgattgctggcctcaatgtgctgcgtatcatcaatgagccaaccgctgctgctattgcctatggtcttgacaagaaggcaaccagtgtcggtgagaagaatgtcctcatctttgaccttggaggtggtaccttcgatgtctccctccttacaattgaggaaggtatctttgaagtcaaggccacagctggcgacacccatcttggtggtgaggactttgacaacaggatggttaaccactttgtccaggagttcaagaggaagaataagaaggatatcactggcaacccgagggctctccggaggctgaggacctcttgtgagagggccaagagaactctgtcttccactgcccagaccaccattgagattgactcgctgtacgagggcattgacttctactccaccatcacccgtgccaggtttgaggagctcaacatggacctgttcaggaagtgcatggagcctgttgagaagtgcctgagggatgccaagatggacaagagcagcgtccatgatgttgtccttgttggtggctccactaggatccccagggtgcagcagctgctccaggacttcttcaacggcaaggagctgtgcaagaacatcaatcctgatgaggccgttgcctatggtgctgccgtccaggccgctatcctcagtggtgagggcaacgagaaggtgcaggacctgcttctgcttgacgtcactcctctctctctgggtctggagactgccggaggagtgatgaccgtccttatcccgaggaacaccaccatccccaccaagaaggagcaggtgttctccacctactcggacaaccagcctggtgtgttgatccaggtgtacgagggtgagaggacccggacccgcgacaacaacctgcttgggaagttcgagctctccggcatcccaccggctcctcgtggtgtcccccagatcacggtctgcttcgacatcgacgccaacggcatcctgaacgtgtctgccgaggacaagacgacggggcagaagaacaagatcacaatcaccaacgacaagggccgtctgtccaaggaggagatcgagaagatggtgcaggacgcggagaagtacaagtcggaggacgaggagcacaagaagaaggtggagtccaagaactcgctggagaactacgcctacaacatgcgcaacacgatcaaggacgagaagatcgcgtcgaagctggctgccgacgacaagaagaagatcgaggacgccatcgacgcggccatcagctggctggacgccaaccagctcgccgaggcggacgagttcgatgacaagatgaaggagctggagagcctttgcaaccccatcatcgccaagatgtaccagggcgcgggtgccgacatgggaggctccggcggcatggacgaggacgctccggctggaagcggtggccctggccccaagatcgaggaggtggactaagcggtttgtgtcaggtctcgtgtgtctgctgcagtggctggctggcccagtcgctgctcgatttatcgtcgtcgtcgcggtgtatccgcgttagaaccttttgttggtgaacaatattatcgtggcacgcgttttaagtaatacggtattctggttcggtttcgtattgctgtttcttctctgctttatttctattcttgtcttgtttcgcgtgcttagccagtcttattaagcgaaggctgcaaaatagaataaacaatgggtggggcaaaaaaaaaaaaaaaaaaaaaactcgagagtacttctaga

SEQ ID NO: 160486 - DNA, 197 bp, Zea mays
  Clone ID: MRT4577_77942C.1
ctaggcaacagtaagttccagctagaagtctttgcatgggtgtcgcgcggggctgggatgagaaagcaatcacaaacatcagaggcgcacttcttgttcctttgaagaagaacggagaatgtgagatgcctgtcgcagagacctggggagctcagggtctagctgtctttggaagcgtgggctgcccgaggtatgat

SEQ ID NO: 160487 - DNA, 289 bp, Zea mays
  Clone ID: MRT4577_77943C.1
ggaagttttaccacatgtaacagattcctttatatgtagtgtgaatcactatttgtagaaactgtcatgtcaaaatatttaactgactgttgacatgtattatctttattccttgtatttgtttattggggatatctgctttaagatatatactactatgtatatccagttaactgagagatttttgactctcttaatagaactgcattaagtttatgattttgtagaaattagcttttgtctaggcaactagtgggtatactctgcaaatattgtaatgaactcttac

SEQ ID NO: 160488 - DNA, 103 bp, Zea mays
  Clone ID: MRT4577_77944C.1
ctgccatagacctactcaaaaccccacagcacaccgtctggtcgtgcatggagagaactcgttgagcagattccttgttcctgcagtaaccctgtccaagccc

SEQ ID NO: 160489 - DNA, 236 bp, Zea mays
  Clone ID: MRT4577_77945C.1
aaaagcacagcaaccttgaacttaaattttgttgaagctttgtacacttttgaaaatggccctcgaaaaaaaaaaacttttaaacgaattattgtttttacagaagttttgtgggggacttttcaaacttggggggggtaattaggtttttggtcagccaaatcgccgtttttttggacgacacgggacctcttccaaacgggcggaaaaccccggcgagctttttgagccttttt

SEQ ID NO: 160490 - DNA, 403 bp, Zea mays
  Clone ID: MRT4577_77946C.1
cccacgcgtccgcccacgcgttcgggcaggatgggaggtgatggaactgttgcataatccagataattccattgaggcatccaagaagggtatcaacaccaggatcttctaccttgagaacttgttcacatctaccaatggcgtacaagatgaaaggcgtattcaagggcctcaaggtcatctcccagatctttgtggtaaaagagcaccagatcgagatcggttatccgaccgatgtgaagcacgttgcgcacatcggttgggatagtcctacagggagtgtagcttctcctagctggatgaatggcatggagtcgccggacttttcatcgctgagcaatgccggaccatctgcacgaacctcctgggcttctcaaggtgatcttcaggtctcttgttcatt

SEQ ID NO: 160491 - DNA, 813 bp, Zea mays
  unsure (1)..(813): unsure at all n locations
  Clone ID: MRT4577_77947C.1
cccacgcgtccgcccacgcgtccgggtgccgatggtcgtcgagcttgagcacggggaggcgtccgccggcagccacgaccaccaccaccacctgcagccgcaggggtcggaggaggacaccgacgtggaggccgcccaagagcccgaggtcgagccgcccgtgccgctcgtgccgattcggcaccagagccaggcgctggtggcggaccaggagggtgaggaggtcaggctggaactcacgctcggcttcgagccagtcgtcaggcagcagccgaggctgtcgtgctgcgactcgagcggcttgagcgccgcgtcgagcctcatcggcttgcggctgcagctgccagccgcctgagcagaggaggtcatctcatttcacaaggcacagtggcacaccaagtgcagttttgcaaccaatgcggtgtttgcttaaagaaaaggttttggacgccgagcagccgactatttcctaggttttgttttttcattttcttttcttggctgtaattgtaaaggctgatgaactgcacagttttagcgtcgtcataataggagttttgcaattccatatgagattataagctattaaaaagtttgattaaaaaaaaaaaaaaaaaaaaaaaaaaaaaaaaaaaaaaaaaagnnaaaaaaaaaaaaaaaaaaaaaaaaaaaggggggggggggggttaccactgtttaagggcgaattttggggatttccattacactggcgggcgttcgggcttgcttttagagggcccattttccccttttggggggggtntttcctttcnttgggcggcgttttcaccc

SEQ ID NO: 160492 - DNA, 444 bp, Zea mays
  Clone ID: MRT4577_77948C.1
gcgccggctcgccttccaacgcctgcaaggcgaaacccctcaagggaaaggctagcagcaacgagcgcgcgtcgcccagccctactcagaggcagcatcagcaggagacggaggagctggagctggaaccggtgccgatggtcgtcgagcttgagcacggcgaggagtccgccggcagccacgaccaccaccaccaccacttgcagccgcagggatcgtcggaggacaccgacgtggaggccgcctcccacgtgagccaggccgaggccgagccgccggtcagcagccagagccaggcgctggtggcggaccaggagggagaggaggtcaggctggagctcacgctcggcttcgagccagtcgtcaggcagcagccgaggctgtcgtgctgcgactcgagcggcttgagcgccgcgtcgagcctcatcggcctgcggctgcagc

SEQ ID NO: 160493 - DNA, 251 bp, Zea mays
  Clone ID: MRT4577_77949C.1
ggggtcaaagaaacgattatatccaaacgtgctttttaacattggggtgttaccacgcgttttgaaaaaagtgttttcacgacttttgtctagcaaagatgcacatatgcctacaaaaaaaaacaggacccattttaataaccacaatatgtgttctgtgaattttacagcactatccttataacaagggtataggttattgtttaaaccccaaatgcttactgtaaatgctatttgacccttcccgtaaa

SEQ ID NO: 160494 - DNA, 349 bp, Zea mays
  Clone ID: MRT4577_7794C.1
aaacatccttaacatgaaaataattaattcctagcaggaatttaatttttcaaacaacatacccccgtccttggtgggggggccctttgcttttcactttacctgaaaccaaataccctttataatttcctttttttcgattccctcggggaaggggcgacccgagtttacctgccagctgcccaactcaggaatggttttgtacacggtacacctcgatcgggattttagcctttggcaactaacccctgacaatatcgggttctttaaacttttgggcttggacaaacctcagctcgttggtggaatcctagcttaccccaatccaggctgtttaagtgaggcaatt

SEQ ID NO: 160495 - DNA, 627 bp, Zea mays
  Clone ID: MRT4577_77950C.1
ggtacgcctgcaggatccggtccggaattcccgggtcgacccacgcgtccggatcagacgtggcgacccgctgaatttaagcatattagtcagcggaggaaaagaaactaaccaggattccctcagtaacggcgagtgaacagggaagagcccagcgccgaatccccgccgcgcgtcgcggcgtgggaaatgtggcgtacggaagacccactccccggcgccgctcgtggggggcccaagtccttctgatcgaggcccagcccgtggacggtgtgaggccggtagcggcccccggcgcgccgggctcgggtcttcccggagtcgggttgcttgggaatgcagcccaaagcgggtggtaaactccatctaaggctaaataccggcacgagaccgatagtcaacaagtaccgtaagggaaagttgaaaagaactttgaagagagagttcaagagggcgtgaaaccgttaagaggtaaacgggtggggtccgcgcagtccgcccggaggattcaacccggcggcgcgcgtccggccgtgccggtggtcccggcggatctttcccgctccccgttcctcccgacccctccacccgcgcgtcgttcccctcttcctccccgcgtgcggggct

SEQ ID NO: 160496 - DNA, 426 bp, Zea mays
  unsure (1)..(426): unsure at all n locations
  Clone ID: MRT4577_77951C.1
tagcaaccataaatagcttactaataacacctgcatggcttgntcacggcgtgacattaagtagggggggcgaaccacacccctcaattgctgaatcatgcatcttgtatttttttctaacaaaaagatacctaataactttctctcttttccccccttctctgagaaacggtacgcctgtccgtggctttcattaggttcagcaaaacatcttcgccagcaccggcaacagcctcttttatttctgtggccacaagaaccctgtccatctttcgcaggaacctgttttccactagctcgacgcacatgaccaccattcctcctttgtgatcctcattaacagaatgtattatgtccacttcaaattcgttaatttaacataaacattctaaatgttgccccacacttccattaacctatttatca

SEQ ID NO: 160497 - DNA, 204 bp, Zea mays
  Clone ID: MRT4577_77953C.1
ctcacgcttaccaacacacattcaactttctttcatcgcgcccaacaaaacacggagggggcccaatgttatgcttttcctatcccaacacaccatgcccttactatagcttcatcacgcccaccacaccatagaacaagtgcgcaagcgtggtgacaacctccaaaaccaccggaagagacaacaaccacccttttcaacaca

SEQ ID NO: 160498 - DNA, 115 bp, Zea mays
  Clone ID: MRT4577_77954C.1
caatgtccttatggcctgactcctgttgggagtttattcgtggtttggtccattttactccaacaactctttaaaggctccctctctgtcttcctgactcttaccgttcgtgcgt

SEQ ID NO: 160499 - DNA, 311 bp, Zea mays
  Clone ID: MRT4577_77955C.1
atgccgtgatgtcttttttttttcatacagttctgaccgcgtacaccagtttcactacaaaataccataatcatatggaagtaatggctcatgggacagactgaagggattgaactccactacttgggataccggacttagaaacacaatttgaaagagggactgagcatatcgaaacgcctgacattaaaaaaggtgagcagcttgtggcgctctaacatttgaatcccctgcggaccatcagccaactgatgaggagcatagccgtaatgcccccacccaccatcagtttaaacatcagggtttaaagc

SEQ ID NO: 160500 - DNA, 282 bp, Zea mays
  Clone ID: MRT4577_77956C.1
ttttgttttatgcgaaggcgccgtatttgtataaagagtacatatttgttttacggatgtattattttttatcacccatcatggagttgcggtccattaatcgaagttatttagcccgcataacatatattttggtaaggccaaaatccgtgtcaacaccagctcaggactcctggtgaggaagagttagctgcctgcacgcctctccaccaaatttgagcctcccccttcaatagctgcgtgccaaaatgaacccgatctccatacacaatctcgaagaca

SEQ ID NO: 160501 - DNA, 1449 bp, Zea mays
  Clone ID: MRT4577_77957C.1
acgacgcgcagcgagagcgcagcctgctgcgggactggctgctgcccgtggagggcgcggtggcgctcagcatcgtgctggccttcgcgtggcagaaggccgtgcgcgcgtggccgcgcgctatggtgcgcgtcatcctctggtccagcttcggtgtgaccctggccgtgggcgcgctgctcatgtgcttctcgatgctggccactgtggggctgggcgtggcgatggtggtgttctccatcggcaccgggctgtacgcgtgctgggtgacgcggcgtgtgggcttcacggcgcgggtgttcgagcgcgcggtgcagccggtggataagttccacggtttgaatggccccgcgtacctgatggtggcggcgggcttcgcgtggatctccgtgtggtgcgtggcggtgatcggagctgtgaacttccgcttccccgggctcaccatcctggggctggtggtcagcctggcgtggaccgccgaggtgatgcggaacgtggcgaacctgacggcgagccgggtgatcgcgctctactacctgcgcggcatgcagtcgagcgtgcagttcagcttccaccgcgcgctgtcgcacaacctcggcagcgcctgcctgggctcgctcttcgtgcccaccatcgaggcgctccgcatcctggcgcgcgggctcaacctgctggagggcgaggacgagttcatgttctcctgcgcgcactgctgcctccacgtcatgaacgccatcttcagcttcggcaacagctgggccttcgtccacatcgcggcgtacgggcgcgggttcgtgcaggcgtcgcggagcacgtggagccagttcgaggcgctgccggggatggcggcgctggtggactcggacatcaccagctccgtgtgcttcctgacgggcgtgacgagcggcgcgctgtgcgtggcgctggcggggtcctgggcgttcgcgacgcaccggcactacacggccaccgtgtcgctgctggccttctacgtcgggtacctgatgacccgcatcggcatggcgctgccccaggcgtgcgtcggctgctactacgtctgctacgccgagaaccccacgtcgcggctcttcgacggtaacataccgaaccagctgagcaagatgcaggaaagccgcggcccgtccgtgccgacgccgcggttcccgcaccgccagcacgtcggcgcgtgagtgagacgacggagcttcttttccctcgtgtgccaccgccgctcgtcggtgtggcttgatccggatgagggcggcggctcgtacggcggtctggagatcaaattttctttttctagttttgtaaatttatttatccattttttagctgacagaaatggtgaatccccaatattttgggtgtatgtagacagagtactattcttgcataggatttatgtgaatattttaactaactgaatcagaatcaggctttgtccat

SEQ ID NO: 160502 - DNA, 290 bp, Zea mays
  Clone ID: MRT4577_77958C.1
gattaatgaaaacaacacaggaaaacgcgtacaagggcgtccgtttttgattgaggcacaaaacatacctctgacaatgaaaaacgaatgcccgagagtgagcctaacaatcactactacgatcccgaatgcctgcacaagctgaccggtaacccataatgggaacccaagcttatgcatccagaaaaatggcttggttggagcactataattccctcaagaggacaaggccggaagcaccaacctgacagttgaggccaggagcgccatgaccgcaaaaagggccagcc

SEQ ID NO: 160503 - DNA, 865 bp, Zea mays
  Clone ID: MRT4577_77959C.1
cattgggtccctcgaggccggccggggtagtgcttctgcatcgttgtgtagatattttttttccggttttaagaggtcgggcaagcgaaaataggctcgcctctacctcggctcgggcgcagagcacgcggcaccggcgcgtcctctcctcctgctccgatctctctgcccagccccgcctgtgcgcttcgctactacgcttcctccatgcatcccctcagccatgtacgcctgtatttgagaagacattagcggagttgaatccagaagaagagccgaagagttatcttagccacagccaggtcgcccgttagttgttcgcggaaatgtccctccgccagctgcttcaccaaacgcgtccgtggcgcgcgcttgagcagcccacgaagatgtcttgtctcctctccatcttccgtgcgctctccattctccgttctgaaggctcggctgagccactgcgcagatcttcatctgtgccagccccgctgccaagaagcttgccttgctccagctctgacccccttggccccagattcagcatcgacgtggtcgactcggaccattggccctcgtcatttgacttgttgtccgacgctgcacggagcaatgaatgcccagatgtcttcgagcaacgtgaggatgatgaactgcacgactctgatgatgagatagatgacatgaggcatcgaaagaagctattctacaagctggatagggggtctagagagtttgaagagaacaatgtgctgttacgccgcaggaagagagacaaaaccagtgcaaagaaccaaaggagtgcaaggagcgcagcctcccaagtctgtttctaccaacgatccaaaactgaagggaaagcgttctatgc

SEQ ID NO: 160504 - DNA, 649 bp, Zea mays
  Clone ID: MRT4577_7795C.1
gccggccgggtccaggtctgtcatttcctcctgagccagatcgtgcgagccccttcggttactggtcgtccgcaggcggcaggcgaacccctctccctccctgcgatctcttagctgctcatggcaatggcagtcttaacttcctcgccgagccgcgcccgccctctccacacgagctccgctggcctacctcgtccctgcactcctgcactcgtcgtcgtcttgccgaaggagcttttgtcgccatccaccatgctgcgacacgccgagcgtcgtcattgttctcctcgtcgtccgagctctgcccgagatatcgggccgttcgtggagtctgagggaattgcaggagaggaccctgagcagcagcagcttggtgaaggttgtccacattgcaaccactgctcaggagaagacgaagtcgtggaaggagacttccaggagttccaagactacgacgagttttaggtgtgggttggcggcaacccccagtcagctgcttgtgaaggccttatctttactgcgtttcactagtactttgatttaactgttaagttgatgactatgtggatgtctatgactctgtgatgtaataagttaatactcttttatgttattattcgagcaaaaaaaaaaaaaaaaaatttaccta

SEQ ID NO: 160505 - DNA, 391 bp, Zea mays
  Clone ID: MRT4577_77960C.1
agacgccggcgttccggttccgcaccccgtccgcgcgcgtgctccgcctcatcccctgcatcgcgccggccaccccgggcctctgcgccgacgaccgctacttcttcagcagcgccgccgcacgcgaggtggacgaggccgctggcgggtactgctacgccgacgacccacggagcgcgcgccacgtcgaggaggaggaggaggacgagctgagctgctgtggcgatgacgagcagctgctggagcgggtggtggcggaggcgtgccacgcgagcaccgcagggtcggtggcaggggagggtggcgaggacgccggggtggacgtcaaggcggaggagttcatcgccaggttctatgcgcagatgaagctgcagcgccagatctcctggct

SEQ ID NO: 160506 - DNA, 280 bp, Zea mays
  unsure (1)..(280): unsure at all n locations
  Clone ID: MRT4577_77961C.1
gcagncccaacnngggncnncaaagagcagggcgggggcnnngcaggccacagngggcncngcacangnaccgangngcggcagaagaaggaaccnnggccccgnnggnngaccngagnnncnngnccangaannnannnggaaggagagcnngcanncnnnnnncacnngnaccgaccgnnancnnnggagnngngangnnagcagnncgaaaacnggngnngacaacnaaaagaccancannncnncnngaacaaagagaagaaaagaccannngacn

SEQ ID NO: 160507 - DNA, 278 bp, Zea mays
  Clone ID: MRT4577_77962C.1
cccaaacgctagcctcattcaccctacgggatcacaccagatcgtcaaccgccctcatcccctctctcctcacgccaatccaaaccctagccatcgccgccatcgccgagtaccaggcctccggggaacgcctcatcggcctgcatgtcgatccacaccgccctgctccgtgcgtcaccctccccacggaggcgaaggcgccctgcgctggagatcgcgggatggttccacgcggctcctaggctaccagctggccatacggatcttgccaagatcgc

SEQ ID NO: 160508 - DNA, 539 bp, Zea mays
  Clone ID: MRT4577_77963C.1
ccgtgttcctatgacagccatggcggccgaagcaccaccgtcggcttcaacgttctcctcctcaacctcgcggctacctctgcctctagtggtggggcggtcagatccgcagagttgtacatcgggagccgcattagcttgactttgaagagcgagatcgggtacgagggcgtcctttacaccatcaacaccgaggagtccaacatcgggctttgcaataatcttggaaatgaacactgaggattaagctgaggaggatggtgctaacattgatttaaactcacaaggaaaggaaaatgtgttgttctaaaagcctccacaagacaagtgagcaatcaattctctgctcatcaggctattagctaggaacttgtgagatgatattattgataaggattacaacacacatggatatgtgaacttaaggttgacttggaagaaattgtggcagcaccagttcaggatggacaacaaccgaaatctcctacaaaagttgtttctaatgtgctatcgagctccagtgtgttcctatgcaatct

SEQ ID NO: 160509 - DNA, 283 bp, Zea mays
  unsure (1)..(283): unsure at all n locations
  Clone ID: MRT4577_77964C.1
attttgttgatttttttttttttttttttgggttttattttttttttttttttttttttggggggngnttttttttttttttttggaaaaagggaccccccgggaattgtttttaacccaaaaattcccccagtgtgggtccctnttccaccaagaagggggaaaagtgacatatgagtattattgggttccataaaaattgctaaaccgctttctcatttttttgggaattacaaccttcacagttttctccaaacatttgggattttttcccgcccccccc

SEQ ID NO: 160510 - DNA, 1029 bp, Zea mays
  Clone ID: MRT4577_77965C.1
tccccctctccctctcggccagcaccacctcacatcaccgtgatcctatgacagccatggcggccgaagcaccaccgtcggcttcaacgtcctcctcctcgacctcgcggctacctctgcctccagcggtggggtggtcagatccgcatagttgtacatcgggagctgcattagcttgactttgaagagcgagatcgggtatgagggcgtcctttacaccatcaacaccgaggagtccagcatcgggctttgcaataatcttggaaatgaacactgaggattaagctgaggaggatggtgctaacattgatttaaactcacaaggaaaggaaaatgtgttgttctaaaaacctccacaagacaactatcagctaggaacttgtgagatgatattattgataaggattacaacacacatggatatgtgaacttaaggtgcgaaggttgacttggaagaaattgtggcagcaccagttcaggatggacaacaaccaaaatctcctacaaaagttgtttctaatgtgctatcgagctccagtgtgttcctatgcaatctggtcttcataccgcctccaagaaaagctccgcaatgacagtttctgcaaaggttcaacaactttaggatcaactagaggtcgagcaacaagaaaaagatggacttcatgaagaagtggaaaccttagagactggagcatctcaggacaccattgatagtatgaagaggtcaatgaaaggaaataacaatattcttcatcaactattaagcttcaatcgaggccaagtttttccatcttaactccgcttgaccccaataggacctgcaaccttatgactactttagtagctagttacaatagctctggatttgtagttataggattattttcaattatgcttactgtttaatactttgagttgaagttattggattatatttggattttaagttaaaggatttgcatctatatgttttgaagttatattattatctgttggatgaaatatttgtgttgaacaaattcatatgat

SEQ ID NO: 160511 - DNA, 394 bp, Zea mays
  Clone ID: MRT4577_77966C.1
ggccgcttttttttttttttttttggagatatatcgcaatgaatctattgctttttatctgggaatcacaagccagcacgagggcgccttagggaaccacatttgatatcatatcaaatggatggcaccagcagcgacgggcagctgtctggagatgacatgggcacagtacagggagaactggatggatgggagcgattggtgctgctggaggatggctgagaaaggcggggaccacagtgctagcgactaacaaagcattaggcgacggtggaggctcgcaacagagcgcaacacaatacgacggatgaatggaggcaaatggagacagcatgcagcagggggcgccatagctagccacagctaggctggtcaaagctgttgcaacaatgtg

SEQ ID NO: 160512 - DNA, 729 bp, Zea mays
  Clone ID: MRT4577_77967C.1
ttgggtacctcgaggccggcaaaaaaaatacgcctctgctttagcagtagtttccaaccagaggcaggcacctcgagaggcgggtgaacatggagggcgataagaaggcgggcgccgtggcagagaagaaggcggcggcggcggatcagagcaaggaggtggccgctggtgatgtgagcctgaaggagctgtccaggaggctcaacgacttcgccaaggagagggactgggagcagtaccatagcccccggaacctgctgctcgccatgatcgctgaggtcggggagctgtcagagctgttcatgtggaaaggggaggtgcgcaagggcctcgccgactgggacgaggcggagaaggagcacctcggcgaggagctctccgacgtgctgctctacctggtccgcctctccgacatgtgcggcgtcgacctcggcgacgccgccctcaggaagatcgtcaagaacgccgtcaagtacccggcgccgtccaaggaacaaggcgcctgatgatgacgaacaataccacctgtgatgccttctttgatgcttttgggatagctggtgcctggtagagaaccaggcagcgagatatatgaactgatgcttggaccctttttccccctttttttgcggtgcatgctcgaaggttaataattgatacaattattgctcggctgatatgatagcttttttttgcctttaaaaatggagtcgatcggattaaagaata

SEQ ID NO: 160513 - DNA, 300 bp, Zea mays
  Clone ID: MRT4577_77968C.1
agcagtggaacaacgcagagtactctgtatttcatatgttttatcttcgggaaaccaattagtagtagtccatttgaactcatgatagcaaggtcaattctgaaacaactgatggtgctgagccaatactagactgcagaagacccatgcttgaaccactatggactgtggatagagggacgcaaggactaccgtcatgatatgaaataagttaatcctaaagaaaaaatggggcctaacgtagctgaacaggaggagccgcaacacgacctgctcggtgaccgccaacccgcgtactct

SEQ ID NO: 160514 - DNA, 847 bp, Zea mays
  unsure (1)..(847): unsure at all n locations
  Clone ID: MRT4577_77969C.1
gccggccccggccggggagttctcgccgtctcgtccgtttctcttctcctgtgtctatctccacctctcctccacccgggcgatctgctctttggacttcagcgaccccatcgttctatctctccgtcgtcatctatctgtgctccccacctcccgctcccttttcgttgcgcctcggggccgctgcgctggtgatttgcgtcgcctccccccctggggttaatgtgacggccctgccgacgatcttgcctgacgactagtttcttctctagctgggctactctccattcagtggttatggagcctcccaggaagaataagtccagtggcatgcaagtcaaggaggaagtgaagttagaagatggaaatgatttgttagtcaagcgcaggaggactgaacttccaggttccattgttcaactacaacagaaaattgaagtatttgacatggagaacaaagtgccagatggtctttcagttgaagattctactggcaaggatcccatggatgtgctcactagatatgcagcacagaactctggtcaagggaatagttgcagtaacgaacctgcaatctcgagactgacaaaaatatgcaaggcaattggctggaaagaaccatcatatgactttgaagaacaaggacctccgcataacagaatgacaacgcagttccacttgttggacccttactatgacgagcaccataggggacgactcatcgcagaagggcaggtgttgcctgttctgcggtccaggacccatgacaggtttctagacatgcggtatgacgacaggtacactnnctctcttgagagggctgcttggacgtcgtatcgttccaggt

SEQ ID NO: 160515 - DNA, 185 bp, Zea mays
  Clone ID: MRT4577_7796C.1
gtattttacatatttacatagccgtggttatgaacattatcttcaaaacaccgggttcaggctcccttgtggatgaggtcgagctcaaccacatactgcgggctatacttgctgactacgatgatattatggtcttacataaggctgacttcattattgatccaagcctagtgtatggattctgt

SEQ ID NO: 160516 - DNA, 287 bp, Zea mays
  Clone ID: MRT4577_77970C.1
tgtaaagctttttttttttttttttttttttgtttttttttatttttttttttttttttttttttttaatatttttttttttatttatattttttttaattttttttaaaaaaattttgagataaatcccaatcaatatattgattatttttaaaaaaaacatgcccgttttagggcaccatttgcgaataccttgccgggggggcgctccaaagggcgaaatcttgctaaatccaaaaaactggcaggcggtgcagcttttatttaaagggcccaattggccctat

SEQ ID NO: 160517 - DNA, 409 bp, Zea mays
  Clone ID: MRT4577_77971C.1
catcccatagagaatcataacttcaaaacatatatttgtaaatcctataactccaactcaaagtattaaacattaaacataatcccactcgtcccagactcccagtcctagtatgtcgactatttcacttcttgttcttgctctccactctctacagatgcaaatggaaaataatcctataactttaaatccaaagctactataactagctactatagcagccataaggttgcatgtcctatagtggtcaagcagacgtaagatggagacacttggcctcgattgaagcataatagttgacgaaggaagtaaagaaagtgttcctgctaaaaattgaaacctagtcaaatagaaagcagtactagatttgaagaggaatgagttcatgacctgaggacatgaaattgac

SEQ ID NO: 160518 - DNA, 935 bp, Zea mays
  unsure (1)..(935): unsure at all n locations
  Clone ID: MRT4577_77972C.1
gccgtctcgtccgtttctcttctcctacgtctatctctccacctctcctccacccgggcgatctgctctttggacttcagcggtttagcccaaacccttcttcctcctcggtgcactccaatgcgccgcattccgtccttctaatgccgacgcattctctcgttgcagaccccatcgttctatctatccgttgtcatctatctgtgctccccacctcccgctcccttttcgttgcgcctcgggccgctgcgctggtgatttgcgtcgcctcccccctggggttaatgtgacggcccttccgacgatcttgcctgacgactagtttcttctctagctgggctactctccattcagtggttatggagcctcccaggaagcataagttcagtggcatgcaagtcaaggaggaagtgaagttagaagatggaaatgatttgttagtcaagcgcaggaggactgaacttccaggttccattgttcaactacaacaggaaattgaagtatttgacatggagaacaaagtgccagatggtctttcagttgaagattctactggcaaggattccatggatgtgctcactagatatgcagcacagaactctggtcaagggaatagttgcagtaacgaacctgcaatctcgagactgacaaaaatatgcaaggcaattggctggaaagaccatcatacgactttgaagaacaggacctccgcataacagaatagtcgcctcgttcgccgctccccgccttgaggttcgtcgcagtgccactttacttctcacccaaagacagcgcagttccacttgctggaccctcactatgacaagcaccataggggacgactcatcgcagaaagggcaggtgttgncccgttctgcggtccaggacccatgacaggtttctagacatgcggtacgacgacaggtacactcctc

SEQ ID NO: 160519 - DNA, 710 bp, Zea mays
  Clone ID: MRT4577_77973C.1
gggggcaaaacgatctcgttgaatccgacaggatagcccgcccgcttgctatcccaccccttgcactgtgctgaccagatccccactttatcccacctgagattaacccgcagcacaacaaactcagcataaacaacttcgtaatggcgtttccatcccgcaagcgagctactgcgattccgatgcgtcgacctctttccccgacacaccatcccaaatccaaatcgagggtgggagcggcttctccagaacgaagacagatcatacaggatcgcgagcaacaaatcatgcatctccgtggttctttcttcgctgtcaggttccgctgcctggaacaacgacgggtctctgtccggaatctcctttttcttttacctcatcatcaatctaataaagctgcaattttttttggtgtgtcctttctcttctccatcattaccagcactagctactactactacagtactacgacttccggcgcggcgaaacagacacccccatcaaaagggtgaaaagggaaaaaaacaaacagagcaggacattcgcgtctagtccctgtacgcacacaaggaccacacggcaaattccccaagggcaagagcaaaaaggaaattccaaaaacgacctcggtgattaagcagtgggcccacctccctcgccgtcgccggcgagctcaccggtgctggcctcgggctgcggagcctcgtggg

SEQ ID NO: 160520 - DNA, 480 bp, Zea mays
  Clone ID: MRT4577_77974C.1
ccggatgtttccgtgcgccacgcacggtatcagtgccggcgtcgcccacccatgcccatgccgatcaagttgcgaggtgccttgcgcttcactcccgggctcccgccgcccgagagcgagcagcgagcggagtaaacaaaatctgctcggagatcgaggaacaaactcgattcgccactgcagatttcgcgtgcgcccctgcggagtgccgactccgtagacgacgaagccgatcccggtggctccccgtctctcgtctgccgctgcacgtcagcacatggcagaaaccgcttcgctatgctagtctactactctaggctctagctcgtgcatctcagcacctctgctatggcttgtacatgcatgtaaaccttctgcctgtctgtgtcgtgctagaaatgctagcagaggatgaagtttttctggcaaaccatcaggccactcttattgaagacactcattaaatcttttgttcctgtc

SEQ ID NO: 160521 - DNA, 781 bp, Zea mays
  unsure (1)..(781): unsure at all n locations
  Clone ID: MRT4577_77975C.1
tccaagacttgctcgcggtcttttccatcccatccgccgatccacagccaccccacaccagttcccgagcagagcgagcgccccatgccgcgtgccacggcgagcctccgcctgcaggcagcggcgtcgtccacctccaccgcgaccccaagagagcagcaggcgtcgtcctcatcctcgtcatggcctgttccaccaccgcttccccagcagccggcggtgtcggtgaactccgacacggtgatgatcctggcgtccttcctgtgcgcgctcgtctgcgtgctcggcctcgccctcgtctcccgctgcacctgccgccccgcctcgtcctccaccgccacggggatcccgcagcaggcgaggcctccgaaaggactcaagaagaaggccatcgacgcgctgcccaccgcgccattcaccgctgccgcctcctccgactgcgccatctgcctcgacgagttctccgacggcgacgcgctgcgcgtgctcccccgctgcggccacgccttccacgtcgcatgcgtcgacgcctggctccgcacgcgcgccacctgcccctcctgccgcgccggaatcgtcatcgcccaccagccgctcatggccgcaagtctgtctcctggatatcttgacccgtccgtcgtctctatctagctagctgttanaatacccaatcctttgctccctccttgtaaattacttttgcaaaccttttgttttattttaactgtnaatatttgaaagatatatatattaatgctcgacggcatgtcgatttcagtgc

SEQ ID NO: 160522 - DNA, 1148 bp, Zea mays
  unsure (1)..(1148): unsure at all n locations
  Clone ID: MRT4577_77976C.1
ggccgcttttttttttttttttttgcagtaccaaacagttcagtgggattggctggatcatagaaccgtgaccaacccaaagagagagagagagagacgactaagaattacaaccagaagtccactttgcgaattctctcacaccatacatacacgcacgcaagagttttacgagatagcccatcctggagcccggagaggcctgngtacccctacattgtcttatggatagtatgtatagaaaaataaaggggacagtattttccaaaagcgcatgccaagtgggctttcccttagggatttgcgtaggggttggttgtaaaaaaaaaaacatttttttggcttgggttttgaaataaaaaatcccccctttaaaccctgggggccctgggaagggaccaaaaggttttggccgttcccccccctttttaaaaattgggggttttgggaaaaaaaaaacaaaaaaaccctttggggagaagggggggtttttttaaaaaccccaaggggaaaatttttttgggggggggggggatttattttccccccccccgggggggggggggtttattacatcatccagttaagagcccccccccctatcataatggggggggggggggatcccccccccccccccccccccgaaaaaaaaaaaagcgtcgctagacttagaactcgtcaaaatcttcgtcaaagtcttcctcatcaccttcttgatcacaaaagtcatgcaggttttcctcaaacgaattcgggtcctctaccacacaatcagcttcttcctctgttccttgtgcgtaggggggctgggagcgagcacgggaggggcgacggtgatcgactgagcagaggggtcggcaagggcgatgtcgaggtcctcggcagcgctggtcgacgtcggacggcggcggggtcgatgaggacggcgccgaggtctccgggtggcggctccgaggctccggcggcagtgagcagggcaccggcggcggtcggcgcgagcagggaggacgagagcgtgagggcgagctcgggattgcagggaaccggcaccacgggcagtcgggcacggagcttcgttttatagagcatggggaggagaaagggagagagaacgccgggagagggagagggaggtccggcggcct

SEQ ID NO: 160523 - DNA, 275 bp, Zea mays
  Clone ID: MRT4577_77977C.1
gcactcccactcccaaaccccatgatgaacctccctttccggctccgccatctccgacgccttctcgctgcaccgcccttgacaaccctcgccgccacacactcccatagcccaccctcctcccgaccgctgcaccccacccgaatccagccgctgcggttccatctacccaaccccacagtgcggcggctctcctccgagcaacgcaatcctccccactcacctccaggacgagcgcttcgacacgctctcggataggatctatgatgccgtga

SEQ ID NO: 160524 - DNA, 410 bp, Zea mays
  unsure (1)..(410): unsure at all n locations
  Clone ID: MRT4577_77978C.1
catcctccccccttctgggtttttgcttcttcccgtttcttcctcgatttttttttctttttttggtgctcctnttgggccttttggggggggggggcggggccttttcccttccccgcgtttgggcccccgccggatttttccttcccttgggcttgggctctcttccttttggtaaaccgtgttcttatccgggctggtcgcttgggtttcccctctgaacttggttcgtctaacccaaataagggttctcttccgggcacccttttcggggcgtgcccctccctgggagtgctctatgcttccgggctctcgcccttttttctttggtgcttctttttgtgggtctcaagctttttacccttaagggtggtcccctccgcttggcccccctttccagtgcgggaata

SEQ ID NO: 160525 - DNA, 382 bp, Zea mays
  Clone ID: MRT4577_77979C.1
gcttgttcttgtgttttttttttttttttttgttttcgtttcttttttgtctctttttgtttttctttttttttgtttaatttcgggggcgggaaaaaacgcggggggccccaactggtttttccccaaattttaaaaacagggcacaaaggcccttgggtggccccaccccaaaattttttgtgcaggaaaaaccccatttggtttttaaccgcttcgggccaaaatctttaaaaaaaaaggggcgccgctgcccctatccagtggccccacggccaaggaaggcgtgcaaaaaaaaaggtaaaatccccccttagccctcccccttttcttcaagcttgcggccgcccctttttttatacggcttttaaaggaaaaattt

SEQ ID NO: 160526 - DNA, 1124 bp, Zea mays
  Clone ID: MRT4577_7797C.1
gcccgcccgccccagcggacgcgtgggcggacgcgtgggatcgtgcgagccccttcggttactggtcgtccgcaggcggcaggcgaacccctctccctccctgcgatctcttagctgctcatggcaatggcagtcttaacttcctcgccgagccgcgcccgccctctccacacgagctccgctggcctacctcgtccctgcactcctgcactcgtcgtcgtcttgccgaaggagcttttgtcgccatccaccatgctgcgacacgccgagcgtcgtcattgttctcctcgtcgtccgagctctgcccgagatatcgggccgttcgtggagtctgagggaattgcaggagaggaccctgagcagcagcagattggtgaaggttgttcacatggggaccaagacccgggacatctgcctgtggcagattgtgcgagcccctaccgctactggtcggacgaaggcggcatgcgagcccccctccctccctgcgaagtcttagctgctcacggcaatgtcagtctgaactacctcgcccagtcgcgcccctgttctccacacgagctccgctggcctacctcgtccctgcactcctgcactcgtcgtcgtcttgccgaaggagcttttgtcgccatccaccatgctgcgacacgccgagcgtcgtcattgttctcctcgccgtccgagctctgcccgagatatcgggccgttcgtggagtctgagggaattgcaggagaggaccctgaggagcagcagcttggtgaaggttgtccacattgcaaccactgctcaggagaagacgaagtcgtggaaggagacttccaggagttccaagactacgacgagttttaggtgtgggttggcggcaacccccagtcagctgcttgtgaaggccttatctttactgcgtttcactagtactttgatttaactgttaagttgatgactatgtggatgtctatgactctgtgatgtaataagttaatactcttttatgttattattcgagcactaaaaaaaaaaaaaaaattatacaattaagtggatgactatgtgaatgtctattactctgttatgcgagaagttaaccgtgttttttctttaaaaaaaaaaaaaaaaaaaaaaa

SEQ ID NO: 160527 - DNA, 595 bp, Zea mays
  Clone ID: MRT4577_77980C.1
gttaagcaaaaagatactaactgaagctccgatgatttacatacagccttgaagaagggggcgagccttgaggatactcacgtgatttcattggaagcgctcagccccaactatcggttgttaatggctgatccaaggtcgagcttatcaccatcgacgttggtgaagactgagcgcttgcctacgtgatacataacagacccaaactcgtctgaacgggctaacggagacatgatgtcaatgattgcgaaaaaacatggcttgggtgccttatgtacattttgtagaccggcttatcgaggattgacagttggaaacacatacttcttgactatccattccacacaggacatgaatgcactgaatcatatgagcattcatagagataagatgtacaactactgcatgccttactataagacgctgcaacctctagaagacgatacagacactgatatcagtttcatataaactctaaaacccccgatagaaaattactacgactggaaacaggactattgctaggtttttgctgatcagaaagttcaagaaggtggcctgccatatgatgagaaagaaaaatcaacgagttcct

SEQ ID NO: 160528 - DNA, 480 bp, Zea mays
  unsure (1)..(480): unsure at all n locations
  Clone ID: MRT4577_77981C.1
agcanccagccgccaaggggcnngnngagnnggcngagcnccaagaacgngaggggaggagaggaacnacnnccgnngncancanagcggcagagggggggggagaggcaanganncnngngaagaanaagaaccanccaaccgggagaagcagcggcnacaggcgagcgangcgngaagccngcaanaangnngaggaaaagnnagcagncaagggggacaaacnnggaaaagaancccttatcaactttgcaaaaactagtatgtcttcgaaatngattaatagtgacagtgttttctttgcttctttggttgtttttttagtttattttttttttttttttaaagtttttttttttttttttttatccaatctagatcatcattattttgaaagcttttgngtattagcgctttatgatagncatttgnntgaatggctatgcactaanacacaggctttgcagctctttgaatttt

SEQ ID NO: 160529 - DNA, 222 bp, Zea mays
  Clone ID: MRT4577_77982C.1
ctttccttctacgtgctaatgtagctgcagagcctgcccatgatgtcacagagagagcgagaggagagcgtacattcaattgcatgctccctctattgcattcagtaacggttgcgtggaaaggcgtgtacacaaactctatctgacgtatgagtcctcattgtgcctctctaataactaccatacaactcattccttggaacactatctcccaataatgca

SEQ ID NO: 160530 - DNA, 328 bp, Zea mays
  Clone ID: MRT4577_77983C.1
ggaaggacggcgtacggcgctgccaacgctaccacaccggcccggtcgcgcgcccggatgcgacgcgcggtcctgtgctggcgggaccgagatgtgcggtgcatgtgggcgcgtacgtacgttggtcgttggtccctccgtccgccctccggcttcgtggtttcgtttagttaggatgcgtttggttggcgagccaccggatgtggagtggcttcattctagatttggagaatagagctgttctgttctatgttaggtaagcaggatggagctgctctattttttgcttggttggggagtgtattataacggagccattcactttttt

SEQ ID NO: 160531 - DNA, 443 bp, Zea mays
  Clone ID: MRT4577_77984C.1
ggcacgcttgacgatacgtgaagacagatgctcaaggcgggtgtgactccagtaaggctcagaataaatcggcgtgcatctcgtcgattctcgtgcgcaagatctgcgaaaccttgcaaaggcgctggtatgcagcggtcgatccttcaatcattcaggctcagtggagaagggaccttcatgagagattacttcatctagttagactcattcttactcagtggaggataattcgacgtattgtaggactaataccatcagagggtcttgatcgttttaagaagctgcttttcaccggatgtctaatggctgacgattatgaggctaatgataatcttaggtagatgcgacctggcaagattaactcaaacgtttagtcagagcccaaaattcctgatactattgatatagctgaagctggatcaggaatgctttcttaggca

SEQ ID NO: 160532 - DNA, 236 bp, Zea mays
  Clone ID: MRT4577_77985C.1
ctctagccgctcgaaccggttcctgctggacctgacattgcgattcattatattacaagtctcaggaagagcttagggttgcattaccttacaagcgaccgttctatcatgctacttttagtaagagccaaaacttgaatgatgcgtcgtaaattggatctgccgtttgtgtttaataaatatttgttaacagtaatttttttctttttgaaaaaaaaaaaaaaggggggcccccc

SEQ ID NO: 160533 - DNA, 568 bp, Zea mays
  Clone ID: MRT4577_77986C.1
agcagtggtaacaacgcagagtactttttttttttttttttttttttttttttatttttttttttttttttttttttttttttttttttttttttttttttttttttttttttttttttttttttaaaaaaagcccccccaaatttttggggggccccagcccccaatctttgggggggcccggaaaaaacccttcccgggggtttggcccccccccaaaccccccaaggccccgttttttaagaaaaaccccacgttccggccctcaagggcgagggggggcccccccaatttacattttccccccccgggcccccccaggggcgggggcggggacccttatagcccaacagccgggcggttcctttgggggggggtttttggcccaaaaacccccatggaaggggcccccccccccccccggggggtccccccgggttaggggcgaatcccgcgaattcccatccccctgggggccgctcgggcctccctttagggggccccattccccccaaagggggccggtttacaataccccggccccggttttccaacccccgggcccggg

SEQ ID NO: 160534 - DNA, 396 bp, Zea mays
  unsure (1)..(396): unsure at all n locations
  Clone ID: MRT4577_77987C.1
ctcgagccgccgggctcgtcatcggctcctccgcctccacctccgcccgccccctgatcncgatcgacgacgccgaccccagatccctttcctctccgccgtctccccggnagaaaganagaagatactagatanctnagaggacttgaagaagagaaggagacttatgaggtggatgaatggggatttactccaattctggtgctactaagatgggctaggggctgctacagaacaaggctgggacaagattatgtatatatgcaatagcaggggcttacaatttcttgctcttggtatccccgaatggcttccatctgggattgcatcttctgtaagataagatactcatccagatctgagcggatgtaccagcatcttggtttctccccccca

SEQ ID NO: 160535 - DNA, 584 bp, Zea mays
  Clone ID: MRT4577_77988C.1
ggccgcgcgcagtcttggtgccggtggagagcgctagctgtggccggccatgtcgtcgtcgtcgactcgaagcaggagaaaaaggaagaggaggaggagggtgatgtgccgccgtgcatgaatggcgacgtggggagggacgacgacgacaacaacggcggaggaggaggcgaagaagaagaagaagaagaagaaagagaaggcgagttcgcggcggcgatggcgcagctggcgccggagggcgtgcgggcgctgcacgcgcgggtggaggccgagtggggccccgtgctgcagagcgcgtgccagacggcggcggcgcgggcgctctggggccgcgcggtgcgcgacccggctgccgggctgctggccggggagcgctacctcagggggcttcgcgacaagatgcggcgcgacgagcaagccggcgcgagccaggtgcacggggtcatgatcgccgtcaggacgctctggttcgacgcccgcgtcgaggccgccgtcgccgcgctcggcggcgacccgcaggtcgtcatcctcggtgcagggatggatgcaagagcctaccggctgagctgcctaaaaggatg

SEQ ID NO: 160536 - DNA, 201 bp, Zea mays
  Clone ID: MRT4577_77989C.1
gcggtcgtccgttttttttatttgttagaagagaatcaggcatagacgtatcatgcattgattatagctacaagaatgcgaaacaaagacctatactatatatttttttgccgatgcgaatcagaaacaggtttatggtcacgcgctaaataccaattaaaatgctgttctggggctgctaataatcggttttcccccgat

SEQ ID NO: 160537 - DNA, 804 bp, Zea mays
  unsure (1)..(804): unsure at all n locations
  Clone ID: MRT4577_7798C.1
ccggccggngatccagcagtcattcagtcacacaagatggctttcccaaacatcaagcttgtttcgttcttgttatctttcatccagatctttgttgcagatgcccagccccatctacgaccagttgctcggtcagctaagttggcctctagtattgcaaacaagcccattgtctgcaatgagaatgcaacaattgcgaagcgcatgccagcgcatagctgggacacccatatgcatgtaacggatccaagttaccctgaggcggcagatgccgagtatactcccggcttgcacaatctttccagcgccctgtcattcgaatcgacggtcggtatgagaagtattgtcatcgtccagccctcgatatacggaaacgacaatactctccttatcaatgctctcacgagactcggaacgcggcacggtcgcggcgtcgtaggcttcgatgccaatacaatctccttcaaaaccctgcaagaatgggacaagcttggtgtaaggggcgtacgattgaacatcaagtccaacaacatcaagctcaccgaagcccaactgcaggcgcaggtcaagcagtacgccgagataatcaagccactgaactgggtccttgaactgtacattggcatggaagatttgccaaagcttgagcccattgttggagaccttggcgtcacactttccattgcccactttggcgcgccaaatctcccgcctcctgaaaacaggactctacccttcgatcataataccctcgctggtttccatctctagtcaaccttttgaaaggcggtatacatatctcaa

SEQ ID NO: 160538 - DNA, 176 bp, Zea mays
  unsure (1)..(176): unsure at all n locations
  Clone ID: MRT4577_77990C.1
taatncggcacgaggatgagggtagcatacaccgctgcagtttctagagccctgtgtggcactcgtgatcccacaactgcacgatacgtgccctcgctaagggcggctccctgattgagaggcccgccgcggctcccaagncgaaggctggcggggggaagacgacgccggccacc

SEQ ID NO: 160539 - DNA, 239 bp, Zea mays
  Clone ID: MRT4577_77991C.1
ctaaattttatactcctcttcctttctttctttattggggggattttttaatggttttggggggtaatacacaccaccgcaacgggaaacatcaccaaaaccttttgccaagctgtccttaagaccccaacatctaatgcccttgaccaaccgctctaaaattaaagatcttcccaaaaacaaaaatggccttaaaaacgggggcccaaagatccgaattacggaaccccgaacaaaaa

SEQ ID NO: 160540 - DNA, 368 bp, Zea mays
  Clone ID: MRT4577_77992C.1
cataacctttcccatcaagcccagattccataagcggtttttgggataaaacagggggccttagtttttacaacgcatataacagttgtttttccatgccagtttcaattttcaacccataacgggaatccaaagttgttggttaagctgcctactttaagaattcagggccatagaacagcccccacagccaaaggggaaccacacacagttccattttttgggccattttttttaaaaaccatactttttgggctaaaaaaaaaaacccgtttgggggcttccgagattaacgattttggggcaaccgtccgggaccttttccgggggggggccctccttgaagaaaaaaccgtttgaaaagccca

SEQ ID NO: 160541 - DNA, 2834 bp, Zea mays
  Clone ID: MRT4577_77993C.1
gccatccgccgcctccccgtatctcccccggctcccccgaacccgaccatgttcctgatcgccagcagacccgcaggaacaaaaggccgcgaagcgcgcagcggatggatggaggcataggcactagcacctcctcgcctccacctccgtcctcttccatcccgtccaatcccccgcgccccggcgcccctctccgccggcggctttgctgggtcccgcgctcctcctcctcctaggctgttctggttggggctgcggcggagggaactaggtaagggggaaggaaaggggaggtttgagggagagcgcaacggcaagcgccagcagcgatgccatcgcacgctggatctggaccggcagatctcgcagctgcgggattgcatagttcctgcctgaggcggaggtcaaaacgctatgcgatcaggcctcttttatcctctgagcccaatgaccggtggcagctcggacgttcccccagagaagctggctacgaatttggccaaaacatttcccacctgttcgatctttcaaatagtctctctctcatttcaagggcccatcaacttgtaatggaaggatttaattggtgccaggataagaatgtagtcacagtcttcagtgcgcctaattactgttaccgctgtggtaacatggctgctattcttgaaatcggggaaaacatggaccagaacttccttcaattcaaccccgcacctcggcaaattgagccagacacaactcgcaaaaccccagactactttctgtaattgtggtggtgacctttactttctggtgtttgatgctcctctcttccccagcatcagggtatgtagatcttgtccttagatatgggtcggatgtgcccggccttaaggtctccctattcttttgtttggagattaggtcggagctgcaggatcgagacagtcgaacgcggaacttgaccgccagatcacgtagctgcgtgttagcaaggtcctgcctgaagtggaggtcgatacgctatgcgagaaggcataggagatcctcatgatggagtagaacgtacaactcttatgtcaaccggtcattaagtggggatagatgcattcaatttgctacaacataagaaagttgtgacagtgttcagcccacctaactattgctaccgatgcgggaacatggctgcgatcctcgaaattggcgagaacatggatcagaacttcctccaattcgacccagctccgcggcagattgagccggacatgacgcgcaagaccccagactactttttgtaatcagcatgctggctttctttcaacttgtctactgcagcgccagcacctgtagatctccttagaaaatggtgtttcctctagccgccttgtacccccatcattcttttggtgtggagattttattgccgcttctcagaacattgaggttgttgaaagtacatggcattgggtcttcctttttttttgccgtcttgtatctccattttgtatgattctgagacaaaagagaagagaagctgcaatagaattgtctcgaattatgttgttaagatcttttgggggtgctggaacgacatttatacaagatgttaaacagctaaatgccagtggaattgtcttatgtcttattttatgcgcagaatttctagtattcgaaggcgttaattggtattaggagcgttgatccacttgtactggatgtcttcatttggtgtcaggaaaagaacgttgtgacagtgttcagcgcgcctaactactgctaccgatgcggaaacatggctgccatcctcgaaattggcgagaacatggatcagaacttcctccaattcgacccagctccgaggcaaattgagccggacatgacgcgcaagacaccagactactttttgtagaaaaaacagtgtgtggctaaaaaaaagagagaagagacgaggggaagatgcaggaaatggacccgatgttctgttgtgtctgtattgtgatgccttgctaggtgagatgtttcgtttcagatgagaattcatgagatgcaggcacattattggctgcttgagattctgggctgatgcacatcagcagaggctgggctagccgctgaggtgggtgccactagcagattcccatgggtagctggctgctgcgtgggccagtttttagcagagctccaagagcaacttccagactgaatcactgaattcatgagaagctgtgccaaacagtttttttttttactgtgaagtgattatttgctgattcattgaagtgattttatgaaataaaccaggagactgggaaaacaattcttgtggttcactccgcgcacagaattattagtaaatcatggagaatcaaataatcacttttcacaagagaatcaggttccacagaaaatctggagcgggaggagctctaccaaactggcccttaaatcactttcatcttctccatctccaactccaaagtgcataaggataagaacgttgtgacagtgttcagcgcgcctaactactgctaccgatgcggaaacatggctgccatcctcgaaattggcgagaacatggatcagaacttcctccaattcgacccagctccacggcaaattgagccggacatgacgcgcaagacaccagactactttttgtagtaagcatgttggcttcttttaacttctctaccgcagcgtctgtgcctgtagatcttcaaaaatgtgttccctctagccgctctgtagcccctcattctttggtgttgagattttttttttctcctcttgtacccccattctgtatgattctgagatagcagagaagagaagctgcaatagaattgtcccgaaat

SEQ ID NO: 160542 - DNA, 1525 bp, Zea mays
  unsure (1)..(1525): unsure at all n locations
  Clone ID: MRT4577_77994C.1
gcacgaggcgaagcgagagggaatgatggcggcataggcactagcacctcctcgcctccacctccgtcctcttcgatcccgtccaatcccccgcgccccggcgcccctctccgccggcggctttgctgggtcccgcgctcctcctcctcctaggctgttctggttggggctgcggcggagggaactaggtaagggggaaggaaaggggaggtttgagggagagcgcagcggcagcggcagcagcgatgccatcgcacgcggatctggaccgccagatctcgcagctgcgggattgcaagttcctgcctgaggcggaggtcaaaacgctatgcgagcaggccaaggcgatcctcatggaggagtggaacgtgcagcccgtgcgctgccccgtcactgtctgcggcgacatccacggccagttctacgacctcatcgagctctttcgcatcggtggcgacgcgcccgacaccaactacctctttatgggcgactacgtcgaccgtggctattactcagtggagactgtgtccttattggtggctctaaaagtacgttatagagacagaatcacaatattgagaggaaatcatgagagtagacaaataactcaagtgtatggcttctatgatgaatgcttgcggaaatatggaaatgcaaatgtgtggaagtactttacagacttgtttgattatttgcctctcacagctcttatagaaaatcagatcttctgcctacatggtggtctctctccatcactggatactttggataatgtccgctcccttgatcgcatacaagaggtcccgcatgaaggacctatgtgtgatcttttgtggtctgacccggatgacagatgtggatggggaatttcaccaaggggtgctggatacacatttggccaagatattgcacaacaattcaaccatacaaatgggctaagtcttatttcaagagctcatcaacttgtaatggaagggttcaattggtgccaggataagaacgttgtgacagtgttcagcgcgcctaactattgctaccgatgcgggaacatggctgcgatcctcgaaattggcgagaacatggatcagaacttcctccaattcgacccagctccgcggcagattgagccggacatgacgcgcaagaccccagactactttttgtaatcagcatgctggctttctttcaacttgtctactgcagcgccagcacctgtagatctccttagaaaatggtgtttcctctagccgccttgtacccccatcattcttttggtgtggagattttattgccgcttctcagaacattgaggttgttgaaagtacatggcattgggtcttcctttttttttgccgtcttgtatctccattttgtatgattctgagacaaaagagaagagaagctgcaatagaattgtctcgaaataaagtcttcctttttttttgccgtcttgtatctccattttgtatgattgtgagacaaaagagaagagaagctgcaatagaatttntngaacccccccaac

SEQ ID NO: 160543 - DNA, 769 bp, Zea mays
  Clone ID: MRT4577_77995C.1
gtagtccaaaaatacattgtctcagcacctcctcgtccccacctccgtcctcgtcgatcccatccacccccagcgcccctcctcgccggcgggcttgctgggtctcgcgatcttcctcctcctcggctgtgccttctggggcggcggcggcgggaactaggtaaggggagggaagggaagggaaggggaggtttgaggtagagcggagccgccagcggcgatgccgtcgcacgcggatctggaccaccagatctcgcagctgcgggattgcaagttcctgccggaggtggaggtcaagacgctatgcgagaaggcaaaggcgatcctcatggaggagtggaatgtacagcccgtgcgctgccccgtcactgtgtgcggcgacatccacggccagttctacgacctcatcgagctcttccgcatcggcggcgacgcgccagacacaaactacctctttatgggcgattacgtcgaccgtggctactactctgtggagactgtgtcgttgttagtggctctaaaagtacgttatagagacagaatcacaatattgagaggaaatcatgagagcagacaaataactcaagtgtatggcttctatgatgaatgcttgcggaaatatggaaatgcaaatgtgtggaagtactttacagacttgtttgattatttgcctctcacagctcttatagaaaaccagatcttctgcctacatggtggtctctctccatcactggatacattggataatatccgccgccctgatcgcata

SEQ ID NO: 160544 - DNA, 1184 bp, Zea mays
  Clone ID: MRT4577_77996C.1
cccacgcgtccgcccacgcgtccgcccacgcgtccgcccacgcgtccgcggacgcggggtgcagcccgtgcgctgtcctgttaccgtctgtggcgacatccacggccagttctatgacctcatcgagctcttccgcatcggcggcgacgctcccgacaccaactacctcttcatgggcgactacgtcgatcgtggctactattcagttgaaacagtttctctgttagtggctttgaaagtccgttacagagatagaattacaatacttagaggaaatcatgagagcagacaaatcactcaagtatatggcttctatgatgaatgcttaagaaaatatggaaatgcaaatgtctggaagtattttacagacttgtttgattttttgcctctcacagctcttatactcgagcacggccgggaacttcttgcttcccgatcaacacttgcacctcctcgtccccacctccgtcctcgtcgatcccatccacccccagcgctcctcctcgccggcgggcttgctgggtctcgcgatcgtcctcctcctcggctgtgccttctggggcggcggcggcaggaattaggtaagtggaggcaagggaaggggaggtttgaggtagagcggagccgcagcggcgatgccgtcgcacgcggatctggaccaccagatctcgcagctgcgggattgcaagttcctgccggaggtggaggtcaagacgctatgcgagaaggcaaaggcgatcctcatggaggagtggaacgtacagcccgtgcgctgccccgtcactgtgtgcggcgacatccacggccagttctacgacctcatcgagctcttccgcatcggcggcgatgcgccagacaccaactacctctttatgggcgattacgtcgaccgtggctactactctgtggagactgtgtcgttgttagtggctctaaaagtacgttatagagacggaatcacaatattgagaggaaatcatgagagcagacaaataactcaagagtatggcttctatgatgaatgcttgcggaaatatggaaatgcaaatgtgtggaagtactttacagacttgtttgattatttgcctctcacagctcttatagaaaaccagatcttctgcctacatggtggtctctctccatcactggatacattggataatatccgcgcccttgatcgcata

SEQ ID NO: 160545 - DNA, 774 bp, Zea mays
  Clone ID: MRT4577_77997C.1
ccggccgggaaaccgacccatcatatcatcaccctgagagatccgtcccgccaatacggaccaagcccaataaaccagggtttttgtaaggaaaatccccgtcgttctcgcgtctggagctcggcggcggagcagggcggcagggggagggcgatggaattctgcccggtgtgtgggattctgctgcagatcgatccgggcaccggaagccaccgcctgcgcctcttctgccccgtctgcccctacgtctgccccatcctgaacaagatcgtgaagaaggcgaggttggtcaaaaaggaggtggagcccatctccagcacggcggatgagatgaaatcggcccctaagaccgcagttacatgccaaagatgcaaccatggagaagcatacttcaagcagatgcagattcgatcagctgatgaaccgatgacaacaatatacaggtgttgcaaagaagaatgccagcatgaatggagagaggactgaccatagcattcgcactttgcttacacttcgctccctgtgcttcttcagttttgagtgttgggatgtcctgttgcacatgtaatgcttctaatcagcgtatacttaagtacaaatttttggaaatgtatgttctatactatggcatcgctttttggctgcaaaagacattgcatgacacatcatctagagttatttgtgatgatgatctcaatcatcagtgagagctcacttaaaaaaattcattgagttaaaaaaaaaaaccaatgcttttttggaaaatttgcggtc

SEQ ID NO: 160546 - DNA, 1759 bp, Zea mays
  Clone ID: MRT4577_77998C.1
cccaaagccaaatcgaaaacaaataccaagacagcgaggaaaacaaaaaatttaaagaaaagctccccccatccacgaacaaaagatcgcgaagcgagagggaatgatggaggcataggcactagcacctcctcgcctccacctccgtcctcttcgatcccgtccaatcccccgcgccccggcgcccctctccgccggcggctttgctgggtcccgcgctcctcctcctcctaggctgttctggttggggctgcggcggagggaactaggtaagggggaaggaaaggggaggtttgagggagagcgcagcggcagcggcagcagcgatgccatcgcacgcggatctggaccgccagatctcgcagctgcgggattgcaagttcctgcctgaggcggaggtcaaaacgctatgcgagcaggccaaggcgatcctcatggaggagtggaacgtgcagcccgtgcgttgccccgtcactgtctgcggcgacatccacggccagttctacgacctcatcgagctctttcgcatcggtggcgacgcgcccgacaccaactacctctttatgggcgactacgtcgaccgtggctactactcagtggagactgtgtccttattggtggctctaaaagtacgttatagagacagaatcacaatattgagaggaaatcatgagagtagacaaataactcaagtgtatggcttctatgatgaatgcttgcggaaatatggaaatgcaaatgtgtggaagtactttacagacttggttgattatttgttgatttcagatggaaaaattttctagactactgtagattcagatgtggataactgacaggatatagaattccgaacctgcagctgcagatcacttggtctggttttctaactgtaggacattatagtgcatgtttatcaggcttaaacccttgacaacatttcccacaaggtatggcttctatgatgaatgcttgcggaaatatggaaatgcaaatgtgtggaagtactttacagacttgtttgattatttgcctctcacagctcttatagaaaatcagatcttctgcctacatggtggtctctctccatcactggatactttggataatgtccgctcccttgatcgcatacaagaggtcccgcatgaaggacctatgtgtgatcttttgtggtctgacccggatgacagatgtggatggggaatttcaccaaggggtgctggatacacatttggccaagatattgcacaacaattcaaccatacaaatgggctaagtcttatttcaagagctcatcaacttgtaatggaagggttcaattggtgccaggataagaacgttgtgacagtgttcagcgcgcctaactattgctaccgatgcgggaacatggctgcgatcctcgaaattggcgagaacatggatcagaacttcctccaattcgacccagctccgcggcagattgagccggacatgacgcgcaagaccccagactactttttgtaatcagcatgctggctttctttcaacttgtctactgcagcgccagcacctgtagatctccttagaaaatggtgtttcctctagccgccttgtacccccatcattcttttggtgtggagattttattgccgcttctcagaacattgaggctgttgaaagtacatggcattgggtcttcctttttttttgccgtcttgtatctccattttgtatgattctgagacaaaagagaagagaagctgcaatagaattgtctcgaaat

SEQ ID NO: 160547 - DNA, 393 bp, Zea mays
  Clone ID: MRT4577_77999C.1
cggacgcgtgggcggacgcgtgggcggacgcgtgggcggacgcgtgggcggacgcgtgggcgccgcaggcggcccaggcccaaccgcagccactggcgcagcagcctccgccgcctcctcctccagcggggctgagccggtacgagtcgcagaagcgccgcgactggaacacgttcctgcagtacctgcggaaccacaagccgccactgacgctggcccgctgcagcggcgcgcacgtcatcgagttcctccgctacctggaccagttcggcaagaccaaggtgcacaccgagggctgcgcccacttcggccagcccaacccgccggcgccctgcgcgtgcccgctgcgccaggcgtggggcagcctcgacgcgctcatcggccgtctccgcg

SEQ ID NO: 160548 - DNA, 1025 bp, Zea mays
  Clone ID: MRT4577_7799C.1
ggccggccgggccgggcttgcggcctggccgttgcccagcttgcctcggcacgctcagtgctcgcgcagagaagccgcccagccacgccccagggtacaccagtccaccagcgccctgttgatcttccccaagagccggaacccactcaacaccacgtcctccactttcttcgtctagatagttcaaccccacctcctctcttcctcgacacgcacagcaaccacgccaagctcgacccgtcgcccagcggtctgcactaggagcctgcgcccggagttccgtccgcgacgtgctcatcccgtcgtcgacggtcatcgtgagcagatattgggccgttcgtggagtctgagggaattgcaggagaagaccctgagcagcagcagcttggtgaaggtggtccacattgcaaccactgctcaggagaagatgaagccgtggaaggagacttccaggagttccaagactacgacgagtatgactatgggttggcctatgaccccgtgacataataagttaataaggttttatgttattattcgagcactgtgcgatgatgttcatctatgtaatcgctgtgtacgtgaattctgatcctggcacgtacatagttcgcattcggtttgccttctgaaaccgggtgtgacaacgacgatgccgacgacgacgacgagggcgatgtcggcggtgacggtgacggcagcggtaggggcggcggcagcggcaacaagggtggtgacggcggcggcagcaggggcggcagcggcggtggcggcagcagcagaggcagcaccaggggcggcagcaacagggctagtggctagatgccactgaccttttagatattagtatagtatagttagaataatgtagtagtaattactagtgtagagtagtatagtgtagtgtagtagtagtagcagtaatgtaatgtaatgtagtagtagtaatagggaagtatcaactcataaagagttgatttgtaagcatgatatcttccccttaatgaagtaatggtgttggtttc

SEQ ID NO: 160549 - DNA, 244 bp, Zea mays
  Clone ID: MRT4577_779C.1
cgcaacgtcaagctacgcgtccacataactaacaatgcttagatcaacatgcacagtgaccgcgacaaggcgatacaccatggtctcatggttaaccagagctaccttgcgcaagctcaggatcatactcagcgcaattactgtatcaactctactgtgcactcaccgtgtctgcatgacagcactgcaactgcacacgaccacagatgcatatgtttatgcaacggatgccattgcaacaacc

SEQ ID NO: 160550 - DNA, 2040 bp, Zea mays
  Clone ID: MRT4577_77C.1
cggggaccgtggttttgtcccgctctctatatgtgtgcctgttggggccaagctgcaccagcagccagcttcctctgcgcgcgagatgctggtcgcttcgacgggcactggcaaagggcggcacatggcggggggcgggggcggccgggacctgccgtcgacgccgacgtgggcggtggccctggtgtgcgccgtcatcgtgctcgtctccgtcgccatggagcatggcctccacaagctcggccactggttccatacgcggcagaagaaggccatgcgggaggccctggagaagatcaaagcagagttgatgctgatgggcttcatctcgctgctcctcgccgtggggcagacgcccatctccaagatatgcatcccggccaaggctggcagcatcatgctgccgtgcaagccgccgaaaggcgccgccgccgccgacgacgacgacaagagcgacggccgccggagactcctctggtacccgccgtaccctggatacgatgagcccggccaccaccgccgtttcctcgccggcgcggctccggacgacaactactgcagtgaccaaggcaaggtgtccctcatctcctcggccggcgtccaccagctgcacatcttcatcttcgtgctcgcggcgttccatatcgtctacagcgtcgccaccatggcgttggggcgtctcaaaatgaggaaatggaagaaatgggaatcggagaccaactccctggaataccagtacgcaaacgacccttcacggttccggttcacgcaccagacgtcgttcgtgaagcggcacctgggcctctcgagcacccctggagtgagatgggtcgtggcgttcttcaggcagttcttcgcgtccgtgaccaaggtggattacctgaccatgcggcaggggttcatcaactaccatctgtcgcccagcaccaagttcaacttccagcagtacatcaagcggtccttggaggacgacttcaaagtcgtcgttggcatcagtctcccgctgtggttcgtcgccatcttcactctcttgatcgatatcaagggattcggacgcgtgggttttgtcccgctcgttatactcctgctagttggggccaagctggaggttgtcatcatggagatggccaaggagatacaggacaaggcgacggtcatcaagggggcgcctgtggtggagccaagtgacaggttcttctggtttaaccgccctggctgggtcctcttcctcatccacctcacgctcttccagaacgccttccagatggcgcatttcgtttggacactgctcaccccagacctgaagaaatgctaccacgagaggctgggcctgagcatcatgaaagttgcggtgggcctggctctccagttcctctgcagctacatcaccttcccgctctacgcgctcgtcacgcagatggggtcgcacatgaagaagaccatcttcgaggagcagacggccaaggcggtcatgaagtggcgcaagacggccaaggataaggtgcggcagcgggaggcggcaggcttcctcgacgtgctgacgagcgccgacaccacgccgagccacagccgcgcgacgtcgccgagccggggcaactcgccggtgcacctgctccacaagtacaggggcaggtcggaggagccgcagagcgcgccggcgtcgccggggcgggagctcggggacatgtacccggtggccgaccagcatcgcctgcacaggctggaccccgagaggatgaggcccgcctcgtccaccgccgtcaacattgacatcgctgatgccgatttttcttttagcatgcggtgaccttgaacaaattctgtgtccttactcttgtatagggaagcaaaagcatagacggagaacataatgacacgttacgttagggaaagtttcgtttattcatcataaaatagaatacgtaataaactagtatctccctcttcaaaaaaaaaaaaaaaaaaactgagacccttacaaggtacagctgcaaaaaaaaatattaaaaagaatagagcagaaaaaaaaaaaaaaaaaaa

SEQ ID NO: 160551 - DNA, 773 bp, Zea mays
  Clone ID: MRT4577_78000C.1
ggcccgcttcgagccggccgggccgggactcacccacccacggcaagtcaattgaaaagcccagcaaataagcatagggagaagctcagcaatggccatcaccaaccttgggttcgctgccatgctggtgatactactgcaagtgtccacgttatgcgccgtggcacagcaccacggcgtgatgacgctgaacgggttcgagaaaggccaggacggcggtgggccgtcggagtgcgacggcaagtaccacagcaacaaggaaatgatcgtggcgctgtccacccgctggtacggcggcggccgccggtgccagaagatgatccgcatcaccagcgagcacaacgggcgcaccgcacaggcaaaggtggtggacgagtgcgactccagcaacggatgcaaggacagcatcgtcgacgcctccgccgccgtgtggaaggcgctcgggctcaacaccgacatcggcgaggctcccgtcacctggaccgacgcctgaaaccatgcatccatccaccgttaataaagcagcggccggcgaccgcaaagacgacatgcagtgctcatcggtgcagtcatgtcgactacgtacgtatatacgcatatatatggcagaataaactacccgtatggatagcagtgcgggtttatcgagtatcttgtaagagtcatgtgagtctcaatttaactagtcggttttttctgttgtgcaataacccgacctagttgtactactcttgttgtattacggaagaaatgctagctcttcagtagtctgc

SEQ ID NO: 160552 - DNA, 1288 bp, Zea mays
  Clone ID: MRT4577_78001C.1
ggccgcttttttttttttttttttgaacaaatgtatcgataccaactaaaaaagaatgggttgcattgcgatcatgtcgacgacaaaactgtggacagcggcatctgtagcaccgcaaattcaggaaatagttttcctccccccactcgacaaaaaaacaacagaaaaacaaaagggatgtcgcagttaatgtgctgctctctgctcaccacagcccgattatcttccaccagaagccgcccaccccgagccagatgatgatgtttacaacggagatgacaaacccatagccccaccactgagccaatgggacatacccggcgccgtagaagacgggagcagagccgatgccgtagtgggtggtcccgcccatgaggttcgagaggaatgaaagaaccatggcagcgaaaagcgacggggtgcccagggcactcgccaccgacaggaacgcggtgaacattgctccgatgtgtgcggcaccactggcaaagaaatagtgcgagtagaagtacagcagcaccagcacaccgaatgagagttgccatgacatgccaagccctccaacaaacttcacaacagtctcactgaaccaagagatcagcccgaatttgttgaggtagccagccattgctataagtgctgcaaaccatgtaagggtatcccacgccacagactctgccaaacactctttccatgtgacaacccctgagattaagaggactgctaggccaagaattgctgcagaaaccgcatccacattcagcatgcctccaaagatccaaagaccaaccgtaagcagcagcgtgccggccatgatcgtctcctccttgctcatgggtcccatcttggcgagccgctccttggccaggcgtggggcgtcggggctcgccttcacctccggcgggtagatcacatacagaatgagcggcacgagcacgagcgacagcagccccggcacaatggcggccttggcccagagcgtccacccgatcccctcgccgatagtggcagccgtgaggttggccgagagcgggttggccgccatcgcagtgaggaacatggctgacgagacgccggaggtctggaagcacgtgagcatgagccaggctccgagccggcgctccgtgccgtcgccggcgcgcgagccgcatgcctcacagagagactttacgagcggtaggaagatgccgccagcgcgcgccgagacggaggggatggcgggggcgaggagcgccttcgtcgccgccttcgggacctcctcccccggccggcctcgaggtacccaatg

SEQ ID NO: 160553 - DNA, 268 bp, Zea mays
  Clone ID: MRT4577_78002C.1
gggcaccaacacatagaaaccaatagcataactggcatacaccactagttacataggcaacaaaattccaaccaacacaggctcaaggtctccaagcaacaaacgaggatggcagacacacttactagcactgaaggccagcctatggcagaatcaatccttacattgtgcagacaaatcatctctgccgcttaaccaaagggtgttaattctcaaatacattattacacgtccttccacagttaattgttcattacgtcagcaatcc

SEQ ID NO: 160554 - DNA, 536 bp, Zea mays
  Clone ID: MRT4577_78003C.1
attcggctcgaggcgtcgtctacgccttctttggcgccttcgggtcctcctccctcgggcggggctactcgctcagcttggcggaggcgctcctcgcccccgccatccactccggctcggcgcgcgctggcgggatcttcctaccgctcgccaagacactctgtgaggcatgcggctcgcgcgccggcgacggcacggagcgccggctcggagcctggctcatgctcacgtgctttcagacctccgtcgtctcgccagccattgtgccgcggctgctgacgctcgtgctcgtgccgctcattctgcacgtgatctacccgccggaggtgaaagccagccccgaagcgccacgcccggccaaggagcggctcgccaagatgggacccatgagcaaggaggagacgatcatggccggcacgctgctgcttacggttggtctttggatctttggaggcatgctgaatgtggatgcggcacctgcagcaattcttggcctaccagtcctcttaatctcagggctggcacatggcaagagt

SEQ ID NO: 160555 - DNA, 262 bp, Zea mays
  Clone ID: MRT4577_78004C.1
tacagcttgcgcactttgtctttttttttggattaacatgggacggggggaaaatataaatagtgtccaattatctaatgtttttgattataagattaaataggggagtatgctcatgcaacgtttttatttcgatatacaggccaggacaacaataatcgggtatcaacctcattatatcatatttaatggtgcaaactctaaaacgaaatgccttgtgagaatatgatgttggcttaactcatccacctactagacaaac

SEQ ID NO: 160556 - DNA, 436 bp, Zea mays
  Clone ID: MRT4577_78005C.1
tgtacatcatccttatggcttatctggaaatggattgccatgtttctcaattctctcccagctactacaagtctacaacctacccttcacgctttcctcaaggtatgaatctgcttcaggacctcctatttatgtgccattggttaattagagttcttatgttgttttagatggctggttctgctttcctgtttacgaattatgcgtcgtcgatagggcgtccgtaagggcgcctctgaccacctactgtgtgcttcgctacattttcagcccaccgtgtgccagcccacgcatgcttgtttaaaacgcgcggcgggtgtgcgcgttagtcgttggtttcttgtgcgctgtgctgccgcgcttgcatatgctcagacttgcaggcaatctgtcgtgtgcgcggctgggctggaccttcaaatgcagatgcacagca

SEQ ID NO: 160557 - DNA, 141 bp, Zea mays
  Clone ID: MRT4577_78006C.1
cagtaaataaagggcggtcgctgatttattgactgggctccttgcaacttttgttaaatccaaaagaccctgattgcaaatagaaaggacttgcacgcaaaaacaccacgagggagaccaataattcgaatttatttgggc

SEQ ID NO: 160558 - DNA, 279 bp, Zea mays
  unsure (1)..(279): unsure at all n locations
  Clone ID: MRT4577_78007C.1
gcagcctccctgggcgcacaccaatggagggtgctctccttctggagttgtatcggcaagatatcaccctccagagcagttctctacaccatgacacctgaggccaagaggcaagacatgattgcacttcatctgacattagcgttttatatttggtgtgaagaatctatctgacggggggaggcttgccgactacaacatcctagaagagagcactctncacttggtgctgcgcctcaggggaggcatgcagatctttgtgaagactttggctggctt

SEQ ID NO: 160559 - DNA, 852 bp, Zea mays
  Clone ID: MRT4577_78008C.1
atcgaggccggccgggccgggacccatattattgataccaactagcaacatacatagtgaagtacactagcaacatcttagcaccaatgggagccaagatttttgccctccttgccctccttgctctttcagcaagcgctgctacctcgacttttattccacaatgctcacaacaatacctctctccggcgacagccgtgggatttcaatacccaactatacaatcctacatggtacaagaggccatccaagcaagcatcttacggtcattagcattaaccctccaacaaccatatgctctattgcaacagccatccttagtgcatctgtatctccaaagaatcgcggcacaacaactacaacaacagttgctaccaacaatcaatcaagtagttgcagcgaaccttgctgcttacctccagcaacaacagtttcttccattcaatcaactagatggggtgaaccctgctatctacttgcaggcacaacagctactaccatttaaccaacttgtcgggagcccttatgccttcttactgcaacaacagcttctaccattccatctgcaagctgtggcaaacattgctgctttcttgagacaacaacatttgttgccattttacccacaggttgtgggaaacattaatgccttcttgccatttagccaacatgctttgacgaatcctaccaccttattgcaaccgcccaccattggtggtgccatcttctagattttttatgatttatactgtaataataaagttctcatgctgatatgtgcgacctctcagtaataaagtattagagatctatatttcaaaaaaaaaaaaaaaaaagcccctaggccctcga

SEQ ID NO: 160560 - DNA, 787 bp, Zea mays
  Clone ID: MRT4577_78009C.1
cgggccgggatattattgataccaactagcaacatacatattgaagtacactagcaacatgttagcaccgatgggagccaagatttttgccctccttgccctccttgctctttcagcaagcgctgctacctcgacttttattccacaatgctcacaacaatacctctctccggcgacagtcgtgggatttcaatacccaactatacaatcctacatggtacaagaggccatccaagcaagcatcttacggtcattagcattaaccctccaacaaccatatgctctattgcaacagccatccttagtgcatctgtatctccaaagaatcgcggcacaacaactacaacaacagttgctaccaacaatcaatcaagcacaacagctactaccatttaaccaacttgtcgggagcccttatgccttcttactgcaacaacagcttctaccattccatctgcaagctgtggcaaacattgctgctttcttgagacaacaacatttgttgccattttacccacaggttgtgggaaacattaatgccttcttgcaacagcaacaattgctaccattctacccacagaatgtggcaaacattgttgccttcttacaacaacaacaattgttgccatttagccaacatgctttgacgaatcctaccaccttattgcaaccgcccaccattggtggtgccatcttctagattttttatgatttatactgtaataataaagttctcatgctgatatgtgcgacctctcagtaataagtattagagatctatgtttta

SEQ ID NO: 160561 - DNA, 832 bp, Zea mays
  Clone ID: MRT4577_7800C.1
agcaggcgggcgcggagggccaccgcgacgccgcgggggtgtggtacgtgccctactgggagggctacgacgacggcttcgaccgcgacgcgcacgacgccacgcactacatggagcagatcaagctcgtgggcgccgccacgttgggggccgtcctcgaccgcctccacggcgtgggccgccccgtcacgctcgtcgtgtacacgctgctggtattcggcgtggccgacgtggcgcgcgcccgctccgtgcccgccgcgctctactggatccagccggccaccgttctcgccgtgtacctccacttcttccgcgccacggacggcgtcgaccgggccatcgccgcggcgggcggcgacccgtgggcgagcgtccggttcccgggcctcccgccgctccgcgtccgcgacctgccgtcgttcatcgtctccacccccgagaacgacccctacgcgttcgtcgccgacgcgttccgcgagctcgtcgagacgctgggccgcgaggacaagcccagcgtgctcgccaacacgttcgacgcggtggagcccgaggcggcggcgtcgctgcgggaggctggcgtggacgtggtccccgtcggccccgtcgtctccttcctcgacgacgcggcggcaggggccggcggcgccaagaacggaggcaacaacaacgacctgttcaagcaggacggcgagggctacctcgactggctggacgcgcaggcgccgggctccgtggtgtacatctcgttcgggagcctgtcggtgatgagcaagcggcagatcgaggaggtggcgcgggggatggccgagggcggccgccgactagagagctc

SEQ ID NO: 160562 - DNA, 508 bp, Zea mays
  Clone ID: MRT4577_78010C.1
ggagcaaaaaattctttgcttttattacatcccttaaaaaggaaaagtccaggggggaacatgtccaacctaaatactacgtttcggttctccgagccctaaatacccctaaaaaactccttcataaaacccaaggtatttaattgttgggacaaaaaattactgacatggggaagggagaacattgaaaaaacagctcgcccttttttagcaggccaatctcatctcattgttgggaaactgaattactgacatgaggcctcattatgcgtctcatagcaggggaaagtaaaactatgaaccaagggcgaaactggaggtccggccccagaaaggaaggaagggttttttgatattttggggaacatcgggaggcctggtctacctaggaggtagcgaaaatttcactcctggaggcaagagtcaacttcaggggggccgccggggtttcctccgcttgctttgtttcaggggaaacgcaaaatgcttctagctttttccttgcaaa

SEQ ID NO: 160563 - DNA, 1269 bp, Zea mays
  Clone ID: MRT4577_78011C.1
gcacgagatacgaactagcaacatacatagtgaagtacactagcaacatcttagcaccaatggcagccaagatttttgccatccttgccctccttgctctttcagcaagcgttgctaccgcgactattattccacaatgctcacaacaatacctctctccggtgacagccgcgagatttgaatacccaactatacaatcctacaggctacaagaggccatcgcagcaagcatcttacggtcgttagcattgaccgtccaacaaccatatgccctattgcaacaaccatccttaatgaatctatatctccaaagaatcgcagcacaacaactacaacaacagttgcttccaataatcaatcaagtagttgcagcgaaccttgctgcttacctccagcaacaacagtttcttccattcaatcaactagctggggtgaaccctgctatctacttgcaggcacaacagctactaccatttaaccaacttgtcgggagcccttatgccttcttactgcaacaacagcttctgccattccatctgcaagctgtggcaaacattgttgctttcttgagacaacaacatttgttgccattttacccacaagttgtgggaaacattaatgccttcttgcaacagcaacaattgctaccattctacccacagaatgtggcaaacattgttgccttcttacaacaacaacaattgctgccatttagccaacatgctttgacgaatcctaccaccttattgcaaccgcccaccattggtggtgccatcttctagattttttatgatttatactgtaataataaagttctcatgctgatatgtgcgacctctcagtaataaagtattagagatctatattttaaattcaaaaaaaaaaaaaaaaaaaaaaaaaaaaaaaaaaaaaaaaaaaaaaaaaaaaaaaaaaaaaaaaaaaaaaaaaaaaaaaaaaaaaaaaaaaatttaaaaaaagaaaaaaaaaaaaaaaaaaaaaaaaaaaaaaaaaaaaaaaagggggggggccttttaaaggaaccaaattttactccccggggttggaaaggaaaaattttttttttggggccccaaaaaaaaaataaaggggccgggttttaaaaacgggggaggggaaaaaccctggggttccccaaattaattcctttggaaaaaaacccctttttcccaaggggggaaaaaaaaaaaaggcccccacccatccccctttccaaaatttggccacccttaatgggaaatgggacccccc

SEQ ID NO: 160564 - DNA, 370 bp, Zea mays
  Clone ID: MRT4577_78012C.1
gggaaaagagaacgtgagatttgggaattggagatatcacaagccctgcagatttctttccgattgtcttgggacttagtgtaagaccaagtcttgtccatgatagagcatgttctaatttgtgcgaaaagcataaacaaacaagttaaggtttataagagaaggaatcggaggcatcgagaaagaggcacatgctcgttctaggtcctgttgtattagattttgtgccaaaacatgaagctaatctgagagagaggcaattctcactctcaatccgaatgacgcacagatttgccacgcatggtgccaatgctttggctgtccgatatctggatcacagtcaacctggaaacagagatgagatgaggag

SEQ ID NO: 160565 - DNA, 619 bp, Zea mays
  Clone ID: MRT4577_78013C.1
ttgggtacctcgagccggccgggaccgggaagagggacgacttcccgccagcccatcgccgcaaggaccaagccattgaagcgaggcgcttgcagtgaacccgaaaaagtcgattgacccggaaaatccactgctagcacccgtccacgcccactgctccatggctcggtagtccgcaaaccctcccacatccacatccatcgccgctattctacccaccatgagccaattagtcgtccggccaggacgcaatgccgcccgccaggccaagaaactcaaggaaatccgcaaaacgaagaacgcaatccaatggcacgagcgagagcgaaagaagcgacaagaactcatgcaggagcgatgggagtccaagcaagccgtcctgcagcgcatcatgtgggagaatgcaaatgtcaagggcgtcaagaaacgtgctctagccaatgccaaagaagattggaggttgggtcctttgaggccaaaccgtgccatcggcccaaatgcagacaagtacggtgctctcacatcgtctcagatgcagaaaccagaaatctgcggcaagacacaaaagaaccttaatgcttggagagagaggaagggaatgggacttgagaatgcctat

SEQ ID NO: 160566 - DNA, 359 bp, Zea mays
  unsure (1)..(359): unsure at all n locations
  Clone ID: MRT4577_78014C.1
gcgnaccaactaccaacacacatanttttggactttaacaacatcttancaccaatggcagccagtattttttcccttcttgccctccttactctttcagcaagcgcttttacctcaacttttattccacaatgctcacaacaatacctctctacggtgacagccgtgggatttcaatacccaactatacaatcctacatggtacaagaggccatccaagcaagcatcttacggtcattagcattaaccctctaacaaccatatgctctattgcaacaatcatccttagtgcatttgtttcttcaaagaatcgttgcacatacaactacaacaacagtagctaccaacaattaattaag

SEQ ID NO: 160567 - DNA, 151 bp, Zea mays
  Clone ID: MRT4577_78015C.1
tgtcgattatgatcgccatgcatcggagctatcagacgctcacgaccagcaagatccattctagtgagtcgacgatgagctctgatttcttgcaaatatgttatgatcatggtggctcgctgaggtcccctactggaatcatgagctgagt

SEQ ID NO: 160568 - DNA, 227 bp, Zea mays
  unsure (1)..(227): unsure at all n locations
  Clone ID: MRT4577_78016C.1
acccacaccgccgccgcagcgcccccgccccagcgccgacaccgccaacaagaagcacaccgaggcgacccccgggcccaacccncaggagcccaccgagccccaccgggacgacgaggacgcgcagcccccaaaggccggggncaacggcgacaacgaccccgccggcgagcagcagaacgacgggaaancgcgcaacgacagggccagcaccgagggccaccggc

SEQ ID NO: 160569 - DNA, 432 bp, Zea mays
  unsure (1)..(432): unsure at all n locations
  Clone ID: MRT4577_78017C.1
gcgctgtccggtcacagacgcgggatttcaacacccaactatacaatcctacatgcggcaggatgccatcgtagcaagcatcttacggtcattagcattaaccctccaacagccatatgccctattgcaacaaccatccttagtgcatctgtatctccaaagaatcgcgacacaacaactacaacaacagttgctaccaacaatcaatcaagtagttgcagcgaaccttgctgcttatctncagcaacaacaatctctttcattcaatcaactagctgcggtgaaccctgctgtctactggcaggcacaacaactcctacaatttaaccaacttgtcggaagccctaatgccttctaactgcaccaccagcttctgccattccatctgcaagctgtggaaaacattgcttctttcttgcgacaacaacaatt

SEQ ID NO: 160570 - DNA, 1048 bp, Zea mays
  unsure (1)..(1048): unsure at all n locations
  Clone ID: MRT4577_78018C.1
ccagggccgcccgggaccgctcgaacccaccccgtccggcatgcgctaagcacgcnggtgccccgtccgaaggagtccccgccgcgcacgccgtcattcgtcgcaagctgtcgaactctcgcgcccagagcnccgccgagccaccttcgttcgagctcgccccaagantgtgatctgttcccgagtttcgaggaatcaatgaccaagatttggtgacccactggtcccgaaatcaagttcttcgagttctacaaagttgaagaccctgagcatctttttggtcaaggctagtccatgatgcaaccactgctcaggagaagatgaagtcgtggaggaggacttccaggagttcccacccccccatgagttctaggcgtgggttagcggcaaacccctactattttgagcactgtgtgatgatgtccatgttatgtaactgctgtgtacgtgaataactgatcctggcacgtacatggttcgcattcggtttgccttctaaaaccgggtgtgacagctgctgcaataaaaaaaaaaaattcgtcaaagcaagttggctaaatggaagcaattgttgttgttgtaagaaggcaacaatgtttgccacattctgtgggtagaatggcagcaattgttgctgttgcaagaaggcagtaatgtttcccaccacatgtgggtaaaatggcaacaattgattgattgttggtagcaattgttgttgtagttgttgtgtcgcaattctttggagatactgatgcactaaggatggttgctgcaatagggcatatggttgttggagggtaaatgctaatgactgtaagatgcttgctgcaatggcctcttgtagcatgtagggttgtatagttgggtattgaaatctcgcggctgtcgccaaagagaggtattgttgtgagcattgtggaataatagtcgaggtagcagcgcttgctgaaagagcaaggagggcaaggagggcaaaaatcttggctgccattggtgctaagttgtttctagtatacttcactatgtatgttgctagttggtatcgata

SEQ ID NO: 160571 - DNA, 364 bp, Zea mays
  Clone ID: MRT4577_78019C.1
ataaaaaaaaaaaaaaaaaaaaaaaaaaaaaaaaaaaaaaaaaaaaaaaaaaaaaaaaaaaaaaaaaaaaaaagttaaaaaaaaaaaaaataaaaaaaaaaaaaaattttgttctttaggccgtaacccccttaggggcaatttttcaatttttccttcactttgggggccttttaacctttcttttagggggcccatttccccttttggggattctttttacatttcattggccgtttttttacaacgtcttgatttgaaaaaccttggctttacccaatttattccctttgcagaaattccccttttcgccagttggctttttatcgaaaaggccctaaccgtttgcctttcccaacatttg

SEQ ID NO: 160572 - DNA, 840 bp, Zea mays
  Clone ID: MRT4577_78020C.1
ctcgaggccggccgggacccatattattgataccaactagcaacatatatagtgaagtacactagcaacatcttagcaccaatggcagccaagatttttgccctgcttgccctccttgctctttcagcaagcgttgctaccgcaactattattccacaatgctcacaacactacctctctccggtgacagccgcgagctttgaatacccaactatacaatcctacaggctacgagaggccatcgcagcaagcatcttacggtcgttagcattgaccgtccaacaaccatatgccctattgcaacaaccatccttagtgaatctgtatctccaaagaatcgcagcacaacacctacaacaacagttgcctccaacaatcaatcaagtagttgcagcgaaccttgctgcttacctccagcaacaacaatttcttccattcaatcaactagctggggtgaaccctgctgcttacttgcaggcacaacggctactaccattcaaccaacttgtcgggagccctgctgccttcttactgcagcaacagttgctgtcattccatctgcaagttgtggcaaacattgctgctttcttgcaacaacaacaattgctgccattttacccacaggttgtgggaaacattaacgccttcttgcaaccgcaacaattgctgccattctacccacaggatgtggcaaacaatgtcgccttcttacaacaacagcaattgctgccatttagccaacttgctttgacacatcctaccacctttttgcagcagcccaccattggtggtgccattttctagattttttatgttttatactgtaataataaagttctc

SEQ ID NO: 160573 - DNA, 508 bp, Zea mays
  Clone ID: MRT4577_78021C.1
atcagcctgggaactttttttttcccggttaaatcataaaaaatctagaagatggccccccccatggggggcgattgcaataagggggggggattcgtcaaagcatgttggctaaatggcaccaattgttgttgttgtaagaaggcaacaatgtttgccacattttgtgggtagaatggcaacaattgttgcttttgcaagaaggcattaatgtttcccacaacctgggggtaaaatggcaacaattgttgttgtcccaagaaaaaaacaatgttttccacaccttgcaaatggaatggcaaaagcttttgttgcaataaaaaggcattagggctccccacaagttggttaaatggtaatagttgttgggcctgcaagtaaacagcagggttcaccccaacttgttgattgaatggaaaaaattgttgttgctggaaataaacaacaaggttccctgcaactacttgattgattgttggtagcaactgttgttgtagttgttgggtcc

SEQ ID NO: 160574 - DNA, 416 bp, Zea mays
  Clone ID: MRT4577_78022C.1
aaaacggcaaaacgcaggggcaatctatttataaatccgggaatcccaaatacaacaatacaaggggccaacttggtttagccttccaagttacaactttcccaacataattcaccgaaaaacacatgataggcatcccactcgactaaacgacggaatttacatttaaagggcccaagggggaaacccaaacatgtatggacaggctgacgtgcatttgattggaaaggaaaaaagcccacatttaaaccgaatattcggggttaaaagccccccccccccccagaaaagcgatgcacccatgcaaacatgaagggcatccaagtaaagcccccagctcaactttagggggaactggataaatgcaacgggaaaaatgatgccttgaccccagcaggggggaatctttgggggcc

SEQ ID NO: 160575 - DNA, 575 bp, Zea mays
  Clone ID: MRT4577_78023C.1
cgcccgggcaggtacgcgggtaatcaagtagttgcagcgaaccttgctgcttaccttcagcaacaacaatttcttccattcaatcaactagctgtggtgaaccctgctgattacttgtaggcacaacagctactaccattcaaccaacttgtcgggagccctgctgccttcttattgcagcaacagttgctgccattccgtctacaagttgttgcaaacattgctgctttcttgcaacaacaacaattgctgccattttacccacaggttgtgggaaacattaacgccttcttgcaacaacaacaattgctgccattctacccacaggatgtggcaaacattgtcgccttcttacaacaacagcaattgctgccatttgggccaactcgctttgacgaatcctaccaccttattgcatcagcccaccatcgggtggtgccatcttctagattttttatgctttatactgtaataataaatttctcatactgatatgtgcaacttctcagtaataaaagattagagatctatattttaagttaaaaaaaaaaaaaaaaaaaaaaaaaaaaaagtac

SEQ ID NO: 160576 - DNA, 323 bp, Zea mays
  Clone ID: MRT4577_78024C.1
gaaaaaaaaattggcagaggatcagatccccaaaaatcacaaccggaagaaaacagcccgtttggttaaagacaacaggggaacaatgaatatattctttacgccaactcaacgcatgggtgggatgtacattggaacatcggactcctgttttacccaggttcagggtaccaagactccaaaagaggcctggcttcgctatatttggttggaagagtcatttttcttggccccatgggttttaaagcatcccgcatttccaggtagttgttccgcataactggcatcctttacctgagcaaatgggtttttgaactggacca

SEQ ID NO: 160577 - DNA, 394 bp, Zea mays
  Clone ID: MRT4577_78025C.1
aacccgaaacgaaaggggttttttcttttaactctcaaaatcccctcccaggcttggccaattgggcactttttgggcagccggccccccatccatcctacaatcctccagtttccgggcaccttagttaacttggaattggaaaactttggtgcggggcttatgacatcttgggccccattgtccccattagggaggtttccccagggggggatgctcagggaacggaggggaagggtggtttctcccatccgcgctttgttgccagctccacatactttccataacttttcctggggatttgggatggctggggtcatatcataaagggccttccttggcccgggcaaagcctttgggcatttgggtgtgggttttgagccccttgccgaaa

SEQ ID NO: 160578 - DNA, 246 bp, Zea mays
  Clone ID: MRT4577_78026C.1
caacagtggagtcctgctttaactatctcataggctctcatgtcaatctgcgcactgctcacgagaccatacactgatgatcctcttgtccctgagaatgctcacatgtgcaagaccgaccaggccacgtatgagtctaccgcacgctcctggacacagaagtataccatgggctagacgcaaagctaaaagctggccaaactggtgaatgtgccggacgccacatcgatatcacctacataacca

SEQ ID NO: 160579 - DNA, 187 bp, Zea mays
  Clone ID: MRT4577_78027C.1
aaaacactgtgtaagtagtaaaagccgatacaatttaaagtccaagctaggagaatctatggaatcggtaaggatgataccttgcgagccaagatattaaatgaactaaatgtttgaatcattggacctaaaaaagaaactttctttatgggttgaacttctgttgcgtcttataaggaataactac

SEQ ID NO: 160580 - DNA, 647 bp, Zea mays
  Clone ID: MRT4577_78028C.1
ttttttttttttttttaatttattaaacgattgaactattctgaataattcatcggcttaccatgaccggaacgatttaataatcgtagaacaacgatgagtattggttcaggcttcctatcaaacacttagcaagggttgtgttcgaaggcggcttacaggggaagagctcgacaggggcttcagagctcaatacaagtggcacacaactggcagatagagcgtcgggatcgacgggcacgtcgcgacgcggtgtgggttgacgacgaagaataaaggggctactggcttcgacttcagcaccaaatctcctttcaaaattataattggcttgaacttcacacgaacaatgatgagaccgtggttcaggctttacgtcgagtacttggcaggcgtcacagttggctttcgctgtcttcgccgcccacaccaagaacttctctcccaaacacaagcaagggaccacaccacaggtattcgacgaaatcaacataggactgcagcaaagcttctggaataggaagatggcaacaaggtcgacgatcaggcgcggcgctaatgcaagaatgcagaacccaaggtaccatggcgcagaagcgcgcgagatccagcgtccaaggctaagcagcaggggcaccctcgtgccg

SEQ ID NO: 160581 - DNA, 444 bp, Zea mays
  Clone ID: MRT4577_78029C.1
aaaaaataaaacaaaaaaaaaaaaaacaattaaaataaaaacaaaaaaaactaaaaaaaaaaagataaaaaacataacaggggtgggccttcctaaacccaaaacccaacaaatctactttaatatcgcatacaaaaacaatctttcattccatcagctattcctcattactgacattctaattgatttgccttgcttcccttatctataaacacctccttcactaccttctcttctacaacttcttacctcctactccagctctactttctttttcattatttgcagttcctccaatacactctccgcacgtaaactttctccaactttttcaaactctctcgttccacctttttcctatcttcaccatccaccctgtttcttccgttctcttcctatactcattactttctctcttttatttctttattttctcgttttttt

SEQ ID NO: 160582 - DNA, 153 bp, Zea mays
  Clone ID: MRT4577_7802C.1
acttatgctccttgtgctctctgcaagcgtctgctacaggcgcgacattatgccacaatgctcacacgctgctatagctttccttcttcccctgtacctcataccacgcgagcattaggtatgatgaaacccaatcattcagccgtataggat

SEQ ID NO: 160583 - DNA, 591 bp, Zea mays
  Clone ID: MRT4577_78030C.1
cttatgggttgtcccagcacagcaccaacaacacgaggttttatcttattatccttgctatgtttggcatcatcaattctcttttcactttgggaagggcattttcttttgcattcggtggcctccgtgcagcaatccatattcatgcatctcttcttgaaaatatcatcagtgcaccgatttgtttctttgaccaaaatcccagtggtcggatcctaaacagattatcgtcagacctctatgccgttgatgattctcttcctttcatcctcaatatatttgtggccaacttcttcagcttattcggcactctggttgttttgtcttattcacaggtttccttcttattcgtcttacttccactctggcttatctataggaagttgcagttctattacaggtctacatcacgtgaagtacggcgacttgatagcgttgctcgttcaccaatctattcatctttcacagagacacttgatggttcatcaacaataagagctttccagaatgaagggttcttctttgaaagattcatccaacatgtgacactatatcagaaaacgtcctacactgagctcgttgctagtttgc

SEQ ID NO: 160584 - DNA, 146 bp, Zea mays
  Clone ID: MRT4577_78031C.1
acaaaatttcgcaaagaggcaaaaagcctgatagagctaattgggtaatgcatcagtatcatcatggggaagatgaagacgaaaaggacggggaactatgtagtatctaccatatactgtcagttgccatataacagtatggaaat

SEQ ID NO: 160585 - DNA, 267 bp, Zea mays
  Clone ID: MRT4577_78032C.1
ggcaatttataatttattactactttaaatcaaatgtagcattatcacactgtatttaaattgtcattttttaaaggaatattttcttcttaagatatatagaggattttggagaagagagacaggaggggtaaaaccagcttaaggttcagcgagcagaaagggacctgagaggatgctcactgtaagactgttggacagtggtgtgtattgaggggatgaatcggaacgatagtctcatgcagaaaatagtgagattaagatcat

SEQ ID NO: 160586 - DNA, 170 bp, Zea mays
  Clone ID: MRT4577_78033C.1
cacctcgtcacataagccatttccaactggcgcaaaattgtcctatgctcctggtcttttgaggttgtccgaaccatttcactgtacgctctatgcttcttttcccatccttacacgggttcaagggaaaaccaatgtaacctcagaccaagcatcacagcttaccatta

SEQ ID NO: 160587 - DNA, 382 bp, Zea mays
  unsure (1)..(382): unsure at all n locations
  Clone ID: MRT4577_78034C.1
cggccccttggccggccccttgggcggacccttggggtcgtaccatatcatatactgcgaaatgaggatgtggtgaccgttctcgagatgttcaatagtgtgtttctgtcctcgacaacggagacagtattgaccagtatctgactgaacaaaagcgcttccggaaaattaattaagaaaagaataaccgtgtccgggctccagcaagtcgagtgttaatttccattctggatacgtgtaactgttgtagaagaatgcgtattaatcgcttagggtttgttcggtttanaaaaaaaaaaaaaaaaaaaaaaaagggcggaccgtattaaggatccatgctttacgtccgcgtgccttgcgacttctttcctttttttttgtg

SEQ ID NO: 160588 - DNA, 595 bp, Zea mays
  Clone ID: MRT4577_78035C.1
ctcgaggccggccggaaaaaaaaggacccctccctaccttgacttttgtttcgatgggtggttgcgcctctatagcccgaatttctcgtggcctcttgcacgccctaggtcagttgtgtccctagccatgagtctaacccaagcatgtcgataggatcgaaacgaacactgcaccctgtttccggagaaatcgtaatgaactccgcacaactagaatagatcctagtactatactcacttatatatatccttgctctcgtgtcctcctgagtcatcgcgtcgagggaactaatgccatagccacgagttcatcaacgaaggatgagatcgagtgccaccgtagtgggttctcagcctcgccaaggatggaggccacgactgcgcgactgctggtcaaggacagatactacaagatgaggaacatgaaggatgtcgcaatgagtttgtgagaggtttagaccgtcgtctccaagtcaactttggttgttggatcgttgtcttcgtatgatgtaattatttaactatttttgtacagaactccattatatattaaagatgtgatattcgtttcaaaaaaaaaaaaaaaaaagcggcc

SEQ ID NO: 160589 - DNA, 612 bp, Zea mays
  Clone ID: MRT4577_78036C.1
gtagtacaattcattcattcattcattaaaagcaaggaagaagacttggaactctgctagctagcagtagccagtagctagtgctaccttcccctgctccgacctctatctgtcgttctgtctatctcgtccgtcgccgtcgagccggctatggagatgcagccacagctcggcgactcttctccggaggacaaggtgcgtcggtcggccgctccagcacagctctcaattcgccaagatatattgacagttatatactaattaaaaacctgcaaagagagatccttgtttgattttttttgtttacaaagatctgactgtgcgcttaatttggggatgaccgatgaaatcgactcaactccctgcagctcgccagccgccctctgacacccggagggcgctggccggactcgcagtggcggcccgcagaggagaaggccatcgacgactggctccccatcaacgcgcggaggaacgccaagtggtggtactccgccttccacaatgtcaccgccatggtcggcgccggcgtgctcggcctcccctacgccatgtccgagctcggctggtgcgtacgctagcttgctagctgtgtgcctgtgtctgactgac

SEQ ID NO: 160590 - DNA, 1320 bp, Zea mays
  unsure (1)..(1320): unsure at all n locations
  Clone ID: MRT4577_78037C.1
taagttccatatgcaaataaatactaggatcatgtgtgtacagcaagcgtgcgtgtactagatactgtactcaacaagcgtgcgtgcagacggctgctggactgtacagcaacaatagaactaatcttttgcatttcaattggattataaaaaaataaagtgtgccatatgcaaataaaaaaatagatcatgtaggtcttcgagacagtggtcttctaaaccggacaagcgttcatcctacttgcagacggctgctggactgtacagcaacaatagaactaatcttttgtatttcaattggattatacttaatgaaagtgtggttcagacactagaaagaataggaacttcatgtcttcgagacagtggtcttgcaaaccggacaagcgttcttccgagaaagccactgctttatgcagtgcacgtgatagctgtggccacagctcagcttcccagtttcctcgtgtacttcgaactcttcttgacagatgctacatctcctgtccatttccgtagaaaaatgtctggggttgaacgcggagtactttaccatcctaaggctttgaatgatctcgtcctcacgaagccctgtacttacatatccaatccggtcctcaagatcgagcaactcctcatatgtcatgttgtcgacatcgaggcgccaatcctgatactgatcataaatacccattcttcccaataacatccttgtctggaacatcatctcttcctcaacccgtgcgtgggagtgccggcggccactcacatgtcggatgcgtccggaaggtgcacggtcgacatcaacgaacggcatgacatggtgcggcggtgaactcagaggggacgaggacatgtgctcccgcatggtgaccctcctggccggaggtgcgccaggcctctctctccgcggcctgtcggcctcggcgcggcggcgcgcggccaccgtatggtgcggcgccaccacgcagtccaccgaagaggcctcggcggcgaacggtatgcccggcgtgcaccagacgtccccgccgacgcccatcccggcactggccccaccaccaccactgacgccgccagccctcgccttccgcctctccctctcgttcctccgccgcctcacgcgccactcctcggaacgccggggcgcttgagcctggaccgccggtgccgctccagccgcgcacccaagcctgcgccagtccgccgtgggccgggccgcttccaccgcggcagccggcgcgtgcgcctgggccgccgcggcgcaaccgagtccgcgccagtccgccggaggccgcgggattnccggcgcgatagcctcccgat

SEQ ID NO: 160591 - DNA, 163 bp, Zea mays
  Clone ID: MRT4577_78038C.1
cgtccggaataccggccgagccagcatccgtcactcttgagatattaagagggatgaaacgctgttatctgaaccggttttattttttataagacccataagcgggccggactacggcatacggtttctagaatcggttgaataagataacggccacccctgc

SEQ ID NO: 160592 - DNA, 338 bp, Zea mays
  Clone ID: MRT4577_78039C.1
acgcgtccttccccaccgccagggcaagccaatgggcatggtgttgttcaaagacgccaaggcgagctagaccaacgggaaagcatgcacacacacccagccgtcgaggcgctcatactggggcagagcctacaacccacaggctgggtgtcatcccctgaggaccagacgaaagatgcattactggaaacaccatcgccgtacaagctgacacgccatacgggggtccacaaaagcgcggaacacccttgtggcccaagggccagcggtgccaacagcacacatactctgcaagagccactgacccggcaggacacaccaggagggccatcagggga

SEQ ID NO: 160593 - DNA, 264 bp, Zea mays
  Clone ID: MRT4577_7803C.1
aaaaaaaaacaaagttacaaaacaatgtaaaaaggacccagcaaattcatggggaggagtaccatccatttccacactcaaaaaatccaacacatccaaggaaaaaaaaatgacccaaacaatgaaaactcaaaagttcaccctaaaacaacttaaaacacccaagggacaactcctgttaaagttaaaaactcaagatcctttttactcaaacaaaacattattgtcataaaaaaaaggttgtgcaatttcttaaaaaaacta

SEQ ID NO: 160594 - DNA, 327 bp, Zea mays
  Clone ID: MRT4577_78040C.1
cacgaggcaatgcttgttcaaccgcactttaaaaatccctaatcctatggattgagtgcttagtccctagaacatagggaaagacaatttatgtgtgcagaaataataatgcctcgtgattgctgcgcagattagaatcgtggtgccaaggataagagatctgagggttaaggggccagtgagaatgcccaccaaggttcttcacatcacaacaaggaagtctccctgtggtgaatgaacaaacacatgggatagatttgtgctccgtgttcacaagcgagctattgatctttttagctgtcctgatgtggacatgttgttcacatc

SEQ ID NO: 160595 - DNA, 116 bp, Zea mays
  Clone ID: MRT4577_78041C.1
attgtacttcccacgaaaaagcccattgtttgttgtgtcgccgcatttttgttttgggcttgctgatttgattacggggaggcggcttcctgcatttctttgtagtgggttatgca

SEQ ID NO: 160596 - DNA, 925 bp, Zea mays
  unsure (1)..(925): unsure at all n locations
  Clone ID: MRT4577_78042C.1
tcaagtggggggttttggggtgtcggaggasgtgcagtacgggytgaacsggttgttctggsttgttggtggagggggtggagtgggaggacaavahttasragaaagtayttsgtgktggggaacggtttcccgagaattaggtggaggcaggggtatgtyctctggcggaattggttwmaagaaaggaggaggargaggaacggcckagytgcggtcgctggttcgaggnctbtgaaaggggtgccctttggtcaaaggagagaaacaaagktgktggaggaggragttggaaagggtsgtggaggaaaggkgtggcggsgcacgaaaaatttggwwatggggastgttwataggggagtgcggtgsggaggttttcgaggggyttcggttggttwactctattgktggggcaggggaggggaargccgaggggggcggcntatcgttmaaggctttrcgagaaataaagtgcacggtgttaaattttccgagggtggtggrggagaggaggasraagaccatcacyatccggcgtggggaggytgtmatgttaaagctsgtcgtgaatttgtggagvgaggaaggatgkgtaaagatcttggagttgtggaggaaggccatcytttcgggggaagaaggagggaaggtgatcatrattgagatattcttgggnsggtatatggggcgggtnatgtaggaggscgagttgttgatggacatgttcatgatggtgaanacaaagggcaggvaggggggrgaagaggattggggcratatttttacaaaggttggtttctcsgattaaaaggttgtaaagaaaatgggagytsgtggtgtcatsgaggtttaccmatgatcaatgatggatgtaatgtgattgtgagaggasgatactgtaaaattaaataaagggggtatktag

SEQ ID NO: 160597 - DNA, 295 bp, Zea mays
  Clone ID: MRT4577_78043C.1
tcgccgccgctgttggattccgcaagaagcgccggccccacttattggagaagaagatctaactattggtttgtggtttatttcccactaggtttctcactgatgggaacttggtggagacttatgctattatctggatcgaaggtactgcaatactggtaaagaggatatattcatcgtttagttgatcaaggtggctgtgggggggatccttttagtttggctggaatggtggaaacatgtttgtgtcgggctgtggtcgttttggtttgaaactggtaacatggttgagtct

SEQ ID NO: 160598 - DNA, 584 bp, Zea mays
  Clone ID: MRT4577_78044C.1
gagtcttataggaaggcacttcttccagctatggggcctggggtaaagccagcctaaatcacagaatctctttcgaggtcactggtggacagcccaggccacccccaagtgcccagtgcctgccaggagctgtgtcctcaggcttgggggaggctgaggcagctgggcccctgggtttctctccctgggaacgggatgctgctgcctgtaaagccacaccccagagcaccacccccaccaccctgtgtgttctgttgcagggatcgcgtttagaagaatggctcagccatgtggtcggggcagtgtatgcaccaaagcttaacgtggccctggatgttggaattcccctgcctaaggttcttaatatcaatttttccaattcagttctggagatcgtagagaatgctgttgtgctgaccgtggcatcctgaggctgagacatggccaccagccttccctgttgactactagagaccacctgtctactctgcctcaatttccctcccagtctctagctgatgttggtgacagtaaaaatgccctctggccctgaagcactactccaagtttggggtgggaactgc

SEQ ID NO: 160599 - DNA, 391 bp, Zea mays
  Clone ID: MRT4577_78045C.1
cccacgcgtccggctccagcgagcaaaggctcctgaccgataagacgatggctctgatggcggtctagccctggaagatggcggtgtcctgcgagcgccgcgcctgggccaaccttgtcgtgcggatcaaggcgccatactacgtatatgacctgcacacctacgaatgatgtgccattgcagtgagagattacttaaactcaccatggacttccagactagcgcacactcaggctttcatgtcaatacagcgatctagagatctttgccagactctgtcaatcaagcccagaggcgttcgccgtagtctctgcccaactgaggtgcgcgtaccgtctgcatgctccacagataatgtgacatttgaactgatgcggcacattgtgcatga

SEQ ID NO: 160600 - DNA, 370 bp, Zea mays
  Clone ID: MRT4577_78046C.1
ggccggagatctctgaagccttcgacgcgtttagcatccatcatgttggcatactgcggaaagatcaaggatgagctcattacgaatgctgtctacattggcacccatggcaagggtatccttgctgatgatgagtccactggcaccattggcacgcgcctattccagaatcaataggcagaacgtcgaagagaaccgtacgaccctccgtgagctactattctagcagccctggtgctatacagtacatcacccatgtgatcctcttagatgacactatgcaccacaagaccaaggatggctatccatcttgatgatgtcctcaaggacgcaggcatcactgcatggacatcaaaaggggggggttttt

SEQ ID NO: 160601 - DNA, 395 bp, Zea mays
  Clone ID: MRT4577_78047C.1
ctacgcccaacgacgacccctacaaagtggtggagaggacccaagtccttcgtcgcaaactcctgccgcagagaggtgattgtgtgatgaaggagggcgggttggacgctatgtggacgatgtcgtcgacgtagagttagggtaacaggtattagtgctgcgtcggaggacgaatagggacatgtccgatttggccttgacgaaggccagcgataccaatttaggaagcgaagcgactgtaccaggtctgtggtgcctgcttgaggccatatagcgagtggttgagcttgcacactaaatgaggatgagtggagttgacgaagccagcaagctagctacaatacactgtttcgatgtgagtgccatggaagaacgcgttcttgatgtacaaccga

SEQ ID NO: 160602 - DNA, 723 bp, Zea mays
  Clone ID: MRT4577_78048C.1
gccgggtcgggtcgcctctacggctctgcccgccggcccgcccgcccgctccctccctccccaagtcccccccagtccgcactgaccactgccaccaccaaaaactcatggcctctcgcgcacccatccctcctgctccgccccacctccgcctccacgccgcgtccctcttctcgcagcgcctcccactccctcgcgcgcgtgccccgcgatgccgcggcggacggagccgcctcctctcagcgctgccgtcgccgcccccctcgccagcctcgcgctcgcagggcgtctccacagctccgatcgagcgcgaactaccgggacccgcgcctacccccgctcagcagccgcaccaggatccggcgatcgccgcggaggtcgctcgcctctccgccgcccgcgagaggctccgcgcggcgcacacgctccgtgagaagctccgcgcgctcgacgctgagccccgcgtcgcggcgttcttcggcgaggagtccagccgcggggtgttgggcgtgctcgagccccgcgaggtgctcctgctgaaatgcctcgtcgcggcaggacaggagcacgtgctcggccatgagctcgattggtacggcggcgacggcggccatcacgtgcaccaccaccgcaacggggtcagtggtgggagtgccctgcgggatgcgctgtatagcctggccggtttggtcgggaagtggacctcggagggagtggtggctg

SEQ ID NO: 160603 - DNA, 370 bp, Zea mays
  Clone ID: MRT4577_78049C.1
ggcacccacgcacactcttatacgtcacgagtccggaccccggaggagccaagccatggcgtccacctcctgctggctcctccaccagtcaaccgcccgcctcggcgcgtcgcctggcctggccgacgacccgccgcgcagcgcccagctgctcgtctgcatggcccggatgcaggaagccgccgcggaccagagcgacgtctcgcgccgagccgcgctcgtgctcctcgtctggatacggccgacgccggcgccaaggtggttcctgacgtcgtggcataccgagaagcagacaacgcgttatgcaaaggccgagccagcacggactacatgatgaccaatggggactgctgcaagctgctgatcccag

SEQ ID NO: 160604 - DNA, 285 bp, Zea mays
  Clone ID: MRT4577_7804C.1
taagttctaggatcgcgagcggccgccctttgtttgggttgattgaatgagtgtgggccgcgaagttactcgagtgtggagagtgcaggcgcaagataattggggcttgtattacatagaagcagagagcagaagtaacatgtactggcacgcaagctccttgaaacagcgtactagtttgttttacatctcagcgaacttggatagtactgtagtatttcgaaaacagcgtacgtatccacgctgagtacgtgacgcgcccagaggcctggagcaaacgaactc

SEQ ID NO: 160605 - DNA, 435 bp, Zea mays
  unsure (1)..(435): unsure at all n locations
  Clone ID: MRT4577_78050C.1
attgctggggggggggggcggagtgatcccttgtggagatcccgtcttgtttgcatcgttggggacagnaacgtagccaaatttacggtccctcgcaaaattgtaattgttggaacaatctcaggctaggggggggggctgcggcccccaacccgttcgctgaacgttgtgcttggtcctcgttcacggtccccctgccgtaggtctgcccagcattgctcctcagtcaagccccggtcactgggggtttgtttggttacgagatagggcctcgatggcgctggctccggaggtatgctctgatgttggaagggctggatccacttcccacagggggtcccccccagatgatttacttggcgtgccctggttccttctcttttgaagccatggctgctgctgngactgtggccttgttggggcccgggtctaata

SEQ ID NO: 160606 - DNA, 684 bp, Zea mays
  Clone ID: MRT4577_78051C.1
aattcggctcggcacgagggtcgagtgctctctccagtccccacgcccgatctcgcccccatcccatggacgccgatgagatggacctcgactccccatcctcggcctcccccgcgcccgcctccggctccctccccaccgtcctctctgagctcgccgccctccaccgccgcgcgtcttcctcctccgtcacctccccgcccttgtccctgccctccatcacattcctctcctccagccccgcagccgtcgcgtccatcttccctcgcctcgccgaggccggcgtccccgcatcctccttgctgcccccgctcgaggcctcgctctccgcgcacccgctccccgcagccgtcgcctacctccgcctcctcctcgccccggcctccccgcttctcaccctcttctccccgcttccattcctctccctcctcctcgtcatccgcaaggccgcctcctccttctccggagccggcagcgccgcctccaaccctagctccgtttccggcggcgccgccaacccccgcaagcgcaagaaccagcgccagaagccagcagcggctccgcgggcggcgccgtcgctgctcccgaaggcgctctccctgctcgcggacgccgcggggaggctgccgctcggggcccacccggacgcgcggcggtcgctcgtcgataccgccgcggagctca

SEQ ID NO: 160607 - DNA, 266 bp, Zea mays
  Clone ID: MRT4577_78052C.1
acgcttgaatttgtgcctctctgattcccttgagccaaatccctcacctcatagttccctgtggcgcctgcagaattctgaggaataccaggtttcccccatccttttccataaaacatatttatgtatccatactaaagagtactttctgaggagtacttcatagattttttttttaattgccttgtttgccttcagtttccttaattttcatggtttacatggatgtgtgtgtaggggctatatttgtgtatatacacgtgggt

SEQ ID NO: 160608 - DNA, 441 bp, Zea mays
  Clone ID: MRT4577_78053C.1
gggaaacataatctactgtttgataggacatgatgtccaaggtttacaagactgcgccttcgaacatattacttattatacaagacaaaccgagatgcatcatccttgcgacagactgcatcatgtaataaacagctctaactggagcatgcactgggaccctcttaacgcgcactgaatccgggcagtaaagtctgaatagagggagggcacaagcacgcaaaacttgaatggtgacataaaatgacccaccctaaccggggagcacaagagggctcaaaactttgtgctgatagctggcatctgccatgaaatggttcccacggagggacccggtaaacacaccaggcttggctaaccaaggctgtgggaaaaatactctccctgaaacatgcttttacagataaaatacccatggcactaaaaaaagaaaacgctgag

SEQ ID NO: 160609 - DNA, 218 bp, Zea mays
  Clone ID: MRT4577_78054C.1
ctctgtgcaggtagatgtcacaacgcacttctgttgaagtatggtgttgattaccttgtgctagcggtagatgcaaagctaaaattgtgcctgcctgacgtctcgcttcgatcggccaggggtccaaattacgtggcttggcggcacaccttttttcagccagggcgtgagtgtgcggaccctcacgccgattgactgattggatccgaattgggaat

SEQ ID NO: 160610 - DNA, 463 bp, Zea mays
  Clone ID: MRT4577_78055C.1
ggtaccggggcacctcttcgagttttttttttttttttttttttttttttttttttttttttttttttttttttttttttttttttttttttttttttttttttttttttttagaaaaaggggcccccctttaaaaccccgttcaagagggaaaacagaggtttaacccccttaaaagacaaaatcgggccccggaacccaggggcctaaacggaaaaaaaaaattttttggccgggaacaacccggggaaaaattgggggaacccaaaacccccaacccttttaaagttttgaaaaaaaaaaaaaggggatttttttggaaaacctaatttgggcaaattggcccatctcccaaaaaaaaagctatttttctctcccaacccccctcgggcctttggaaaaaggggcccaaagttttcaaaaaagagggccgccccttggggttgaaccctttccggcccca

SEQ ID NO: 160611 - DNA, 750 bp, Zea mays
  Clone ID: MRT4577_78056C.1
atggatgtcaaatcagctttcttgaatggaaatctccaagagaaaggagcaggagaatcaatgctgctcgtgggagtatatgttgatgacctgatcaattgtggaccgattgttattaatattaacagttttaaacaacaaatgatgcagacgttaagtatgagttatctgggactcctcacttactacttgggcatggaggtcagacaagatgtgaatgagattacaatctgtcaaaaggcctatgcatcaaagatagtggagaaatgcaacatggcaaactgtaatcccacagacaccccaatggaacagaggatgaagcttagcagtgttgttaaagggactgaagtagatgtaaccagatacagaagtattattgggagtctgagatatcttgtaaattcaagacctgatttggaatttgcagtaggtctttcgagaagattattagatatgtggctgagcatgctcattgcagacgtaaaggctgaaagtattcagaaattcagtctgttggtggacaaaatgtcagctattgaactgagcaagaatcctgtgtttcatgataggagtaaacacatcgacacacgttatcactacattagagattgtgttgacaagaacgtggtggatgtggaacatgtcagaactattgaccagcttgctgacatactcacaaagccgttgggaagagtcagactagcagagctgagatcaaggcttggggttggtagagtccaacaagattaa

SEQ ID NO: 160612 - DNA, 488 bp, Zea mays
  Clone ID: MRT4577_78057C.1
ccggccagcgcgccgccacgtcggcctcgaccgcggcgaacagcggctgcaggaacacctggaagccgcccacgaggtggatcacgatgcagacgttggcgaagtccaccagccagtagggctcgtagaagcccgacaggatgtcacccggcgccgcgttgccgaacgccgagtagcccaggcagccgcacagcatgtagaacgccgtggtcgtcgccacgcccaggaccgacgcctgccgcatcgtcttgttctcggccggcggagatcgcagcgtgtcctggatttcaatgagaacaatggtgtaggagtaggcaaacgcgatgttgccgagagcctggaacgtcagccatatcttctcctccgcgctaccaacgtccaccccgacctgcgtgccgtagagcgtcgtcttgcccgtgggacctgagatggtctggccgagggcgagcccgacggcgatggtggagtagcagaaggacatggcggcc

SEQ ID NO: 160613 - DNA, 400 bp, Zea mays
  unsure (1)..(400): unsure at all n locations
  Clone ID: MRT4577_78058C.1
gggaatcctcccgccgcggcgncgccttcccctcctctttcctccgtccatgctccgccgctgacacgttcgcccgacttaaccttacgttgggacggcggcgccggcgccgtcgccccctggatcatgcgttgtgcattgcccagaccttcctatccggccggtcgccagccgacgggggtactaggcgcggcctccgtattacgccggctcttgttgcgcgctctccctgaccgagtcactcacatattcacgcccaggtgccgctgcgngccgtagttggcgaaccggagcctgccattgcttgtgctgcctccgaagagggggtggccgttgggtctgtccctgtggcgggagcgggggtaccgccgccgcctcgcgggccgatggttcggcccgg

SEQ ID NO: 160614 - DNA, 515 bp, Zea mays
  Clone ID: MRT4577_7805C.1
atcaacgatacccctctcgcgcgtgtgatgtttggcacgtgccacatgcttccccacatatgcatgcacgagtctcctattcatcttgtcgaaactgcctctctctactcatctccgcccactgtctgctatatccacagcttaaacggccgcacgcctcctctgttctcttgcgagctgtcctccatgcggcggccacactatcaatggacccggccacttctccgaaatatgtgagaagggctcggatctactcaagaaggactatcctttatgaccataagatgaccatatgctccggcatggccatctagagtgggaattacttccactctagtaaataaaagaccctgataatctctttgtggaaggtgactttacgagcactctatgtattactgttagaagaatgcgtggaggctgaatctaatatatctactacatttacacgagttggacgactatggctgcgaactccctgacacttctgtgtgggtggctgactattattatgg

SEQ ID NO: 160615 - DNA, 290 bp, Zea mays
  Clone ID: MRT4577_78060C.1
ctccgagatcgggatagcggcgcccagcctgcctgctccatcatggagccgcctgtgctcagcggcttcagcaaggacctggccatctactgagctctccgaggtctgggacaagaccttcttaggcgacgtgatatctgtctatgctccatagcaggaaactgttcctggcaggctgtatagctgcactaatagagatgacagctatgtcagctcctctatgttgggctgtaccagatctgatttgcagtaaatggactcatcatgcgaccactctattggtcttagca

SEQ ID NO: 160616 - DNA, 374 bp, Zea mays
  Clone ID: MRT4577_78061C.1
gggttgggcaattcaaccaccaaaattaattaggaactaggtgtaagcctaattccctttcagtttacaactcgaacagtgctcaaatctcaagaacgatgatccgattgcgtgaatgcagagtctagatgccttaggatgtttcttgtaagcttggtgttctgctccatgcgcctagtggtctcttttatagccccaaggaagctaggagccgttggacatcagtttggtaggcaattcttgcattctgtcgagtggtgcatcggacagtccggtgcaccaccggacaaccactgtagcagttcggtgctcgatttccttccataccgggcgcagccgaccgttggtcctcgggaccggttggcgcaccggac

SEQ ID NO: 160617 - DNA, 514 bp, Zea mays
  Clone ID: MRT4577_78062C.1
cgtgaaaaacatacattaatgtaccatgatcgcaattagatgacaaaactatacaaccgagctatgacgaggcaccttttcggccagcagaatacacaacatcgctctagcgatactgttttttatacagaaccaatgaggcaacgcgtactaatatcatacaagcgatctgaaggccataggtacttggggacaacaatctgttttttgacgcgttccagtcctgctgttgtgcttgcctctcactcggaggaactacttgtgactcataccactaagtttactgagcttctccagacgatcaaagctcaaaatctagttgatataatatggggtcgaagacaaaactagagaacctgccgttcgagtaataatacttaatgatgaggaaccgatatggcaactataactggctatgattggccactaccgctataaggtgcactagctcatctagcgttagattgctggtgctcatgttcatgtacatatcagaacttgttgcatacgatgt

SEQ ID NO: 160618 - DNA, 308 bp, Zea mays
  Clone ID: MRT4577_78063C.1
gtccacaacatatttttgggacgcacatcagtacataatggttctgcaaatagagcgtccaatattcaccacaccataacatggcacatttgtaaaaactgcgggcccaggtcatcaaaacgcggcgtgtacagtactacaaatgttagcgtagagcaatcaattcctgttaccagacctccttgttagccatgttgaagtctcggccctcatatacgttgcggtccttgtggacagcaaccacacccctgcaatcccccacgttgcgcttattaaacaacttcttgggcaagcacttaaagtacccc

SEQ ID NO: 160619 - DNA, 510 bp, Zea mays
  unsure (1)..(510): unsure at all n locations
  Clone ID: MRT4577_78064C.1
cggcgctgaggcggcggtttcgntatacttcccaatttcaccgcttctgcctccggntggttccactccgcaccgcggcgcggaggcgatggccgtcccttcctccgaccgcgcgagacgccccttccccctctcgccctcgctctcgctcttcctcctcatctccgccatcctcgtcctcctcttcctcttcctcgacccctcgcccggatcgctcgcgttcctcccctcccgtctctccgcatcagccccttccctcgcacctcctctaaccccccagcaacaaagccgcgccccgcgaagcagaagcccacctcactcgagaccagacggctcgagcgccaccgagaaagcggaggagggcactactgccaccgcatcgcaacccgtcacaaaagccgatgccaacggtagcgcatcgggaccatccgcaaaggaatccagcggaggcagcggctcaggcggaaacagcggcgccaggggagccggcgcggacggggagacgggtac

SEQ ID NO: 160620 - DNA, 294 bp, Zea mays
  Clone ID: MRT4577_78065C.1
gcccaaagacaaaacatatctaaaaaattagtatacaatctactcatatgcatatgccccagtatgccagaaagctaaaaggggctatacttcactaactagaatgcgtcgttgccccttcactcaatgaggttacataggattagcctgaagtataaggacacgtgcctacaccaaagcctaatatatagtctactaatacgtattaaaaaagatgacccttaaattgaccgttatgtttgtatataaacaaattgacatgacctgcttcagaattaatatccaaaaccctct

SEQ ID NO: 160621 - DNA, 388 bp, Zea mays
  Clone ID: MRT4577_78066C.1
aggatcaagacacttcatattattcattgaacaagatagaggtgacacatgacaaaatcagaacaccgcccggatttgtttagtagcctcaccaggcatctgattaaatttgattgaataaaccgaacatatgtgtccaaaatcacaagtgagaagcacaagtaggaatagatattacagtctttgaataggagaaaacggtaaccggtagggcagccgaaaactttgtccacgctaacgaagaaacagctacaaaatagagagacgaagcaggagggtcgcgataaaagctcctcttggctttctttcttgggtccgaagaattagaagcattttctgtgcacaatggatgggccagactcgtcgtactcagcctttgcaatccaca

SEQ ID NO: 160622 - DNA, 633 bp, Zea mays
  Clone ID: MRT4577_78067C.1
aattcggcacgaggcgcaaaccaagcgacgacgcggcccacgccatgagctgatgaacattgggccagtcgctgctccagtcctctgctcttccttccgcccacgccagcgccaacgccagcgcctcggggccgtgcgggggctagggtttggattcgtgggtggagtccgaggctagatccagcaggaggaggggaggggaggggaagggttggtgggtccagccggcggggatggccgccaccgccggggcgtcggacgacggcggtagcgtgggcggcggcgggggcggcgagcggatgaagctgctgtgcagcctgggcgggcgcatcctcccgcgcccgggggacggcacgctgcggtatgcaggcggggacacccggatcgtgtccgtgccgcgcggggtatcgctgccggacctcctcgggcggctcgccgacgcgtacggcggcgccactggcccgcacttcgccgtcaagtaccagctccctgacgaagggctcgacgcgctcatctccgtgtcctcgccggaggatctcgacaacatggtcgaggagtacgacaagctcagcggcgccagcccgaactgagggtgttcatcttccccatcctggatgcgcgggcgggcagcgg

SEQ ID NO: 160623 - DNA, 188 bp, Zea mays
  Clone ID: MRT4577_78068C.1
tcgtttttctgctaccactaaagggctagcactagaagtagcaccaccgtcgatcgagaccgttcgtcactgatgcgcgcgcattatgactacacacacgcaggccgagacgaatgcaggaggacgttgacgccgaccgagcgaacgaagagctaatgcagagctaactgaacacatgagtaagctgt

SEQ ID NO: 160624 - DNA, 172 bp, Zea mays
  Clone ID: MRT4577_78069C.1
aacctattaatcttactccgatcccgaaggccgacacatattgaccggaatgctatgatgctataccatgctaaggtatcctgaccgaagggaccaggcatacttggcaatgctcgatccgcctgtggttctacaggagttttttaacctagtacaaatgtgggatctgatt

SEQ ID NO: 160625 - DNA, 572 bp, Zea mays
  Clone ID: MRT4577_7806C.1
gggtgtcagcgcctgcgccagcggagaaaagaaacagagttggaccggccccgctcgggcgcctctgccgacgcgcacaccatttgcgctaccgccggggagccctacctccgatgcctcctatgactaaccttcacatggctctgtcgcggtatccgccccgccgcggccgcccaggcgaggccgacgccgcggacgaggccgcggatcgcatgcggcgggactagccgctggcagaggaagctcgtccggtgggaaatggatgcccaaggcgggcgcggacacttacgtagccccggagggcgtgcttgccgtacaggcgaccgcacacgacggtgcctctttttggaacgggtgaccgggctggcggggcggatcctaaacaacgatcactgctggagctgcctgcgacagcctgcacgagcgatgcgttctgcatgccgcatgagccgctcccacaggggtgacagctgacacaatgcgggaccgcgccgtgacagcgagcacctactgtgctggcgcgctcttgcaccatggatgctgagcgcataatcggacattactctgtgctg

SEQ ID NO: 160626 - DNA, 891 bp, Zea mays
  Clone ID: MRT4577_78071C.1
ttttcggaagattgcaacagggtcgtccggtcgcgtttctcctacgcggtccgtgggctgtgcggctgtgcctgctgttgcctcgtctcctcgtttaaacgggcgaactcaagattgcaacagggtcgtccgccgccaccaattgctagcgcaatcctagccctagcccagcgccccctccggccctccctgcttcgtgcttggtagcgatggcgtcgttttctgaagcgcccccggggaacccaactgctggcgagaagatcttcaagaccaagtgcgcgcagtgccacaccgtcgacaagggcgccggccacaagcaaggtcctaatttgaatggtctgtttgggaggcagtctggtacaacacctggctactcttactcttcggctaacaagaacatggctgtgatttgggaggagaacactttgtatgactacttgcttaatcccaagaagtacattcctggaaccaagatggtattccctggactgaaaaagccacaggaacgtgctgatctcattgcatacctgaagaatgccactgtctgatgaggatgctgctgtggctctaaagatgaagagcagcgattcttttttgcagctaaaataatgacacgaatttactttaatttgacaggctggatgaacaagaaagctaagaactccaggtagttctgtaacggttttgtctattgctgggggcaaacaccaccccagaagagcttttgattagtggttgaaatgtgacaccactataatacgtttgacctgacgagcatttaaacacacatttgggaagcttttgattagtgttttaatgttcgtttttcatgctgtctttgaaaagctacctgatttctcttaaaaaaaaaaaaaaaggcggccctcgagc

SEQ ID NO: 160627 - DNA, 121 bp, Zea mays
  Clone ID: MRT4577_78072C.1
cgctatgtcgtacaccggatatcctctagcgccgtcccacaatcgggcttctgaggttctgctgacgtcgaccgcgccgactacaccctcgattgcgtacctcgctgctgtgccctctcca

SEQ ID NO: 160628 - DNA, 1457 bp, Zea mays
  Clone ID: MRT4577_78073C.1
gtaccctcgggtcttccgggaagcttttcttcaattcattaagtggagggataaaatttggtttctatatttttatactacaatttataataacgctccaactaagggcctatgtggttcttggtgttaaaatttagcactacatttttaacacttagattgaaatatgagtgttaaaaggtgctacaagtgaagtgctaaattttagcatctaatagaactttagctccaagtgtgctaacctttagtacttgttaaagtttagcatataacatccaagcatgtcttcagtatttcctctatatagccaacaatagtataaagtagtttctctatattgccaacaacagtacaatatgtatattctgcataaaactattgtcttgattgataagtgcttaaattatgtttaactcacttggaagccaaaaaaagagtatcccagttcttaattttgtgctagagttttttttgtatatataagaatgatatgcactggatattataggctcggaatttgctgtcagattttatattactcatcaaagaagacatgacaactctatgcaaaataaacgtctcaaataaactgatttctgcaaaaaaaaatgaacattaaaatgacctagttttccaaagctaaacgtcattttgctggatgttgtagtgtagatctcaaagtctgcttgttgagatgtggatctttcctcatcacggtgaggtcctccgttgactagtagcgtatgcgttgctgcgtgctgtctcggatggatggtggttcatttccaccaagattctttacttaaaatttctgctcagtagagatcctaccatgcaatcgattgcttcaagatgtttttcttttttcttagagacattattcgttttagtattttagtagattatttaacggatgatatatttggtgcacatagaagtttagtgcatatggtgtatatattaaatcatccgttaaataatcttctaaaaaaaaaaaaaaatagctccaaagtgtgctaacctttagtacttgttaaagtttagcatataacatccaagcatgtcttcagtatttcctctatatagccaacaatagtataaagtattttctctatattgccaacaatagtacaatatgtatattctgcataaaactattgtcttgattggtaagtgcttaaattatgtttaactcacttgaaagccaaaaaaagagtatcccagttcttaattttgtgctagagttttgtatatataatataggctcggaatttgctgtcagatttttatattactcatcaaagaagacatgacaactctatgcaaaataaacgtctcaaataaactgatttctgcaaaaaaaatgaacattaaaatgacctagttttccaaagctaaacgtcattttgctggatgttgtagtgtagatctctgagtctgcttgttgagatgttgtt

SEQ ID NO: 160629 - DNA, 611 bp, Zea mays
  unsure (1)..(611): unsure at all n locations
  Clone ID: MRT4577_78074C.1
ttaggataatagggaaagccgncgcacctggaaatcctttgcattagctttcagccacggggaattggtcctggtgattcatcagggcacgctcaagcaattgaccccttcgctgtgcatgtctggtggacgaagataccgtgattcgtcgttggagtgccgtcaccaccgcagagccgcgtctcatcgtgggtagagaacatcacgcctcggttcctggttgggatttccggtgatggcgccgccgtgggctgagaacaccgccgcctgtgcacagcatcggtaaggaggaggagatgtggggatcgtcaatctcgagttcgacggtcatgattagagcactgttacctgtttggctcgataaatcctgagcgttgatctgtgaatgggcggatgagagggtgtaataaaattggggccattgatctatgatcctatggtcgcagtcacatagcggttcaagattaaatctgggccatggatctcagatccagtgacctccttcacgtacatgttcgggtaaaatatagggatcctcgaatcttgatttgacagccataaaagcgcgcatgtatatactgtcgtgttatatttgctaatgagtccctcgg

SEQ ID NO: 160630 - DNA, 334 bp, Zea mays
  Clone ID: MRT4577_78075C.1
cccggcacggactgcaactaggtccacgcgctcacggatcacgccggcgtcctgctcacaaggaatgttggtatctacgacagccagcttgtcgctaacccgctcggctatctcacagacgtggagctcgccgtctgagacaccgctggcatcaagcagcatggaactcagcacgacgacaacgagcagtagactatagcacgggcgagtcccggacatgctgcacaatactacaccgatacacagcgaacgcatggcatggatagcactatctaccgcaagaagtcgcacacaaggatcatgacagatgtatcacactgcttgattcacttgc

SEQ ID NO: 160631 - DNA, 555 bp, Zea mays
  Clone ID: MRT4577_78076C.1
aattcggcacgaggccggcgaccctgcccctgccggcgaaccagtaccaaccccattgcaaggaccagcccagcgtcgcatctcaacatcccgcatctcccacatcgtgcgcacctacctagacctctccagttccaggaagcgccgttccgctcctaagaaccagcccaaggccggggacaaggaaagggatgcggcggccgccgaaactgacgggtccaaggcggggccgtcctcgtcccacccgtctcggctgctccgggagctgggcatccgcgtctcccgctacacgcatgaggagcgccgggatatcatcctccgctacatgcagaagcggagcggtcgccagatcgtcaaccgcgcggccagtaaggtcccatcgaggcaggctctggcagtcaggcggcggaggggtgctggagggaagttcctcggcaaggatgacgcccagattacagataagctagaagaaaaggcagaagaagagccagaattgccaccagaagtcgtctcaaatgctggaggagtacccatagttggtatggtctttgagag

SEQ ID NO: 160632 - DNA, 369 bp, Zea mays
  Clone ID: MRT4577_78077C.1
tttgaacactttcaccataacgcgaagggcatggggggtggtggtagtgaccacaagggcggaggacaggcccttattcgacggagacaccacggagttagacaccaaacagacattctgcggaggggtattagtgatagaacggcccagcgccaccaccaacccgaggctgactagcctcgctgtgtaggggaactcaagcccgctggacgcggacaccgaagaccccggggtgtgactacttccattcatctgagagtgcggcggaggatccctcaagggaggaagagcactatacggcaaaggtttggccatgaggaagggttctaaaggatcatttcctgatgctgttttggttgctaagatatt

SEQ ID NO: 160633 - DNA, 2028 bp, Zea mays
  Clone ID: MRT4577_78078C.1
gatagctacacaacacaagaaagagctgcaaatggcaagccacatcgcagtttgcagctagcggacacaacagtcaggcagcagcagcagttaccaccccgtgctccaccgtgttgcctccctcccaagtcccattggccgccatgggctcctgcctctcctccgagacccccgccgccagcgccggcgcggcggcgtggtggcggaaggggcgccgcgggacccgggaaggcgcggccggcggcctccccagcggcggcaagaagccgcccggacgagggggagagatgacggaggacgagctcgcgcgggtctccggcaggatgtgcggcaacggcgccagcgcggtggcgtgcctccacacgcagcaggggcggaagggtaccaaccaggacgccatggtcgtgtgggagagttttaactcaagtgacagcatcttctgtggtgtgtttgatggccatgggccatacggtcattttgtcgccaagaaagttagagattcacttcctgtcaagttgcgcacacaatggcagactagtgctaatgggccctgctctagtcctcatcaaaatggaagcatctctggaagtatcaactccgaagaaacagcttctattgtcgatgacgaatggggagatggtgataacactgagaagcttcctgagatgtttcttccacttaagcgatcttacctaaaagctttcaaattgatggacaaggaactcaagctgcatcccacagttgactgtttctgcagtgggtctacggcggtaacgttggtgaaacagggattggaccttgtaattggaaaccttggggactcgagagcaattatggggacaagagacgcctctaacaatctaactgctctgcaactcacagttgatttgaagcctaaccttcccagggaagctgagaggatacaacaatgtaaaggacgagtctttgctcttcaggatgagccagaagtcgccagagtgtggttgcccaataacgactcccctggactggcaatggcaagagctttcggcgacttctgccttaaagactatggtttgatatctgttccagagatatcgtatcgccttctcaccgagaaggatgaattcataatactagccaccgatggggtgtgggacgttctctcgaacaaggaggccgttgatattgtggcgtcagccccgtctcgggcaacggcagccagggctcttgtcgacagcgctgtcagatcgtggaggctcaagttcccaacatccaagagtgatgactgcgctgtcgtctgcttgttcttggatcgtgctggctcggctcaagagagcgagagcgaagccattgtggagacggcagagcccaccggggaggaggtctgcaggcgggatgccggtgaggtcgacgaggacatggcagtcgcagatgctggtgtacatgtagtatccagcgcggagcacagtgccgaggcgactccgttgcagcactccaccacgtcaagggagctcgacgacgagattgtaccggcggacgagcacgagcctcccgtcgtcctgaaggagcctgcgaggtgcgggtctgctcgcagcctggcagagtgcatatcgacgagcgaggaagaggagtggtccgcgctcgaaggcgtgacgcgggtgaactccctcctgaacctcccgagaataatgtccggcgacaggagatcggccagctggaggaagcgacggtgaacagcagaggaagctctccactggagttcttcgccgagttcaaatcctccctcagtctctgggaatcttccccaggttgttttgacctcaaccgcgtcagcgtgtgcgttccggatcgtttgtttgttcattcttgtgccttttttgccggtaggtgttccatgcttggggcttctctgtgtccgtttgtgcatagaaaagttttttttttggttctgtgagaagcttctgtaaaacatgcagcacctcctggagtgctatatgtgtatcattaggtcatcgttttgttcatcttatttggtttttggtttgt

SEQ ID NO: 160634 - DNA, 526 bp, Zea mays
  Clone ID: MRT4577_78079C.1
aattgcccgggtcgagcgagctcttttttcggccgccgcccttttttttttttttttggaacaaaacttagtatccacccggggaacactcacacgcgcggataaagtcttaaacaacactcatggctttaaacgtaccatttgcacgttattaactcgacacaggctaaacggcagtgatgcaatagttcagtaacagctgacgtcgaacaatgatcgcagatatctttattgctttccacataggttatcctcttaagccaaactacagcacccagctcagacacatgcatttctctcttctgcggaaggccttggctcacctttggcctccagattgggttccttacttctccacactctttgatgatcgtcctacagctcaccgctttgaccttatgtccacggaacagcaaaagcgactcaagaggagggatattcagaaaagggtctccaactactcatgtggcttagtggggaacccatctttacccttacccagcttcactcattcttgagaaaattt

SEQ ID NO: 160635 - DNA, 267 bp, Zea mays
  Clone ID: MRT4577_7807C.1
agggcgcggcggcggcagctcacatgatcaaagatatggaacgtcatccaagacaaacaaaggcctctagcggcccgaccacgccaagagttctgtcacgaacttattatgaggaaccacctacatctgcggcgcggactgaatgatggtgaactcaagcgccggaacgccggcgggcaccaagttgtacggttcacgggcagagcctttaaaggctaggggctacgcgttcaaatacgtgaacaagtcatgcaaaacaacgcacct

SEQ ID NO: 160636 - DNA, 633 bp, Zea mays
  Clone ID: MRT4577_78080C.1
accttccgctctcattcgcagctccgttcccacctgagcccagccggtcggtggctgccggcagcaacctgctgctacttccgttgctcctcctccctcccctcccactccctctcagccccagctcgagcgagagagcatctccctcccgagcgaccgcgtccgcctccctcccctgccccccgtgcggttcttggtgacggcgcggcggcttggctggccggcctcgcctccagttgacccgactgactctcccccattcggtcagcccggaggaggaggaggaggcggaggggatttgcttgactttttgaagcttctcgctcgtttctctcctagcgttgcggctgccggccaacggcctcgcggatttttctccagtctcaccccctccttcaagtggcggcggagatcagctggatccaaaagcctcgccagaaaccggctgggactctagggttggctgctcagctcagttgtcttcggcggctgctcctcctgatccctcccgttgccgctggacagctctctctggctctgctgacttgacccgggacggtcgaaagaggaacagagttcggctgtggatcttcggtaaaggaagctcattcatcctgacatctggtacgcaga

SEQ ID NO: 160637 - DNA, 1214 bp, Zea mays
  Clone ID: MRT4577_78081C.1
gcaggcgcaggctccgctccgttcccccgctgtagttcgagtgttcgacccggcggccggcggcgacgcgctcgtggtttccagcgatgtcggcgcaggcgggtccagggacgtactccccggcggctgccgcaggagacaagcggcgggagaggaaggaggagctgcggcgccacctcgccgaagacgccgactggccgcgggccgacggccgctccttccacgactgccggccagcgtttatgcagacaggaccaactactgctgcatcagggtctgcttatgcagaatttgggaagacaaaggtcattgtatcggtttttggaccaagggaaagtaagaaagcaatgatgtacagtgacgttggtaggctcaattgcaatgtgagctatacaacctttgccactccagtgcgtggacagggagcagacaacaaagagtattcatcgatgcttcataaagctctggaaggcgcagtaatgctgcacactttcccaaagaccactgttgatgtttttgccttggttcttgagtctggtggcagtgatcttcccatcattatatcatgcgctagtcttgcattggcagatgctggaatcatgatgtatgaccttgttacgtctgtatccgtgtcctgtttcagaaagaacatcatcatcgatccaacctcagacgaggaagcatggcaagacggaagccttgtggtggctttcatgccagcccgcaaggagatcacgcagctcacgctcactggagagtggagcgatggcagaataaccaatgcagtagagctctgtatggatgcttgcagcaagctgggtgacatattgcgtgaccgcttgaaagataccgctaccttgacgtgtgaatgacgtgttagagagagcactggcaacaacagatgttcttagctgtacaaattctgtaggcaggggaggctgatcggcctgatgtttgagtgagcatgatgcatggttatgatgatggtctccttcacggcaaaagctgtcaaaccgggaagaaattgcagggcagtgtgtatttggcatgtaacgtacttctgactgacctttgccttcatgtagcatctgtatctttctttttccgcgtactgtaacacttcttactctaccaggagctggaatttttttggttcgggtgaaaaaacattttgctgctctcagcttttcaaccaaaaaatccaaaaaaatata

SEQ ID NO: 160638 - DNA, 1038 bp, Zea mays
  Clone ID: MRT4577_78082C.1
ccctccaacaaccggagctcgcgcccccctcgatctccggacaaaaatccgccctttttacgcccgccttgccctttctggccgcgagagcctccccacccccacccgccacgatctcgctccctcgcgtgcgcgtgttcccgtcgcccctgtctgtccctttcgcccgatttccttgcggttgaggaggttgttggggcgggccgggggagaaaagaagaggaaggaagttagccccgccgcgccgcgcctcgccgcaccgccgccgccatgaacgcgctcgctgcgaccagccgcaacttccgccaggccgcccggctgctcggcctcgactccaagctcgagaagagcctcctcatccccttccgcgagatcaaggtcgaatgcaccatccccaaggacgacggcacgctggcctccttcgtcggcttccgcgtgcagcacgacaatgcccgcgggcccatgaaaggtggcatccgctaccaccccgaggttgatccagatgaagtaaatgcacttgctcagctgatgacatggaagactgccgttgcggcagtaccatatggtggagcaaagggaggaatagggtgctctcccggtgatttaagtaggagtgagttggagcgtctgacgcgtgtatttactcagaaaattcatgaccttatcggaactcataccgatattccagctccagacatgggaactaattcacagaccatggcatggatctttgacgagtactcaaaattccatggtcactccccagctgttgtcacagggaagcccatagatcttggtggatcattaggtagggatgcggccactgggcggggtgtaatgtacgctactgaggctctcctggccgaatatgggaagtctatttctggatcaacctttgttattcagggattcggtaatgttggttcatgggctgcacaactcatccatgagaaaggtggtaaggtaattgcacttggagatgtatcaggcacaatcagaaacaaagcaggaatagacgtacctgctctgatgaagcac

SEQ ID NO: 160639 - DNA, 407 bp, Zea mays
  Clone ID: MRT4577_78083C.1
aaaggaacaaaatggggggccgcctttaagttacccatatggtagggggcgccattctggggtaggccatgcccccgccgaggggggccggggaaacttctggttgcccatcctgcggggagatatgggcccgggctaagggcccttacttggaaacactggaaaaacccgggttttggcgcaacagggcacacttggggccactttgggcatatgcatgcttgccgaatgacatttagctacccccgggggcgggaacataccagcatttggtgtgggagtcatgttcgtgcacggcgaacaatgtttgcttgcacccgcgggccgacgaccggggggggggggcggccccccccggtgggtgggcccccgtcatgtctggggccggttgggtctgccccccctgg

SEQ ID NO: 160640 - DNA, 601 bp, Zea mays
  Clone ID: MRT4577_78084C.1
actgcacccgtcttcatgggtcctgagatctttagcatctttggctgaggctgggcttgaggtcgtcctccgtccgagatgagctcgggcgagacggaaattacttttccgtgaagggggccctcaggcgaatcaaggatttttcaagggtgcagccttcgctagaggatgggctggggcgaggcgtagttttgagggaccgttgaatgggcaacaatgctggtttcctacttggaaatattttgtgaccgctcaaggttttgagtgatgtttaaatgtgttcattctaagcatgggggttgtttctgctgaacatattagtctggtacctcttgttgcctgctgagtttttgcattggattaatgacatttggacattcaatcaatgtgattgggattaatatttatcatttctactgcggattattaccccctccctaaataaccgttgttctcgctttctgaaagccaaacatactcaacttttacaaaatttttacaagaaaatagtaatagttattattcacaattagtataattagttttgtgaataaaggatgccaatattttcttggaaacattaatcaacttgaaaggaaag

SEQ ID NO: 160641 - DNA, 167 bp, Zea mays
  Clone ID: MRT4577_78085C.1
atgcatggcgtctatcttgtgctggctgcaccagtgcagcagccgtttggccgtgcaatagacagagcgtacatgagcggacagaggatgcgcaactgataacgcggatggctcagaaacaacagggcgtcagctacggcgatgcaggctgcggggtcggcacgacc

SEQ ID NO: 160642 - DNA, 185 bp, Zea mays
  Clone ID: MRT4577_78086C.1
tttgggccaaggttttttaaacattctaaagaaatggggaccaccttactttggttactaaaaaaagctagatcagtttccagctccaggtggctccaaacccaatttttgggattgacaggtcttttaaaaaaagcgtccaactttaaccttggacccgttttttaaaacaacattttttccgg

SEQ ID NO: 160643 - DNA, 179 bp, Zea mays
  Clone ID: MRT4577_78088C.1
atagcacctgcagcaagatggatgtgggcagcaaagatgtcctgatggagagcccgccggactactccgcagctccccggggccgatttggcattccctgctgcccagtgcacctgaaacgccttcgtatcgtggtggtggtggtggtcctcatcgtcgtggtgattgtgggagccctg

SEQ ID NO: 160644 - DNA, 202 bp, Zea mays
  Clone ID: MRT4577_78089C.1
gttgttttactgtgaccattctgccgacgccatgttcgccgcatgagcggtcgttgcgaacgagctgcaatgcgatgtctgcatatggagagggagctaatggacgtcgccgcccaagacaatgaccatcgaccgaggatggaattgcttgtcgggggcatggcaatctgggattctgctagaaccatattgggcctaaatc

SEQ ID NO: 160645 - DNA, 720 bp, Zea mays
  Clone ID: MRT4577_7808C.1
gtcccgcgttcaggtgtcccgcccgcgtcggaagaaagagagcttgctcccgtcgggcagtcgcggctcgcgagtcggaggagatggaggatgacggcggcgggaggaagcaggacacgacggcggcggcggcgtccaaagcgcagcgagaggccgcggcggccggcgtctccgtgcacgagtggctgcagcacgtgaaggcctccttcctcggcctggtgggcaagttgacggcgaggagcgagcaggaggcggcggaggcggacatgcgcgcggccaaggcgcaggtggaggcgaccgacgaggcggaggccaagaagaagcggctcgcagatggatgatgacccatccatggccgatactgtagattcagctggaaactactgcgtgttgtacatacaacctacctgggggtagctcaaccctagagctaggcctagagctaggcctgggcaatcggtttttttggttcggttttttcagtgttgtatacggtttttcggttcggagttcggtttaaactgaacatccgaaatctatctcagtcaagtagtcaacagagctacatgtatggctgttcggtttattgccccagcccccagcttatagtcgaagccatatgtctaactgacctgtttggcacagtcttgttgaaaaaaccaacagcttatttgataagttggtaaaaaacagcttctgcttgttggctgtttttgcttc

SEQ ID NO: 160646 - DNA, 398 bp, Zea mays
  Clone ID: MRT4577_78090C.1
ggacctttgggctgatttatgtgcttgtctacccttacccgttctgtctgttccctcttctcttatcttatcttaccttaatgtagtggttctgttttgtcccacaggttgttgtttgtgttatactgttattgctctgtattgctgtggttatttacctctctctgcttactgtactgtcttggtctttagtgtaactgacttacttgctttcaggcgcgtcctagtcacgtagcctagtagtgcgtccttttcagagggaaaagtgcgcacgagtttagcgaggaaaggtagcggaggccacgggagcgagaggacgaggactaatcggcgtagtactaggtgtaatacggtatcaaggaggacgcgccctagcgtaaggggcgtcgtgagtagta

SEQ ID NO: 160647 - DNA, 338 bp, Zea mays
  Clone ID: MRT4577_78091C.1
ggtcgtctctaggggcgctcgaggcgcggtgagagctcaaatggctacgatcgtctcttgcagcttcttagcacatacagtcttaacgtactttggggtgggcaccgacggctttgctccggcttgaccagttgcctgctcaataagttacgccaagtgctttctagccaccgtaggctctaattgagaatctcttactttttctgccacgtgattggctaatttgcaatagccacacatgtgtgagcgaccaggcacaacaagattattatctggagtaactttgtgaatcaatccgaaaaacgttggaaataattgatctggagaatggcgatatg

SEQ ID NO: 160648 - DNA, 374 bp, Zea mays
  Clone ID: MRT4577_78092C.1
cggacgcgtgggcgacagcctaattctcagacgaatgctatctggactggcctcgacctcgagcacaaaacgctgtggccgagcggatgagaggaggatggcttccaccagcctcagctcctccttgcgcagggctactgcaaactagcaggagtcccaagatcttcgtcgtaccacacccagctgacctggtgctcgaggaatccctcccagaacgcggaggcagagctcctccggttgagctacccggcgaggaaataacaagcatgcaaagaccagctgccggcgggccacggatggcgaccaagcggcgccgtccgcggcgcaagaaacaaccgacacccctccttcttctccggcctttcacgttccca

SEQ ID NO: 160649 - DNA, 347 bp, Zea mays
  Clone ID: MRT4577_78093C.1
tttttctttctgatcgcaaaagaagacctactgcctgggacattttacttaagctcgtggaaggaaccaaattgggccctacaccatcctgagaaaatattacttacagatattggtaagccacagatgttttcatttgaactccctgaatgacatgacataaagctttagttcgggacgcctgtgtgggacaggtggatttggaaatgttcatgaggagataccacatgggaactatggtagcgagggccgggaagaggcttaaagaaaaaatagggattttacccaaaacagttacagaatgagggccataatctgagcagaatcaaccacacgaatattcgtac

SEQ ID NO: 160650 - DNA, 286 bp, Zea mays
  Clone ID: MRT4577_78094C.1
gaagctcggaattcggttcgagcgcaaacggcgaaaagaatgtttatatcaggggcagctgatggtagggagagtcgggtttggggcgacggggggcccacccccctcccaaacggacctcagctagccaccacaagcaggggtagttcgaagaggagaggtggcgctgccggcggccctgccaagaaggaccgattccatgccgtccacaaggtgccggccgccgacggtcaagaccacagagccaggaacctctagatcgtggcaaaccaacacagatgaggag

SEQ ID NO: 160651 - DNA, 432 bp, Zea mays
  unsure (1)..(432): unsure at all n locations
  Clone ID: MRT4577_78095C.1
cacgcacccaacgcaagcatgcactagagcgggcggccgtccttttttaanntttggatatcaacccgnaaacaaccgccccaaacagagaggggatggataaaaaaaacaaaacgggaggggcaaaaaagcaaagaaaaaacagggcccagaaggaaaccacataaggcagacacggggcaacacccagcgaccccggcactggggatggccaaagcaaaagccagcacaagccagagggaggcctcggaagcaatcctggaaacacttcttttttcgataaaggttaggagaaacagtatcccaaggcagggaagtaacagggggccaacatcctacagcgcgcagaacggctcctcccccaaagcagacgggacagtcacaacaagaccctggccgctaacaaacccttcctggaacggggccacaaga

SEQ ID NO: 160652 - DNA, 226 bp, Zea mays
  Clone ID: MRT4577_78096C.1
cccactcctgcgctgcagaacaagtcggtgactcgttccatggctctgtcaccgagggctctctgtcgactgagctaccagatcgatgaggagcacaggcggacaccactcgcaagcaacaactctccgcgtactacaacttacatgccagtaggagccctgtactcatacagaacgcgaacaccgcatctctgaacgagcactgcatggacgagctccacccaca

SEQ ID NO: 160653 - DNA, 168 bp, Zea mays
  Clone ID: MRT4577_78097C.1
aaccggcataacatagctctttcgccccctttttgagcacccggagccgtagggagtcgggagcctcatcctcatgcttgccggcccctttatcgcaccttggggaaaggaggcccacatcatcgtcctcaggatcccctaaaagcacctgtttgagaaggcaccgcc

SEQ ID NO: 160654 - DNA, 345 bp, Zea mays
  unsure (1)..(345): unsure at all n locations
  Clone ID: MRT4577_78098C.1
cgcggtcacagccggaggtaccccgcgcgcgcgcgggcacggtcacggtcacggcgtgccaagcccgggccaccacgacgagccgcgtctgcgtctggcgcgcggctcccgcgcggcgcttgcgcgcaaacacgccgcgcggaggcgggacgacagaacccgtcgagccgcgcaaggacgggccgccgtcagcggtcgatcaagcggaggaagccgggctggcgcccgaaaagctggaagtgctggaagaagcggccatcatgggggaggacgaggggcgccggcccaccgactacgaccgccgcgcgcacatattngaagagagctcgcgggtcttccgtgatc

SEQ ID NO: 160655 - DNA, 590 bp, Zea mays
  Clone ID: MRT4577_78099C.1
ccggccgggatttctgtagcctttcccccgctgccgcttccacatcgacagcttacatcctaccgctcgctcccagtcgcctcttacactccacccatgcagatggagcataggggactcgagggcccccctgaggccatctggtgagcgtgatgctatgataatgctatgcgcctcccccttcctactctggtcttggctaatcgacaaagagtgataatgcgcttgatccctaccaactatcttatgatcagaaacttcccattggaaccctcatcttcttacaagacacccacacatacaaatccatctgatctactatacacacgtccaactgtcacatgcatctccaactaccacctctttcttcactgcttacaaatgttagaacacattctactaatatcatatgaatctagactctaaagaaaaaaatcatgagctgactgtatcatgagccacataaaatcacatccctcctgcaacgactccgaaaaccactgaaaggcagatgactgcatcttcaaatccatttcttattccaacaccagcaaggatgacgacgattctgatgacgacgatactgatga

SEQ ID NO: 160656 - DNA, 324 bp, Zea mays
  Clone ID: MRT4577_7809C.1
gcgtagtaacttggactctagacgccgtcggattaaatagatagtttagacgcgagcgcgctctgggtccagctagtacgcgtgctgcgagtctagctttcttaggtcacttaaatcaatcagggtgcttaagcaatggtaatagaatgagccgggccttattacaaaggcgcctaaatgtgcctgtttgggcctatgaggctaggaacctgataaacaagtaattacaacttacatcttgtatcaccaaaacaaagaaaaaaatctcaatttccatttcagcaagtcacttagcagctaaatttttatcttttaatgtacagg

SEQ ID NO: 160657 - DNA, 132 bp, Zea mays
  Clone ID: MRT4577_780C.1
tacgaaagctcggaatttggctcgtggacttgaaaacaccgggataatacggaggccagaaagagaacaaacgggggaaagtttaaatgtacagcggagcatacccagcacacacgctggatgggtagggac

SEQ ID NO: 160658 - DNA, 419 bp, Zea mays
  Clone ID: MRT4577_78100C.1
gcccgcgggccccggtccggggttcgagccacgcgtccggcgttacacggcgctctctgagcctctctgccaagtcaagatgcagcccatgcccatgcatctgcttctgctgctcttcctcagccttgcgtttccgctgcagcctatggtcgtccgagcttctccggcctcgtcctcgtcctcgtcctcgtcctcgtcctcgccccgccatgactgcccgagcaagtgtggcgacgtgagcatcgagtacccgttcgggatcggccctggctgcgcgatggagaaagggtttgagcttcactgcaacgagtctcggtctcaggacggccgccgaagcagcaccgcgtacttctctgacggcgacctgccggtactggccgacatactgctgctccacgggcaggtccgggtgatgagct

SEQ ID NO: 160659 - DNA, 414 bp, Zea mays
  Clone ID: MRT4577_78101C.1
ccggccgggaggcaagctttgctaccctcgacgaggtagcggtcagcccgccttcacacctccctcaccaaaaaggtcccgcccttttccgacattcacaggagggacaggaaatcagcggccatggcctcgattccggcgacgaccttcgccgtcatcttatccgacctcttctgtgccgcggctggcaccgggggggaggcgacctccccgactacgtcatccagggccgcgtctattgcgacacctgccgcgccggcgacgcgaccaatgtcaccgagtacatcgcggacaccaaggagaggctggagagcaagcacttaggcaccggcaagcacgagcgctgcatcgagggggagaccgaagggaacggaacgtacacgaaagagctaaaggccaaccacgaggaggaca

SEQ ID NO: 160660 - DNA, 422 bp, Zea mays
  unsure (1)..(422): unsure at all n locations
  Clone ID: MRT4577_78102C.1
atcgcgagcggcgccagctcgattgggctcggggaggagtggaggagatggccggggctggtgtggatgaaacggagctcgggcaggcgaggggtgaggggacggctcggatacagtggcggggtggtcgctgaggccggtgcgagcattaatggcgaggtgacggggcgtgaggcggtgaacgcgcaggtgatggcatgggcgggacgaaggtcctgacaggcgggcctgggctgccagtgggagagcggcgcgagagggagagaggtggagccgctgaacggtggggccggtttgtcaggtgcggcgcgggcgcgcgcagctgggccgcttgggtcgggggaggagagggggaaagagcatgcgcgacgcggcttgggctaaaatcggcccatccganggggggagggttttttcttttt

SEQ ID NO: 160661 - DNA, 548 bp, Zea mays
  Clone ID: MRT4577_78103C.1
aactggggacggggtgagcggcgggcaggcggtggttgatgcgatccggcccgagacagaggaaacgccggccccggagctgccgctggtagacgagatgttcgaggccgtccgatcccgtggcgccggcgtccatgtggtccctacctttgctggcagattttgacctctgttgtgattgctataatgaagggaaatttgatccaggcatggccaaaaccgatttcatcctcatggattctgcaggagtttcaggtgctagtggtactagttggacagatgaggaaacattacttctattagaaggtttggaaatttttggtggaaaatgggctgagattgctgaacatgttgctactaagacaaaagcacaatgcatgttgcactttcttcaaatgcaaattgaagaccgcttccatgatggcaaagatattaatcaaaacatcccagtaaagacagagcaagccacaactgagaaagccattgctgaaacatctgagaaaatggaagttgaagataaagtggaaggaagaggtactgtggatgaa

SEQ ID NO: 160662 - DNA, 217 bp, Zea mays
  Clone ID: MRT4577_78104C.1
cccacgcgtccgctcactcacactctaactcgaatactaacacttacaaacacacatacgcggcgcatatcaaccactcaaacactcaaacaatcaaaaaataatatttataaccaaaaacaatacccattatcactgctcttcttgctttcaccctacttgtctaacatattatctattactataccaatataaatacctctacctccaaatactt

SEQ ID NO: 160663 - DNA, 527 bp, Zea mays
  Clone ID: MRT4577_78105C.1
aaaaaaacggttcactaagattttaaaaaaatttatgaatcctagggggggaaaaaccccctgaacggacatcccggtaaagacaggggcaacttaggggtttcacccagttttcctaatttcgggcccggggggggaagaccaggaaaaataggggttttagggcgggacacttgctaaactacaggttttatgggggggggtcttaatttttaaaaccccacgggccccaactatgggtcccattcaaaagggcagccccctcaggggaatcctaagcctaaacctaaaaaggttaatccggacttttttttaccccggaatcctttggaaaaacctaaaaagaatttttttgacttttttttactccaccggtttaaaaaacccggggaacaaacttttaattataattgggcaccattttttccgggacatgcatgttttaaaaagcttccactaaattttcatttgacctttcagaatgaaaatgtcctcctcacgcgggggatagtaaacccttttggggg

SEQ ID NO: 160664 - DNA, 1754 bp, Zea mays
  Clone ID: MRT4577_78106C.1
cccacgcgtccgcccacgcgtccgcccacgcgtccgaaaacatcccagtaagtacagagcaagccacaactgagaaagccattgctgaaacatctgagaaaatggaagttgaagataaagtggaaggaagaggtactgcggatgaaaaggcctcagagaaaaccgagggaaactgtgaagaaacaaaaactgaaaatgccagtgttgttgtaaataaagatactcagaattcagatggcagagattcaggtgcatctccatgcactgaagagccaaagcaatcttctgatgagcaacctgtagtaaaggaaaattctgcagatgtagatacttctggtgaaaaactatcaaatgttgctattgatatcctaaaatgtgcatttgaggctgctggtcacagcccagaatatgaaggttcatttgctgatgcaggaaatccagttatagcactagcagcgtatttagctggtcttgtggaagatggtaacgctaccacttcattccgtagttcactaaaatctatatctgaggtgcctcctgcactccaattagcaagtaggcactgttttattcttgaggatccaccaaatgaactcaaagacatttgtgttagtgtaagtaagaaaaatacagatgctgatcaaacaaaagatgaggatatgatttcaaattcaatcgccaatgagaaaaaagagatcaatgagaaagaagataagtctttatctgtggaaaagacaaataattcatccatgtcacaaaatgaccatcaagaatcaaacattaagagtgtctcacgtgatgattgctcctcagtggagccaaaaggcaataatgctaaggagtcaagtgattcaactggtattggggatatgagtgcaatcggcactacaaaagatgttgttgcaggcaattctaaacaagtgaacgactcacctagtgttgaggtggaggctcctgatgactcttctttaaaaagcaaggatgagctcaatgatactgaagatgcagtggcgacaccagctaccgtacaggaacagaaacacagccaaacattggaaaatggtgataaggcagaacctaacaatattgaacgtgtagttgtcgatgagaagggctctatagtgactgccaaccaaaatgattccataactaggctcaaacgagcagcagccactgctgtttcagcagctgctgtcaaagctaagtttctcggtgatcaggaggaatatcatattcgaaggctgacagcacttatgattgaaaagctgttccagaaattagaagtgaagatgtcgttgttttcagagattgagcaggtggtccttcgaacaagagagtacaccgagaagaccagaaaaaaactcctaatggaacgaaatgcgattattgcagctcgtatgggtgcattgccgtctaggccaaaccagcctggtgtagccggcaacaggttaccacctggatatggcaaccctcctttgaggtctccaaacgcaatgccgcggccctccagctgaggaaattccggattccggacacccagtggtctataccccattcttttagaagcataccccaaagacctcaaacctgccagcttgttgtagcattttttagaaagtacattgtacaattgtctgtataactgcttctatgaaaattcaccattttcacttaatcttcgatgtacttgcttctaccaaacctccacaactgttttaaacattccatcagataggaaaattccatttctctac

SEQ ID NO: 160665 - DNA, 1105 bp, Zea mays
  Clone ID: MRT4577_78107C.1
ccacgcgtccgagtaccactgcaactcctgttcagttgattgctcacggaagcgctaccattgtcgaacccaggcagattttgacctctgttgtgtttgctataatgaagggaagttcgatccaggcatggccaaaactgatttcatcctcatggattctgcagaagtttcaggtgctagtggtactagttggactgatgaagagacattacttcttttagaaggtttggaaatttttggtggaaaatgggctgagattgctgaacatgttgctactaagacaaaagcacaatgcatgttgcactttcttcaaatgcaaatcgaagaccgcttccatgatggtgacgatattaatcaaaacatcccagtaagtacagagcaagccacaactgagaaagccattgttgaaacacctgagaaaatggaagttggagataaagtggaaggaagagataatgcggatgagaaggcctcggagaaaacagagggaagctgtgaagaaacaaaaactgaagatgcaaatgttgtaaataaagatactcagaaatcaggtggcaaagattcaggtgcatctccaagcactgaagaggcaaagcaatcttctgatgatcaacctatagtaaaggaaaattctgtagatgtagatacttctggtgaaaaactatcaaatgttgctattgatatcctaaaatgtgcatttgaggctgctggtcacagcccagaatatgaaggttcatttgcggatgcaggaaatccagttatggcactagcagcgtatttagctggtcttgtggaagatgataacaccaccacttcattccgtagttcactaaaatctgtatctgatgtgtctcctgcactccaattatcaagtaggcactgttttattcttgaggatccgccagatgaactcaaagacatttgtgctagtgtaaggtaagcaatgcttgcacctattttgcattgaaatgctcacaagtttttctgacgatataaatgaaatgtgctcttggcagtaagaaaatagagaatggtgatcaaaaacagatgaggatatgattcaaaattcaattgataccgagaaaaaagagatcaatgagaaaga

SEQ ID NO: 160666 - DNA, 3650 bp, Zea mays
  Clone ID: MRT4577_78108C.1
ttggagaatactatagtattttttccaagagatgtttggatatcttgtaaaaaaaactctgttttgaataccatagtttagtagttacaattataattttttggagtatttaaaactccactacaacctaaagtttttgtctatgagactgactagcttcttgcacatgtatactaaataccatagtttgagatattttgtctccaaacaagtattatttggtgtgatgtaaaaaatactatggttgtgccataatattttaaaaccatagtattctaaaaccatggtttgaaatactttgcttccaaacatgtcctaagccttgctagttgctacactagtaccgcgtgtattttttccctgattgaccagctcaccagcatgagagtaaatatttttgatgttctgtgttacgtattccctcaatcctgctaaaggtgtttgtgataaattgcattgccccttatccattttcagttgactctctttttctatatattggctatcttgcggacaacgaacagcagaggtaggagagtaaggagaggaggaagagcactgccagtgctaggggcagtcggcaggcgcggcgcgttcccctcagtccccttccccggctggtcttgccgggagtaaggggaacgaagccaccggagcggcatggagcccaagccgtcttcggcggcgcatgctgacgcgccagcggtcgaggccccccgccgccgtggcggcggcggcaagcgcaagtcggccgggtcctcgttcacgccgtcgaagcgtcaggccaaggagcggaacgcttccttccacgtgcccccgcatcttctgcacagcgggccgcccacccgcgccgcgcgccagtcgccgcacaagctctcgggcacgccgtcggagtcggtgccagcgtcgtcggcggccgcaactggggacggggtgagcggcgggcaggcggtggttgatgcgatccggcccgagacagaggaaacgccggccccggagctgccgctggtagacgagatgttcgaggccgtccgatcccgtggcgctggcgtccatgtggtccctacctttgctggatggttttcgtggaaagaaatccacccagttgagaagcagaccttgccttctttttttaatggaaaatctgagaagcggacacctgaggtatatttggcggttagaaattcgatcatgatgaaatttcatgccaatcctcaattgcatctggagtccaaagacctggctgagttgtcaatcggggagaccgatgctcggcaggaaatcttggaattcttggatcactggggcttgataaatttccaccctttcccaccagatggacatgaggagagtaagccagaggagacccaagacaattctaatgacgagaaagcttctttgatcgagcaactgtttaagtttgaatcagttcaatcatatatgacgcctttaccaatgaaagaagatgtgagagctccgcctcctctgcctagcttgattcctgaatctgtactcattcaagatgtggttgcagcagctgagccttctgttgagtaccactgcaattcctgttcagttgattgctcacggaagcgctatcattgtcggacccaggcagattttgacctctgttgtgattgctataatgaagggaaatttgatccaggcatggccaaaaccgatttcatcctcatggattctgcaggagtttcaggtgctagtggtactagttggacagatgaggaaacattacttaagagatcaatgagaaagaaggtaagtctttatctgtggaaaagaaaaacaattcatccatgtcacaacatgaccaccaagaatcaggcattaagagcgtctcaagtgatgattgctccttagtggagccaaaaaccaataatgctaaggagtcaggtgattcaactgctattggggacaagagtgcaaccgaaactacaaaagaaaatggaagttgaagataaagtggaaggaagaggtactgtggatgaaaaggcctgacagaaaacagagggaaactgtgaagaaacaaaaactgaaaatgccagtgttgttgtaaataaagatactcagaattcagatggcagagattcaggtgcatctccaagcactgaagagccaaagcaatcttctgatgagcaacctgtagtaaaggaaaattctgcagatgtagatacttctggtgaaaaactatcaaatgttgctattgatatcttaaaatgtgcatttgaggctgctggtcacagcccagaatatgaaggttcatttgcggatgcaggaaatccagttatggcactagcagcgtatttagctggtcttgtggaagatgataacaccaccacttcattccgtagttcactaaaatctgtatctgatgtgtctcctgcactccaattatcaagtaggcactgttttattcttgaggatccaccagatgaactcaaagacatttgtgctagtgtaagtaagaaaaatagagatgctgatcaaaaacaagatgaggatatgattcaaaattcaattgatactgagaaaaaagagatcaatgagaaagaaggtaagtctttatctgtggaaaagaaaaacaattcatccatgtcacaacatgaccaccaagaatcaggcattaagagcgtctcaagtgatgattgctccttagtggagccaaaaaccaataatgctaaggagtcaggtgattcaactgctattggggacaagagtgcaaccgaaactacaaaaggtaatactgaacaagtgaatgacttgccaagtgttgaggtggaggctcctgatgattcatcttcaaaaggtaaggatgagctcaataagactaaagatgcagtggcgacaccagctaccgtacaggaacagaaacacagccaaacattgggaaatggggatagggaagaacctaacaacattgaaagtgtagttgtcgatgaagagaagggctctgtagtgactgccaaccgacctgattccatagctaggctcaaaagagcagcagctactgctgtttcagcagctgctgtgaaagctaggtttctcggtgatcaggaggaatatcaaattcgaaggctgacagcacttgtaatcgaaaagctgttccaaaaaatagaagtgaagatgtcgttgttttcagagattgagcaggtggtctttcgaacgagagagtacaccgagaagaccagaaagaagctcctgaaggaacgaaatgcgattattgcagctcggatgggcgcattgccgtctaggccaaaccagccaggtgtagccggaaacaggttaccacctgggtatggcaaccctcctgtaaggcctccaaacgcaatgcctcggcccaccagctgaggaaattccggattccggacacccagtgatctataccccattcttttagaagcataccccaaagactcaaacctgccagcttgttgtagcattttttagaaagtacattgtacaattgtctgtataactgcttctatgaaaattcaccaaacctccacaactgttttaaacattccatcagataggaaaattacatttctctacaaaaaaaaaaaaaaaaaaaaaaaaaaaaaaaaaaaaaaaagaaaaaaaaaaaaaaaaaaaaaaaaaaaaaacacccgaag

SEQ ID NO: 160667 - DNA, 234 bp, Zea mays
  Clone ID: MRT4577_78109C.1
cgacgaacgggtcgatggcgccgctcttctcctgcagccgcctgagtagcgggaccggcggcgggggcatgcaccggcaggggggccgagctggagccgttctcatggggcacctgcagggggaggtccgccgctaccgtgcgcgccgcagacgttggaacggcgcggggttctgtcggccttgagttgcacaacaaggggtgagtgcatatataggggcgccataaataagtt

SEQ ID NO: 160668 - DNA, 385 bp, Zea mays
  Clone ID: MRT4577_7810C.1
tgtacttgagcgctagacgccgcagcgcagcacgcaccatttcaccgagcggtggtggaggcagggcaatccgcagggagcagaggccgcgcgcgcaggcatgggcgcgccggtgcacggcgccctcgccttgttcctcctgctcctggtgggggcaggggacggcgcccaaggagacggcgccgcaggaaccgatattgccagccaccggttccggtgctaccggcgcgacggctgccggggtgaactccaactccgtgctcgaggcgctgctggatgcctactacgaggggctgtttgaactgcatgagagggaactactcctgaaaacgctcggggactctgatgggaagaacaacttaattttcttctgaccctagaacga

SEQ ID NO: 160669 - DNA, 170 bp, Zea mays
  Clone ID: MRT4577_78110C.1
acacagagcacatcaaaagttcccaaagagggcttgctctctcttcacctgctctgttctacagcacactaccagaagacagcagatatgaaaagcatttactttgtggctggattatttgtaatgctggtacaaggcagctggcaacgttcccttcaagacacagagga

SEQ ID NO: 160670 - DNA, 467 bp, Zea mays
  Clone ID: MRT4577_78111C.1
gaggaggactgcggcaggctcaggccctggcgcaggaggctgctcgcgttcatggcgctctcgtggccctcggccgtccgcctagccgtaaacgccattatgctcgacatcgaaataaaataactcttaacgctaaccgaatagaagattttaaaggattttctgcttttataaaaaaaaaacttggatacaatttaataatatatttcaaatatatataataataattaattaataaaaatataaatattaaactcaaattaaaaataaataataaaactttataaatataataaaataattattaaaatatataaatataattataaatatatatatatttataaaaataattaatattataaacaaataataattaattatataaaatataatattataattataaaaatatttactaaataaatatataaatatattttatataactcattaaataataatta

SEQ ID NO: 160671 - DNA, 697 bp, Zea mays
  Clone ID: MRT4577_78112C.1
tgggaccctcgaggccggccgggatcgctggtcctcgctggcgttcgcagggccctcgcctccctgtgactccctcgatgcccgtcctatacacgctgtatcgcgctccgactccaaataaagtaaatgtacgtgacatgacgccaccaccaaattcacctgcgcccttaacccatggactacccggtcgatcccatccgccatattaaccaccgccccacggactgcaaaactcacaggatcctagaaagaccccacgtcatgaaggacagatagtgttcacataactggttccgcatgatcgtcttctagtgagacatgaatatatcatggaaactgactcctgaacgtgggaaaaacatcacttgcgaacactattgatacggtagggtgtagagaggatatgatccctactgaacgagtcattatgaaaatggataccctggggaatgtgaggataaaatcgtgggatattgtaggccaacatagattccggaatgtgcgggagagagaatgccgcgcgtccacagcaattgggtatgctgatgacgctccagatcgagaaaacatgagcattgtagaaggagagctccatgatctcttgagcagaccatctttgaccggaataccattactagtaattggcaacaatgttgacaagcctgaagctttccctagacgaaccttcgcagaaata

SEQ ID NO: 160672 - DNA, 527 bp, Zea mays
  Clone ID: MRT4577_78113C.1
tcacaacactgctggcatcctgcgcctcgcccccgtactcaatcgatacaagcaactgacgcggaggccgagcagagtgctgagggtgccttcacacgctcgccagctccttccgcttatcatccacaccagcacgctcggacgaagccaacacgcgcgagtatctaattttctgaactgtacacggactacccgtgaaaacatcagaactggtggtgccactgcccatcacaaacgactgctggccacggcacgaggtgtgcacacccctctgcgaatgtaactaagttgccgaataccacgataacattttttcgcaccattggagtacaaacggagctgcttctgcgtcacattctacgaaacagggtaataagagatatggcttactctgcgagaggtctatatatacatgtcttacataaactaacttgattggactatgtatgtagcgatatgatgccatatacaggaccgataacgacaattgactggtgaatcatacaatggctctatggctaccacac

SEQ ID NO: 160673 - DNA, 486 bp, Zea mays
  unsure (1)..(486): unsure at all n locations
  Clone ID: MRT4577_78114C.1
gcggggggtgggggttttttttttttttttctgctttttcctcgggcggcgtccttcggcggccggtgttgtcccttgtctgtcctcttgttccccgcccgggcgctcttcggctctcgccggtccccctctgctgnggtctatctgggggggggggggggtctcttcttcgctgctgtgccccttggggcctcctctggggtctgcgacgccctcgcgctccgggcccttggctngacgcgctccctggggaagggcgtctcgctggctgttgagcgcttcttgtcccctgttgcgcctgccctggttagctggaggcggtgcgtcgtggtccgtgttttgttcgtcccgctgctgattgcgatgggcggctcggggaacacgtccaagtttggtgcctccgccgtcctgggcgtgtccctggccgtctgccgtgctggtgctgttgtgaaggtggtgccccctgtaccgccgcatcgctgacct

SEQ ID NO: 160674 - DNA, 363 bp, Zea mays
  Clone ID: MRT4577_78115C.1
acacctgccataccaaagtgataacctttggtattagttagacatgctcagcatatacagagttggacaaaaggaaagatcaatccaactatcactttattcagccctactgcagttgatgttggttcaagctactgctgcctctctaccatgtgcggttgtctgcttcttgcacacatttgatcaaaattacaaccatctaatcatcacaaaaaccttcaggctattcctggtttatctcacaaaatatagtggtaacctatggttttgggagtggtaattctccaagacttttcatgcatagcatggtttccctgaacaagcatatgtgacaagggttgcgatttaactgtaaaaactcat

SEQ ID NO: 160675 - DNA, 196 bp, Zea mays
  Clone ID: MRT4577_78116C.1
cccacacgtccaatatcacgtccaacaccttcacatttaaccttatccagatcctatttcagacctagttcaattatctaaaggttgtccaaatccatatcaagatccactacctcatccaaaaccataacctgcacatgcgccctattcacaccctaaacctataccataaccacatccaaatccttaacctcaa

SEQ ID NO: 160676 - DNA, 2235 bp, Zea mays
  Clone ID: MRT4577_78117C.1
tcattccatcgcgctgtcgtcttcgttgcccggtcgccattttttcctcctgatttcttctttttcttccctcactatggtcaggtcaggcctctgcctgtccctctcgtgtcgtgccgttgtgcggtgttcgatcctgcccgtcgcctctccggccaccgctgagaagatccaccattaaatgcccgacccacccacctcctcctgcctcctggcttccctatatcactcacccatccacctcgcttcgacctcacagactcctcacactccctactgggctggctacgtacggtacgtgctagtactgttagccaggaacaagccccagcagcagcagcagcaatggccgtggagaacggcagcgccgacgaggcggcggcggcgaccgtgaccgtgaccgtgaccggcgcccgcaccgtggcgccggccaagaaccgctgcacgctcgccaccttcgacctcccctacatcaccttctactacaaccagaagctgctcctgtaccgcgccgcccccgacttcccggacgccgtggcgcgcatgacggccgcgctcgccgacgcgctccgcgtcttctacccgctcgccggccgcatccgccaggacgacggcggcgcgctcgccgttgagggcgacgagggcgccgaggtcttcgaggccgaggcccagggcgtcgccgtcgacgacctcgccggaggggactgcagcgacgaggcggagaaggtcttgcagcacctcgtgccctacaccggcgtcatgaacctcgagggcctccgccgcccgcttctcgccgtccaattcacaaagctcaaggacggtctggcggtggggtgcgccttcaaccacgcggtgctggacggcacctccacgtggcacttcatgtcgtcatgggccgagctctgccgcggcgtacccctgtcgctgcagcccatccacgaccggtccctgtcccgctccgtgcgcgtgcggctggagctgccggcgtccgccgaggcccacgagaagacggacccgaacgggccgaagaaggcgctggtggcccgcgtcttctcgttcccggagcccaccgtggcgcgcatcaaggccgcggccaacgcggcgctgccgccgggcgcaaagcccttctccacgttccagtccctgggggcgcacatctggcgcgccgtctcccgcgcccggggcctcggccccgccgacatcaccgccttcgccgtcttcgccgactgccgcgcccgcctcgacccgcccctcccgccggcctacttcggcaacctcatccaggcggtgttcacgggcgtgcccgcggggatgctcctgggcgggccccccgagctgcccgcgggcctgctgcagaaggccatcgacgagcacgacgccgccgcggtcaccaggaggctggaggagtacgaggcggcgcccaagctgttccactacagcgacgccggccccaactgcgtggccgtcggcagctcgccgcgcttcagggtctacgacgtcgacttcggcttcggacggcccgagcgcgtccgcagcggcgggaacaacaagttcgacggcatggtgtacctgtaccccggccgcggcggtgacggcggcatcgacgtcgagctggcgctgcagccggagcccatgcagaggctggagaaggacgacgacttcttcctgcgccaggcggcagcctaagcccgagtcgtcgatcgtcgtgtcagtgtccactgtccacacccatccagttcgttgatcatgctttattttagtagtaagtattgtgtacgttcctgcttgctatattattattatactagtgttttgctttgttccttgattaattgtaagagctaggcgtgcgtgttggattacactgtatttgctggactggagctgaataaggatggaccagacttcgattagtttgtgcaagctcacgagtgatcgagcatggtccctatatatgtcatcactcgttgtagtaatgcagtaatgtactcattatattgttatgcatgtacttccacttgtaccataccatggaatcgaaccaatcaaccaatgcaagaatttagaatcgaaaaaaaaaaaaaaaaaaaaaagagaggatgtacggccccattccagaccccagcaagcccccgctgtacaggagcgtcagggcccgagacttcatcgcaaagttcaacaccataggactcgatggccgcgcgctcgaccacttcaggctctagctgcctggct

SEQ ID NO: 160677 - DNA, 106 bp, Zea mays
  Clone ID: MRT4577_78118C.1
atttccagactttaatggtgacgaaggatataaagcggttgcctccgactaatcacgtcgcaagatcgtgctttagttcgggattgatactttcaggcctacggca

SEQ ID NO: 160678 - DNA, 211 bp, Zea mays
  Clone ID: MRT4577_78119C.1
ctgaaaatcctttgttttcacaaagaatgatgtggaacattggttatgggcttttttattcaaaaatcaaaacaaactaaggttgatgaatcctcaacggtcggagtggactcgtcactcggaaagagtatcccagccgggtacaaaaaaatggggaaatggttaataaatctacgccaggcgctgagtagcagagtcacccatctgtgtc

SEQ ID NO: 160679 - DNA, 335 bp, Zea mays
  Clone ID: MRT4577_7811C.1
tcactgcaacctgggttggggggaataacttttttttttggttttcataccttatattttttgggaaaggcattgtcccccaaaagcattcaacttgctgtacttggtaaaacccatgaaactgggacaccacacaactcatacacaaacatacgcttggatcctccacccaccaaaaaaacgtactactcgaattttatcttgaacaaaatgaaatactcccaaccacaaatgtggttgggcataatcaatcttataccaggaaaaaacttgatgtatatgccccacgaaggggccaaacaagctaccgtatttttcaagataaggatctttag

SEQ ID NO: 160680 - DNA, 430 bp, Zea mays
  unsure (1)..(430): unsure at all n locations
  Clone ID: MRT4577_78120C.1
cctcctcgacccacgcgttcttactaattctaaaatcacaacctctcaatatatacaaatccacactcacatacccagccattctatatcatagctataaatataacctaaactaaattcacttccctgccctttacaacacaacttctttactaacaatacccttaccctacttaatttactttcattacatcacattttcctcaactcacctaatatcaaatataacattaccgaacccccttcccttcacatcatcatcccaaattgaatatcgaactctcccctcactattacattaacctcaacnccttttatatttacgctccacttaacctttacacttcacttttccctatccctccctccttttcctttctttcttttctctatctccatattcaccttcttttcctttccacctctaaat

SEQ ID NO: 160681 - DNA, 811 bp, Zea mays
  unsure (1)..(811): unsure at all n locations
  Clone ID: MRT4577_78121C.1
agagaatcatctgcagttgattcaacgttccaagtcttgggtcatggtgtaatctgtcaggcttcaatctcagcagaagttgcaagagtttgatccaatccagtttgagttccttgagttcacaatccaatattcatgtgccctgtgctgtcagctgatctttcccttttcataaaaaaagattgtttcctgagaatggtaattctacgttagaaggttcagagattctgatttagtttaaattgtatatggtacctgttggggctctgactttggataaacacagtccccggggagttgaagaacaattatctactctttacttgatatacattttcaggagtatcttcgctcaaaaaagaaacaaataatatggcgaaggcgaatggttacttcacctgaacacgaagactcaaagcagagattgaagtcaaatcttcctctttgtcggtgatcaagcgaagccacaagatatacttcgccgagaagcgaagtcaaaattgaacgaagttagattagtccactccaaggcatgatgcttctctgaccaagattatcttagttgatgatcaagtgaaccaacaattgtcgatgtttcgagtgagtgtctgactagtaaacttgtgctacacgttttaaggccgagatggtgtgcaagtaggacacaaggattatactggtttgaacgaaatgtcactactacagtcttgttagcttatgctagcggcactatattgcttgtagtaggagttaaaaaaaaaaaaaaaaaaaaaaaaaaaaaaaaaaaaaaaaaaaaaaaaaaaaaannana

SEQ ID NO: 160682 - DNA, 324 bp, Zea mays
  Clone ID: MRT4577_78122C.1
ccgtcgacctcgagaacaattttctatgggggctgtgattgagtcaaccacatactgaaaatgagggattatgtttataacatgatcacaaacgaccgttagttgggggcttttttatggaagatggccgcttatatcacgctaaaaaaaatgttcttaaaatgggtctttgagctaccaatgcatcgtgggggaggcagctatagaactggtgggtcctttaagcagattcatcggtgcttgccttccgttataacagattgcttcgattcggtagggattgccaatttaatacaagtgatgcatatgaactaacgagaacca

SEQ ID NO: 160683 - DNA, 377 bp, Zea mays
  Clone ID: MRT4577_78123C.1
caagtgcgttgtcatttgtgcaaagtctacaagaaaataactcaagcgattgtgtcagaggacctcatctggcaaaaattgaaattgaacggcagcggtgcctcaatggaaacccagataatatcaagcttatggaagctttggtgcagtacctccacagatttggtcatttgtcttgctcagcatctgatgttgaaatttaccttcacatgctatccaacaatgagatatctgagctgctagatgaaattactagatcttttgatgcatcatcaatttcagttaacacactgggttcaacaattactcttttcaaggtccaggaacttttgggaacttcattcacaaaaccaacttcagaacttgagggcattgca

SEQ ID NO: 160684 - DNA, 1572 bp, Zea mays
  Clone ID: MRT4577_78124C.1
caacaccgacccccgcttcaccaccacaatccacaagcagctccggcctccagctgagactctcgagttccgagtcgtccgtacgtgtcgtacgtcccagcagccggcgctcgtcgtacgtactgcgtacgcgcgcaagcgcttggtacgaccgattcagcacgcatggcgatgaagaagggcggcggcgcggcggggctgaagcagatcctgaggcggtgctcgagcctggggcgtcgtcagcagcacggcgcggggtacgaggaggaggaggacgaggcggcggcgacggggctgccgtccgacgtgccgcgcggccacttcgcggtgtacgtgggcgagcggcgccgccgcttcgtggtgcccatcgcgctgctggaccgccccgagttccgctccctgctgcgccgcgccgaggaggagttcgggttcggcgccggcggcatcctcgtcctcccctgcgaggaggtcgccttccgctccctcacctccgcgcttgcctgcgcccggtgaaggggtgcgggttgcctgccacgccgcgtcgccgccgctatattcgttcgattcattggtatctcggcgagcttactcacctacactagctactagctcggcgagagctccagcggttacgttgatgatggcgtgtgtcgtacgtgtgtaaatatagattactcgtattagagaaaagcgctaagctaagaacaggccggtggcgcggccggccggctgctgcgcatgcgcggaggattgtgccagcgcgcccccggcccggccggcattggagacggccgaccgaagattcgaaggatgaagcacaaggacatcgacggatcagatgcatggagctgagcgagagcgagagctccagatcagcttcgctgcagtcggctacgtacggctatcatcatctatctagccgtacgttgccacgttggccgctgctagctgcattgcatgcatgtacgttgtttgtgatgcgtttcacttactggccccctgctggtgcaacaagtgaaccatcattttttcccttttttttcggtacatgcaaagatactgctggctgactgtggcctgtgggtacgtagccagaggcccagagctaggtagctggtatatgggcgaccgtacgcaccgacatcaagcattcagatatgcacacacagcatacaaacaagtgtgtgttccgtccatccttcaattccttgcagcttcggttcgtttttatatatcctgatgattcatcgatcaataaatataggagtattttttttttgttgccgcaaagcaaaaaacatatatgcatggttcatgacaatgatgtgtcggtcctgtatgcgtgtgacgcgtgctccggaagaagctggtttgcgctgtcgtcgacccatcctgccatcattcacggctagcgggcacgtcgtgtatgtatatgatgaccaacgtagaaaggaagtcatcggtttctagttaagggcaggtctcgtaggttcacggctctaggagttggaattcaagtgtgcatatagatatgagacggaaagcttaataaaaaaaaggaagttttttttc

SEQ ID NO: 160685 - DNA, 546 bp, Zea mays
  Clone ID: MRT4577_78125C.1
ggggtaccgggcccctttcgagttttttttttttttttttttttttttttttttttttttttttttttttttttttttttttttggggccccagccaaataaacatccaatttccaggccctaacacaacatcccaatttacacatgcatacaaatccttttccaagggtttacaaatcgtaaaacaaaacagtccccttgtaggcttggacagaggaccatgccttcaaatgaaccccaaaagtctcggttccggagtaggggaccctggaaaatacaataagataccgtaattggtcatacagataggggggatccttactgaccgacaacctttttgaccgtataacgccttggaaatgccgggtacacgacgtagttcaccacactgatccccgtccacagccaaaagtagtagcccagggggccgtcgttgaggtcaagggggagccagcccttgccgccccaggccggggtcacggacgccaccaatgggaccaccagggggttcaccgtagtacgccagcgacatggccaggaactgga

SEQ ID NO: 160686 - DNA, 641 bp, Zea mays
  unsure (1)..(641): unsure at all n locations
  Clone ID: MRT4577_78126C.1
ncgacaccgagtcacaccgacccccgcgctccaccaccaccagcagctccggcctccagctgagactctcgagttccgagtcgtacgtccctgcgcccggcgctcgtcgtacgtactacgtacgcgcgcaagcgcttgacacgtacgaccgattcagcacgcatggcgatgaagaagggcggcggcgcggcggggctgaagcagatcctgaggcggtgctcgagcctggggcgtcgtcagcagcacggcgggagcgggtacgaggaggaggaggacgaggcggcggcgacggggctgccgtccgacgtgccgcgcggccacttcgcggtgtacgtgggcgagcggcggggccgccgcttcgtggtgcccatcgcgctgctggaccgccccgagttccgctccctgctgcgccgcgccgaggaggagttcgggttcggcgccggcggcatgctcgtcctcccctgcgaggaggtcgccttccgctccctcacctccgcgcttgcctgcgcccggtgaagggtgcgcgggttgccggcctgccacacgccgnggngcccngggcgccggtatattcgttcgagtcattgggatggttggcccacagctggctagctggctagcttactcacctacactagcta

SEQ ID NO: 160687 - DNA, 545 bp, Zea mays
  Clone ID: MRT4577_78127C.1
cgtacgtgtgtaaatatagattactcgtattagagaaaagcgctaagctaagaacaggtggcgcgggcggccggctaacttctgcgcatgcgcggaggattgtgccagggcgcccccggcccggccggcattggagacggcccgaccgaagattcgaaggatgaagcccaaggtcgtacatcgacggaaaaatgcatggaaagctgagcgagagcgagagctccagatcagcttcgctgtcggctacgtacggctatcatcatctatctagccgtacgttgccacgttggccgctgctactagctgcattacatgcatgtacgttgtttgtgatgcgtttcacttactggcccctgctggtgcaacaagtgaaccatcatttttccccctttttttcggtacatgcaaagatactgctggctggctgtgggtacgtagccagagctaggtagttgcctagttggaatatgggcgaccgtacgcaccgacatcaagcattcagatatgcacccagcatacaaacaagtgtgttccgtccctccttc

SEQ ID NO: 160688 - DNA, 456 bp, Zea mays
  Clone ID: MRT4577_78128C.1
atgtgaaaaatacaattgtcatatactgttcttaactgttacctatcctcatatacattttcatgccagcaacttatgtgcctacgaatgacacacacaggatcctcctccagtgatctagagccctgttactaacaaatgcttaatagataacctgcaaatagtttaacaaggctaggctaccaacagtgaaactgacaattggtgaaggaagttctgaattcaaggaggttggttagatagacctaaaagggggaacacccagaagctgaagggcatactgtatttaaagacctaggttcttgaacatgcagaccgtgacctgaacaggaccactactttggctatatggagtgtcagtagaccttgacattgtcttggacatagatgcatatctgtgtgacaaaagctactcgatcactatggacctaatatactagctgtaatcataacctg

SEQ ID NO: 160689 - DNA, 353 bp, Zea mays
  Clone ID: MRT4577_78129C.1
aatagcaacacatatagcacagtcagacatcaacattggcgcccaaaatattgtgcctctgtatgctcttcgatatgcttgcaagtgatgctactgcgaccatgatgacgaaatgctcacaagctactatagctacaattcttgccaaggacctctgacgagcgatgacttcggtaggcgaaaacgcaattcttgaatgctacaggatacaacaggcgatcgcaacaggcatcttagatttatcacgctcgatgctgcaacaatcatcagccatatcacagcagatgcactatcgagcatatattgacgcaaaacatcaggacacaacaactacaacaacttatgctagcaaa

SEQ ID NO: 160690 - DNA, 482 bp, Zea mays
  Clone ID: MRT4577_7812C.1
ggtggggggttttttttttttgggggtgtttttttttttttttttttttttttttttttttaaaaaaccccgaaacaatcatggccgagcgggacacaaggtataaaaaatagggctgccaggatggccccctgggcccaattaacggggccaaacaggccgcaagggcggggagcattaaatcaggccctggggaagggggccaaaggtaaaaatgaccaacccccgctggcctaaaaaaaccactggggcccacttaaaaaaaagcttcaggggaaacggggggggacaaatttaaaacactagctaagttccggggacggatcccggggggcaggcaatccccgaggatgtggcggttttaaagccctggaacgggatacacctactggggagcgggaaaaaaaaacgcaggggtgtaccactgggttttccttttccggggaaagggcctccctggtgtaaggggcccaaaagccccc

SEQ ID NO: 160691 - DNA, 585 bp, Zea mays
  Clone ID: MRT4577_78130C.1
gcacgagtaggcacgaccggcgccgggagagggggtggagtggaagcctcccacgcttccctcgccgaagcgcccctctcctcctgcgtaggcacacacgcacgcgtcagtcgccatgggaacagaggtgctccgcccgcatgactgcctcgcccgtgctaggcggccgcggccgctgcgccccactgccgggaggaggacggcggcgcgccagggctgtggcacacgcggcgacaggcggagcccctcggcggcggtgacggtgccgaggcatgtcgtacggaccaaggtggcgatggcggacgcgtacgcgggcccggcgttcggtgccatgtcgccgtcgccgcgggcgctgcccctgccacggttttcgtccaggacggtcgtccacgcgacggtgtcaggcgtggacgccgccgccacgcgggagcttcggcggctgctggggctccattgactcgtatgatcaggcaaattgtacaaaagagtaatggacggggccatggctgcccatgagcccagcaacacgtacgcaagggtcagatgcgtgggtgtctcttcccatctcgatcttctcgggttgct

SEQ ID NO: 160692 - DNA, 120 bp, Zea mays
  Clone ID: MRT4577_78131C.1
aacccatcaatatccttctagatgatgacatgaatgctcttctgggagactctcgaaatgcacgctcctatcatgatccttacttaaaatggccccaataaaatttatcaatacgtgcct

SEQ ID NO: 160693 - DNA, 488 bp, Zea mays
  Clone ID: MRT4577_78132C.1
ggggaaatggggttttactgggggcccaccccccccccctccggggaaaccatccggggggggcaaaccttcgggggtttaaggggggtggggcctgggggcccaatttttttccccccaaaatttcctggggggccccccgcgggtttttttaaaaattgggaatgggccccagaacccaccggggggggccccccaatcggggcttgtttggtttcccccctttccacgtacaaaggggggcctgttgttattgcccggaagggggggcccctgatttgggcccaacgggggcgggggccgggccccccccccaaaaaaacctttttttttttttcctggagggtttcctcgggggtttggaccgggaagggggccccccccccccccttgccggaaccatggggggggcgggggccaaaccccaactttttttcttgggagggggtttccttcggggtttcctctaaggccttcaaagggggggg

SEQ ID NO: 160694 - DNA, 384 bp, Zea mays
  Clone ID: MRT4577_78133C.1
tcgactagtctctagcatcgcgagcgggcctaccctttttttcttttctttttttctttttttattttatacggttttcgtttcagataaccgcggattagccatcttgtcaaacgatcaggatctaaaacactggagtcaagatccaacatcgtccatgttcaaacaactaggccctacccatcaccctagggggctccacattattcgacttgctgcacgggtcctattcagttgatcaccatacacgcctgcatagcggctcacgcgactcactagcgcggggcccatgcgcccacaacttattacgactcgtcaccaaccaaccaaaccaagccacccagcacgtgcactccaagcgtgtgagctgtgctctgctctacc

SEQ ID NO: 160695 - DNA, 432 bp, Zea mays
  Clone ID: MRT4577_78134C.1
atggccggttctaaagatcacaccgatatctccccggacaatatcctaaagccggttgttgaaagtatgacgaccgatgagcaacagcaatacgaggactacacgcgtcaggcgaaggagaaattcttatcacaatacacggtggatcgccaccagaaagttatcaaacatggagagaccgatgtcgcatctcttctatcttcgcttcaagtccccaacagtggagggttagaagagtcaattggaaaattaacgcgtacgttggaaaagtctgttgctcctagttttccatcatacgaaactagtaatagggtatttatgtctgatgtatcggcaacaaatggggattcgcaaccccagcctttgtatggtatgccgataaactcatattcagggcaaatacaaccaccgtcgtccctgaaagtcgcctag

SEQ ID NO: 160696 - DNA, 631 bp, Zea mays
  Clone ID: MRT4577_78135C.1
atctccctctcaatcctacactccccgttgcggccctcgcggcgcagctctggcatgacgatccgaatatgcggcaattactacaggccggtaaaggcaggatcctccttcatcgacgcttctgcggaaggatggatctctacctgcgagctttcaaggaggatgccctccatcgcccctatgcctactgactcatagctggcctccatgatcacccaaagacggtgatcctcacgaagtccgcatcgaatactgggaagaactgaagcggatggcgcatcatcatgatcgaccacttctcatcacctcgtgctcaccgactacttcctcgacgtcgattacgacgataacgccaccgtctcgcctgacgaactccctatgcacgagaaaaacgttgccgactgctagaccgacaaagagcgccttgagaagatgttcaagaccgacaacaacaggtgcgtctatatcaacttccacttctacatgatgggcctgacgaacaggcctggattagctctcgagatataggatctgacggactccatcgtcttatcacgcattaccatgtgatacttcgtcgtgtacctctgaggacccctcagagtaatgtgcttggtaatgtcttgtactg

SEQ ID NO: 160697 - DNA, 309 bp, Zea mays
  Clone ID: MRT4577_78136C.1
atgcccgcccggcaagggttacaaattaggacccgggttatacattatcacgacttaaaaaaaaagaagagtttcccccggtttaaaaacttaacgggggaggattgccacaaaaaattattcattcagccctttttgttgaaacccttggcttggccgggaataaaaaaagccctttttttttttacactttccaaacccaacaaaattgttaagggccccggcccctgggggttgtcccctccaagggttttaaaggggccgcgcttggggaacccccaaaaccccccggtggggggggggggccct

SEQ ID NO: 160698 - DNA, 383 bp, Zea mays
  Clone ID: MRT4577_78137C.1
ccaaccgggaccgggttttcaattaaagcaaatataactttgggtctgggaccttccacttgaattgggtcccaaaaacttacgggaatattactgggcacacaaagaaaacatattggtgtgggtaaattagggtggggcgttggccacacaccaccattggcagcgccccccaagaaggagtgatcctaagacacacctctatttttttgtaggcaactatttcgcagctttgtacgtactctttcactggttcatcgcacacatagtcctcactaagagtgttgacagcaaacaacatcgtccaccacggtcatcatgatttgcagcttcttgattccatatccaactgggacaagcttggatgggccccacacaaccct

SEQ ID NO: 160699 - DNA, 402 bp, Zea mays
  Clone ID: MRT4577_78138C.1
gaaaaatcagaagaagttcagatgaacacctaagacaaaccaggtcggagacaatgagtaacagcgtcaaatcatcttttcatgatcccaagctgaaaggcaagccctccagagagcgttatgtgacccacaaccgagcacattggtgacagaccttcggggcctgtctgaagccatagcctccacggagagccctgtggccgactctgcactctccaccctggctgggatcagagcaggagcatcctctgctggttcctgactggcaaaggaccagcgtcctcgttcaaaacattccaagaaaggttaaggagttcccccaaccatcttcactggcttccatcagtggtaactgctttggtctcttctttcatctggggatgaccatggacctctcagcag

SEQ ID NO: 160700 - DNA, 1801 bp, Zea mays
  Clone ID: MRT4577_78139C.1
cattgggtacctcgaggccggccgggccagtgaaccagtcaccaactcccgtggcagtgataccgttgactgctgagctgtcagcctgaagccgaggggcaaacgcaacgtcgccgatgcggaagccggcggcactggtggtttctacggcggttttcgcagccgcagccgtagccgccgtgatggcacgccagaggttgcgggaagcgaggcgatgggcacgcgcaggcgccgtgctgcgggacctgcaggagcggtgcgcggcgccggtggagcggctgcggcaggtggcagacgcgatggtcgcggagatgcgcgcggggctggcctccaacgactccgagggagatagcgggagcagcgtcctcctcaagatgctcgtaacctacgttgactccctaccgtccggggacgagaaagggctattttatgctcttgaccttggcggaacaaactttcgtgttttacgaattcagtttgggggcaaggaacaacgaatagtcaagcaagaatctaaaacggtatccattcctcaacatttaatgtccaggggatcaaatgagctgtttgattttattgctgctgctttagcgaagttcattgcctctgagggtgagggcttttatcttcctgagggcatgcaaagacaacttggttttacattctcctttccagtgaagcaaaattcagttgcatctggtactcttatcaaatggacaaagggttttgcaattgatgaaatggtaggaaaggacgtagtggcagaattaaacaaggctatcaaacgccaaggagttgatatggaagtcacagtactggtcaatgatacagtagggacattggctgctgggagatatgtggataatgatactgttgctgcagttatactgggtactggcactaatgcagcgtacatagaacatatggactcaattcctaaatggtgtggcccacctcctgagtctggaaacatggtgataaacatggaatgggggaactttaggtccacccaccttccactgactgaatttgatgtagccttggatgcagaaagtttgaaccctgatgaacagatttatgagaagttgatctctggcatgtatatgggggaaattgtccgaagggtcttgctaaaaatggctcaggatgcttctcttttctcagataatgtacctctggaacttgaggtcccatatatccttagaacatatcacgtgctgatgatgcatcaagacacatcgcctgatctcagaacggttggcaacaagctgaaagaagtcttcaggatagaagacacctgtttcaaaacaaggaaattggtagtggatgtctgcgaggttgttgccagtcgcgctgcacgacttgctgctgctgggatacacggcatcctcaaaaagcttgggcgagacgttgccagcccagacaaacaaaagacggtgattgctgtggatggcggagtttacaagcattatactttcttcgcccagtgcatggagagcactcttagagacttgcttggggagggagtggcgtcctctttagtgataaaacttgccgaagatggctcaggcactggagcggcgctcttgtcagcctcctattctcaacgtctccaggccgtggatgattaatttctgcttgtagttccttcagattctgaaggtatagcaggtatacaattgctccagtggatatttgtctataacggttataacattcaactgccacattcttttttctgtcaggcctgtgctcctgcagtgcccatttttaaggggttgtacacgtcacttaagactcc

SEQ ID NO: 160701 - DNA, 296 bp, Zea mays
  Clone ID: MRT4577_7813C.1
cccacgcgtccgtccacgcgttcgtccactcgtccgcaagtgcgcttgtcggccagtgccgtgtaaatttctgagagttggtcttgtgttattaccaggttttgttcgtttctttcgttttggagagagtggtgctacctacctgcactgctacactagactaatctgtgtgaatggaatactactgtactttgtctttcttctaaaaaaaaaaaattagactcttactgattctgtaataccgtactgattctattagcattattccgtcgtaaactgttaatttaaacattttt

SEQ ID NO: 160702 - DNA, 336 bp, Zea mays
  Clone ID: MRT4577_78140C.1
attccggtttggaccaacccttcctccacacccttccttccctccgaaccctcctgtttggaacatttttaacctaaggcgggggtgttcccttgaatcaggggaggaaaacgtttccaaactttttaaatacacattagaattcaaacctaaccctaaccctttttgggtttacaaggttttccaattttctttttaccttacatgaaaccggcgttccttccgtcccggttaattttttatttcaacttccaaaccaaacggttaaatttttttttaccttttaactaaaacttttttcaaaaaaccaaccgacgaagattggcttttgttttt

SEQ ID NO: 160703 - DNA, 339 bp, Zea mays
  unsure (1)..(339): unsure at all n locations
  Clone ID: MRT4577_78141C.1
ccggccgggnaaagccgccaccggcgttgacgacgaggcgagctccaactcgtcgcccaacatctcgaccgccgcgacacgcggcggcgcggaagctgcggtggcccggtcctcggcccgcgccggcggctcggccttgccgcggcagaccgggcacgacgcgcgcgtcgcgagccacacgtcgatgcactcctggtggaacacgtgcttgcagccggagagctgcctcaccatctgcccctcgcccaggacgccgaggcagaccgcgcactcagcggcgccggngccgnngccgncagcatcagcagccactgaggntgagccgncggcgccggctcg

SEQ ID NO: 160704 - DNA, 275 bp, Zea mays
  Clone ID: MRT4577_78142C.1
agacctgcaattattggctctttggaggtatacacagtctaatgcccggacaaaacaagattactaacaaacgggggcaaaaaacatggattgtggagttttacttccaaagggcaaaacactaataatatgcatgtattgcagaggctggaaaggaactataagacattgcccacggcgggaaccacatggtttgaaaaaaaatctgcgagataagatcaggtccctgaacggattcaggttgctgaacaggacaaagccttataagaaaatct

SEQ ID NO: 160705 - DNA, 1895 bp, Zea mays
  unsure (1)..(1895): unsure at all n locations
  Clone ID: MRT4577_78143C.1
attgggaccctcgaggccggccgggctctccttctctggcttgtcttctccttccttcctcttcctcctcccctccacgagatcgaaaccgaggcacgaattagtcatcctcggatcagcacctctcgagtgtgtggctcgtgtcagggtggagaatttcattcaggaaaaaaaaaaaacaagaaaaaaccgtactccctagcactacacatacgcactttccctctctactgtcggtctgtttctcccaatcctccacagtctctctctagagtagacccaggaaagaggcgatggatatggccattgacacgccatcgccggcgccgcccacgccgccggcgccatcggcagcggccgggcggcagacgcgtgcggcagaggcggtgcgtctggagcaccaactggtgcgcgtgcctctcgagtccctccgcgccaccgtccgctcgaaccaccgcctcgccgagaaggagatcgccgccgtcctctcctccgcctccgcggcccccgcagagagcagtgccgccgccgtcgaccacctcacctccctcgtctctcgcctccacggcctcaagcgcaagatggaggagggcgcacgagcggaggaactgcaggtgcagcggtgccgggcgcgtctggaccggctggcgactgccagcaccggcgacgatgccgagtgggaggacatgcggttgaagaggatcctggtcgattacatgcttcggatgtcctactacaattccgccaccaagctcgctgagacttctggtattcaggacctcgttgatattgatgtctttctcgatgcgaaaagagtaattgattctcttcagaataatgaagtttctcctgctttagcttggtgtgcagaaaacaagtctcggctaaagaaatcgaagagtaagcttgagtttttactgaggcttcaagagtttgtggagtttgtcaaggttaagaatttcattcaggctatagcatatgctcgaaaacaccttgctccctggggctctgtacacatgaaagaattgcagcgtgtcacagcaacattggtttttagaagcaatactaattgtactccatacaagatattgtttgagcaagaccggtgggactatcttgttgacattttcaagcaagatttttgcaagttatatggcatgacactagagccgctgctgaacatatatctgcaagcaggcctgacagctctcaagaccccgttctgctctgagggtagctgtcccaaagaagaccccttgtctctggagggcttcaggaaactagccgagcctctgcccttctctaaacagcaccactcgaagcttgtttgttacatcaccaaggagctcatggacactgagaacccgcctcaggttctgccgaacggctatgtctacagtgagaaggcgcttcaagagatgtccaagaaaaatgacggcaagattacatgccccaggacaggagatgtttatgacgtttcagagtgtgtcagggctttcatctcctaatcatgaaatactctgatttggtgtggctttgggaatctgagtgaatgtacatagagtggtcagcgcattgtgcgccatgtcgagttgattgaactaacctgcaatgttgaactggctggatgttggattgtgcgcatcgttgcaaccgtgaaactgacgtttttcatgctccaacaaaaaacagagtggaacaactgtataatagcggggaggcttcagacccgatctaagtgaaattaaaaaaataatttgttagacacaggtagaacccctgaaaatataaaaataaaccaaacccaantaaagggcgggccgccgactagaaaggaacgtcgacccgggaaataataccggaccggaaccgacccgcgccccggctttccatat

SEQ ID NO: 160706 - DNA, 139 bp, Zea mays
  Clone ID: MRT4577_78144C.1
tcgggaatatgatgctctcgatgcggccaacaaactctgcatcatctaagagctgcattacgcatccgtatgacattctgtagtgacctacctgtacgccaaaccagagttttgcaggtatgggtctgaattggtccat

SEQ ID NO: 160707 - DNA, 830 bp, Zea mays
  Clone ID: MRT4577_78145C.1
acacaagtccagtgcatacttcctagtactccagcacagcaagtgcaagttcctagtaccaaatagcagcaatggcgccagcgcagcaagtgcaagttccagtgcaagcctcgccacccgcgattctcagcgtcctcgagaccactctcgtagcgccctcgccgagcgccggtgccgccccgctggagtcctccctcccgctcaccttcttcgacgtcctctggctcaactccccgcccgtcgagcgtgttttcttctaccgcctcgccgccgacgccgacgtccccgccatcctctccaacctcaggacctcgctgccccaggctctccacgcctactacccgctcgccggccgcctccgcctcacgcctgggacggctgaccgctacgagatctactaccagccgggcgacggcgtcaccttcaccgtcgccgagtaccgcgacgatgttgacatcgacgagctcgtggttgacaagccgagggaggtctgcaagatcgggccgctcgcaccgcctcttcccaaggggggcccggtgctcgcgctgcaggccaccgtgctccagcgtggcctcgccattggcgtggccgtgcaccacgctgcctgcgacggcgccatctccacgcgcttcctgcacacctgggcggcggccggcaccggcgtcgtcgctccgtcacctcctgtcatcgacagaactctcataaaggacgccacgggtctctacgacgtcttcgtcaaagccatgccgtcggccgacgagatggagcacgtcaaagagttggacgacaagctcctcgccaccttcacactgtccaaacaagacatacag

SEQ ID NO: 160708 - DNA, 765 bp, Zea mays
  Clone ID: MRT4577_78146C.1
aagtgcatactcctacgaccaatacgtagcagcaatggcgccagcgcagcaagtgcaagtctcgccacccccgattctcagcgtcctcgagaccaccctcgttactccctcgcccagcgccggcgccgccccgccggagtgctccctcccgctcaccttcttcgacgtcctttggctcacctccccgcccgtcgagcgcgtcttcttctaccgcctcgccgccgacgccgacgtccccgccatcctctccaacctcaagacctcgctggccaaagctctcagcgcctactacccgctcgccggccgcctccgcctcacgcccgggacggctgaccgccatgagatctactaccagccgggcgacggcgtcaccttcaccgtcgcccagtactaccgcgaccatgttgacttcgacgagctcgtggttgacaagccgaggaaggtctgcaagatcgcgccgctcgcaccgcctcttcccaaggggggcgcggtgctcgcgctgcaggccaccgtgctgcgtcgcggcctcgccgttggcatggccgtgcaccacgctgcctgcgacggcgccatctccacgcgcttcctgcacgcctgggcggcggccggcaccggcgccgtcgctccgtcgcctcctgtcatcgacagaaccctcataaaggacgccacgggtctctacgacgtcttcctcaaagccatgccgtcggccgacgagatggagcacgtcaaggtgttggacgacaagctcctcgccacgttcacact

SEQ ID NO: 160709 - DNA, 237 bp, Zea mays
  unsure (1)..(237): unsure at all n locations
  Clone ID: MRT4577_78148C.1
cngggggggggccaaaaaaaagcattattaaccccaaagttgctcgagtgttgaactatgcatcaacgtctatacgagatttgccgggccctatttagggctatatcttgttggggttttctaccagtatgcggaatgcgcggagtcttttttacccattttgctgcatgaccgactttcccccatgctgcctgtataccgtaagttcccacaccctttccattaattccaaagttt

SEQ ID NO: 160710 - DNA, 170 bp, Zea mays
  Clone ID: MRT4577_78149C.1
actaaagtgagtcgtattaagttgttgactgttcgcatggtcggtcatcgtgggtagatgaagcaatctgctactactggcagtggatcacaggaggcatgcaatgggggataggggtgtacccaggccagatcattcatctaaaggggttctttggtgccatagaaaat

SEQ ID NO: 160711 - DNA, 1351 bp, Zea mays
  Clone ID: MRT4577_7814C.1
aaacggggtacatgcaagaagaggaggtgctgatttctctctgtttcctcgtttcgttgccagcccaatcggttcagtttcggcggtaacaagatcaactgcggtcgccagtcgattctgtgagcctgccagccatggagttgtccagttccgtctcgtccacggcggcggcggcggcgcaggcgcggctgctccggccgccgtcgtttcgccagccggggccggcgggattcgtgtcctgtaggagttacgctataaggagcaaactggtgagggcgatgcctccgatccttgctagcttccagcctgcatctcctcggtacccaagctttcaagacgcaaatggcaaaagacgaaatgttccttgttatcagagacaacaaaccccgcaggtagaagccaggtcgatggaggaggtatatgacgctttggctgaacaccttctttcggtcttgaagaatattgaacatcttgattcaaaatacattgttggtctagctggcccacctggtgctggcaagtccacagttgcctctgaagttgttcgacgtgttaatacattttggtcccagaagcacacaaagggtagtggagcaccgcttcctaccaaggaaattgctgcaatgcttccaatggatggtttccacctttatcgtgcccagcttgatgcaatggaggatccaaaagaagcacatgcaagaagaggagcaccctggacattcaatccatcactgtttctgaaatgtctacatacactaagaacagagggttcagtttatgctccatcatttgatcatggtgttggcgacccagttgagaatgacatatttgtaaagccacagcacaaaatagtgatagttgaagggaactatctgttactggaagaagatgtttggaccgaaattagagacttgtttgatgagaaatggttcattgacattgacatcgatatctccatgcaaagagtgctcaagagacatattgcaaccggaaaagagccagatgtagcagcatggaggatctcctacaacgaccgaccgaatgcagagcttatcctggaatcaaggaagaatgctgaccttgtgatcagatcagtagacttctcaagctagtgttcaattctttcaataggaaatagcattgtggttctagagttggaggttgttgtgggctgtttccgtggagattcctgtacatataataagctgaatgcctgtttcaaattttcatggtgattgtgttgcatgtaataagatattccttcactatgtaccgtggaggattgttaagtaatttattgacattttttaatagaaacacccttcagatttagctccggggaaaaaaaagt

SEQ ID NO: 160712 - DNA, 645 bp, Zea mays
  Clone ID: MRT4577_78150C.1
ggcgctcaggcggcgggcgggctgatgacaaacagttgggggcaccataatcggaagccccgtcgtgatgggcgacgccgccaacgcctcccgtcggcgtcggctggcctcaattctcctttcccggaaaccgcgcctcaccgacagcaggaacgagaccacggccacagccgaatccaaggatggcttcaccatggcggtctccttctggatggccgacccaccacaattgtccatcttctccatccactgctgcagaccccctcattttcaagacgggccgtactgcaatttcaaagatttgccacacgtggtcggcgtcggcgcggcgggccgtttcgttctcatccgcgccgtcttcgaccgccgcgccacatccgaatatttcctttacaaggccggtgagtcaccattgctcgacccgattcttcctccctacgattatcgtgatggcgaccgcgatgatctgcggggggtcagggagttcggcgtcctgcagctcggcagccagtatctcgtggccgctctctgcctcgacccgttgtcggatgactattaccttcggatctatgtccgagagaaaatcatggagcaccaggacccctgaccaatccatgtcctgggagtgacaggattatgcccgac

SEQ ID NO: 160713 - DNA, 972 bp, Zea mays
  Clone ID: MRT4577_78151C.1
caggtagtccggcttcctgcggctccaggtcgtagaccgagttgacgagcacgtggtcggcggtgtccagccccaggaactggttcatcagcagctcccgaaagcacggtggaaacctggtgtcgcccaagaacgtcggcatgtcgtccacctcgagctgggtcgacagcccagccagagccaggccccgcgcctcctcggggcgcagcggcaggggcggcaccggcacccgcccggcccacgcgtgcgcgtacacgatgtccacggcgcacgtctgcgtgaggaacgccgcgcacgcggcgccgcgccgccgcgccacgcgctgcgcccagggtgcgaacgcgtcgtacaccaccacgtgcaccggccgccccagcgccgactccgaccggaggagctcgtccagcgtctcggacccggccgactcgaggcgctcgaagtagcgggcgcccatccctcccacctcggcggggccgccctcgtcgcagccgtcggagatcacggcgacgtggaccgagctcggggtcggcttcgtcgagctgacgacgaagcgggtcgccgcgagcgtgcaccggacgccagcgcggccggcgagccgcttgccgaactggagcagcgggttgatgtggccctgcgtggggaatgggagcaggaggacgtggacgctttggtcggacggcctcgccatggttgtagttcaacgaataacgaatgtgtgtgataattctatcgacagctgtcacagatcatacagacttgctgcaatggcgggcatggttaacagctagcatcttcttgctgcctctggctgtggtggttctaatatcttgtgtctccggcaatgtgttgtagcaagaacgagagatgtaagtgaagcttaatctgatcccctgtttgttttacaactgtaaccctcttctttaattgtactgtttggtagtcatatgctgataacatcatgtaacagtttta

SEQ ID NO: 160714 - DNA, 300 bp, Zea mays
  Clone ID: MRT4577_78152C.1
ggcaggtggcaggttgctgtccgtcgtcgccgtcggctgcttcctcctcttcgtcgtcgtcgtcttcacgctctcctcccgacgctacgccaccctcgtcctcgacgctcgtgatcgccgaggtgacttccacccgtcgcagctgcaggggggcagccacggcggcggcggcgagggtgacctcaagcatctgcttgctgctcagcggaccaacgacgacgacaaggcagtcacggaaccggagctggaggaatcagggatcagaggaaagatcagcagcaacgtcgtcggggccggggg

SEQ ID NO: 160715 - DNA, 665 bp, Zea mays
  Clone ID: MRT4577_78153C.1
gctcgagggcggccgggccgggatctcttctctctccccctctctccccagacatgcgcgtcgcccgccgacacccgcacccacagcagccagagcagcagcggcagcaatggagcatcggggcctgcttctcgtcctcgccgccgcgctgtgcctcgcgggcgccgccgacgccaggcacgccaagaagtcgtaccaggccgtcttcagcttcggggactcgctctccgacgccggcaacctcatcgtcgacggcatccccaaggccctcaccaccgcgcgcgcgccctacggcatgaccttcttcggccgccccaccggccgctgctccaacggccgcgtcgtcgtcgacttcctcgccgagcatttcgggctgccgctgccgccggcgtcgcaggcgcatggcaaggacttcaagaagggggccaacttcgccatcaccggcgccacggcgctggagtactccttcttcaaggcgcatggcatcgaccagcgcatttggaacaccggctccatcaacacccagatcggctggctccagaagatgaagccgtcgctttgcaagtcggagaaagagtgcaaggactacttcagcaagtccctgtttgtggtgggagagtttggggggaacgactacaacgctcctctcttctccggcgactact

SEQ ID NO: 160716 - DNA, 220 bp, Zea mays
  Clone ID: MRT4577_78154C.1
tacggacactgtcatctcggtgtcctgccatccaacagagaacaagattgcttctggtggccttcataatgataggactgtaagattatgggttcaagatagctgatcaacttgtaggtgtctgcttcccatggagatggactgtaagactacgctcagaccagacctaaacagcacttgctatggatatggatcgctattctagatacgtttacaactt

SEQ ID NO: 160717 - DNA, 1337 bp, Zea mays
  Clone ID: MRT4577_78155C.1
cctgcaaaaccctcgatagcttttatctgtaatcaacttctccttacagccattagaaaaaaactataccaaacatgctggcatagtacgtggagatccacgcaacgtcgtcctgcacatcgcagccgtccagatgccccgccgccgtcggtccatagcatcgattcactccgcgcgcgccgctgtctcctcgtcgtcgccgcgttcctcgattatctctccatggcggccgcctcatcccccgctgcatccgccgcctcccccggtaggggtgccggcgaccctcccgcggcagcagcggcggcgacggctgggtgcccctgccccatatgcctcgaagccttcaaagacgaggcctacctcgacacttgcttccactgagaatctatccgtcatacatgcttttgatggcgaatcatttgagcggtggtacataaatcaggaacctaggaagaggcgtctttcagatgcacacgagttggtgtcacaattctataacatgaaagagaccacaagcaacatttctggggtgcagcaatactgggagcaacaaagatatctccgtaagaaaatttggcttcaaacctggctaagacgggaaattcaggcccttactcgggacgagaacgttgaggtcatagtccaccacattcacggtgtcatgggatccttcatgaagaggctcgaaaaggagcacacgtcgtcaaggtggacgacttcaccggagaaaaggagggaagagttcaggagattggtttccgatgctgctaggccgttcctcctcggccgaacggagcgattcgtcgccgaggtggagctcttcctggcatcggatctcaacatggaagcctacaacaaactgcgcgtccagaggtttagggagtccagctctcatctaacgagagagcaagatgcactgcctcgtgatcggtcgcttgaggagcactacatgtatttcctgtgtaacgacacggactgtgatgagatgtagtgatctgtgatccctggtacaaaaatgccttttattagcctggccccgattactagagagttcacggtacaacctaatgctgatacatggaacatacatagcagtggcgaacttgtttgatttttttaataaaatagaaaagaaaaactaagggatgaacttcggatttgaagctgttgaagaacagtaaaacgttgttacagtgcacggataatgcactctcaaaatgctctaatttcacgcctaaccgggtccagtccattgcagcccgcagtccggttgtttccaaacccaaaaaaaaaaaaaaaaaaaaaagaaaaaagtactctgcgttgttaccactgct

SEQ ID NO: 160718 - DNA, 322 bp, Zea mays
  Clone ID: MRT4577_78156C.1
aagccttaatttttttttattttttcctaaaagccataacccgttcaaattcaggcccggggggaattgcccattaaaagtttgggcggaaatcctttcaggggcttacaaaaaaaataaagaccccatccggggcttttgaaaaaaatcccttttttattatgagctttgtttcccaatttgattataaaccggcatgttgggacccctactgcgcccctgtggttttggccctaccagggtgaccccaaaggggtgtgccccttgagcggctgtttatacccccaaatgccccttgggtggcaactgggaaaacccaaca

SEQ ID NO: 160719 - DNA, 812 bp, Zea mays
  unsure (1)..(812): unsure at all n locations
  Clone ID: MRT4577_78157C.1
agcagtggtaacaacgcagagggcgcgggatgtgaagaagtatactaatccccctttcctcctggtgcaggcgtctttcagatgcacacgagttggtgtcacaattctataacatgaaaggtattatgtcaatctgttttttcccctttcaggctttcacccgtctgtatgctacatcagaattctatgtgcctcacttgttatgtaagacttatgcttgctgaattaagcagagaccacaagcaacatttctggtgtgcagcaatactgggagcaacaaaaatatctccggaagaaaatttggcttgaaacctggctaagacgggaaattcaggcccttactcgggtaagccgttgttacctattagcagtacatctattccataggttacaagaatcatgagtgcctttagctactggggtaggcgacctagcttttgttaaggatatatagcaacgttgagttttttgcaggacgagaacgttgatgtcatagtccaccacattcacggtgtcatcggatccttcatgaagaggctcgaaaaggagcacacgtcgtcaaggtggacgacttcaccggagaaaaggagggaagagttcaggagattggtttccgatgctgctaggccgttcctcctcggccgaacggagcgattcgtcgccgaggtggagctcttcctggcatcggatctcaacatggaagcctacaacaactgcgcgtccagaggtttagggagtccagctctncatctaacgagagagcagatggcactgcctcgtgatcggtcgcttgaggagcactacatgtattt

SEQ ID NO: 160720 - DNA, 156 bp, Zea mays
  Clone ID: MRT4577_78158C.1
attcggctcgagctagctatctcaccctttttttagacccgaaccggcgcctcaatgccggggggcttttaatagaccgagtggtattagaccaaggcaatatcatggtcgagggcgcctctggcgcgaactacaaagcagctcacaaggacggaa

SEQ ID NO: 160721 - DNA, 1183 bp, Zea mays
  Clone ID: MRT4577_78159C.1
ctcagtctataatatttagttgcaagtgagagttttatacttacgacatgctacattttgttatccttatagttggttagcctattgtagaaggtggttgaacttgtactttgagaccaaatatatattgcatacttgatattatactattatttgagcttgtcttattgtactcttatctgttcttatgaaggttagaggaatgtgtttggggtgagtaatttttttgtgttgtttcctctatccatggccatggaggagcaaaggaggccacctagctcgaagatagcgccaatgtccatgaaggcgtcctctgcaaatggacgcttcaaggcatgaagaacagaagccattttcgaagggacaggaaaactgcactgcaccaagacgtggacaagctgaggaagaagttgtggcacgagaagaacgtccactgagctctaaagcaggcgttcgcgaggccgctctgcctcgcctccctattgtctcaagtcaatgtccttctttgcttttcgatcaatttcacaagcaagaagcaacctcaccaataatctgttgccctttcgaaggactcgatacactttctgatttctgcctcttctgaattgttcctagacattggagcttctggccccgttgcaagtggaaaatccttgtacttaaaggttgcaatgtagtggccccgttgcaacgcacgggcactcacctagtagaagattaactatggcatgttttggtttgagtccggcctttccatgatttttattagagctgatcttgtggcaattgagcatcttctgcctagggcaaaaaaaaaaaaaaaaaaaaaaaaaaaaaaaaaaaaaaaaaaaaaaaaaaaaaaaaaaaaaaaaaaaaaaaaaaaaaaaaaaaaaaaaaaaaaaaaaaaaaaaaacccccccggagaaagaaccgggcccaaaaaaaattgccccccgggggaaacacccggccaattttaaatcccccccgggggtttaaaaaaaaaacggaagggccccctgggggtatccggggggtttaaaaacgggcccccgatgccccgggggggttttggccgggggcccatggaaaaagggaaaattccgggccctttccaaaaagggttcccgggggggtaaccccaccgggaatggcccggttacttcaaaaaaaaattttaaat

SEQ ID NO: 160722 - DNA, 597 bp, Zea mays
  Clone ID: MRT4577_7815C.1
ggccctaggggcctttttttttttttttttcttttttttttttttttttttttttttttttttttttttttttttttttttttttttttttttccaaatccaacttggaaaaccgggaaaaaaaaagggaaaaacggggttttcaactttaaaaacccccccttggcggaaaaaacccccaaccctttccccccccccccttaaaagtaaaatatggaggagcaagagggagccccccaccccccccccccacgggaaaaaggggccccagggcccccgcctcaggcggccaaaaccaaagacccaaaggctgggggccccaaaaaggctcaaacccaaacccccaaacgggggcaccaccccggcctttcccaaaacccaggaaaagggttgggaccttgggcagaacccggggcccaaaggcccccgggggggaggggccccgaaggcccagtggttccaaagccgggaccccaacagggggaaacttgatttgctccccatccccaggggttacagaaaaaaaaaaacacggtcccagttgccccaagtaagggggttggctgaccccccccacgaggggggaagagcccttgg

SEQ ID NO: 160723 - DNA, 497 bp, Zea mays
  unsure (1)..(497): unsure at all n locations
  Clone ID: MRT4577_78160C.1
aagagctngtcgtcgatacacccgtgcggtaagctcggaattcggctcgagaacccgcaatcgttcctgttgtgcttaagcacgagcatccacagagctggatacatgacctagagcgagcgggtggagaggctgctcgccagacatggacaggacaaggggatcatcgtgcgcgccacggaggagcaaacccacgagctgcggccccacccctcggagggtggtcacggcccgggactggcccctgccatacgtcggtaagtcgcgctgcccctacatgcttctggaccagcgacccagcatcgccaaccagcacggtcagttatacgaggccgacgcgcgcagattcaacaacctatccgagcacgacgttagcttggtcctttgacaacatcactcggggggtccatgagcgcgccattgttgaacaaccgttcgataaagatcgcctacgtgccaaacggtaaggtctacgccgtgatcgtagtagccccacc

SEQ ID NO: 160724 - DNA, 201 bp, Zea mays
  Clone ID: MRT4577_78161C.1
agaacagtactgtctaatttttgggatgcaacagccgtgaaacaaaagggggaaaacaagacagaccactcatattaaatggcaaggggggaacaaccaatggtggagatatggccgaaccctatttcttttgttaaaacatgtaggctgaaaggggctgtatggagcgggtatactgggagctgagcagtgcgctcaaac

SEQ ID NO: 160725 - DNA, 713 bp, Zea mays
  unsure (1)..(713): unsure at all n locations
  Clone ID: MRT4577_78162C.1
cattgggtacctcgnagccggccgggccgggctcttgcttggcctgttccaaattatatgcaatcgcaagcgagcagaatggcgaggtccagtggtagtagaccagtggccctcgtgctgctggcgctgtgcgccgccgccctctcgtcggccacggtgaccgtgaatgagcccatcgccaatggcctctcctggagcttctacgacgtttcctgcccgtcggtggagggcatcgtgcgctggcacgtcgccgaggccctccgccgcgacatcggcatcgccgcggggctcatccgcatcttcttccacgactgcttcccgcagcgagcagatcgaggtacccaaccagacgctgcgtcccgaggcgctcaagctcatcgacgacatcccgcgccgccgtccacgccgtctgcggnnccacggtgtcctgcgccgacatcaccacgctcgccaccagngnacgcnncgtcgtcgcgtccggcggcccctnttcttcgaggttcctctcgnggcggcgcgacggtctgggcgccggcgtcagcggaacctggtgggcaccctgccggcgcccttcttcgacgtgccgacgctgatcgagtcgttcaagaaccggagcctggacaaggcggactgggtggcgctgtccggcgcgcacacggtgggccgcggccactgcgtttccttcagcgaccggttgccgcccaacgcggacg

SEQ ID NO: 160726 - DNA, 1718 bp, Zea mays
  Clone ID: MRT4577_78163C.1
gcgtgggaaacgacaaggctggtactttctttaaaccaaagcgcagatcgactgcaaatcatgaagcgtgggagtgcggggggcatgtaagagcaatcagaatttcgatcagccaaatgaaggaaacaacattggagaacatacaaggtacacttatttacatgccatccaaagttttttttttgtttttcagctgttgcttaatggcactttctgagatccctcgacctgggccgggattcttgcttggcctgttcacaaattatatgcaatcgcaagcgagcagaatggcgaggtccagtggtagtagaccagtggccctcgtgctgctggcgctgtgcgccgccgccctctcgtcggccacggtgaccgtgaatgagcccatcgccaatggcctctcctggagcttctacgacgtttcctgcccgtcggtggagggcatcgtgcgctggcacgtcgccgaggccctccgccgcgacatcggcatcgccgcggggctcatccgcatcttcttccacgactgcttcccgcagggctgcgacgcgtccgtcctcctgtctggttccaacagcgagcagatcgaggtacccaaccagacgctgcgtcccgaggcgctcaagctcatcgacgacatccgcgccgccgtccacgccgtctgcgggcccacggtgtcctgcgccgacatcaccacgctcgccaccagggacgccgtcgtcgcgtccggcggccccttcttcgaggttcctctcgggcggcgcgacggtctggcgccggcgtcaagcgacctggtgggcaccctgccggcgcccttcttcgacgtgccgacgctgatcgagtcgttcaagaaccggagcctggacaaggcggacctggtggcgctgtccggcgcgcacacggtgggccgcggccactgcgtctccttcagcgaccggctgccgcccaacgcggacgacggcaccatggacccggcgttccggcagaggctgacggctaagtgcgccagcgaccccagcgggaacgtggtgacccaggtgctggacgtgcgcacgcccaacgccttcgacaacaagtactacttcgacctcatcgccaagcaggggctcttcaagtcggaccagggcctcatcaaccacccggacaccaagcgcgcggccacccgcttcgcgctcaaccaggccgccttcttcgaccagttcgccaggtccatggtgaagatgagccagatggacatcctcaccggcagcgcgggagagatccgccgcaactgctccgtgcgcaacaccgccctcggagatgtctcatcgtcagcccaccagctcgagaccaccgccggcgacgaggggctcgcggccgacgcgtgaaatgatgattagctgctgttgttttttctctggtctccttcgattctgttgaaataaggcttgctgcatcatcggtatagtttgcattcttctacccatcaatatggtatatcttcctgtgtcagccccgtgattaccatgcagaccaacgcgtgagcatctatatgtcttaacaatatcagcagcaaagcatgcatttgatgtgttcatttgaaagataaagtctagacacacaaaaacaggatggggagaaacaagcagcagttcaatgagctaagccaacataagctaatggtggagtggtcaatgtgcatatcttcttgtgtcagccctgtgattaccatgcagaccaaaaaa

SEQ ID NO: 160727 - DNA, 311 bp, Zea mays
  Clone ID: MRT4577_78164C.1
cccgcgcgttcgaaaacgaccaccgaactttaagcactgaactgtccaagcgggggactgtcagatagcaaggagcgtgtcgcgctgctcctggcggaactctctgatgctagtctgctgtcactagccccggtcggcgccgctacgacatgcgcacctacgcaactgaccccgtacgcacccgccatcgttctgaacactgcgctcaccgcacaacactacgccattctcaatgaacacccgcagacctgctattaccagtacaagatgaaccccatcatgcaacgctacatctactgccccaacggcta

SEQ ID NO: 160728 - DNA, 1225 bp, Zea mays
  Clone ID: MRT4577_78165C.1
cgattctgtctccctcaggtcgagattcgagagttcccgtgttcgtccatccgcgctgtgaggttctccgatggccgagaagtcacccagctccgcgccgcagggtggttctggtgggaatgaatcattcgataatcttgtaattcaagctccacagcttatgagggaggattacatacagaatgctgtgaagtttctttcacatccgaaagtgaagggttctccagtatttcacaggcgttccttcctggaaaagaaaggccttacaagtgaagaaattgatgaggccttttgtagagttcctgaccctaagccaaatggaacagatgctgtagctgctggtaggcaacaagcaaacaatcccagtcaatctgttgtgctgcaaccttatacagaagttcaaccacaagcagctactgcctctgccactgctggaccaattgttccacatacaaaggcacagttgagctgggtaaacacactccttggtgcaggtctttttcttggtttaggggctagtgctgccataaccctaaagaaattggtcatccctagtctgaaatcttggactcgtagagtcgttgctgaaggagatgaaaatgcaaagagtgaacatacttccaaactttgtgaagaaattagggaagccataaaagtttctgcatcagccttttctgatattgctaaaataaaccaagaagtgcttgcttcaaaagatgaagataggaaggtactcatgaagttaacagaagcattcgagtcacaagaaaatgtgtttaaatcattgagtgagaccttaaatcgtatcagggagaatcagctttcacaacacagcctattggaagagcatgttcagccttcatcatggaacgggccaattgactatcaagggagagcttttcagcaaactaatatgtatgcaacaccaccaaacaacagttttgacacagggaggaactcattcatgccattagctgctgaatcttcttatggaccatttccaggatcctactctgagcgggtgcagaggcctggtggatacggattccagcaacagacaagcagcgaccgattgaatgttgttggcccacggagcagctaccaagggggttcttctaatcaccatgctggtagtaatgccatggatgacccggcagcggttgcagcagaattgcagcgccgctgggttcccccacagccaccaggcgtcatcatgccagaggct

SEQ ID NO: 160729 - DNA, 620 bp, Zea mays
  Clone ID: MRT4577_78166C.1
gccggccgggtcgggaactacttatctacctgctgttgcctatgcatcctccatgcttcttgcttttgtatgaatcggcagcctgctgcaagattatgattaggtcatgtgcttctttgccacttcttatactgtttcctccactttatgatgattagatacgtactcgataagctacctgcctttagattatctacctagatcagagagtgatttgttgtgaaatgcactagaggtgctcgcccctctccttcttttgctcaatatgcggtgcatcgactagcgtgcacgcggatcgctgcgccccgctcgtgtccagcgccgaatttctgctcttgcgggcgagcgccgttccctctgtgattgacgacgcatcttctgctgcatgattacgcgcgaactcacccaatctcaggcatgatatgaactgcaaggcgcccgatcatgtgactgcgtggtctgcgacgtcgtgcttcctcaacctgaactgctaccagtatatggtggacgacctattcgacccgaagtacttctcgatgactcctctgcttgcgagcgactctagtggcactgtcgagcctactgacattattgaatctgcacggatgatgtctgagaag

SEQ ID NO: 160730 - DNA, 230 bp, Zea mays
  unsure (1)..(230): unsure at all n locations
  Clone ID: MRT4577_78167C.1
ctcgaccaanacagcctgggtgccaaatgacgttttgggcgcaccacactgacacaaattattaaggctcaataaccgcaatagttccctagggccacacaccaggagatattactgcctgtacagaaacagtccatcaaagactgcggtgcacaaaccaacacccttttccaggacaaaattagtgaagccaaggtctaacatagctcttgctaccaacaccaacaagc

SEQ ID NO: 160731 - DNA, 193 bp, Zea mays
  Clone ID: MRT4577_78168C.1
tacaaatgcgggaacacgagtggatgggagctaggctatgcgtgcatgcgacctcacattgcagcttatactacaacagggtctcggcttaccgatcgtcatttgacgtatcgtgtctgggacatggctgtcgtgggtcgacgtacgtcgcctgggatcacgtgcgccttccccgagatggcgtggtatcgaa

SEQ ID NO: 160732 - DNA, 279 bp, Zea mays
  Clone ID: MRT4577_78169C.1
gaaagaattcctttaactactttaaggtgaaatcagcattttccaaggcgtactctgtgttaactgatgcaaacttgtttattagtttgggacataataggagcattctgggtaccattgtgagaccagattcagttctccttgaccggaaaggctggaacaatgaagatatgttagcggaaccctgggagccgatcacccaacagtttgacaccgagaatgatgcagtatacaattggcatgtgatagacgaggatgaaccattgcccagaaatagtc

SEQ ID NO: 160733 - DNA, 286 bp, Zea mays
  Clone ID: MRT4577_7816C.1
acaaagagaagagaaagcataaggacacttactcaacagaagcacctttaggcgaaggaacagaacaatatgtcaatagtatctcagattgaccatttctgttacttgtcatttctactttcagaaactaaatgactttcaaatttgggtatagacaataaagaactgaagtgctcactactcagtgatttggaaattttgatgcttgtataaatgtcagataattaatttccaaaggcgtatgtattaagtaaaagtctgtaaatatgttaatgaggccaatttt

SEQ ID NO: 160734 - DNA, 210 bp, Zea mays
  Clone ID: MRT4577_78170C.1
gcggcgctcgagccggccgggtccaaactgcccgttctcctctcctctccccaatctgcgtgcgccgtggcaaccctagcccccgcgatccgctcgccggagggaaggagggagccccgccggcgtccatggaggtgaagctgtgcaaccacaagcgcgagcgtgacatcctggagagatacgcggacctgtacgccaccaccaaagtca

SEQ ID NO: 160735 - DNA, 498 bp, Zea mays
  unsure (1)..(498): unsure at all n locations
  Clone ID: MRT4577_78171C.1
tctagttctagnacgcgnacggcgccctgtgttttttttttttttttttttttttttttttttttttttttttttttttttttttttttttttttttttttttttttttttttttttttttttgggggaaaggggttaattttgttttttaattaacccagcccaaaaccccaacaaaaaagggggggggggcaaaaaaaatttctccgccaattttttttaaaatcaaggttttaaaaattgccatagggggccgggtttttacccagttggggcccttggattttgcccccctcaacttaattagttccggtttattttttaaaatttgccccctcaaattagtttgttttcctggggcaaattggggcttgggggaaaaaaaacggccataaaaatgggtcccgggggggcttttggggcctttttttttttccgggttttatggggccggggggggccccgtcccccttttttttttccttgtttttttttttt

SEQ ID NO: 160736 - DNA, 657 bp, Zea mays
  Clone ID: MRT4577_78172C.1
ccggccgggatgataaacccactgtctccgttcccgactccttttcctgtctctctctctctcggcctcgtccatccaaccggcagagccaacaaggaggcacaagcaaacggacgcgtggaggtggacaaacggcgtggacgcgaaccaaccgctcgatcactcccgaggttgagacactgaggagggatgcctggagatggtggctcacgacaacggcagcaagtcgcgggtggtgaacgacaaccccaacgccggaagagaggcagagtacggagcgcctcatgtaccaccaagcgcctcactcgagcaccaaagcacctccactctcgaaaatgacatcaaggaacccgggcacctcgggtgagatctggagcgaaggctagatcatccacatggcaacgagccgttccgcaggaactgcgaagagcgcggcgaccaactcgatgtggatagacatgctctacgtcaacggccatgaccagctctgctgaggaacatcagctgcgagcgcctctatgaggtcaacatggatctgttcatactccacgcatagctcgtggaggcataccatcgcctcgagaactactcattactcataactgctcaccgctagagtattgacggcaggcccttcaccctggcgatacaatccat

SEQ ID NO: 160737 - DNA, 580 bp, Zea mays
  Clone ID: MRT4577_78173C.1
cacgcaggatgatttgatgcatgtgttctccaagctgccgcgcgatctcaacttcatcgaccacacgagtaacatctcctggaaagcgtttgcgagggcgatgccggtgatcatagacccggcgctgtacatgaagaaaaagggcgatctgttctgggtgccggagaggcggagcttgcccacggcattcaagctgttcactggttccgcgtggatggtgctgtcccgggcgttcgtggagtacatgatctgggggtgggacaacctcccgcgcacggtgctcatgtactacgccaacttcatctcgtccccggagggctacttccacacggtggcgtgcaacgccgacgggttccggaacaccacggtgaacagcgacctgcacttcatctcctgggacaacccgcccatgcagcacccgcaccagctcaccgtcggcgactgggaccggatgctcggcagcggcgcgcccttcgcgcgcaagttccgcagggacgacccggtgctggacaggatcgacgccgacatcctcgcgcggggccccggcacggtggcgcccgggggctggtgcggccgctct

SEQ ID NO: 160738 - DNA, 440 bp, Zea mays
  unsure (1)..(440): unsure at all n locations
  Clone ID: MRT4577_78174C.1
cctcgaggccgggcgggagaagcttcatcatccggagcagccgcagtaccacctaccccgccgccggtcgccctccatctcctcgccgctgcctctcgtttctcttttcaatagtcgagatgagccgtggaggcagtgcgcggtggtggtcagagggctctgggtgatcggttgggaggaggagaaccacccaaccagcagtgcctccatgctgcaagtgcttcgcctgctgagaaaccntctgatgcgacgactgatgcggccgagcaggttgctgctggggctaccagccaancaataactaccacagggctgaatggcaaaaactggcaacttccttacggaccgtccttcaaccaatgtgccacgctgctcctggcggtggctctaccctggcgctactgttcggtggcaactgatgcccgcgctggtgcgctcac

SEQ ID NO: 160739 - DNA, 587 bp, Zea mays
  Clone ID: MRT4577_78175C.1
cgcatgaccccttcctaaacttgggttcttttaaagggccgccctttttttttttttttttttttttttgttagttggggccttacattctttgtttattgctccacaaaacatgggccgtaaaaacgtggcccgactatttctttgcttgccagcgcgccaaccaagctcttcgcatctggcgaggcgttaacttaccttacgcttcaccgtttggaatcatgcaattgccccaatccttgcctacaaactgggggaaacgaaaaaagaactgaacttgcgattcatgaaaacagggtactgccgggaccaatatggatatctactgggcttatttatttggataataactgacgcacactttactttctcaaaaggacttggtgaacatgcctgcgtcttgagaagccttttgccttgttggccgaaactcatgcctacttttttattctctgaagggataatggtgacactgtattggacgtaatttactgaccaaagctttttatcgcacacgaggatctcgcccttgttcatcctgttctcgatcgtgatcttctcgaaggtccatttgatcactttgccaa

SEQ ID NO: 160740 - DNA, 321 bp, Zea mays
  Clone ID: MRT4577_78176C.1
tgtgaatgtgaaagaaccatcgagtttaccccacatatcagcggtggagacagagatgtgattactgttggtgtaacaaagttgtcggtgacggttgcttggtcactgattagtcagtagtttgtagctttgggctgtactggttaacttagtaatttatttataatgacttatgtttgggcacaagtagtagtgcgtgtatcgactagtactgtgaatttgtgatgtgctttgttatgttgaactagtgtggtagtgtgtaaggttatcttagcctgttcaatggaagctggcgcctcatcctaggcgcggctgcaaatt

SEQ ID NO: 160741 - DNA, 436 bp, Zea mays
  unsure (1)..(436): unsure at all n locations
  Clone ID: MRT4577_78177C.1
ngaaaaatctcccagccgctcgtccctatccgttcagccggcgcaagattttcctgtgtctcagtcgttctcatcctctccccagccaccgtacctgactgcgtgatattttttggccgccgctcaccgccggtgaagattccgccgccgttctcccctgacgcggccttatctcctccctctctgctcatgccgcgttctctctcccagcgcctactcctccccgcgtgtctctctctccctgcttgcacgcactcgctctcatctccggccagccgagcgctcttcttccagtcgagccccagcgctgcagcccttcgccgcgctctgctcagctcgaagcccatctccttgcttccccgccgagtctatccctgcgctcgccccttcgctcggccgccgtcgagcttccctctgccccattcccgcgcgcccc

SEQ ID NO: 160742 - DNA, 281 bp, Zea mays
  Clone ID: MRT4577_78178C.1
ttttttttttttttttttttttttttttttttttgggttttgttttttttttttctacaaacgggttatgtccattacaaaatggggcaaaacacaatttttagggaattttcgggggcgacatatagaaactcacccctatggtcaaaaaaatactgtgttgcgttgtctattacactgtataaagaaagtgcttttaaagtgaatatgggggtagataaaccgtggactacacggtttaatattatccaaccgcagattacttttttatacacctccat

SEQ ID NO: 160743 - DNA, 128 bp, Zea mays
  Clone ID: MRT4577_78179C.1
gcgtgcctgcgcgcccacgctggatgcggatctcgtttaattccgcttcccgataggccacagaagagacgcctacctgcgcttcttagatgagcaattttgcctccttatatctcgcctatgctgaa

SEQ ID NO: 160744 - DNA, 291 bp, Zea mays
  Clone ID: MRT4577_7817C.1
tctagatcgcgagccgcagcgtctttttacgctttctctcacgcatacaatgactagtgtaaatttatattgacaatagcttaattatgaaccaacctataaatacatttatctttttagaacaaaacaaaattacatacacataaatgtcatcctatatctattatataagctcacctaaacttaatttattgtccatatttttacaacatttttacttgaatatccttgactttaccaaatttaatatcttttcacatattaatcttttttacatttttaattatattt

SEQ ID NO: 160745 - DNA, 547 bp, Zea mays
  unsure (1)..(547): unsure at all n locations
  Clone ID: MRT4577_78180C.1
ctgcaggccgactctagagcatgtaataacttcagcgctctctcatgatcatcatagggaagttgtgccttgttgacacacatattgttcacaatcgactagaaccgataaaacataatgtctatggtctctccaggcaattgcacaaagttcttgtactcttgccggtacatctcaaagagtctagtcttcatatgatcattgcactcatgtaatttctaaagggtggaccagatcgcgtgagccatagcgaagtgtccaactcgctcaaactccgccagcgagtggcatgagaacaaagcgtcatgagctttgttgttcgaatcatggatctccacttgaattagagtgatttgttcacttgtagcatggaacgcaacatcgagacagatcttccagactttgtaccctatatgtaacacccaatatcctattctaagatttattaatatttcttgataagatctggggctaaaaggtattttaatataagattcctcatttttaaatgttattccngaaaaaaaacataaaaaataaaatcttg

SEQ ID NO: 160746 - DNA, 124 bp, Zea mays
  Clone ID: MRT4577_78181C.1
ccgggcatcatgcgcatacctgtcggttagattgtctttggctctttgatagcacgtgtgacacttcaccgcctgtgtgactctgctcaccgttgctaggcactgctttatagtgcttatcatg

SEQ ID NO: 160747 - DNA, 394 bp, Zea mays
  Clone ID: MRT4577_78182C.1
attgagaccaactagcaacatagaaagcacaatactgcaccaacaatggcagccaaaggattgtgcttccttatgctccttggtctttctgcaagtgctgctaccgcaaccattttcccacaatgctgacaagctcatatagcttgctttcttcccccatacctctcaccagcggagtcttcaggatgcgaaaacccaattcttcaaccctacaggatccatcaggctatcgcatccggcattttacctttatcacccttgatcctccaacaacgcgtagacctattccagacattacctttggtgcactacttcggccagagcatgcaggcacagctgcttcctctacttgcgctaagaaaccttgatgcctactactagctgcagcggactc

SEQ ID NO: 160748 - DNA, 1502 bp, Zea mays
  Clone ID: MRT4577_78183C.1
gtcgaggagtgacggaccacgcgttctaatcgcgccctcaaacattggtcaaagagctaaaggaatcggagaaggaatcgatctagaactcaaggaaaccaggtcgacatctccgccactcgtgctctcgtagcgtagagcgaggccagggcgggaccagcgtggccggcgagaggggatggcgggctcggccgcgtactctgcttccgctaccaccgtggtggcgatggccaagggcaacggcaacagcaagggcgtcagaggcggcggctccgcgggcaccaacaaggtgacacgacctcctaggattacatctaatgttaagcagaacttgaggattctaaaattttggaaggaatttgaaaggaggcaaacaagtggacctcagcctgctactaggtaccgcaaaaagaaagtaataaaagaagtgcttcctgatgacacagacttctacgaggatccttcttccactcttcacttgacaaatgagggtttggaaattgcttcaccagttattctcgtggatggctacaatgtatgtggttactggggaaagcttaagaaggatttcatgaatgggagacaagaaattgctagacaaacactcattgatgagctggtatctttcagtgcagtaagagaggtaaaagttgtagtggtatttgatgctgccaattcagggctttccacacataaggaaacatataaaggggtcgatgttgtatattctgccgacttatctgctgattcttggattgagaaggaggttgaagctttggtggcagatggctgcccaaaagtgtgggtagtaacatccgatgcactggagcaacaattagctcatggagaaggtgctcttatctggagctctaaaagattggtcaaagagctaaaggaatcggagaaggaactcgatctagaactgaaggaaaccaggtcgacatcgttgcaaggaaaactcctgcagcacaagctgaacccaaaggttgtgcgcgcactgaaaggtcttaggaacaagcttgaagaacaagagcggggaaagaagtgaacaggaaccactggttgacaggaaagagagcaggtgtacagaagtggcgtttgtgcggccgacggacatcaactaacactggaggctggatccactgaaagtttgatgcgaacatcatgtaaatggatctggcttccttttgggtgcagtcagtttggtgtaggcaccatcagagccctgtgaaaaatagaagcactcacgcatggtagcagcttgttattgttgttagctgctgacgctttgaggcatgtcaacaagtagagatggattgcaaatcctaatcaatgtatattactttgtgtgtgtgtgtgtgttgttattgcgataaaagtcaaaaccttcctgtactggttcaccgcaccacagctagcagtgtccaattcaattcacattcagctgaataacaatttttttacgtcggaaaagttgtgtaaaaatgatgtaggacttgggc

SEQ ID NO: 160749 - DNA, 473 bp, Zea mays
  Clone ID: MRT4577_78184C.1
agccggtttggggtttttttttttttttttttgactcaaactgggaccgatgcccaatttacaaattaccagatgcccaaacccattttccggcaaccatacacatttaacactgcatttgcgaaaacggaaggaaaagattttttttcaagaaggggggttgtgcaccaagacgctaacctgtcacaggaaagctgcagctataattaataaccaacatggtctggactgaaatgcccagtacggctggccgtagttcatataggagcaaaacatgaggatctgaagcgaccaccctggatgcagcgggggaaatgaacaacccggtcgactggcccacggatcttcgctgtaacactggtctttcaagcctgagcggtgggcctgagtgacataagtggactgataaccatcaccaaccaggcccgcacgggatctaaccttgcataacagagggagccggaagggatggg

SEQ ID NO: 160750 - DNA, 2466 bp, Zea mays
  Clone ID: MRT4577_78185C.1
aaagacaagaaatcctcgccgccaggcgcaaagccgaatccgaagccaagagccgtatcgacatggaactctccctgacctcatctgctgctctgcagttcgtcctgctcctccccctgttctctgtgctctgcatactctacctgcgccaggatcccaagaagcagcctcgcgctcatggcctcaaggtctacccgctcgtcggtaccctcccgcacttcgtcaagaaccagcgccgcttcctccactggtccaccgacgtcctcaagcgcgacccctcgcacaccctgtcgttcaaggcgctcggcctcaccggcggcgtcatcacggctaacccggccaacgtcgagcacatcctcaagaccaacttcgccaactaccccaagggcgagctgacggtgtctatgatcgaggacttcctcgggcacggcatcttcaactccgacggggagcagtggctgtggcagcgcaaggccgccagctacgagttcagcaagcgctcgctcaggagcttcgtggtcgacgccgtccggttcgaggtcgtggagcggctgctgccgctgctcgaccgggcgcagcgcgacgggcggacgctggacgtgcaggacgtgctggagcgcttcgcgctcgacaacatctgccgcgtggcgttcggtgacgacccggcgtgcctcgccgaggaggagggcatgggcatggcgatggcggcgcagcagaggcagagcgccgagttcatgcgcgccttcaacgacgcgcagagcgccatcatggcccggttcatgtcgcccgtgaagtcgctgtggcgcctcaagaggctgctgaacgtggagcccgagcggcggatgcgcgaggcggtccgcaccgtccacggctacgccgacaggatcatccgcgagcgccgggcgaggggcgaggcggccgggcccgcgcgcgacgacgacttcctgtcgcgcttcgccgcgagcggcgagcacagcgacgagagcctccgggacgtggtcaccaacttcctcctcgccgggcgggacacgacgtcgtcggcgctgacgtggttcttctggctggtctccacgcggcccgacgtggaggagaagatcgtgcgcgaggtccgcgcggtgcggcgtctgggaagcgcgggcgcggcggcgccggcgttcagcttcgacgagctgcgggacatgcagtacctccacgcggccatcaccgagtccatgcggctgtacccgccggtggccatggacacgcacagctgcaaggaggacgacttcctccccgacggcacgttcgtcggcaaagggtggctgacgacctactccgcgttcgtgatgggccgcgtagaggacatatggggcgcggactgcgaggagttcaggccggagcggtgggtcggcgaggacggcgcgttccgcccggagagcccgttcaagtacccagtcttccacgccgggccacggatgtgcctcggcaaggagatggcgtacatccagatgaagtccattgctgcatgcgtgctcgagaggttcagcttccagttcgtcggcggcggggagcggccggggctcgtgctctcgctcacgctgcggatgcagggcggtctgcccatgaaagtggtcaccaggacgaactcggctctaggctagactttccacaccagacagtatccatctcaatacacatacgattggacggtttagggagattggggtgtaatttcacttagttttcgagctgatccatgtcaacccaaaaaaaaaaaaaaaaaaaaaaaaaaaaaaaaaaaaaaaaaaattaccatttcaccccaacacacatggattgtggcggatccatgggcatgcaaacatgcccttaagaattcgcttataaaacatgttaacgcaaagatgaggaccactcaggacatccacgtgtggtcggaaggactcttctttatgcatgaaagttgttatatatgctcggtgcaggtgaacagtcatgcagcaggttggtatatgtttcacaaaaagaactagggttttcaaaccctctacataaatatttgaaaaaaaaacatgtagactgaagaaaacttagcaacctgtctattcaattctagttgctatgagaatatttacttgttagcagtaagcacttataatcttcgaaagattggtttctcagtctggtttttcttacagtagtacagcacataaaatggaaaataaatatacttctacaaagcgctgaacaagaagaaataacaatgtgtcagcaagaaaattgatgatacatacattctttcatgcacaggtattgactccatagcagcggatctgaaggagaacaagatgaccatcataggcgagatggatgcagtggcgattgccaagaagttaaagaagattggaaagattgacattgtgtctgatggacttgcgtgagtacaaaagaaggaagcaaagacctagcatgatttaggaggtaaag

SEQ ID NO: 160751 - DNA, 146 bp, Zea mays
  Clone ID: MRT4577_78186C.1
acaatagggaaagcaggcacgccagcaggaaccggaccggaaaacccggaacgacccacgcgattttagacacgagggcgcaaaaaacccaaagggccgacacaccacacaaaggggacacaccacaaacaagcacgcggagaaac

SEQ ID NO: 160752 - DNA, 606 bp, Zea mays
  Clone ID: MRT4577_78187C.1
ccccacccgtcctgactcctgtccagcctgccgccgacgatgccgcgccggcgcacgaattgtcaccgtagttgtggcccgtattatggtgcacgagctggggcggaagcatcaagacggacctgcaggcgcacctgaaggagctgatgactgagctctaccttctcctcttagtcataggcaccggcggggcacccaacaagctatccaagatcaaggtggtgagcacctcgatcgcccgcttgctcacactgatcttgaaaaagcacaagtagaagctgaaggaggcgtacaagaagaagaacctgatgaacatccagctccgccctaagatgacccgtgccatgagccgtcgcatgaccaagcaccagatctatctgaagatctatatggaaaacaagcgtgagaagtactttcacatgaagaagtatgctatgaaggcctatgtcaaaactgagagatgctgtgcttaacatatcattgactgtattataatttgtggtttgaatggacatttgctgtgacatcggaagtacgatgtattactccatttacatatatgtctaaataggttggactggcggatagactggcaagggcggccgc

SEQ ID NO: 160753 - DNA, 443 bp, Zea mays
  Clone ID: MRT4577_78188C.1
tgcaaagcactggaaatccaatcgaggtagatatctgttgtaaacagcctcaaggactcgaactcacgctttatgttaccttttcatgatagctcactactgctattgctataataacactataatacttgataactaatataatcccattttcctgattaatttatactttaaatatcctccatgtattgtcatactttaactatcttcttcttttcatttataaatattattattttaattttttctcttttatttctttttaatattcttttttatcatttattttttttctttattttttatttttatttattttttttttttattttttttttttattatttattttttttttttttttttttttttttatttttttttttttttatttctttattatattttctttttatatattttatattaatttttataatttt

SEQ ID NO: 160754 - DNA, 257 bp, Zea mays
  Clone ID: MRT4577_78189C.1
gctggtcgctggagtcggtctaaagaaagaatggaggggacgttgctgctgctgcttggcctgctcctcgtgctacccctgctcctcgtcaaactcgttgtcgtcaacaagtacttcccggccgcgccatggcagcccgggaagccgccgctgcgtctgcctccggggccacggcagctgccggtgatcggcagcctccaccacctcctcgcgtcgcgccacggcggcctccttcaccgcgccatgcggagctgtcc

SEQ ID NO: 160755 - DNA, 369 bp, Zea mays
  Clone ID: MRT4577_7818C.1
ggtgagtacccaattagcctcagtgctacatgggcaaggggcatgtatgcgggcaccagaaactctaggaatccactctttctctctcaagtgcgctctctctcactcctgtctccagcatatttgtcttaactagactgtctctcaagtgtgctctctctcactcctctctccagcatatttgtcttaactagattgtctctcaagtgcgctctatctcactcctttcttaaccatatttgtattagctagattgtgtatagagtgctgtctatctccaacatattcctcttatggcgatcatctctgtctgtatctatctctatctctatcactctagctaacatgcttctgctacctccacagtag

SEQ ID NO: 160756 - DNA, 641 bp, Zea mays
  Clone ID: MRT4577_78190C.1
ccccctgaaaagactccatgcgacgggcgtataaaattttatgaatatctcgactcgcatgatctaattcgtccttagtagttttcgcacaggtaatggtgtttgctatagctcaagcctccaaattcaaagctatatttgaaaaccaaaatctcttgagcgttctatgtctgaccgttgttaggtttgagactaagagtgttcttgttgaaaagcagttgaatttcttcagctgcagttgagctttttcggttgagttaaacttcagctgagttgagcttctttagctgtagttgagctttttcagctgagttgaacttcttcaactgcagttgagctttttcagctacagttgagctttctcaacttcagttgaacttcaacttcaactgtgaacctctttgaccatacaccagttgaacctgcctccgggcctgttgaactggggttttctctcctgaactctctggtcaagatcagttgaactagtccccaggggcggttcaactagtccctgacccctctgaccaaactatccagcagtctatcagtcagactggcagacatgacgatagagctgtcaggggcggttcaagcagttttggtcaacatgaccagattgtgcagcagtctactagtca

SEQ ID NO: 160757 - DNA, 730 bp, Zea mays
  Clone ID: MRT4577_78191C.1
ctctgtttccttcccggactaccaggggcgaatcgcggacgccgcccacctcccccatctccttccccagcacgtcgcaaacccttcgtcgccacccccgcctcccgccgcggctcccgtcgtcgcgtggccgtcgcgagccaccgctggcgtctctcgtccggttctctgagtctcggcgacctgttcctccgccgagttctcggggccctgctgtcgccaccgccgaatcctgctgtcctcgccgcagccggggaacgcggtgtgttgcgggagctggcaccgcctccttcgaggtgcgtcgtcacggagggtagtttccgtttcgtctccatctccccaaggatcggtcatggtcatgctcagcttcgttgggatttctaagaccgttgagcattctgccgagcctatggtcccaatccataaccgaaatcgcttcatggatcctaatgggcgcgtcgaacatctcggggtttctattttcactggcacaattttattgcacgttgaaacatatagttagggttttatgacaaatgtatttaatggccatggtatccgtacgaaaatggcactacattttgtacagttttgcatgcttaccatatgctgtgccctcttgaaattttggtgtagctagaccaggagagagagtcgcactgtgatttcatgcatgtaattaaaatggactttaattgcatggtacaagccaaaatgtggtatgttcgtt

SEQ ID NO: 160758 - DNA, 698 bp, Zea mays
  Clone ID: MRT4577_78192C.1
ggaccctcgagctcgccggggtgcgtgtctcgtctggctgcagagcactagagccctgctgcctacccttgcgtattgtgtttacacttcacgatatggcaagaggccaagagctcttgcctacggtggagcagctgccgcagctggcttcgtctcgccgtggcttgccgtgctcggtgtggccatgctctccgtctgggccatcacgctcgccatcttcctctgtggcgacagctcagacaacccgagaccaccaagatacaatcctgccgttagtgcggctatagcagctggtggcggagggggctgtggtggcgggggcggtggtggtggagggggctgtggtggcggaggcggtggtggagggggctgtggcggcggcggcggcggcggatgctagagttcatcgcatccgatgcaccagcgggcagcggcatcagttgtgctggtctgcagaagctaagatgccagaagatgtatcaatggatatttttttacttgtcaattgtcatacatggcatatatggtaaggaaggactgtccgtattatgggtattcttattagtttttgtttgttgtcatgtctctgctgctattagcatggtgtatatataataataaattatgtcgtctttgaattcgtactcttatctgtacacaagcttttcaattgatggctctctaggtttgcaggcctt

SEQ ID NO: 160759 - DNA, 678 bp, Zea mays
  Clone ID: MRT4577_78193C.1
ccggccggggtgcgtgtctcgtctggctgcagagcactagagccctgctgcctacccttgccgccttgcgtattgtgtttacacttcacaatatggcaagagctcttgcctacggtggagcagctgccgcagctggcttcgtctcgccgtggcttgccgtgctcggtgcggccatgctctccgtctgggccatcacgctcgccatcctcctctgtggcgacagctcagacaacccgagaccaccaagatacaatcctgccgttagtgcggctatagcagctggtggcggagggggctgtggtggcgggggcggtggtggtggagggggctgtggtggcggaggcggtggtggagggggctgtggaggaggcggcggcggcggatgctagagttcatcgcatgcatccgatgcaccagcggcatcagttgtgctggtctgcagaagctaagatgccagaagatgtatcaatggatatattttttacttgtcaattgtcatacatggcatatatggtaaggaaggactgtccgtattatggatatccttattagtttttgtttgttgtcatgtctctgctgctattagcatggtgtatataataataaattatgtcgtctttgaattcgtactcttatctgtacacaagcttttcaattgatggctctctatgtttgcag

SEQ ID NO: 160760 - DNA, 284 bp, Zea mays
  Clone ID: MRT4577_78194C.1
gttgtgtggttttcttagtttgggtttcctctttccttatatttctaggcacaaaccccccataaaatttttttttagatttacacaggccccacggggggtaaaccaaacactgggctgtatctcccgcccaaaccaaaccggttttgaacacccaccttaacagaaaataggggcacttcccccaaaataggttggttgctcaaattccacagataacgacacggttaatcccctgaggcccattcctttaccatttgagggcacccttatattcccaaaaa

SEQ ID NO: 160761 - DNA, 371 bp, Zea mays
  Clone ID: MRT4577_78195C.1
cccacgcgtccgcccacgcgtccgaaaaaacgatctagcaccgcgaaggggctactgttgggggtctgcttcgtcgccgaaggtcctgtaagaagaaacaccttcagaagatcagcacagaagtaacgccgaagctaccatccagggagctttggcatagcgacacgacttgagacgaagggttgcaccgacttaaagatgaaaagaccgatcggtccatgataatttgtgtcatgattataactagttgtaaaggacataaatgtaattttgaccgggctgcgtcccgtgcctataaataggtgaacagtatccccgtactgttcacgttggcttgtattcgctcgtgcgtcacgcttggacctatacct

SEQ ID NO: 160762 - DNA, 437 bp, Zea mays
  Clone ID: MRT4577_78196C.1
gaaccaaaacaacagagttctacagcaagttcaattgatcactgtccaaccataccttatatatgggacatcaaaggctaaacctgggcaaaaacactagaaaaaactacgactgccaaaaacgaaacattagtgcaggtgcaccacgattcaagctccactcaacggctggtcttggtaacacgctcaatctacctcttcttctagatggcgacagtggggcaagagcccttgcatgagttcatcaactgatgtgcagagcactcagccaaggtggtgatgttgctgaaagcgctctccctatccccagtggtgatgaagacctacgtcatgaactcacccttctcacgggagagatattcacagcctgccttctcacaacaccagatgaaccaatacgggtggcattccacacgtggtccactggtgataatggc

SEQ ID NO: 160763 - DNA, 464 bp, Zea mays
  Clone ID: MRT4577_78197C.1
tacgtgggcttgcatcctctagatcttccgcccttttttttttttttttttttttttgtaaaaatttataaaaattgccctttttaacccaaaaaaccattaaaacctttttttaaaccggatcccaggtgacatgcattctttagcccgcttgtccctctggtttctttaacaatacatggccctgccaaaaccacatttttttttttttttttaccctggtcgtggtccaactaacaacaaaagaaatccactaaattttattttatctgcccgccgtcttccttttcatcacttcacttgtaaaaaacccacatccccattcccctttaaaaaaggattcccaaaactttccaccatcccccaatcatttactcttacaccttttggaccctactaatttctactatctctttacccaatccatccccttcaatccaaaaaacctcccaaaaatggtatgt

SEQ ID NO: 160764 - DNA, 278 bp, Zea mays
  Clone ID: MRT4577_78198C.1
gccactcgtccgaatacgcgtcagactgcatgcaggcggcgacactacctgcgtagggggcaagaaggacctaatctctttcacacgtgaacccgtacgtactacgggatccagaccacggcttccagctgacatagtgcagatattctgacagaggagtcagcaccatatgacagactgcttaatgactaaccgagactgtgggccccaatccagagtacgaagcacaggttgggaggacctttacccgatcagtaacagggaggacaatacaggaa

SEQ ID NO: 160765 - DNA, 177 bp, Zea mays
  Clone ID: MRT4577_78199C.1
tttattaatgcttggctccaaaatgcaatttctccttttttttttttggtaggatcgttaacatggaagtgaacaaatgctcagtgattatctacatgaatcacgcgaggctggtgcttccgttctaaagaaatttgtcaacaatgatgtaccgtcgagacagattgtaagaatacc

SEQ ID NO: 160766 - DNA, 410 bp, Zea mays
  Clone ID: MRT4577_7819C.1
aagctcggaacactgctcgagggccattatgcccccccgtttacaaaccacgggagccccactcggcccagggcaaattaaaaacggaaacacccggcatggcccaccagagctcaaagaatgaacccgaccctccatggtacgtccccacgaagtactagcgggcataaaccaagaagagcaaaccagatgccagcggctgcggcccgaggcacacaacaacccagcccaagaaactaaaggcaccagcagacggagacaagcaagaaccacaggaccaactgacaatatccaacagaacaagccctcccaaagcacacaccacgatggggcccaaccccaaacacgaacaaaaatccaagcacccagcagagagccaagtcaggacccatcccaccaaatccgaaagt

SEQ ID NO: 160767 - DNA, 425 bp, Zea mays
  Clone ID: MRT4577_781C.1
atgtgattgttaggaatccatctgtggaggctatcttttcctcagaagaggggaagataggggggtcttcccaaatggggggggtaagagaagccactactttctcacgaatgtttaaagtgagagattccaggagttaccagttgaattcccttctcgttataggaaatacccagaataaagtgaaactttcccattcccccatcccctcgtatggaaatctcagatctgttctccttaccaacagggaaggtttaaagaaagaggaaatgatcgcagggaaaagctccagtctttggattctccagaaaggaaacgcattaaatactccagggaaactggcaggtaaattagaaactgttggctcagcctacacctttctccgacttgctgcctttttctgatctcagatggagggtattggg

SEQ ID NO: 160768 - DNA, 842 bp, Zea mays
  Clone ID: MRT4577_78200C.1
gcgggaggtaaatacgagagggccgataaatggatatgatcgctcgtacatcatgccatgtcaggacgacgtactcgttgcgtcacgggagatggcagaaccgaccgcgggcgagacgattggcccggacgacggtacgccgaccttgtccgcgcacgtgggccgcacccagtccgagtgcctgatcggagaggcgctcaagaaccagcgcgccatgaaccccatccacaccgtctttgatgccaagcggctcatcggcaggaggatcagttttttttttgtccccacccccatcaagctgtggcccttcaaggtcatttctgggcctggtgagaagccaatgattgttgtccagcacaagggtgaacgagaagcagtttgcagcctgaagagatctcctctatggttcttatcaagatgcgtgagattgctgaagcttaccttggtaccacgatcaagaatgctgtggtcacagtccctgcctacttcaatgactcacagaggcaggccacaaaggatgctggggtgattgctggccttaatgtgctgtgtatcatcaacgagccagcagctgcagctatcgcctatggtcttgacaagaaggctaccagcgctcggtgacaacaatgtcctcatcttcgatcttggatggtggcacctttgatgtctccctcctcaccattgaggaaggaatctttgaggtccaaggccacagctgccgacacccgccttggaggtgaggactttgaccacaacgatggtaaaccactttcctccagcaagtccggagtaacaccatcaacgatatttctgtcaaccccaaggctcaccggaggctgacg

SEQ ID NO: 160769 - DNA, 480 bp, Zea mays
  Clone ID: MRT4577_78201C.1
cgaagatcgtattgacaacttcaagacaactgcacatttaagatgtcggacctagaaaattaccaacccgaaggccaagaagaaggtgaaggttccgcccatgcccccttcaaaggccaaatgtcggttctggacccttttaaaggtgtcctgcgcctgtcccttatccaacatggtcttgcccccggtcttcgccaaggtttcaaaggccttgaccggcggcaagcccacattttccttctgaaccaaggcttccaagaagatgcctaccagaaacttgtcattgcccttggcttccaacacaaaaacccccttatcaaaggcccttaccggaagcaacttggcgaatgggcccgtcttttccttcttgaaccggaaggccacccccccaaaggtggcaactggttttgcctcgtcctcaaagacttgggtgaagaatcccaagaacccttcattcttgttaacttctttcaaaaccaa

SEQ ID NO: 160770 - DNA, 847 bp, Zea mays
  Clone ID: MRT4577_78202C.1
ccggcccgggcccgggaaagatcccaaattaaagggccatatataccgacccgaacgccgaagcaatataattcggtggaccaccactcaaaggacgcgtacgtacgggccgggagcgagcatgaataagatcgcctccgccggagcactgctggccgtggtagcggtggttgcggcgttggccgcgacgacggcgtcggcgaaggactacacggtgggcgggtcagacaggtgggacacctacgtcgactacggcaagtggaccgccggcaagacgttcatggtcggcgacaccataacgttcgagtacatgccgtaccacaacgtgctggaggtgacggcggcggactacgccagctgcaacgccggcagccccatctccacccactccggcggcagcaccgccttcaagctcaccgccacgggcacccgctacttcatctgcggcatcccgcgccactgcctcaacggcaccatgcacgtcacgatcaccaccgttccctacgattccgccaccgccgcggcaagcggccccgcgcaggctccgctccagtcatcctcatcgcctccagcagccgacgcctacgcgcccggaccggcggcgggacacaaggtggccctgggcgctgcagggaagtcgccggcgggcgcaccgagcagcgcgccgcggtatcagcagcccgcggccgcggtggctgggctggcggtggccgctctggtggccttggtcgcctaagctagcaacgtgcgtgtaatttgcacgcacgatgcaggtttgaccttttgagatactgcttactgctgctggactgtacctgaaacaagacttctgttactgcgaacgtac

SEQ ID NO: 160771 - DNA, 359 bp, Zea mays
  Clone ID: MRT4577_78203C.1
cttccgaatgagaaagcaagaagggtcttttgccgtattagaaaaaagggccctgttccattgttccaaaaattttccagtggggatcctttggcacttaaactggtagaaaaactatttgcggttgattcaaaggaccggctgacagcagaagaggcgttgcgtgatccatactttaaagggcttgcccgggctgtaagagaaccattctgtcgaccaatcagaaaagtggaatttgactttttgcacaaaagaatgtctaagggagagattagagagttggtatttcgcgggatactggaatattacccacaactgttgggtagcttcatttatggcgcagagaggacaaccttttt

SEQ ID NO: 160772 - DNA, 578 bp, Zea mays
  Clone ID: MRT4577_78204C.1
gtgctccgcgtccccaccacactagagaaccaccacagcacctcgccgccgccgccgaggacgacgacgacgatgtggcgttcgcgagctcgcgctctcctcctgctccgctcgtccgcccccagttcggcaccgccgcagcaaaatccacttcggagcttggcccgagccccgcccccgccaccaggccttctctcccgcttcctctcctcctcctcccagaaggccccgccggctgcctcccctccctcgtcctccgcacccgccgccgcgcccggatccgctgcaccgccggcctacaccggaaacctgaagaaagcactcgcagggttgaggagaattgatttagaagggttgcggtggcgtgtttttgatgcaaagggccaggtacttggacggttggcatcccaaatagctgttgtgcttcaaggcaaggacaagccaacctatgcacctcatgtggaagctggagacatgtgtattgttcttaatgcaaaagatatctgtgttacaggaagaaaaatgactgacaaaatttactactggcatacagggtatattggccatctgaaggaaag

SEQ ID NO: 160773 - DNA, 451 bp, Zea mays
  Clone ID: MRT4577_78205C.1
gcggtcgttgcggttctacaggggcgacatctacggccggttcctggatggcgacgggcgcctgccggtggaccggcagcaggaggaggagagggagaagggcgccagcgccaacggtaggtaggaagggatgatgaggcagaggggagagcgggagaggaggaggccagctcggattgttgacttggtcagccgccgatgcggtggcttgattccactggcgggtttgactggtgtctcggttttctacggctatcgaagctgacgtgggagctaatggtacggcctacgtggtgaggtcacgtgacgaagtgcacagcatcagcggcgcggtgctgcttgctacgccttagtgtacaaagctacaaaagcattacaaaattatacggaaggcggtcgtttgaaggatgacgagtgggggtctacatgtgaatatacttttgttgggttc

SEQ ID NO: 160774 - DNA, 201 bp, Zea mays
  Clone ID: MRT4577_78206C.1
atgcacgcgcgcggtacgctgctaggaattctgtatgcgagggtagttaacgaccgtttttttcgcccctctgcctatctttctttcggggtacattaaaaggcaggacgcggcgatctactcacaggcgatcgaaccctggaaagctactgatcctgcaccgaaccttaggacggcatgtagaatcgcatctctacatca

SEQ ID NO: 160775 - DNA, 265 bp, Zea mays
  Clone ID: MRT4577_78207C.1
ttatatctcgagcgggcggccctttttttttttttttttatcggaaatcaaaaggggggggtgatcattgaggggcgcttaaacctactgggaatttaatataacccaacaaggcttttgttgggacttgggaaggcatcttgcatatcatgggcgttgacatctccagatcttggtggcgatggcttactttacgccggctaccaggaccgaattcaatagggtgggttcactatatcttaagggtggccaacagagttacaag

SEQ ID NO: 160776 - DNA, 437 bp, Zea mays
  Clone ID: MRT4577_78208C.1
aaaagggggggtagaacccgatccaagcaccccgcgcggaggggcggaagaggggccacacaacgggccccggcgaccgagggggaagggagcaaacctaaaaaagcacagcgggcaaggggaagaaaaaaggggcgaacacagccgacgaagcggggggaagaaggcaggggagaacccctggcccgaagggaagccgccgagggggctaaccggccccgaaacgaaggcaaccggggggcgggacggggaaggggggaagcgaaggaaaccggcgcgggggaaggggaaaggggccccgggcgaggccgggcacgaacataaggggacccccccccacctgggggggggcgagaagaagccgggaaacaaggccaaccttttgggggagatgaatacctggaaaacaaggccggccctgggggggaccgccgggc

SEQ ID NO: 160777 - DNA, 362 bp, Zea mays
  unsure (1)..(362): unsure at all n locations
  Clone ID: MRT4577_78209C.1
anttcctttttttttcttttttttttttattttgcagcgggaacataatcaccaaacattacaaggtacaaaannnnaatcgtcctttatcagaacaattacaaaagtataactttgaaatatatatatcctcactcaaatgaccatcctcagctataacataaagactgggtatactgataaaaaaaggccgaacccaccgacacttaacaccatcacagcagcacaaagttatatcctaggtaacaccagactagtgaatgttagataacctccacttgatgattatccttgttctgattctagactcatcaaaacgacggcatattattttatccgctttattctccgtattaacccgc

SEQ ID NO: 160778 - DNA, 331 bp, Zea mays
  Clone ID: MRT4577_7820C.1
aatcgggttgacgacgagtaattagtcggcggccgcccttgttttcgcctgcaggaacagagcgaccggctggaggttcttcaccagggcctgcccggagcccaagtccacgagcagcaccatggcaagccccagggcggccagcgcgccgttgatccgatcgctgtacgcggtgaagccgagctcgacgggcgcgccaagcgccgaccggggctcccgcagcggcacgggcggcagcgtcacggagctggctgacgcggacgccgcggccttctttttgcgcgcgccgcgcttattgggcccgacgcgggacttgatccgtagcacgcgc

SEQ ID NO: 160779 - DNA, 529 bp, Zea mays
  unsure (1)..(529): unsure at all n locations
  Clone ID: MRT4577_78210C.1
ggtccgggaggaaagagtaacagaagttgattgaatatgtacagagaattttctcaactcatccctttacttagcacaaccgaacacttacgactttgtactggaagaacacatcgtactcaagacaccgacatgaacaagcccagtgctggtgtggtcatctggaaaaagtccatatctaaccctccagcagagtcaagctgatacgccaccctctggcccgccgcacacggcacactgacgatactgtatcggttggcaggttggacagatggcacggaaccgacaattgtcgaattgacgacatcgttcgcgctgatccccgccgaagctgcttgctgaccaacacttgacacagtaattcccgctggcgatcgaagtttgactggcgacatgtcaggccaaggagaaactggcggcatatgaaactccaaattgcaggtcttgccctcatcttcgggacggatatcgaagacgaagatagacgacagtgttggtgaaactgagcaatgtaaccatttncaatgac

SEQ ID NO: 160780 - DNA, 381 bp, Zea mays
  unsure (1)..(381): unsure at all n locations
  Clone ID: MRT4577_78211C.1
cctgccgcgtactatacttggtcctctagacggcnccctttttttttttttttgcaggggcaaagattccattagctttattgttctgctgcttcaagcagcatgcagctccaggtcatcgaaattccttttgtcgttgatttcgacataccgtacgtggctcttcaataggtgtgtcggaggacactcgggggggggcgctagaccctagctagcacgtgtaacaaaacgcactatacgagactagtcaaggtatatatctagctcacctaagaaaccggctgtgttcgctgcggctttaatccggctgcggctgcagcttctacagtattttgtctctactgattgcagctgcagcagtacaaacagccataacattac

SEQ ID NO: 160781 - DNA, 717 bp, Zea mays
  unsure (1)..(717): unsure at all n locations
  Clone ID: MRT4577_78212C.1
cccgggnncgnacccacgccgtccgcccacgccgtccgtaccaaatccgngcagnaagccaacatctctacgacatacatgcccttgttgtcatcagaagatttgccgaaggaataatcaagatcacaaaggttaactgtttcattaagggtgnttgaaaaaaaagacttgtctgaattagaacaatttcatatatgataaattgtaacaacctgacaggatttttcgtttggagccaagagttagcagctatcattttagcagccgttacggcgggacttgtggctgtcaccttgttcaaatgttgaatcacagattgagcactagttcaaatgttgaatcacagatttttggagatcgagctggattcggggccagacgccaaggaacattgcaccaacattatacatgaaagccaagaggaagaatatctcggtggcccttagaaacaatcgatggatgcacttctgctctccttacactcaagatagagaaataaaagaattcatctccctctggcagggtatcaataacacacatgaactcaatgatcttgatgatactattttatggaggtggacggctgatgggaaatacagcacaagtagcgcctacaaaattcagttcaccacgaacttttgtaaaatgaaaatctgtcctatctggaaggcgagaactgagcccaaatgtcgcttctttgcatggaccttgttgtat

SEQ ID NO: 160782 - DNA, 336 bp, Zea mays
  unsure (1)..(336): unsure at all n locations
  Clone ID: MRT4577_78213C.1
cttgcttatttagtccagggtttttttttttgcttcccattacacatgaaacananngcaagaggtattttttttatagaaaaaaaaaaaaggggcccccctgcatagccaaaaagccgagatcccaaagacgtaccttttccagtgtgagaccataaccccttttaaaaaaaaccctcctcctgccgtctttggtactcaccaccaggcacccacctcagtgactttagtgtggagcacaacgccaacacaaaaatgccagcgggacggcccccggagctgtttatatgatccatccacccttgacaagaatgtgttctgaacccaaatgttttt

SEQ ID NO: 160783 - DNA, 322 bp, Zea mays
  Clone ID: MRT4577_78214C.1
ctcagcccagatcagtcagcctcttttttttcttacaaatgctgtcaaagaaaaacgaaagaaatatcatattctttcgatcttttatagacagcatttgtaagataaaaaagaggctgccgttctgggctgatcgatcgcgttggtcagccatgatttactggaccgatacttactggcgtgcctgctttcttttataatgttgtatttcattcattatttgctaaatcccttgtttatttcttcctttaatttaattaatttattcgattatttgatttatttcattacttttgttaatttatttcatttcccttctatt

SEQ ID NO: 160784 - DNA, 1145 bp, Zea mays
  unsure (1)..(1145): unsure at all n locations
  Clone ID: MRT4577_78215C.1
gccggctctgccgtcaaccacgcccacgtccccgcggagcactgacatgcgcgcgtcgtggtaccctggtctgtggcctctgcgctccccttcctccgcggccctcgcctcgccagaacagcgggagatctcgggatcgggcggccctcctccggcgtccggatcgagaggattggacccgaatccgatcgcctagcagggggcgcggcgcgcgcgcgatggcgccggcggtggtgtcggcgctggccaagtacaaactggtgttcctcggcgaccagtccgtgggcaagaccagcatcatcaccagattcatgtacgacaagttcgacaccacctaccaggcaacgattggcattgactttctgtcaaaaacaatgtatctagaagaccgaactgtacgtttacaactctgggatactgcaggacaggagaggtttaggagtcttattccaagctacatcagggactcttctgttgcggtggttgtttatgatgtatccaatagacagtccttcctgaacacctcaaagtggatcgatgaagtgcgcaccgagagaggtggcgatgtgataatcgtgctcgttggcaacaaaactgatcttgtcgacaaaagacaagtgtccacagaagaaggagagagcaaggcaaaagaattgaatgtcatgttcatcgagaccagcgcgaaagccggcttcaacatcaagccgttgttccgcaagatcgctgcagccctgccaggaatggagacattgtcagcaaagcaggaggacatggtggatgtcaacctgaagtcgacttctagccagtccaactcgcaacaacaggagggaagtggatgcgcctgctagaagtgtgttagcttcaggcatactttcacttgaagagcgtgtgtcggtaactgttgtataagcagttacatatttcactagtgttactacttactatccttaattctctgatgcttctgtagtgaggctcacatcgttttctcattttccatcttgattttgtatgttgcggcaaaagaccagaaataacaacattttgaatcacaccgggtcttttgttacacaaaaaaaannnnnnnnnnnggaaaaaaaaaaaaaaaaaaaaaaaaaaaaggactctgcgttgttaccactgct

SEQ ID NO: 160785 - DNA, 334 bp, Zea mays
  unsure (1)..(334): unsure at all n locations
  Clone ID: MRT4577_78216C.1
aacccaaatttccaatgtattgcgggaataggcaagtctgttacaagatccttctcccctcatgggcttcggcggcngaaacactctgacttatcttcagtttgcggctcactttggccgacgctgcacgccttccagagggcttattggtcaggtttacctctttggctaacatcttgccggtggcccagcttgctgcttttctgcttcccttcgaacagngagacagaggtctctggcttcttcatgtcttaggtgttgaacctccttgggtctccaaatctttctgcctcctgttctttcttcgcctccttcttcaccgtgttccagctgc

SEQ ID NO: 160786 - DNA, 366 bp, Zea mays
  Clone ID: MRT4577_78217C.1
gttttccgaatcggccgcgcggggtaccgcggcgccgggggccgcccggagctccggccgagtccgttggcgggggcgagccagggcacaacgcgagcgcaatggcggaggtggggagccgggtgcgcgggttcctgcggaaccggtggctggtgttcgtggcggcgatgtggatgcagtcgtgcgccggggtcggctacctcttcggcagcctctcgccggttatcaaggcctcgctcggctacaaccagcgccaggtcgccgggctcggcgtcgccaaggacctcggcgacagcgtcggcttcctcgccggcacgctctgcgccgtgctcccgctctgggccgcgctcctcgtcggcgccgagc

SEQ ID NO: 160787 - DNA, 578 bp, Zea mays
  unsure (1)..(578): unsure at all n locations
  Clone ID: MRT4577_78218C.1
ggccgcttttttttttttttttttagcacaaactgatggcggtgttatctcactgtacatttcttcaggtcacatcttccaagaaacatagatgatcaggtgtttatccaatgggcacaaatacttcttttttttttttttttttttttttttttttttttttttttnttttgtttttttttttttttttttntgttacccattcctgttaaactttatcaatgttttttttgtagttattatataaatattgccatttgttaatgcttactttttttttttaaattttttcttttaatttctttttatttttttattttcataattttttttatattttatatactttttcttttattatcatttctctttttctgatttcttttattcattctttaaatttttttttttttttgtttttcttttttttttacattttttctttatctattttttttgttgtttttttattaattatcttttttttttttttttctttattttttccttttttttatttcttttttggcacctttcttttttttatttttttttttttattttggcttttttttttt

SEQ ID NO: 160788 - DNA, 768 bp, Zea mays
  Clone ID: MRT4577_78219C.1
ctcgagccggcgggcataatactgttgtcgctcccaggttctgcattgtaattttccaccataataaatattgtattttctataaaaaaaaaaaaaagacaagtgaaccaatatagcccaagccctatacaaccaaaccctaacacacacccatttgattcagtttccatggctagcctcaaggttgcatttttggctgcagtgctctgcatggttgtggtgagtgcacccatggcacatgcagctatcacgtgcgggcaggtgacgaatagcctgatcaattgcatcggttacctccagaacggaggaacgccgccgtcgggatgctgcaacggagtgaagagcctcaatgccgccgccaagaccaccgccgaccgccagacggcgtgcaactgcctcaagtcggccgccagccaaatctccggcttcaaagccaacaacgccgcctcgctccccggcaaatgcggagtctccatcccctacaagatcagcacctccaccaactgcgctaccatcaaggtttgaagagaaagtcatggacgcaggaaaccggaaactactcactagtatatgagtagcattattaatattaagaataagatcgagggtgatgagggctccacttatatgcccctctcctcttgtatgagagatttgtattggatagctttaaattgtgttgcgttgttatttctctgtatgagttacacatagttatatctactttaatattgggttctcccgaaaaaaaaaaaaaaaaaagcggcc

SEQ ID NO: 160789 - DNA, 1301 bp, Zea mays
  Clone ID: MRT4577_7821C.1
gcttgaagagacggtacttggcatatgatcttatggcgcttggctcagtgtccaaaactaggggtgatataaacacaaattattatggcttgggattaatcttaaacagtggaaatttgtgtacgcagttgccattttctgaaaggtggaaaatgctggaagatgaaataatacagccgcgtaataatgagaaaggccttgagcgtggtgctaagagcaatccgttgtacaaatatgacatggaactattttcggttaggagaaaggctttttgggtgctattaacagtaaaaaaggttcttaaggtgtttattccatcgctatgccatgatgctgatggccttatatttcagggctgggatgatccatatgtaactcgtactcatgaaggtcttctaaagtggaaataccctgagatgaattctgttgactttctgtttgagcttacaaatgataatcgtcagctggttttcctatatgagagaggaaaaaagaaacttatggatggtgctcggatatcatttactgatgatgtagatccatcttctgtcgctgggaggattgtcgagtgctcttggaacaaggaaaacagtgttgggcatgtatgcgtattagatctgataaatcaactccaaacgacatcaacacataccggaaggtgatgaggagtatcacagataacattaccgaggagaagcttctcgaagagactgatgagataacgctcctgccgatgtatgccgataggatgaatgttcgtgttcatacaaagatggcacaacacaggcgaagattgccaccacagtgctagtctcgttgctagagtgctgggtcgctctcctagccagcggctggcttctgtagctgtgtaattagtagaggtttcagtagccccccccccccccccccctatgatgatggccagccaactaattctttgcacttcatttgtgtcttgtcccctgccctcacacctacctgtataggcttccctgtaaattgtgtgctctatgttcctccatattctcccctatggttttatttttcatgggtgtagaatagcgtttaacaaggcgggtggtgttctatgtaggcgttgccatctctcggtgctgcctcgtgctagaataatgtagggtgtactggcgataccatgtggttgcgatatatggcttggttttagtgttttggtttgtgcgcacctgatccgatcctttgtccaacgaagattttttccccttatttttgggtaaaaaaggacgtcaatgttacccctctatggtatagtgcttttttgttcc

SEQ ID NO: 160790 - DNA, 1973 bp, Zea mays
  Clone ID: MRT4577_78220C.1
cattgggtacctcgaggccggccgggctatcctacgacacaagcaaagcaaagcagctcaaaaaactttagccagctatcaagacatggctccacttgttgctgctgccacgaatcacactgcccatagaagccacatagtaggacccaacaatgagaattttccaaggcaccaaccttgttcatcacaaaacagaaacaagagactcaggcttaggtcacgagcacaaaggataagcagtcagctgcttgcaagccgaaagcttatgccatggcaaatccctaaaagggactggtttcctcctagcttcatctttggtgccgccaccgcagcataccaaattgagggcgcctggaatgaagatgggaaggggccaagcaattgggatcacttctgccacaattatccggattggatactggacggaagcaatggggacactggagccaattcctatcatatgtaccctgcggatgtcagattgctaaaggaaataggcatggacgcgtacagattctccatctcttggtccagaatactgccgaagggaacgctcgaaggaggtattaatcaggccggcatcaagtactacaaaaagctcatcaacttattgatagagaacggaatagagccatttgtaacaatttttcattgggacgtccctcaagcactggaagacaagtacggtggctttttaggcgacaggattgtgtttgcaatttttttagaaaggattacacagacttcgctaaggtgtgctttgagaacttcggtgacaaggtgaagaattggttgacctttaacgagccacagacatttacaaccttttcgtacggaacgggagtttttgcccctggacggtgctcaccaggagaaaaatgtgctcagcctattgctaactcactcaccgaaccatacattgctggccacaacatccttcgagcccacgctatgactgttgacctctacaacaagaattacaagggtacagacggccgcattgggcttgcgtttgacgtaatgggtcgcgtgccatatggaaatacatttctcgatgaacaggcccaggaaaggtccctcgatcaaaacctaggatggttcttggagcctgtggtccgtggtgactaccccttctccatgagatcattagcgaggaaacggctacctttcttcacggataatgagcaagcgatgctagcgggttcctatgacatattggggataaattactatacctcaaggttctctaagcacgtcgacttctcagaagactactcacctaagctcaacgccgacgacgcctatgccactgcagaaatctttggacctgacgggaattctattggtcctcctatgggaaatccatggatctacatgtaccctaaaggcctaaaggatctccttatgatcatgaagaacaaatacggaaacccgcctatctatatcaccgagaacggaatcggggacgttgacacaaaggataatcctctatccatgcaagatgcgttggacgactacaagaggctagattacctccagcgccacatctcagttatcaaagaatcaatagacttgggggcggacgtgcgcggccacttcacatggtctctgttggacaacttcgagtggtctagtggctacaccgagcgttacggcatcatctacgtcgaccgtgacgacggctacaggcgctacctgaagcgctcagctaagtggctgcgagagttcaacggagctgccaaaaaggctgaaaagaaggttcttacgccagcttagaatgtagtggtgtgtagtttcagttcagctgtgtgtctgatgtgtatggccgtgggatgaaacaagctagctagaatgtagtggtgtggtagtttcaattcagtagtgtgtgtccgacccgttttatgcaaataaataattaatggacgtgtgatccatttgtcgatatcactatcgatcggtaatgttgaattact

SEQ ID NO: 160791 - DNA, 196 bp, Zea mays
  Clone ID: MRT4577_78221C.1
cttccgggcataccactttcttatgggggcttctttcttttgatcttgggaggggctaccgataccagggcccttgttttcctttgggtaaaggggaaacctttgaaccttttaatggtagcaaatagctgggtagcttccaaaatggggattggcttttcccctggtgcttgaaagccagaatttggtcattcgc

SEQ ID NO: 160792 - DNA, 245 bp, Zea mays
  Clone ID: MRT4577_78222C.1
ctgggctatagctctggaatcctactctggtcctttattctcttcgaaaagtatggtgtgaggatcaaggcaacgagggggctgtgcttttgcaaacaataaaaggttcacggaaagatgagtggacagctccgttaccacatgttactgtcacctttgctcaggcgacccggagcgtccaacttgaggctatccggaactttgttgttggaaatgatacgaacaaaaatggagagtcttgccca

SEQ ID NO: 160793 - DNA, 480 bp, Zea mays
  Clone ID: MRT4577_78223C.1
tcggtttatcataccagaacctgaacaaagggtgtcatgtgctgatagattgggagctttcctacggagatccaaggtacgcgagagagagagagtatgatatttgctggggcacagggaaaaggactggcccgctatattaaatgggaataaggtgtgtctgcaagctagctagcatcatctgatagttgtatgctagcacttaatttttataattttttagaataattttagtactcttttttaatatatttatatactaattgttttgttaacttttcttattaatttgagttataattatttttttttatatgtaattttatttattttgtaattaagaatatatgtttatttatattatatattataaattaattatatatatttaattgatattacattaaattatttatttatatataaatatttatttattatattatttttattttatattattgtaatatatattttaat

SEQ ID NO: 160794 - DNA, 184 bp, Zea mays
  Clone ID: MRT4577_78224C.1
acgggctcctacaacagcgacaaccattactgtaaaacactggcagtggctaattcattgatcgatggcttcctatagcatgaacaattgccgtcatacaaccagttctttctgatgaaccctgccttgttacaggaagcaacccatgcggcggaggtggcatcttttaaattacttatgaaaa

SEQ ID NO: 160795 - DNA, 284 bp, Zea mays
  Clone ID: MRT4577_78225C.1
aataatacgacacaccgtgtagccaattcacaaagggcaaccgggttaactttccagcatgctcaatgcttgcactttacaatcggtgcagcttttcattattagatattggacatggggagaatggtctaacataggataggttaaaaggggttaaccaaatatatacatgaaccatgtgttctctcccatatgcctattgagggagtagctactgtgacacccttctacagggcatggctccttttctcatgatcagagaaggcttacagatctgaaaacct

SEQ ID NO: 160796 - DNA, 410 bp, Zea mays
  Clone ID: MRT4577_78226C.1
ttgcaggcgcgctagaagtctgagatcggctcgagcgctcattgagatctctcacaatggctggcccaagcaaatctctcgtcctcgaccctgctctgcagaaatactatgagctcaacgcaaaccgctacaaatacttcaaatggacaccgcgaaacgcatggttgactctactctacgtcggcattgtgcctagtatcattggctatgttgcgtataccactgatggaaaatatgacttgcgcggaaagagacggggcgataccattgctgaattctagaggagatggtggattgatggcgttgtgtgattcattaaagtactgcggccgtcgatttgggagtttggcaaaatcggaatgacattttgtcaaaagcggacaggacggttctccagatgaatgaatacc

SEQ ID NO: 160797 - DNA, 428 bp, Zea mays
  unsure (1)..(428): unsure at all n locations
  Clone ID: MRT4577_78227C.1
cagacacacaaacacaagtcgtcgtaggcagcgatcgtctctcctctcccactgatggcgccaaggaagagagagagatcgccgctccccttctcggcgtcggtggtgcgggtgccctccctcctcgagcgagatctgtctggtcacagatctatctgacaaaatggtgaagatctgctgcatcggtgctggctatgtcggtggcccaaggtggcggggattgccctcaagtgcccagacattgaggtcgtcctcgatgacatctactaagngccctctgcaatttgtaagcatcgttattgatctgtggtagaattggaccatcaagtactactggtcgttcattgatggccctggacaccgtgtcttcatcaagaacatgatcacgtggtccatcccaggctcactgtgctccgcttatcattgac

SEQ ID NO: 160798 - DNA, 348 bp, Zea mays
  Clone ID: MRT4577_78228C.1
aataatttttttttttttttttttttttttgtgggtttttaaaacaatgggtttcggttaacacctcaaaaaaaaaaaaccacctcacttataataaaaagcttttctcatttttaaacaagcaacttccctcccctaaataaaacatactttttccctaaacttttacctattaacccattccattcttacatcccctttctctgttgttccccccctttttactcaccattttttcgcccccaccatcttatttaccaccatattcatacccttcctcctaagccccccctccatacactaatttgatcgccttctcccttgttcaaacaagactatttttcctac

SEQ ID NO: 160799 - DNA, 377 bp, Zea mays
  Clone ID: MRT4577_78229C.1
ataacttatattccgcagcgtccacagatcatgaatgccatgctcaccggctgcctcggatccgtttagacgactgtgatcatttcattccggaggatcctaacttgaagctcacgatctagtctgcgagccacgcaatgctacccgcagtagatgtgtacgtgtcctacgaagaggttactgagcgtacacaacgttctcatgcgtgttagtggaggtgaccacgtacaccatcgtctgatggcaggtccacagtgctctgccactatagacgcccagtcgccttgtgaggttgccctgcgggaccacatcggtacctccactatcaagtgccacatttctgatgacatccgtgctgaatttaaggtggaacacat

SEQ ID NO: 160800 - DNA, 304 bp, Zea mays
  Clone ID: MRT4577_7822C.1
aattgttggggtgttccttctacagacaggggagagtgaaaaaaaaccgtggttattaaatattgtaacagacaaccctctccaagggggggccctaccggggccttgacagttgttcgacttactaccccccatgaggaatccggtcgcagcaacaccgtttgccctccgtgacctgaacaaaggttggcggaccgggacctgccacaagaaaaggccgcaatttggtctaccaacctgggcagccagacgcagggtgcaattcctccagaaaaaaaccgccccgggggctgaggatgggccc

SEQ ID NO: 160801 - DNA, 318 bp, Zea mays
  unsure (1)..(318): unsure at all n locations
  Clone ID: MRT4577_78230C.1
ggcaggccagaaagaggagagcaggagagacccaaagagaaacagaaggcagatagagagggagtgagaggcaggagctgagacacagatcctggaggaagaagaccaaaggaagggggcagagacagatgtctgctcctcctcttgaacttgggtgggaaaccccacccaaaagccccctttgttacttagnaattccccttccctgactcccgagggctagggctagagcagacccggtaataaagcaaccccagggctcttagcttataccgtgcctaaanagcntgccggcacttgccntgnttaactttttnt

SEQ ID NO: 160802 - DNA, 815 bp, Zea mays
  unsure (1)..(815): unsure at all n locations
  Clone ID: MRT4577_78231C.1
ccgggnaaaaaaaaaaaaaaaaaaaaaaaatatccacgccggcgacttgacctcgcccatcccacacgcaagtccctgacgaccagcttctgaaagccggttccgatatctacagccagcatggacgtcaaccatcccgagaataaacaagttcacgtcgctggcgacgacaaattcccggtcgacacgtcgattcccgagcgcaagactggaaattccagtgaagatgaaaaaatcgttacgaccaaatcccaccctcaggttgaaattcccatttacaatgacgtcgagcgtgtcgatcaaaccgatctatcctttgctgcaattctcaaaggcactgccgcaaacccgctcaacgtattcgaaaagaaggcagcactcatcaatgtcgaaatagacaaattcgggatgggcagataccaaatatgcatctggtttctctgcggtttcggttacttccttgatcttgcttgggcccaaggcgttggntttgatcgtcacttccatttacncaagaaatggatgttcctgccccagagcaaggaaacatattttccattgcaaatgcgggattggctatcggagcactcttcttcggccttgctgtnagatgttattggccgcaaatgggctttcaatttgacttgtctgattacttcaatcttcggactcttgttggctgctcctaaattcaactatagtgcgatatgtgctatttacttcctcgcatcgctgggcttaggaggcaacattcccatcgatgccaccattgcccttgaatttctgccacataaccgccgctttctcgttgcact

SEQ ID NO: 160803 - DNA, 237 bp, Zea mays
  Clone ID: MRT4577_78232C.1
atggctcaccagagtttctccggcccgcccgaggccttctcaccgccgttctcccctctctgctcgtggattcatggtcctttcctcgccatcaagttcgcggtggcaccctcttcctctctgcccaactccgacgaccccggaacccccctagctcgggccagcctcaactccgacgacttcactaccgcggagagtagaggcgccgcccgcagccgtctgttccccctggtctaa

SEQ ID NO: 160804 - DNA, 214 bp, Zea mays
  Clone ID: MRT4577_78233C.1
gtcccgtttttctctgaactggttgctacttctgagtctgatcattcaagtgctgtacagagcacacacgccgaccagaggggggggattaaacgcaactgaccacattcgctgatacaccgaagaagacctcacctgcaagtaggtcacgcacccgctgaagaccaccgaccaccgcatggccacctcatggcaccttcccccccgtgactgg

SEQ ID NO: 160805 - DNA, 3387 bp, Zea mays
  Clone ID: MRT4577_78234C.1
tccccgcttccatggcggttctctctgtccccgctgccccgtcgctgcagctccctttcccctccctcatcgatgtggaaaccgcacacaaactgcaggcgcgtcttcgttcttcctccgcatccggctactggctcacaccgcctgtcctctcctccgtcctctggctctggctcatggatgatgccaccaacacctctcctccgtcctccccagtggcggaactgaggcctggcctacccgggcacgacttcgacggccccgcccagattattgagtatatgatatgagatagaagcccttaaaatgagtaatgaagatgtggcacaaggattgggatccttcattggagcctgatatacttgtttataactcggtgttcagtgcacatgttctatcacagcagtggaaaggcgtattttgggtgttctagcaaacgagaattggtggtttaccatctacagctacaggagcaacatttgggttggacatggaagtaagcttcattttttgtaaacaagaaactacaaactggctaaaagctttatgctgcttgcgttgcagtcttgctggtttgtgctgttgctgcttgctggagagatactgcatccgttaaggaggatgacagagtgtggtgaagtgctgcctggaatacgcatgcattgtgtgtctaatgtaggcgtccacagagaggatcggtgcacggttctgctgatctctcccacgcacgcgcatggaagcagatctcaccccggtggcggcgcgctaccccaccggccctcggcgcgagcgggcacggcgcgggcgaggcacacggccctcccggcggggcggacgcggcccctggccacagcgacggtgacaagacaaatctaaccaacaaagttgttggagaggcagtccaggaagcccccggagaagttgcaactgtcacagcccatgcagcgcgcgggctcactgatggccaccagcgtccttccaagcatggtcggcaccaccatcgtcgtcctggtcccatctcgcggttgctggtcctgtgcgccgcccttagaacaagcaacccatctgctcttcgtgaaactgttgtcgaagtcccaaatgtctcttgggaggatattggtaggctggagaatgtcaagagggagctccaggagactgttcaatatcctgtggagcatccggagaagttcgagaagtttggtatgtctccatccaaaggagttttgttatacggcatcgtggttgcagtaagaccttgttggcaaaggcaattgccaacgagtgcgaggctaatttcatcagtgtcaagggttctgagttgcttaccatgtggtttggtgatagtgaagccaacgtccatgaaatttttgacaaggctcgtcaatctgctccttgtgtcctcttctttgatgagcttgacccaattgcttctcagagaggaagcagtttgggtgatgctggaggtgcaactgatagagtgcttaattagctactgacaaaaatggatggcatgaatgccaagaaaactgtgtttattattggagctacaaacaggcatgatatcattgaccccgctctgctgaggccagggcgtcttgaccagttgatctacattccactgtctcatgagcagtctaggctccagatcttcaaggcctgccttaggaagtcccctgtggcgaaggatgtggacttgaatgctcttgctgagtacacgcaagtgttcagttgagcagatatcacaaaaatttgccagcgtgcgtgcaaatatgcaatcagagagaacattgagaagggataatgacaatgaggatactcaagctcgtgaacactctgatgaggaaatggattctgacgaggaacatgagagggcaaagaaagatgtctcactgaactgagaaatgagcttaaaatattggagactgaacatgcagaatgtcttgtgaaggcgagatcaaataggcaaatcaagtctttcagatcttgcctgcatactaccagatgctggaggtactgtgtttcagattcactgcttggagctatcagcatatttatcagtgttctgagctctgcgctgtgacaagtccacctctcattggtcaatcttctatctgaactaaaaaatgaacttagaatctcacacattgagcataacaaagttcttatgaagatcattttaaatgagcatgtcaagtcattgagaatttaatttggtccatctctttccaccctgtagaatggttggttcccaaaaatcttcattgttcttctcagatacctttttcttcgtacgagaccccacaaactgcgtcgaccccgacccggccaccacgccgccataccctcaagtacttgcatttgtttcatagaaacaatctactgttcctcgcaagacagaagtttattttgtattgtaaggttaaccttcatttatttttttcaaatggtgaaattctggaatcaatagtatgtgtttgtttataggcaaatcaagtctttcagtgtcggcttgcactccaaaggaaacacttgcaatgctgaagttataaaaggatttttcagatcttgcctgcatactaccagatgctggagaatttaatttggtccatctctttccaccctgtagaatggttggttcccaaaaatcttcattgttcttctcagatacctttttcttcgtacgagaccccacaaactgcgtcgaccccgacccggccaccacgccgccataccctcaagtacttgcatttgtttcatagaaacaatctactgttcctcgcaagacagaagtttattttgtattgtaaggttaaccttcatttatttttttcaaatggtgaaattctggaatcaatagtatgtgtttgtttgatttggagtcatatggattatttttaggcgtactgtgtatctagggtttgcgtttttttgtttagtagcataggtgtaattctgttatttggtgggtctcatcctccctttacaggaaggcttgtactccggacattcttttctttcttataaatacaaagatttacgactctattgtaagttagaggtaaaaatagtgtgtttgtgcaagctcaaatcttttctcataacagtataacacacatttgtacataagttattgtggtattatatgtttccgtgacaatataacacatatgtacataagttatcgtattattatactgttccgttgcaacgcacgggcactcacctagtataacatttaagtcagcataaacacgttaagagatatctacaaacgcataattaaagttataaattagattcgattgaattattattttaataattgaaaattaaacaattaccaagtatttcatatgaacgatatggcgaaagtgatttattaaagcg

SEQ ID NO: 160806 - DNA, 349 bp, Zea mays
  Clone ID: MRT4577_78235C.1
gcacacgtacctaagcttgttatcctctacgcggccgcccttcattatgttttatgagaacacaacaaagagcggacccagccaaacaatcatctgtctaacgggctccttcacagcaaaacatggcccccgaagaccatgactacaccacttggacggccacgaactcatgagggccagccagcaaaatcagtggtgcgggctgattcatggggaactaacccaccgaatcgacggcggtcacccaggttaagactgtaactgggcaataagcacataatgacctacccgctgagacaccacatacatggccggctcagtcctggtgacattccgaaaaaatggaaat

SEQ ID NO: 160807 - DNA, 463 bp, Zea mays
  Clone ID: MRT4577_78236C.1
ctcatcccacgttaactttagtctttctctcttttcccattactatcgtgtataggatccactacgcaccggtgtctctagacgtcttctttggacatgtctaaacgtctcaaaataacaactagtaacgttggaaaattggtagcataaattttcagctgttttgggctctctgagttgtacttgttctatgaggcgtcatgttatagttgacgcaaatattcagagaggtgttcttttaagaatatatgctttcctccttaatcatcgatcatcctgtaataacttggttctctgttattttcaatagcattccaccactatctgtagtgggcctcagcgaagaacaggccttggaggaagctaatggtgatattcttgttttcatctcatcattcaacccaatgaagaacagcatatccaagcgccaggagaagactatcatgaaactggtagttgatgc

SEQ ID NO: 160808 - DNA, 159 bp, Zea mays
  Clone ID: MRT4577_78237C.1
ggattttggcttttcaccccgcgcgtaacaagctctcagggactaagtggctgtgtgggaacctctacctgacgctcacgtacccgtattgaaatgtaagttccgggcgataacagattggccttttctatactaacattactctatttgtaatgccaa

SEQ ID NO: 160809 - DNA, 199 bp, Zea mays
  Clone ID: MRT4577_78238C.1
ggctgcgttaagacttccatgtggagtggttgttggcgcttcagttagtattattaggtatcctggtggtcttctggctaattttaagagatagttatgtgtagctgcagtttctggtaagccagacggtccagttgtccgtgcattagaatgactgccttcttggtgtataactcacagaagatctggtgggagtcca

SEQ ID NO: 160810 - DNA, 359 bp, Zea mays
  unsure (1)..(359): unsure at all n locations
  Clone ID: MRT4577_78239C.1
gacatgtgcgccgtttcccgccaccagatcgagaatcgtccccaggctcatcgcgccgcgccggcctcctcctccgggtccggacgccccaggagtcgggctcatccgcaacggccacgtattcgccggccaggagaacgtcgagggcatggagcccacgcggcgagcgctcgaagaggaggtcccagaagtgcancaccgaggtctacgacaagaatgcggagctgagcaagcctcggagaccggccagagccccgggaacatggagcacgcgtgctacgactcccgcgtgtgcccgtccttcgacactgggactgaaatccggcgagggattcacagtgcgcaaaatcgcttccatg

SEQ ID NO: 160811 - DNA, 227 bp, Zea mays
  Clone ID: MRT4577_7823C.1
cgccatcacataaaaccagtgcaagcagaagcatcgcaatggcgatcagcaccatggccctctcctccacagccttctccggtaatgcagtgaacgttccgttgtctcacttcggcgaggtccgcgtgacttttcgcaagacggcggctaaggcaaagccggcggcgagctccggcagcccgtggtatggccccgaccgcgagctctacctggggtcgctgtccggc

SEQ ID NO: 160812 - DNA, 378 bp, Zea mays
  Clone ID: MRT4577_78240C.1
attgtatggtctttgatatgtggtttcccgatgtagttcaagttcaacaaactatacaacaggagcaaaggaacaaaagagcgccggaagagggccgagtaaacaagcaaagctcaacaaaacatggggtgggtatgcggacaacatacaaccgagctttgcttgaattgaacgaagatgaaggaaatcgaaagcaaacaggccatacccatgtggggctgcattcaaccaaaaacaggtggttgatccaagtgcaacaattaacggaaccactggggctgctcaaaacaatggggctaccagctgcaaccagaagaagtaaaagcctggcagtactccactgatgagaaccatgaagatcgcgggaaaccagccatt

SEQ ID NO: 160813 - DNA, 334 bp, Zea mays
  Clone ID: MRT4577_78241C.1
aaaaaaaatactaccactctttctaaacttttttatcaaaaatataaactttaaacaaaactagtgatctttaaataattatatgacacaaaaaacaatcaaaaaaaaaaaaaggccgaccttcctaaagaatccaaatttacttacacattcatccaactcaataactattttatattacccccaaatattaattcacttgccaaatttttaaaacatcaatatttgaaaaaccctgttttaccccaataaaatatcctttgacaaaatccccttttctccagatatcatataagcaaaaagccccaatcacatagacctttcaaaaattttc

SEQ ID NO: 160814 - DNA, 285 bp, Zea mays
  unsure (1)..(285): unsure at all n locations
  Clone ID: MRT4577_78242C.1
ttttcccaaacggcgaacgcgagcccgagagcgcggaccgcgngagggagacgaagagagggccggcaagggcgacggcccagggaacggcagcgcagcaccgcacgacggacacaggcgacggagaggggcagaacgaccgcgcccagaacagcgccaacgacgcgggcaaccgcacgacgcccacgcacgaccacaacaccgacaccgagagacgcacccgagaagagggcaagaaccagaggcgccacgaaccccgacaacaccgaccaaagacgacgcgcg

SEQ ID NO: 160815 - DNA, 112 bp, Zea mays
  Clone ID: MRT4577_78243C.1
acaaacacaccataaatggacagtgccaataggcctgcaaatggggtgggacaaacacaccataaatggacagtgccaataggcctgcaaatggggtgggtcgtgatgggtt

SEQ ID NO: 160816 - DNA, 568 bp, Zea mays
  Clone ID: MRT4577_78244C.1
aaactaatctcgctagcggtgagttgaacttgtccgatttccgggagggagctgtgctgctcgtccgcgtccgcctccgctcccgacgcgcctttcgtcgctctccaactgaccatattcgattatatatataggtgcctcgaagtgatgcatgtccaagcacacacccagatatatgacgagcgggcacgaggacaacaccgtgtgtttctgggcctgactgctagtgctggacagagctgagtacctcaagtacaagtacccgatagcaggccggcgctaggagcatcgacgacctgctgacatccgatgactatcaatgaatacatcggcctgatgacgcacatcgagagggaaaacgccacggacgacgctctggcctaatactttatacgcagagtgctatagcacgtcagctgcgtgcctgctcctcaggtgtctgctcaagcttgaaccgccatggtgaccgagatgcaaaaggccgctctttctacgcgtctgggaataccgaccatctacggtatcgatgaagtggatgggcaccacaatgtcgacatagatactattt

SEQ ID NO: 160817 - DNA, 690 bp, Zea mays
  Clone ID: MRT4577_78245C.1
aagtgaatgtagttttgaaatattgtaattttaagatgtcatagtttacaattgtacatgacacacgtacatattgctcaaaatgagtgggtttgcagcaggatgcatagatttccccccttcttttcaccctttctcaactatattttcctcctttctctttcgtaaaacatcaagaataggaagaggtgaaacgctttgcgcgtgcttgtactacttgaactgatcagtcctactgctagcaacacaacaccaggtggtctccatcccttagcacggcaacgtcgtcgacctcggcgccctcgacggtgagcaccctcctcggcgccttcccaaacttcacctcggctactttcatcagctcttgcagcgaatccggaaggaggacaagcttccccgcggcatggcccaggttcttctccgcgccatcgctgggaaagcgatcatgaatgaccactcgtagtccgccttgtcgacgcggcaacatgcagggagcggtctcttcgtgttgttcggtgccgaaggtggctttctgattctgccttggaatcatcctggcagcgtcgccgtcgttaagtagctgttgaaagatggagccgatctgaagctcatccatgcttgttttggaaaatgtctcctcgaaaaacggcgcatcctctgcaacctgcagttccttgagagatttgagct

SEQ ID NO: 160818 - DNA, 412 bp, Zea mays
  Clone ID: MRT4577_78246C.1
ccacaatgtaacatcattgtattacaataccttgtaccacaacacaaaaacaactgggggcgatcatattattaggtgtgggattgatcttgatagctagctaattaacatgcaacttaactagataaacaaatatgcttgttctatccacgagattaataataccgcaatgacctaattgaaccctctgaatcatacgctcctttacgctcacggagattcaggtgactatggcatccatcgctcaccctgcgcactacggtaacaaactttaccacaactagtacgaccagatgcgcccttacacacagcacatcatggtcgacatcttggggaaggcgcacgaccaggacctcaggatggccgccattccttctgcgtctccactttcacgactgcttaatcaagggct

SEQ ID NO: 160819 - DNA, 326 bp, Zea mays
  Clone ID: MRT4577_78247C.1
tttataaattggtttcttaaaaactcagtggttctaaacaagcccttagtagaaaatagaggagctaaagttatttttgaggagccataagttatgcttgtggctccaaaatagctctagcttctatggagggtccctctcaaacacaccccgcgagcatatctaagagtcgaacttgtataagaatatatttttatatttgttcacactcaatagtttttttctatttttggctagcatgaaatccaaaatagatgtgggtaatatttgacatctgattaaagaagttgcatgatatttgttaaaaaaaaaaaaaaaaaaaaaaa

SEQ ID NO: 160820 - DNA, 486 bp, Zea mays
  Clone ID: MRT4577_78249C.1
ggctcgaggcatccgtctccggctctctggcaatttcttcccagcacccctcgccctcatgctctggccgccgtccctgcttctcatggcggatctctggccccttcctgcagccggccgtcgtttcccctcgctgctcttggagccggtcgtcctcaccgtgagccccttctgttttccccatccggccgtcgttcttcagcccaggtcatcgcggtactctaagtccaacgcgccgttgtccactgcaagctcgccggctcgcccttctttaaggccctcgccagcagccgctgctcgtcctctcttcgccctgctgctctctagtggacgccagttcccagccccatctccgctgctcctctctccctcatctctgcagcttcccatggctatcaccgctccctgatgcctgctcgcgagtttccccaacgtcatcagcagccactccatcccgcatctggtcagccgcttgtggggcttggg

SEQ ID NO: 160821 - DNA, 262 bp, Zea mays
  Clone ID: MRT4577_7824C.1
tttttgtgtggcgaaacctgcgcgggcggtggtggcttaagatgaccttggggccctacaatggaagcttccgggcgctcgtgggactgctttgatgattgactatctgcatatgacaatatggacagcccagtatgttaagctgttcaaccggattggcatcgacttgcaaggactccatattgatgtacagtactccatgtaagtatcatgagggcgtgcacaagggcgcaacatttagatgttatgcagactgaggagg

SEQ ID NO: 160822 - DNA, 356 bp, Zea mays
  Clone ID: MRT4577_78250C.1
aaaaccggcccgacgcacgcgtcggctctttctccctatatttctgccttacgatcccgttcctgcatcgcggaggagatggccgactccagcacgccgctcgcgtcggctgatgcgctgctactagctgctgctcgcgccgctcgccgaagagggggacaagtcgatcggctgctaccatgagcggagcgaggaagaggcgcggcgtatgtacgccgagtggatagaagcgcacggccggacctacaacgctctcggtgaagatgagcgcaggatcgaggcgatcaggtgacaacctcacctacttggacgcccacaacggctgcgtcgacgcgggcgtacactaattacgacta

SEQ ID NO: 160823 - DNA, 298 bp, Zea mays
  Clone ID: MRT4577_78251C.1
attaaaagtaaaaagcaaacaaaaagaaaaaatggggaaacaaactgaaccaaaaaagggtccgaacatggaccgaaaagaatccagcactgtaaaaacagacgaaaaaacccaaaaaggaaccaagacacccccccaggacaccaacaggaatgaagaagagttgctcaaaataatcgcaaagagaaagggaccatgggaactcatggagtaccgggcaggacccaaagataatgggaacatacggtctagagcagtaaccaaaacaaaaacccgacccaagggatggggaacaaac

SEQ ID NO: 160824 - DNA, 489 bp, Zea mays
  Clone ID: MRT4577_78252C.1
cgaaatccccgggccagcccacccttccgaaataaaaatttttattccaatccatcctctttagctaaaaaaaatccggttcgcccgaatggattatctccccttgggggaggtccacaaaaaaattaccattaaaccataccaatagcctacggtctaccatacttaacggaatcaaaccaccggaaaaaaaaaggttaatcgtaaccaaaaacaaccacaggccaatccttccttggaagtaaaaattttccatttattaacccctttcctaattttttcctttctacaaactctatcccttttttaaatatttttattttttttactttttttatatgggtgtggtgtttttttatatttttatttaattctataaatatgttttacttcttttatctatatattttattcttctctttatttcttttattcatttttttattactatattttttattttttttcttccatatattttttccctat

SEQ ID NO: 160825 - DNA, 239 bp, Zea mays
  Clone ID: MRT4577_78253C.1
gcctggttaacaacatacagaggtgtcttagattccaatgtggggctatacggctagctggagagcacgcacacctcaccgatggtctctacggatcaataggtgacacagacacacagctttccaaagtttcaccaagctctctaggctggacagctgtgcaccaattgtgcatgcgctatgttcacatatctcacagtccacgcctatattgttgagagatgctttatacctccact

SEQ ID NO: 160826 - DNA, 486 bp, Zea mays
  Clone ID: MRT4577_78254C.1
gccggccgggtcggggcgaacagcagcatcctattcctccaatcctcctacttcactggctcactctcgtctcggtttacaaagcctccgccgccgcaagtccactccacccgttgtccagtatccctccggcgacgatgccttcccgatcggattccgactccctgctggtgcgcgccgagggcatgcgcgacgcggcgctggactaccacggccgccccgccgaccgcggcgccaccggcggctggaggtcggcgctcttcatcatagtggtggagatcgcggaacggttcacgttctacggcgtgtcggcgaacctgatcaactacctgactggccttgttttttttggccaccgcgcccggcggcggaggccatcaacgcctgaaacggggagcggcatctgatgacgatgatgagcgggtccctcgcggacgagagggtcagccgctaccgcacaatcggcagcgccacgatcctatacat

SEQ ID NO: 160827 - DNA, 1509 bp, Zea mays
  Clone ID: MRT4577_78255C.1
cccacgcgttcggtcacagacatcgctttcagcccttagtcttactgagaatattctcatacttctatgcatcttggcaaaataccattttccacgggacactggaaagaaggaagtagattcagaactaagagagattattatccacctgttagcatttataagcaaaggaagtgtaaagactggcaatgcctctaaatggaactcatcgtttttctgccctgctgttatcaaagaggaagtagcgcttaatgagaaaccaccactcatttgtagcaagtatgggtggttcagatttgcagcaagttgtactttgtcaactgcaggtgtttcagtttctcccagtgcagctttatcagtggtgagacgggacaagacttcaggagattctgattctataaggcagactcgttttactgagatattagctgttcagatatacaggattgcttttcttatcatgaagtttctctgtagtcaagcaaaagaagcagtaaaaagggcagaagaactggagtttcttgacctcgcccattttcctgagcttcccatgccagatattcttcatggtttacaggatcaagtggtttgtattgtcactgaaatattcgaggcaaatgggtcaagcactctaaatcccgagacagagaaggtatgccagctcctattggtgacacttgaaacgtcactttacatggaactatgtgtatcccaatcatgtggcatcaggccagtacttggtcggcttgaagatttctgcaaaggaattaaggctatgcttcaagctatagagaagcactccagttttgaaccttttgtcaggtcgctaactgaaattacttctcttttgtatcccgggcttttgcataataaccttctcatgtgactcttgtaaattgtcactgttaaagagatgtgttgttggctaactttgaattgagccacatatggacttgcatactcagttgacgtcacccgaggaagcttcgttttcgcacgttactgtcaccaaagtaaagtgggttccagcggctacgaagcaaattcgcagagccagggcaccaaatcaaactgaaggcgacgacgcccgaggaagcttcgttttcgcatcacctttgttcggtttcacagccgaggctcccaaagtggccagagaatcttggtggacttgcctttccgggactccacactgccgaccacgcttattcacccgtgtaaattatgctgggattctcctttgctggctcgtctggccgatgtgcgtcccatcatcacagagaactagaaacaaatgatacatatgtagatgctatgcgttcttgatcaatcagacacgcattttttttctgtagaggaatacatgttcggcgcgttgcatctttacactaccatttgtttgccttctccatcctgtttaagccctgtttcaaaacgctaccatgcaaattaaccctaagggataatttgggagccgtaaaaaaaaaaaaaaaaaaaaaaaaaaaaaagggg

SEQ ID NO: 160828 - DNA, 268 bp, Zea mays
  Clone ID: MRT4577_78256C.1
agcagtggtaacaacgcagagtacgcgggatcacacgaaatgccctacatttttcttttgaatttctagttgaagggactgggggatcctctgttttcgacagatttcatgataaaaaagattcagactccaagaatgagatgggaggtgtggaaaaactgaagggcaatcttgatggaggacgaggcaatgctgctgaatctagcgacactcaaaaaaaaaaaaaaaaaaaaaaaaaaagtactctgcgttgttaccactgcttaga

SEQ ID NO: 160829 - DNA, 850 bp, Zea mays
  Clone ID: MRT4577_78257C.1
agcagcatcctattcctccaatcctcctacttcactggcccctcctcgtctcggttggaaaagcctccgccgccgcaagtccactccacccgttgtccaggttagttggttggtttcaatttcgagttcaccgagcgacagcttgcgcctgccatttctcggctccgcgtgccggagcttgttcatctccagcttctccggccgttactcgctctgaaccgacgacagtatccctccggcgacgatgccttcccgatcggattccgactccctgctggtgcgcgccgagggcatgcgcgacgcggcgctggactaccacggccgccccgccgaccgcggcgccaccggcggctggaggtcggcgctcttcatcatagtggtggagatcgcggaacggttcacgttctacggcgtgtcggcgaacctgatcaactacctgactggcccgctcggggagggcaccgcggcggcggcggcggccatcaacgcctggaacggggtggcgcagctgctgccgctgctgggcggggccctcgcggacaagtggctcggccgctaccgcaccatcgtcatcgcctcgctcctctacatcctcggtctgggtatgttggccttttctaccttcctctcctccggcagcggccaccagtgcaccgccgcaggggggcagatctgtgcgccgtctggccttaaggtgaccttcttctacgtctccctctatatcgtgggcgtggcgcagggcggccacaagccgtgcgtccaggcgttcggcgccgaccagttcgatcagaccgaccccagggagactgtctccaggagctccttcctttaactggtggtacttcggcat

SEQ ID NO: 160830 - DNA, 267 bp, Zea mays
  Clone ID: MRT4577_78258C.1
catcgctggattgcagccgccagaatgtagttcaatcccttcgtgacttctgaccgatgcaagaaccgcaaacggcatttcaatgcaccatctcacattcggaggaagatcatgccttctccgctttccaaagaactgagacacaagtataatgttcggtctatgcccattcgaaaggacgacgaagttcaggttgctcgaggacactacacaggccagcagattggccaagtggtccaagtgtacaggaagacatacgtcatctac

SEQ ID NO: 160831 - DNA, 1025 bp, Zea mays
  Clone ID: MRT4577_78259C.1
acgcccacgcgtccgcggacgcgtgggcaggtgtagctcttttcttttctgtgcaactcaactttgctgtccctggtataattcatgttacttggtcatactcaagtaactcaactctccattttgattggaaacaggtttcttatttttatagttgaatataatactttggtctgttcttaaacaatagtcttattacaggtagaccccctaggcaaggttgaccctgaagtggaggatttacttctagaaatcgccgatgacttcattgactcggtgactgcatttgcgtgtaccttggcaaagcacaggaaatcatcagttgtcgaagccaaggatgtgttgctgcacttagaaagaaattggcatttatctgttcctggtttctcaagggaggataagaatccccaaagaaattctgtaaagccattggtagatccccaacaatcagaaagtgacgttactggtattagaggtacaagcaataaactaggtgctaataactcagttggcaaccatcaaatacgacctccaatggcagaaacttcggctgtgccaacagtgggctctctatcgaaagcccctcgcttctaagggttatgctgctcttccctattgaaggaaaaattcctatttcaggacaatctacgtcgaaaacagcccataggctctaactcaaggattgctagcaagtggaagcaaaataaacccacgagcgtctgtggcaaactgcagatgcttgtgtcttacaggaaagcagttgctgacttaccaatcgtctctggcagatcctctctacctggggtcgtatgtaactgtattttctttttgtgcccgtaaatgcccccatccgttgtatataaatgtttttgcaatgggggcattatcgtctccagttttgatgttgctatgtaggcgaacaaatactaaagtggaagttaatgaagtgtaagattgatgtcgttttccgttactgaacagttgtgccatatctaacacgctggccgtcggtgggaagctttggc

SEQ ID NO: 160832 - DNA, 202 bp, Zea mays
  Clone ID: MRT4577_7825C.1
gccaccgacaccacaactcatacccaccgctacaaaagccgccggggcgggccccaaaactttttgtaggtcctctctgctctccgaccccaggccacaacggccacagcaaaaaactatgccctcaacgcccgcaaccgtcttactacaaccagataaaggcgcaagacactggaactatcccacacgcttccgctccaaa

SEQ ID NO: 160833 - DNA, 162 bp, Zea mays
  Clone ID: MRT4577_78260C.1
aggctcgagcggctcgagggccgagaccgagattgcgcgcgtgcaggctgcagactgtcctaacagaagaagctcgtaacgtctatttccagtttacatgagctgcatttgacgtgttgtcatctgttttgtttatgaacagaattaacagggttgagatgc

SEQ ID NO: 160834 - DNA, 109 bp, Zea mays
  Clone ID: MRT4577_78261C.1
acacacactcacacgttgcctccaaactcatttctcacgagcgcagatgcgaacctctgatccagcttcgttcattgcttccctcaacggatccgctctctccttagcg

SEQ ID NO: 160835 - DNA, 377 bp, Zea mays
  Clone ID: MRT4577_78262C.1
aataatttttctttttagaaggaatccgttgggggatctatatagacaggggaggtgcaacactgaactaacaaatggaatacacactgatgccttgcaaagttctatccgctactgatctccgtttcgacaaaaaaccaactttgtttaatttcagaataagcacaaagccataagatcctagcaaaccacaaaacacactgatgcctacctaaacagaccgttctgaacaggctcaatgaatttgaaacactgttaacagcatgatcagtttcagccccatctccataaggataccactagttctagaaactaatgccttttttctggaaatctcttggcttattgttcgtaccaaacatttctttcaaccattt

SEQ ID NO: 160836 - DNA, 373 bp, Zea mays
  Clone ID: MRT4577_78263C.1
gccggcccataagctacgagcgaggtctagacatgacacaccagacactcgtgccggggcaccccatgaacattcattagaaaacagttttaagtttttatatttcagtttcttaaaactgttttctaaaaaaaatttggagcggctgtttagaagctagtttctaaaagctggttcgtggctttttttttaattgaaaatgacatgcctgctcattcatttttttttcacccatgcacttgcaacgcctgcactggttgcccacagaaagtcagctacaatttcctctagctcttgcaacgcttgcacttgttaaacttcaattcttgtcgtaactacagcacactttgccacacaggctcaacaaactttt

SEQ ID NO: 160837 - DNA, 266 bp, Zea mays
  Clone ID: MRT4577_78264C.1
cccacgcgtccgcccacgcgtccgcccgcgcgtccgagcagaaggaagcagaggggatagatatgcaagcggctgctgcgcggctgcctcgcgttctcaccgagatcgacccgcacagctagtgggtgcacggacgcgcgctcgacgctatcatgctggacgtcacatggttcagcagagaccagctgaaggtgcaggtggagccgtgtgtgagcctcaatgtcagcagctaccagggcgccgtcggctgtggtggcgtcatgcag

SEQ ID NO: 160838 - DNA, 315 bp, Zea mays
  Clone ID: MRT4577_78265C.1
catatagcgatctattattcactggggctgacgagaaacagacctcttgataagtgtgggaatattccctgaccactaagagaacaaggttgattatcaggccagacgaaatgcgagttttacctccatatataagcgcgccgcagtagcagaaatacagaatttaaaaaacatagacgtttcatttggcagcactagcattggtcttgtctaaattttacccttcccgcatagcagtgaatgaaagaagaaagagctggtggggagcccacctttaagcgggggggatctcgacctcacgatgatctatctcct

SEQ ID NO: 160839 - DNA, 1484 bp, Zea mays
  Clone ID: MRT4577_78266C.1
ttgggtacctcgaggccggccgggagagcctgtcaatgctccgtcgccaaccgcgcctccctgccgcaccctcgccgccgctggctgtgctccggcgagccttccgctcggaagctgccctcgaggccatccgatcgcacttgcactcacccccatcaaagtccacctcaacatcctccgatgcggacggggacgacaaggcggcccccgccagcctcgcgctctacaactaccccaccttcgctggcgcttatgccgcgctcgccgcccgcctcttccatcaacgcgtccgccgccgcctcctcgttctccctttctcctccgtcgtacccttcagagccgaagactttaaggatgcagggttccagacgtgctatctcttggacttcattgggcccaagaagtttgctttcgagctcgcccgattcatccccagtgtgaaagcatttgatcaccggcaaagtacgcttgcaagaatccccaagttgggtcagtgcccaaacaatgtggagcttcatattgacatctcaataggcagtgcccggtctgtatttgactatttctccaaggaactagcaggaacaaagtctgattctcgaatgtgggaaaacttgttggagcaagaacatgttgagcgagtttcaaatgttcttgaatgcatagaggatgcagacctgcgacggtatcagctacctaacaccaaggaatttcagacagcacttagggatgaacgcgcaaagttaaactgtgtcacaaatcctcatgtttttgaacagcttctacaacttgatgttggcgatctgcttactagggagaaatcgcgtgttcgtggcctcctgcagtctgcaggggcgttcatacagaagcctttcaggattcagcttggaagagggtcatatggtgaatgcttggtatgtgaacgacatgctcttgcattttctactgattccatcacttgtgtttgtctacctttgatagcttcctgatgtataacgtacacagcacagctcttttgatactgaagccaaaactgtattactttagcattgacaggtaattcttgcatccatgagtgctcttgctttagtgatactatgctactagctagtggagataggcatttttgttcaaattcgaatgctcgtgcttcagcaattgagccttatgttctcatctttaattgacggataccttcttccatgctccaagagcatagtataagatgttctgttcagcctttaaaaggtgactaggcgtccaggcgagttctaggtccacctggatgcctaggtgacaaggcgccactgtttcccagggtgagctgggtacacctggaaacaatggttctgttgtagtagctcatgcttgcccagttttctgaactggacttcagatgcaaattgatggaatggttttatgcttatttttaaccccgtgttatgggattgttgcgtacctgactgttcctgaacctggctggatgc

SEQ ID NO: 160840 - DNA, 314 bp, Zea mays
  Clone ID: MRT4577_78267C.1
tgatgcttggcgcgtaacggtgatgtaaaccgaccgactggttctactattaactattctcgaaatataggttcccttgtaggtacagctttaccaatgcaaaggtgagccgggaactgcattatgccgggaaccgttcttatgtggcaagaagctgcttccagcgactggaatgatagaccagggtgacaatcagcgtcctgaatacgtgaggtgacccctagtaatcttgcccacacaggactcaggagtgtagctggtgctgccgccaacagggccgccagctaggccgccataccgatgagtggactgcg

SEQ ID NO: 160841 - DNA, 826 bp, Zea mays
  Clone ID: MRT4577_78268C.1
gcccagtcgtctcccacgtcctagcacaacagagtagagctagcaaaggtatctgccatccaccatggccgtctccatcgccggcagcagcatccgcctccacgttgccccgcccagtcgccgccgcgtcagcgtggtctccgccgccgccgcggcgcggctcgaccggcgctcggcggccctgctcctgctgtccacggcggttccagcagcatcggcagcgacagctcccccagcgagcgccgcgggcatcggtctcttcggcatccgcaagaagctggagcgcgcggaggaggcggcggccgaggcggtgagggaggtggaggaggcggtggaggaggcggcggcggaggccgcggcggtgggcggggaagccgtgaaggaggcggcggccgaggcggtgcgggaggtggaggaggccgcggcggtgggcggggaggccgtgaagggggcggtgacggaggcggagaaggaggtcgccagcgagggcctgcagctggtggccggcgcggagctcgccggggacgggctagtgcaggccgcggtggtcgccggcgccgaggcgctcggggtcgtcgtgggcctatccgtggtaaatggtatcctgaagcccgaggcgtagatggtgtaggctgctgggccttgtagtttcggccgaatacaagtgtttgggctttaacgcttcgttgtcggatgacctcttctttggtgtgtaaattgttattattataacaattattggagtgcggatatgggcagctagaaaagtgtgatcaatttgtaatgctgcaggatttgaacaccaaacatgaggtccactgatcgg

SEQ ID NO: 160842 - DNA, 313 bp, Zea mays
  Clone ID: MRT4577_78269C.1
tagcacgcgcatgatcaccaaatgcttgggcgcgcgcagaccccggaaccaccagaacactttcaggctcatcatgcggtacaccgcgttcacgatctcgggcgggagggggcgggacatctcctctaccaccgccttgctgctcacggcggacgaatccccccacccatcaatgctcgggccggctactccgccatcgacagttgtacgctagacgctagccaactcggcgatgcgagttaagcaaaagcttcttcaaagggggaggggactgataaaactcttcctacattgtataaccttactgacccct

SEQ ID NO: 160843 - DNA, 378 bp, Zea mays
  unsure (1)..(378): unsure at all n locations
  Clone ID: MRT4577_7826C.1
acagcaaattatttttattttggaatcagctatgaccattaactggtgtttgagtcacagaagatatatatatatatatatatatatatatatatatatatatatatatatatatatatatatatatatatatatatatatatatatatatgctagcggttcagaactgcagacgctcccccacacagcattataagcgtgtcactcaaagacagattttacacccgcccagctacaagcagcgatcacattaggcattactggggggcacgccacatcagcgcgcgcctctttgagggcttctatcgtcctcaaaagccgcgccgccctgtaatcatagaagcaaacgcccccatngncggaaccaaatgcgagctc

SEQ ID NO: 160844 - DNA, 524 bp, Zea mays
  Clone ID: MRT4577_78270C.1
atgtatggctatgatcacaaatggattacgaaactttttcttataatattataacacacatttatacataacttattggtattatatgtttacgttgcaacgcacgggcacgtaccctataataataacaatttacacacaaaagaggtcatcagcaaattacagcgacaccgacaacgaagcgctaaagcccaaacacttgtattcggccgaaactacaaggcccagcagcctacaccatctaggcctcgggcttcaggataccatttaccacggataggcccacgacgaccccgagcgcctcggcgccggcgaccaccgcggcctgcactagcccgtccccggcgagctccgcgccggccaccagctgcaggccctcgctggcgacctccttctccgcctccgtcaccgcccccttcacggcctccccgcccaccgccgcggcctcctccacctcccgcaccgcctcgcgacgagcccgccgaccccttcttccccgcccaccgcctgggccatggcgccgc

SEQ ID NO: 160845 - DNA, 287 bp, Zea mays
  Clone ID: MRT4577_78271C.1
cctacgcgtctgatcaaggcctccgctaggagcacgatgacggggtccgagatcacactcgatgtgatcgtggactgtgcgagcgtgcggtttcatacaggattggaacggacaggcttgacgcgcgggagcatatctagtcgtgcaggccggcgcgaggctacgagcatcatggagtttctgtggaccatgataacgtgatgcatcgtataagaggacgaggacaggacgtcctgacaggacctgcggatcccatgattctcggaagaggcaccctgaatcgaagc

SEQ ID NO: 160846 - DNA, 107 bp, Zea mays
  Clone ID: MRT4577_78272C.1
gtaaaaccctgaatttctttcttgagcaaggccgtctggtaaagcgggaacaggccatgaccaccacacagctggactccgccttttgaggtgaacatattatacca

SEQ ID NO: 160847 - DNA, 206 bp, Zea mays
  unsure (1)..(206): unsure at all n locations
  Clone ID: MRT4577_78273C.1
ggttaccgtttcgcccacgcgtcgcaatggggaggatcactgctggaattcttctctccttaaactagacaaatctggcggcatgggagtatttttaactacgaactangaagtggagcatgtcaatatcttttacccatgaggctcattatgcagaacagtttggtagcattgcactccttggactccaactataaagccattgt

SEQ ID NO: 160848 - DNA, 772 bp, Zea mays
  Clone ID: MRT4577_78274C.1
cgcggagggcatgtacgggaccatggccgagatccccaccgggtatccgccggcgctgtttgtgcatatgcccaaggacaccgaaagggcgcggttggttgcggaaagcatgtacaaactcagggagaagcacgtcgacgtgcgggagatccagtgcgatgacttcgccgtgagcgcggagttcctggcggagagggtgccggggctgacctgggccttcgccaacgcgctggtggacatgcttcggcggaagggattcgtggatgagaaggggatgctgaagaaggacgggaggagaacgccgtggaaggaggcggctgaggaggccaaggtgctgcctgagcggttcggtctggagaggcatgtcaccgaggagctcaatgttgcctatgcgtaccatgagttcaccagcctgaagaatactgaagtcttccaatggtttgagtcccatatgaatcattaggactgatgcccaactagcttgcataccacagtgaaccgagtaatcttctgattgtttgaagatccacttttgaccatgatctacaatagcagaaaagttagagcaagaccttgtgtaagacttctgcccacagcttatagtttacaacttccactcatagtttctggtatgtttgtatctctatttactacttgttagtgcaaattttgggaagcatgaaaaatgtgctgattacacccattattgttgtacatgtactatttttcttttagaaagcaataaaagtgtgcaaatctgggattctaggct

SEQ ID NO: 160849 - DNA, 434 bp, Zea mays
  unsure (1)..(434): unsure at all n locations
  Clone ID: MRT4577_78275C.1
aaacgancaacgnccacgacccaccacccacgaggcgaaacagcgggggcaaagcacccacgggccacacaaaaccacagggggggggggcacagacagaagcgcacaaanggggncaggcccacggacccgggccggggcaaccggcacccacgaaacaccgggnacgaacgggggagacgagggggaaacaccanaaaggacgagagacagggacacccggagcgagcggaaaaaaccaggggcaggacgggaagacccgccgccaggcaggcancccgggcccggacgcgcacaggacgccccaaggaaaaaaacggggggcaggaaacgggggggcggancngggccgggggggcgaagccgcaccngcggggcagggcgggggcggggccgaagaaggggccgccccccgggcgcggggggcgacccgg

SEQ ID NO: 160850 - DNA, 164 bp, Zea mays
  Clone ID: MRT4577_78276C.1
ggtctacagaaatcaagtctcctatttctgtagaggccgatacttctgaacaaaaactatgggtgaaaaagtcatcggaagaagaaaagaaccctgacgattctttgtctgacaagcacaaaaagctgactgcagtcagattagatcattttgatgacaatgga

SEQ ID NO: 160851 - DNA, 301 bp, Zea mays
  Clone ID: MRT4577_78277C.1
ggggccaccaaaacccccctttttggccagggggggcctttttttccccggggggggggcaagaacaaagtttctcccccttaactttcccccaaacccaaggttttttcccgggcttttgggggaacccccttaaggtttttaacttatagggaaattttgccccccaagggccccaaaaaaattgggttttgggcgccctttgtttccccccaccggaaaaaaattggggaataccccgagggggctccccttttggtctggggcccttgggggagcccccccccaggggaatccgccc

SEQ ID NO: 160852 - DNA, 389 bp, Zea mays
  unsure (1)..(389): unsure at all n locations
  Clone ID: MRT4577_78278C.1
ttccctatcgaccgacgcgtacggttctagatcgcgagctgccgccctttgttttgttttttntgcntttttttttttttttagatttgttttaaatggaaggttgcctgccttttttttttacaacccaaccattattttaaaaaaccctccaattacattatccatcccctcaaatccattgccattctttaatactttaaaacacacccacccttttaatttatttataacattgtcattccaaaacccccaacccatattcatacatatttatttaaatatatatttcaccgataaactttcaaagccacacaccaagtccaaattccttcaaaatcttttattccctaaacccttcttttgtaaaaaacttaccccattctttt

SEQ ID NO: 160853 - DNA, 447 bp, Zea mays
  Clone ID: MRT4577_78279C.1
gggtggtgcgtaggatcttgccctccctcgagagggaagatatcgcggcggcggacgttgaggaccggaggttctccggggaggtctcctatgccctcgacgagatctacctcaagaaagactgtcaatggtctaccgggatgccctaggagtcccacactctgcatggatcgaaataattcaacggctaggagtgtctgtctacaaagcttctccaaagatgacaggaggaaaattaacttctaggcaatcaacggaaggagatccagggacggaatggacatctactgaggatccatatgctagtggccgcgaaggaggacttacattcataaggggggaggcagcaagatgatttgctgtaacacatggatggaattatgctacgacggaaactcgtatacgcctacttctgaaggctaagggctatcactgagaactaaaacg

SEQ ID NO: 160854 - DNA, 211 bp, Zea mays
  Clone ID: MRT4577_7827C.1
ctgctgcttatcttatcactctccgagttctcataacacgtcttaacgagacacacaatggcctgcactgctatcactgcacctgtcgacctggcggcattttaagtacctaacgcacaagcatgagatgataatataggatagtcactggtgccattttaaaaagagagtgccagcactaaatgcccatgactctactctggcatagagt

SEQ ID NO: 160855 - DNA, 697 bp, Zea mays
  Clone ID: MRT4577_78280C.1
tcgaggccgggcggggacgcccttccctagcggctcctcctcgcgattccaatccacgcacgccatctccgactccgcgtccgcctcgcgcagggttagggtttgctctgctccccttctcgtgtttgttttccctgttggatttggtagagaaggcttgatctatcggtctcggggtccgattcggcgtcccctgaccgattcatgcggttttcttgagggggtgggggaaagaggttgtggtgctgttgattcgtcggatacgaggatttcaggggctgggaattgccagggggacgggaggtcgcagattcgtgggttgacttggccttgggttccttgttctcttgggatgtggaaatgaaaacgcgtttcttcttgttgttgtttttaaatttaaaaactgtataaaatttgtttttcactttgtcttgttgaaaatgatacatcggcccgttttgcctgatttctctaaagttttatagcgctgttaatagctagtgatttaagtgctctattagagtggaaatcgtgtgtgcctggttttaagcggtggatttgttaatttatgcagcagatttggtgcacgctgttctcgatttagatcattggggatttttttttcttgtttttgtagagattcgaatttgatatgttaccctgattcgtttaaaaagtcagtttgagctgtatttgc

SEQ ID NO: 160856 - DNA, 554 bp, Zea mays
  Clone ID: MRT4577_78281C.1
ggccgcttttttttttttttttttctttttttttttttttttttttttttttttttttttttttttttttttttttttttttttttttttttttttttttttttttttattttttatagagatctataaaacagacgaaaaaaaaaggacgcccggaccaagctggccagcgtgaatagcatcgcgggggggggagagtgacaaagcaaaccatagaaaacgaaaaaaaaaaagcaaaaaggagaaaagaagaagcgaaaagaaagcaaaaaaaaaaaccagaaagctaacaaaaaagatccaaaagccaacaaacgaatagaactagcaaggatgctgtcccaagggtaggaccctgccggctccgcgtcgccgagaaggcggccacagccacctctgccaggtgcacgcgctgaggggccagtcgggagccggaagagggtgagacaacaggctactccccatgcagcagaagacccacttgcccgaggagccgcactgcggccggaccgggaaccaggccgggggtcaggacactctgaggccccacacca

SEQ ID NO: 160857 - DNA, 215 bp, Zea mays
  unsure (1)..(215): unsure at all n locations
  Clone ID: MRT4577_78282C.1
aagagncagggcaaacaggcancanccacaangacgnnancgganaccccgnagcaannacaagccangaacaggggccacacaangacgnncnggcaagccnggganacaaagccggggcagaaaanngagagcaaaggnacagcgnaaaaaccaagaggagagccagcaagcnagcacngaaaaaaggaaaaacggncacgcgcaggnaccca

SEQ ID NO: 160858 - DNA, 316 bp, Zea mays
  Clone ID: MRT4577_78283C.1
gaaagctggcccgcctgaggaaccggtcctgaattaatttttgggccgttttgtttctagccggcggccgtcctttttttgttggttttattgaaaaaatcagggacccatctgacattacatgataagtttagggaccaaattctaacatgattcactactgtgaatatttggtttgtgcaaactttatcctagatagactaccaagttccaacattcggtttgttactttttatggtaaaacccaaatacacatgttaattataaagacttataaatctattatactctttggattacaattcataaaaggaca

SEQ ID NO: 160859 - DNA, 230 bp, Zea mays
  unsure (1)..(230): unsure at all n locations
  Clone ID: MRT4577_78284C.1
tccttttcccatcttcatacaacccttagtttcaaaacattgctaacatcaactctatggtacagttcactctaactaggtctgccatcaactcctaaactattaccaacaaatctttcaaacanaatctttaactaacttcantaatactcttccaaaactcatataatcccaacctaacataccatttattaaatccttaactactatattaatctcttcttactttt

SEQ ID NO: 160860 - DNA, 4800 bp, Zea mays
  Clone ID: MRT4577_78285C.1
atgccagttaaccataaactaacccccttgccccaccgctgccctacgcttctccctcctacgccgcaggtctctctgtcgccgcctcgtatggctgctacagctcctctaacctcccaacaccatgccccaccaccggctccctcccgctcccctacttcgcctcttctccctgcattccctgctttaccaccgcgccacgccccttccaccacctccgcccatcctcctcctgttggtgttacccccatcagttccttgtcggaaactgtcgagtgtgcctccctgactagctcggtccgccagggatccctcgaagtttttctctctctcggccggcacgacgtggccgctgcattcgcatttgttcgtataactccgcaattggcagtgtctgccccggcaccatttattcgggaggcgatccgtgctgctttcccgctcatcaccttcgaggttctcccctcgtcgttcggatcgttgctggtgcgctttcagtcggcaggtgattgtactgctgctgtgagtcgctcccccctattgcatgaggatgtggcgatcttcttcgagcgccacgacgggaggagtgtcaaacagccggttgatgtgcttgcggtcttgtctgttcatgggttccctctgaccttctggcacgaggagttcatccgccaggcgttccaagtattttgctcagtcgtggaagtcgactggcgttgcacctcgggcctcgactactcgtctgttcgggttgtggtccgcgtggaggaagtgacaagcattccagcagacctttgcattcatgattcttcatctggggattccttcgtttgtcaggtgaagctggttgattcgtggccgctgccggtggattacggccagcatggcacgctccgcccctacttcggatggcctccccatcctgtgctgccgccacctgcccccacgccccaccgcacaacgcccctgcagcccctccgccaccacctatctcgcaaccttgcccgccagctcacagtcgtccccctcgccaccctacagcccgatcagtcgcttgtgacgtgcctcgcccgcacactactggctctggtccttaaccagccccaccgccttctgctcccctgcctaccatccttccccatcataatccacaaaaatatcctccccctgcatcctgcacccgccttctcagctccattccctccctttcccctcacatcatgctcgactgttgcgcctgcgatcgctgacgttgaagtgctctccccctcccccctccccccctcctccctgcaacctgacccagaccatgaatcttcagcaagaaaatctcgcgcacgcaccaaacgtactgctgacctcgcagccaaaaacaagaaaatagctccagcttcacgccacagtgtccgtctgcgggataaggaacccgcgaactacgtggacatgtcctctaaggcgaccaatctgaaagctctgaagaacgagctggcaaactgctccaataatctcaaggcaaaggaaacgaaactcagtgaaatctctgctcaaaagtttaaatcatttcttcctgcctccctttctgggcacagtttcctgccagctgatggctctcgtggggggattgcaactgcctggaatgctgctcactttaccctcgtatccacttccagcaccacacactctctctcaacagtcctctcctataacgcttctgatcttactttcacgctcactaacgtgtatgctcccgctgatcaccgctacaccgccgaattccttggtgaacttcgttcccttgccaacttgatctcaggcccctggttggtcactggcgattttaatcttgttcgtgagccaagtgacaaaaataatgacaacttcaatgtctgcttggcgagtgccttcaacagtgcaattcatgacatgtcgctcattgagcttcccctccttgatcgcctcttcacttggtcgaacaagcgcacccttcctgttcttgcgcgtcttgatcgcactttcataaatggtgattttgaatcagctgtccccaacacttccctcacttctctccctcacgctacctctgaccacactcctcttaaaatcaccatagacacttctattccaaaaaaacattgctttcggtttgagaatgcttggcttcatgatccctccttcctccctgctatagaaccggtctggtctgcggtcactaatcttgcaggtggtgccacaggtgcgttcgttgcaaggctaaagggcacacgtcgtgtcgctaaggcatggtcaaaaaacaaacacacaccattccttattaacaattgcaagtttattattaaactacttgatctgcatgaggagttgcatttcttgaccacaggagagacagtcctccgctctctttgtcgtgagaagctcatacttcagatcagagctcgtgctgcctactggaaacagcgtgggaaattcaaggtgcttaaagaagctgatgaaaatacaagattccatcatgcgcgggcttcacaaaggctacgtcaaaatcagataagggctcttgagctggatggtgtccgctacacaagtcatgcaagtaaagcaatggtactggacaatcatttcactgccctcctcggtgcagcgatggatactgtgtgggactttgatatggcaactctgtaccgtggcctcccaaaggttaatctcgtgcctctgattgaaccgtttactgaagctgaggcctgggcagctatcaaggcaatgaaccataatagtgcccccggtccggatggcttcggtcctagtttttacagagcttcctggcatatagtgaagtccactgtcatgcaattcttagcttccttccaccatggagatgctgatatggaaagaattaatagagcatacattgtgttgatcccaaaaattgttggtgcagttgcgcctggatcctttcgtccgatttcactccaaggttgtccagtaaagattgtgggtaaaattttgacatctcacctccaacagcaagtcacatcgcttgttgatttggaccagactgggttcttgaaaggacgctcaatttctgaaaattttgtctatgctactgagcttgtccaatgctgttacaaaaggaaagctccaactgttgttctgaaacttgactttgccaaagcttttgatagtgtaagctgggatgctctactcactgttctacaggcacgtggcttccctcctctttggtgtgactggattaagctactgcaagtctctgctaagtcggctgtccttttgaatggtgttccgggcagatggatttcttgcaagaaaggccttcgtcaaggtgacccgctgtcaccctacatgttcatactagttgctgatgtcttacaacagctgctggccagagatagcaccattcgacacccccttacagctgaccgttcatgcacaattctccagtatgcagacgatacactgattgtggcaagagctgatgagctggctatgctgcagctaaagtcgattcttcaaagcttcacccatgcaacaggtctggatataaactacaacaaaagtacgctggttccaatgcatgtgcctgctcttgatgtcactcgattcgttaacattcttgggtgtgcagaaggtgcgttcccgcagacctaccttggtctccctctctctaatgagaaattgaaccttgcagcctttgctcccatcattgctagcgctgaccgttatttatctggatggtgggcgagtcttcttaatcaccatggcagacttactcttgttaatgcagtcttggacagcttgcctgtttatgcaatgggggctctcgccctccctccaggcgtgattgaggccatcgactctagacgtcgggctttcctatgggccggggaagaaacagtctctggtgcgaagtgtcttgtgaattgggaacgggcatgtctcccgagaaaagatggcggactgggtgttcgtgatctccgcttgcagaatacctgtctgctactgaagttcctccatcgtgcacacaactcacgtgactcagcttgggcccgctggttagaagtggaatttggaggccccatgtctgctccagacaacacggcagctggtactcattgggctgccctccgacgccttctgcctgactatcgcttacttaccacggtggaggtgggcgatggtcgctctacagccttttggcacgactgctggttgtctacggggcctcttgtggatgccatgccggcgctctactcgcacgcccgacgcaaggaaacctcggtctgcaatgtcctgtctacaacccttcgccttgcatttgtccctcgcctctccaccgtggctgctagagaattggagcagctggaggcgctccttgttggtgtatccttgtctgcgactcctgatctccggttgtgcccgtgggaagacatggcacataaactcaattcatcgactgtctaccaagctgttgtgactaatggccagggatgcgagtactacaagtttatctgggaaaaccgtgctccccctaaagttaagttctttggctggctattggtgcaaaacaggattcaaaccaaagataatcttctcaaaaaacactgcgtggagaatgatatctgtgaactttgcttgtcggccgtggagagctcagtgcatctgatttcgggctgcccttttgctgttggcttctgggcgcgactaggaatatctctcacagacgaagacgcgtcacatctttggagtgttcaacagattgagcacgtgcgcgtctatataacacacctgtaa

SEQ ID NO: 160861 - DNA, 481 bp, Zea mays
  unsure (1)..(481): unsure at all n locations
  Clone ID: MRT4577_78286C.1
ngatccgtcgttcgtctccacccctttctgcttgctctggccgtaaggcagacatagcatacagtgcatccctatctcagcaagagcggagtatgaacttcgctcaatcaccggattaggaaggagggggagaatcgtgtcctgcggcagcctccagagcgaggatgccacagcctcatccgcgcttaatgacccctccatctccacgaactacatgacctacgtgatctagcactacttcgtccacgagcactggaagcacagcgacatcacactcaaggactccaacacccttctcttcattgaccatccgggcccccgctttggcatctagaaccctgaggagatcccttggagagacagcatgagatgtgtatgacgatatccaattatcaccctgagcactggcagacatcatggattgacgtcacacggccggggcccttgattgcatccatgccaaccccccctggatgcccct

SEQ ID NO: 160862 - DNA, 263 bp, Zea mays
  Clone ID: MRT4577_78287C.1
gggaaaaatgaccctaaaggggggaggcaattaaaatgggagttggggaggggccccatctggtaacattcaaagaatcacaggggggggggaccccaaaagttataaaacggggggaataaacacaacaccttgttgccttggaagggaatggccaaaccgatctcacagatttcaggatacataaacaggtttatttgggcctagtcaaactgctcccaaaaagggttagcttgggttgaaaaaacacggggggggggggc

SEQ ID NO: 160863 - DNA, 231 bp, Zea mays
  Clone ID: MRT4577_78288C.1
agtgagtcgtattatcaccggatcatcgttcttctcgtccctctatctttctccctaacgacgccttcctcgtagtgatcatttcctagatccttgattcctggggggtgacggtcagcctcggggtctgtcccgggccgatcgtggaacgcaagcccgtattcctgaacctggtcaagttcaccacacctagtgttgatcactaccccctctcgtttcagggagtcctta

SEQ ID NO: 160864 - DNA, 169 bp, Zea mays
  Clone ID: MRT4577_78289C.1
agttctattctgtgaatttcatttattaaatatccacatatgaccgacaaggctaggcactcttatcatcaggtgaagaactgaaagggggaacaagactaaacgaatatattaaactctgtataacaccctatagaaaaagaacatagaacgatgcacatttggtttt

SEQ ID NO: 160865 - DNA, 636 bp, Zea mays
  Clone ID: MRT4577_7828C.1
tgggtacctcgaggccggccgggatccgttacactcctaggtcctctactcgccagtcgctatgggcaagattaagatcggaatcaacggcttgggaaggatcggcaggatgcgtggctcacgcggctcgtcgctcctacagcgtaggatgtcgaagtgtcgtcacccgtcgacgacccctccatcaccacggtactacatcgagcctacactgttacaagctacgtacaccgcctcacggcgcactaggaagtacagccaacatcacactcaaggactccaagacccttctcttcggagacaagccggtcaccgcctttggcatcacgaaccctgaggaaatcccgtggggagaggatggctctgagtatgtcatggagtccaccggagtcttcactgacaaggacaaggctgctgcacatctcaagggtggtgccaagaaggttgttatctctgcgccaagcagagatgcacccatggttgttgatggtgtgaatgacgacaagtacacctcgcatgtgaacattggatccaatgctagctgcaccacagactggcttgctcccctaggtaagggcattcatgacaacttcggcattggtgaggtgcagatgacaactgatcatgacatcactg

SEQ ID NO: 160866 - DNA, 369 bp, Zea mays
  Clone ID: MRT4577_78290C.1
ccaaaggagaggcgcagccgaagagacagcacagggaaagaccggcacagggagcccgcaaaacacagcacaccgacaaaaaagccagggccgcacgagacggagaccgcgcaggagatcccccgcggcaccagcccgccgccgcaacgcggccacaacaagcagcggccgcgggggagagagccggagccgccgcacccgcacctgcgccgacgaccgccccggcaacagcgacgccgacggggacagcaccaagaacccgggcggaggagaccaagcacggcccccgggaatgtttttttcacaccccccccccggaagcggctggagatgccactccccccgaactggcaaacgggcagaagaacc

SEQ ID NO: 160867 - DNA, 380 bp, Zea mays
  Clone ID: MRT4577_78291C.1
aaccaaacaggcccttatttttttgatgcagcaaacctcaacgttttcgtcttaacacaagtttgttggacatttccactattaaagctaatctcaaatcctatgcgggatctactagtgtaggagtattacatcattagaagacatcatttagatgaagggtgctgagcgacataccataccacataggcatatatttatctccgtagtatactatctagtatgtgtatgtgtggggatgttttgagacaggatcgtcatttgcaacccatgtggacatggcgtaaagtatgcgttctttccatccttgcaggagccaatcacgatccgtttttatgacacaatgcctgtgatactgcagcctaaccttatgcctaaac

SEQ ID NO: 160868 - DNA, 1459 bp, Zea mays
  Clone ID: MRT4577_78292C.1
ccggggcttatctctctgctcgctcatctctctggtgcacgcccccagcccaccgagctccctccatcttgctccccatggccgagcgccctcccgtcctccaactcgccagcgcttggcttcctgcttgccaagtccatctccctccctagcgctgtcccacctcctgctcctccacggcgctcagttccagctcgccggctgtgcaactcgcccatggcgcccatctctctggccgcgacctccctgctcctcctttccccagccgcggtcttccctgctctagcccagccgagctcgtccctgcgcgcgtgttctcctgcgtccagccgagcgcgcgaaacttctctgctcacggcactccctgtctgctcggccatggtgaaaccctccttaccatggatgccggagttcctctgctcgttctcatggccgccgtcgagcttccggcgcgcgcccatctcctctgctcccccgcgcgcgtcctgggactctccatcgcgccgatctgtgcccggccgtggccgtcgaactcgcccagctcggatttttgcttggtcgcccgccgtttaccagtaccgtggtctcgctcggacgcgtactgtcacgattgttcctgcacgcacgccctggtacccctgctcgctgttgggccgaccgtcagcagcttcgtcagcagcttcccggcctccgtcgtgctcagcagcgagtaatttatgtcggagcagttactgagacgccctcctttgcgtcgtgctcgccagatcaagcctcgcgtcgtcgatttgcgcagttcatgttcggcaatcggtttagtctccgtcgaacttctatttaccgtgacgccgagctccttcaacactgccccactccgttgtcgttattccgtcgcctcacttcgatgtcagttccttcatgacatctcctacttgtgttcgcgccgacaaaaggatcctaagagaatgtggaaaaacaagccccaagttgatgcctcaaatactcgacgaaaagcctgaactataaattatcgtggttcttgcagagttcgcgtcgaatttaattttggatgagctgatttgctactactattattttgttttaatgaatagattgatagatatgtaggttgcgatgattttttttatttagtataggtacgcttagtaattatggctagctccgttgttgtgtccgtgtgctgttacgtgacaatataattgtttttagaataatgaagtagttgagtcggagattgaggtttagagattgaggtttaaattttagatgcataattatgcaaaatatagaggtagacatggatgtgatgtatgatctagttaatgacgagacagataagtttaatattttaatcagctagctagcaggaatttgcaatgtatttattcctatcttaattatttgagggagtcaatattctatatcaataatattctatatc

SEQ ID NO: 160869 - DNA, 119 bp, Zea mays
  Clone ID: MRT4577_78293C.1
tatcagccgcatcacgcacccatcgtaaagcgatggcgtcgctcaccatgatggcttccttcgcttccgttgctgttgtctctttctcgcgccgcggtttcttcgccgtggtcaggtcc

SEQ ID NO: 160870 - DNA, 498 bp, Zea mays
  Clone ID: MRT4577_78294C.1
atgaacaacgagaaatctaatatccctaatttttcattgtatgatattgatgttgcgcccaccacacacaactcattagctacaaatgggctttcacaaacccaaccatcttatggtatgtcgatgaactcctacgctggaccacaacctcctccaccgatttgggataaacccacgatcctgcgcatggctggaccatccgggtctaagctcggattgtccgacccagcggctgctggccccgtccttagcgacaaaccaccaagatccaggctaggaccgcgcactccacacaaggattttaatgataaaaaagtcttagtttggctggatgtggccaatacggacaaatgcaagggcattatcattggcgaccctcgagccctcaatgaaaatacaaaaaattgttcctgggaagttgtcgccaaacgaaccctagatggaggagagactttgaagatcatcatcaaatccaccgacgttggggggcaagcgtag

SEQ ID NO: 160871 - DNA, 989 bp, Zea mays
  Clone ID: MRT4577_78295C.1
gcgagacgagtccgtttaaataggtgtcaagtggaagtgcagtgatgtatgcagctgaggcatcctaacgaatgaacgatttgaaaggtcccctcggcgccggccgggcatcgcgctctagggttttgacgcgccggcggcttgtgttccctttaaagcttggctgctcgtctgctcctgctgctgtctgtcttctgctcttccatcgcgccagtgttttgagaagctggtcggcgctcctagatcccttcgcctctctcgcgttcgaggctaggtagccgccaccatgagccgctcggggcagcctccggatctcaagaagtacatggacaagaagcttcagattaagctgaatgcaaaccgtgttgttattggcacacttcggggattcgaccagttcatgaatctggtgatcgacaacactgtggaggtcaatggaaatgacaagacagatattggaatggtggttatcaggggaaacagtgttgtcatgatcgaggcactggagccagttgccaagtcgcagtgaatccttatttttcagctgatatagtagcagcatgaaaactgatgtaaatgctatgagtgaaccctgttgtacttcggactcgtgcttttgcacagcaacataactcggctaccagcacccctgtttcaatggtgacttcattactgccttggcgctaacactggcaatgcatcatttcgtctattgttctacattgccggtgccttgtgaggcacatgtgacctgtgattcatcatcaatactctgtttggatattgatactggagaacatggaattcaattagattcaaaaccaaattagccatgatattaaaatgagatgtaattctaattctattgtttggatgtcactgtattagaatttggaattgagtggtctaatttcatgcaatatagagtggtgatctgcaaaaaaaaaaaaaaaaaaagcggccttcatactggtttattcagttcggtt

SEQ ID NO: 160872 - DNA, 893 bp, Zea mays
  unsure (1)..(893): unsure at all n locations
  Clone ID: MRT4577_78296C.1
ggtacccccggtgttcggccggcaataacagggcttgcattgggaggtgcagatggtgcaacaggngctgtttcagtcacgttcagagtttggtttggaaactgaacaagatcatcccctgctgctcgcccttgtttgtgtttataggttgagatgtgtatggaatagatgcctgatgtctagaagcctcactcccaactgaaagtatctagttttagcttaatttgtgcctgctcacaggtgcacatttatctattgccttggacaaagaaaaataaaacagaatctagtaaccttatcccagcagaaatatcaagtattggaccactttgtgcttagccacaagtgatgtttccagctgcttttcttttgtttgcagtagaagacaaaaattgatattttggctttggggaagggaccaaattcagtgtctctaactggtgctgtgaaccagactaggtgcagtgactgcagtatggatcaggttggggaataaagaaaaatatctttacctctcggctgctgtaggaaatatcaggttttgggatatttgaagcctgccctcgatggagttctcatctgctgcttctctagttattctcaagtgantattttggtgtagagcttgatcagagttcaacaggtactggggagttgctacaaaaatctgaagaaagatcttcacatccctgctgtcatccacttatgtgcacaaattgagantagacttggggtgggtaatatgnggcttcgagggttcagtccccctctgcagaaaatatcagttntgcacctgtttgagcttacccagnagagtttgnctgtctctactttggtctgtattagtgggattggttggatatttgtggacagtgagcccttatctgctctac

SEQ ID NO: 160873 - DNA, 366 bp, Zea mays
  Clone ID: MRT4577_78297C.1
atcgcaccgccacttccctcccgacccactttcccaaaaccctaccaacctacacctattaccatgactcctatgccgtgccaagatctacctccacccatcacccagcggcgaacgtcacaaaaactatgtgagtctgggcagcgtcgatcggcgtcctcgaagtccagcgccaagctgatgtatgatctcgtggtcgtcgccgaccccgcaataaagaggattgagaaagaggatgctaagcggcacatacggtctcttcaagtatacttggatgctccacgagatcgacggattacaggaagaggggtatcaccattcgaaacgctgtgtttttttatcagaccaccacggattactgcaccg

SEQ ID NO: 160874 - DNA, 2000 bp, Zea mays
  Clone ID: MRT4577_78298C.1
gattcattggggacctcgagccccggggggccatcgtagccgtcctcgatctccctcgctccgcagcacaccactcgtagccgccggcaaggcgactgacctctttcctgctgccgagcgccatcgtctcctcggaccatctcacctcagagctgctgcgaccgccggccaacccgtctaggtcttgtccctgccgcttcctgagcctagaacatctttgcattttggagagtctccactcggagctattgtacagtctccatccctttcaacgagatggcacgtcagtctgctctctcgcttgtgagggatcgagcaaagacgggagcgctgaagcgtctgactctgagttcatcgaagacggctgggaggaactcgtctgggcgcatcacctctttccaccgtggtggaggggccaagaggttgcagaggaaggtcgatgtgaaacgcgacgcctgttccacgggtattgtggagcggatcgagtacgacccgaatcgctcctcgagccttgctcttgtgcgatgggtgcaaggggtgcatttccgccgccccaagagtccacaagaactcagtgccatgtctcaaatccaacaatctgctacagctgatgtctccggccggttttcccttgctgcattatctagtagagtgcataaagataaggaagcttctgcactgtactctgctctgggaaatggagatatttctgcatctcttaaatctggtgcgtcatcgagcttaccgaggatagctgtagctggtgccaagcccacattctttgctcaagccaaagcggatgaagaaggaaaacatacattttcctttactgagattcagaaatgggcaacagatgatgtgctttgggcacagagaatgaagcgtcaagctgcactctcctggcagaatgaactgaagaagaaacatttgcttaagacacaagctaacagcttcagtagcttggcagcaaagactagtggtacgagtaaagggccaaagggaaaggctgattgcataccagtgtcttatatattggccagtcaccagtgcatgccaggtagtacagtgatgaactataattcctcgaagccttctaagagttcagcctcttcaccatattccttggaaaatcagttcgatataattgatctcaactcaaaggttggaaattgtataccattagccaatgcacgaattggaacctgggtgcataatattgaatgtcgtcctggtcagggtgggaagatggttcgagcagctggtacatatgctaaggtagtccaggagccaggcgccaagtgtgtcctgcgccttccctcaggtgctgagaaggctgttgattcaagatgccatgctacaattggtatagtctccaacccaagccatggtacacgcaagctaagaaaggcagggcacagcaggtggttaggcagacgccctgttgtccgtggtgttgctatgaatcctgtggatcatccccatggtggaggcgaggggcgtactaaaggaggcaggccttcagtttctccctggggaaagcccaccaaagcagggtaccgatcaccaagtgtggccagtcggaaagcgtttgctggaacaaagctcatacagttcagaaaataaagaatatgtgtttgtggcagagggaactgtgataatcgacttgattctggtgcagcagaagaaatggttgttatcactccaatcgacaacacagaataaatgttttcactccaatggttgttatcgctacttttccccttttgtcattctgcagaaactagctcttcatgaaacctgattagtgaatttcttcctgtatttcttttgcttctttaacacttggcaaatttggctatggttccacggctctgattgagaagggatgctcttacctttttggtcaaggcctgtccaaaactaagaaacacatgttggtagtatgatttttctctctaaaaaaaaaaaaaaaaaaaactggagactagttctcctcgtgc

SEQ ID NO: 160875 - DNA, 370 bp, Zea mays
  Clone ID: MRT4577_78299C.1
cgagcggccgcccgggcaggcacaagctttttttttttttttttttcttttttttgatttttttttttttttttttccttcctttgtggtcttttttaagggctattacaagaacaaaccggggccgcccaacagggacgggggcaacccaaaaaaccggcggaggggcggacagggccccacccccgcaaaaagcgaaacccaaaaaacgggccacccgacaaacgagccggaaacataaaccgcaaaaccgggggacccaaaagaaggggcgaacccacaaaaaaagcggtgcgcccacaaccccgccaccaaccggaaaaccaggggcgcgcggcccaagccacggagtgcccaacgcacggggaaa

SEQ ID NO: 160876 - DNA, 481 bp, Zea mays
  Clone ID: MRT4577_7829C.1
ctccttctcccgtcgcgtcgcctggcgcgcgacgccaccgccacatccgtgccagcgctccgcccctggatcgttgacctcctcccgctcctcgtcgtcctcctcatcgccgcccacgtcctcgccacggcgcccgcggccggatgcttgaaaccagtttgttatttcagtcctgcatccttggcttgttgatctccaaccttccaacgtcagatgatggcgtggaaagttcctgaaagaactaggacagggaaccgatcttatccaatggtttgttcagatgttggtgtcaaaagtgacgatagctgaatagctgatatgtggaaggaggcccttttgagcataaatagttttcggttgctggataggtttgacatctctcgacctctccgtgtaaagaacagtagctagacagatgtgccgtttcatatgttgtggcctggtgggcttttgtaattcatgagcagcattttattactgg

SEQ ID NO: 160877 - DNA, 407 bp, Zea mays
  Clone ID: MRT4577_78300C.1
cccacgcgtccgatcctatgctggtggtgtagagacagacagagagagccgggagagaaaagagaagaggaccaaatctgagaggtggaagccatggcaaaggtgaaacagaaggtggcaacggaggatatccttgaaggagatgatgagagaacatcttcggagaacaactctgtaccacctgtgattctcgacctcaacgagggtttcggtgaggggaacgaggaaggggaagccagcgatgatggtgacgacaaccaggaggaggacggcgacgacggcggtagcacaagtgaagttgcaggcagcaggaattcaagcaacaacagcagcaccaaccacacttccatgagcaataaggattatgacatgaatagcagcagtaatggtgagggccgcgaagagag

SEQ ID NO: 160878 - DNA, 251 bp, Zea mays
  Clone ID: MRT4577_78301C.1
gttgttgtagttttttttttgtttagtatacaaccgaaaagaaatgaaaaaaaaaaaaaaaagaagggaataggaaaacactagctgaaagatgacggagaatgataatgaactatggacggctgaaacaacgctgataaattcaacgaaggggggtgcaattaagtcgcaaagagggggaatcataggactctactgcccgcatgcattatttttttttgaaggcaactgaaggggtcaaacatagaaca

SEQ ID NO: 160879 - DNA, 152 bp, Zea mays
  Clone ID: MRT4577_78302C.1
atcgctgcactcggctcccacgacgcccggctacggttttaaatacttaccgatgccgccgtctcagcgagcgacactgcgatatgcttagtaagccatgtcgctgcgcacgagcgagcaggtcgaagtgcggcggaaccgctacaaggtgg

SEQ ID NO: 160880 - DNA, 348 bp, Zea mays
  Clone ID: MRT4577_78303C.1
gtaaacatgaggggtgagagcccctactggaaattaaataaaaaatatgtacagggagttacacgtttcttaaaaaaaaaaaaaaaaaaaaaaaaaaaaaacccccaaaaaaaaaaaaaaaaaaaaaaagggaggaaataaaataaaggagaaaagataaaattaggggggcacgacttgggggaagcctgttttgggcgtctccctctctttactctccctctcccccaacctgggggggccgctttttttagggaacccaattttgactccccgggttggccgccgtatgcgccttttttttggggccccccctttgttccctccccgggccgggttttttcaaat

SEQ ID NO: 160881 - DNA, 284 bp, Zea mays
  Clone ID: MRT4577_78304C.1
ggacagggaccaggatttttatttcgattccatggagggtacactgggggacttttgttagcccccgattacaaagggaacaatttgctacaaaacctagggggggcttttttagaaaccaaaaacaatttggcgatggtccaaacggatgccgacatttcaatttagttagcttttgattccaacaaaaaaacgcctgacaaactggtataaaagggaaaaaacattaacaggggactttataaggaagaactggagttgccaccgggctgccctttttgtta

SEQ ID NO: 160882 - DNA, 404 bp, Zea mays
  Clone ID: MRT4577_78305C.1
tgttggtgtgctgcttgtgattgttgttttttcgtttgtatcacgtgctactgggatatcttatatattacacgccacttgttagtatatgtttgtataagctctaaaaaaaaaaaaaaaaaaaaaaaaaaaaaaaaaaaaaaaaaaaaaaaaaaaaaaaaaaaaaaaaaaaaaaaaccaaaaaaaaaaaaaagggggggccgttttaaaggatccaaatttacttccccgtgcatgcaaagtaaaagttttttaatagggtaaccaaaattaaattaactggccggggttttaaaacgtcggaactggaaaaaccctggcttaaccaaacttaatcgctttgaaaaaaaacccccttttgccagttggggtaaaaacaaaaaggcccgcaccaatcgcccttc

SEQ ID NO: 160883 - DNA, 240 bp, Zea mays
  Clone ID: MRT4577_78306C.1
cgaagtctaccatttcgatatttattatgattgttatgttgatgcttgatagcatcactaaataatgacatgtgcgtgcacaagtgacctctgttgcaacgcacgggcatatacctagtattggtcatatgcttcttgttgtattatgtggtgataatacataattagtgtgtgcttccgctgttgtgaatcaattggtatctattgtgtttgtcctgtaatagattttcatgtggttct

SEQ ID NO: 160884 - DNA, 522 bp, Zea mays
  Clone ID: MRT4577_78307C.1
cccattcataaattgattaaaagcatgatgagagtcacaaacgccagcacatcctctgggagagtgcagcaccaccaaaggaggcctgatagctggattgtggatccataattaagcggtagcacaagcagatactgaggagacaaagggcaaaatatatactagattttgatcctcattattgctgaggacagctggggaggtggcgatacatagcttttgacgaatatgagatcagaggtatctctgtggaacttgaaaaagataactatttacatagtgatgatgcaatattctaaccatattgatatatagtagaagaagactttgatgagtgcaactgtgtctgcaatgctgaacattaagaagacttctgagcttcacattatgcttatgaatatgtacttatgtagctgattataatgtgttacctttttgcatagatagttcaattatctattcatttttttggaataacttatactgtcattggattttgcaaaatttgccagtacaatactt

SEQ ID NO: 160885 - DNA, 534 bp, Zea mays
  Clone ID: MRT4577_78308C.1
cccacgcgtccggcaagcaagcagctagcatttcctgcaaaaactagaacagaaagagatctccaagcacgcgacgatatgtcaacgccggcgatgaagatgggcccgtatggcggcccaggagggaatcactgggacattaatgctctcaatccgcccaaaaagattgtgagcatccagatttggagcactgattcctcatgcgaaggggccagcggggtcatcaacggcatctcgttcagctatcttgacatggcagggcaactaatcccctcgggtccatggggctcccagaccggtaaaccccacgtgattaacattggtgaagacgagcgcctgatcagtgggtacggcaccagcgatggcaaatttgggacctggcttaaatttgggactgacagggctgtcgatccttatgggccatacggtgcaccgtgtaccataagtgctgttagctggcagggcgggttcatgctggccttattaggccggttctcaaacaaactaaatggggtggggggctacaaactgggg

SEQ ID NO: 160886 - DNA, 580 bp, Zea mays
  unsure (1)..(580): unsure at all n locations
  Clone ID: MRT4577_78309C.1
cggccgcgtgggcggncgcgtggggggtggggggggaaaggaggaggaagcttaggttggctaaccccaccacccatgatgctagtaaacttactccaggtggctcctcaaatatactgtcaggatatgttgggccattggggtacattgatggaagggctttctactcattgatgtgtggggggctgtgtcaaatttggacacactgacagctgtcaatcatttcatggctttactgtttaagtgagcactgagcagtattgccaaattctaggatacttggaaagtagcttaactgtttaagtgtaaaatagtcgttgctctggtttagggtttggtgagtttcatatactgcatatatccccatcggggaccatttagtacatggtttttaaagcggtaaggcggtccaaggcgttggagcaccgcctggacgcctaggcgaggtaggcgggcaaggcgcctaggcgttagaccaccgcccggacgcctaggcgacgccttaagaacagagtttagtacacataattatccatcctcctctcatctttatttgctttatgcatattcatttttttta

SEQ ID NO: 160887 - DNA, 207 bp, Zea mays
  unsure (1)..(207): unsure at all n locations
  Clone ID: MRT4577_7830C.1
atttcttttgctggttccgtttcggttntttcggttcgacccatgcttcctgttcctgatgcacgatgtcatgttggcggatacggtgaccaacgttatcgtgccgtctttcgatgtctagtccctgctgcccatcatctgctcgacgtacgatgccaagatcgacaccctcaagaacgcgcacctctccgatatctgcatcagcac

SEQ ID NO: 160888 - DNA, 535 bp, Zea mays
  Clone ID: MRT4577_78310C.1
gcttctcgcatccataatgctgtctctcaaataataccgctttcaatctctgctgaattgtaatagcgctcaagctgcgaatgcaaattcttcatatcttcgctttttgaagaatggtagtgtgtcatgtttaacaacaacttcagccgttctgtgtggaaccgttcttttttgtagagcacccatgtttctttgtcaaactattccattttgtcgtgtttttgatttcgattaacgacttatcccgctttaataggcacatatctaaactctgattatcttcaaatccgaacaacggaccaatcaaatgcttttaaatgatttcttttttcctattcccagatttgctgccttcgatattccctccaatgtctttgcttggcaatttgaatctgaatttcagagaaaagttttcaaattcagatagtgcttcgaggtgcgaatgccaccaggtgttcttatcccatccattgcacagaagacacgcgtgttggcaaatgaaggatgctgtacttaatttgatgctttttacata

SEQ ID NO: 160889 - DNA, 221 bp, Zea mays
  unsure (1)..(221): unsure at all n locations
  Clone ID: MRT4577_78311C.1
ggggtaaagcccccccttctcgagtttttttttttttttttttttagaccctagaaataccagagcactgcaatctggtggatcacaaagtgcattgttatttgtacattcacctcaccggcccaccctagaagggtggcagagcaccaaaccaagatcttaattattactntgcgtaactggtgttacanaaggccgagtttttactcatgacatgatcg

SEQ ID NO: 160890 - DNA, 217 bp, Zea mays
  Clone ID: MRT4577_78312C.1
gaggcttgagctgaaaacctacctgactaataaataggaccgttataatacgaaagactgtgtccaggagatcgatctgaacgccgtttctgcccttgccaccctcgcggagtcacgcccttctgctgcagatggagtctcgcaccgagatgccctccatgcttgtgcccataacgcccggctgtggctcatccgggcggaagaacccatccattct

SEQ ID NO: 160891 - DNA, 255 bp, Zea mays
  Clone ID: MRT4577_78313C.1
ctgaccgtgggcgggacgcgtgggcgggacgcgtggggcagacgcgtcgggcgccggctagtagtgggggactccagtccagcgctgaagggctactagcgcagcgcagtccctcgtctgctagtgtggtggctgacgccggtgggggtgtgagcaactgcgagctgctgccacccctgctggcggggtcgaccgccggccccggaccgagagtgacggtcggtgggcggtgctgctcggggtgctggtcggcag

SEQ ID NO: 160892 - DNA, 435 bp, Zea mays
  Clone ID: MRT4577_78314C.1
gcagaaccggccggcactcgaccgctgctccaagcgggacacagtaactgctacagggtaacccgtctgacggcgaggtccttgactagatgccgccctgtctgcctctatctagcgccgtcgactcagcttcagacgccaaataacgcctcggccaccaccggcgccgggcctcgatacctgtcctcaatgcaggggacaggagcaccgatgagagaaggacagactccctgaactaccgaaccgtcgagcggcgccccatggtgcggacaacaagccggaccggcgccaacggggacgacctgaacgtgctggctgcctgcgaaagccttctcatactgctcgccaacggcggactgcagatctgcaacccggtgacccgtcagcgcgcgccactcactcttattcacggagcctattgcatattcgggctgt

SEQ ID NO: 160893 - DNA, 425 bp, Zea mays
  Clone ID: MRT4577_78315C.1
gggtaccggggctctcctcgagttttttttttttttttttttttttttttttttttttttttttttttttttttggagggaacaaaaaaacatctcctttatttatgggaaaaaagagggtaattgacaaatctaaacgaccataggctagcatgttcccaaactccttcaaaacacccaccattacatggggggctttttggggtttaagaaccgggccacccaaaatagggagggcaaagcccattcctcggtttagattaaaaaccattaaaaccaaagggggattatggaatcggcaacccaaccattcatccaatggggccgtctggatccaagagcgggcccccatccccaaaccaaactgggcccagttccggccgggaactggaggctgaagccaacggctttactttggggcccgg

SEQ ID NO: 160894 - DNA, 367 bp, Zea mays
  Clone ID: MRT4577_78316C.1
acgcgtgcgtgggctcggttgcgcggcacgggccggcctttttttttttttttttttttttttttttgggttgggtaagtttaaagaagggattgactcaagcgatatctgggaagtggcacttaggaaggaaacaaccggatactggggcaagcgcctgaaggtcgcaagactttaggagcaaggtttggcgccaatcccaaacaaggtcttatggccaaaagcatattattctcgtattgggggatccaaaaaactagcggaggggatccccggggaaatatgggaattcgcagctttggtgtaatgtatgccattcgaggtgaagaataaggggggggcgttgttacctttggcggggaccaag

SEQ ID NO: 160895 - DNA, 531 bp, Zea mays
  Clone ID: MRT4577_78317C.1
tttttttttttttttttttttttttttttttttttttttttttttttttttttttttttttttttttttttttttttttggggggggctggccctattttttttcccagcatatatggagagggacgggggagccccacaaggacctttttcccaacggaataacgtataaagacctaagggggggaaatgccgaagttgcatcccaatcaaaaaaaagggggttaataaaaggggggaaaaaaccccgggggccaaagaagttttaaaaaaataataatatttggggggggaagggcccaacggggaaaaggggggggaacccgggtcctccgggggcccgaaaaaaagggcaccccccccacgtttatttgtgccctgcgaagaaggaacaatgcccaaaaaaatgtagtcgccggaacccaaaaaaaaagtcgggttgggtggggccaaaaaaaccggggggttaatttttcccaacccgaaaaaggccttgtcaaccccccggaccccacccattaaaggggggccc

SEQ ID NO: 160896 - DNA, 657 bp, Zea mays
  Clone ID: MRT4577_78318C.1
tgacttatcagacttctcgttctcgctctctgtgacggtggcgtagatgccatagcagcgaaggtagaggaaggcgataaagattgctgactacgacctgaaacgacaaggacaccgtgcatgaagatggccgcgccgcccgctgtcgctcgccgtgccccggatcgtctcccccgacgaggtgcatacccgcttccggttcgatgttcgtatcccctccgaatctcacctccagacgctaccgcttcgacttcaccactaacaacggagagcatggtgccataccactatcgcattactctatctaaggttgctgaactcttgcttctggagatacataccatgctgaataagatgatctttacaatgctttcagtgattatgcgcatgtgcaaggacttgcatttctatctataatccctcactgaatatgtcaaggcatacgcgctgattgaatacgaaaactttgatgaatcacaagcagcgatcagagcattgacacgaaagtcagctgttcacaagaactatcattgttgactgaggcattcagcagacgtcctatacagaatttcacgagtgcgatgccatcactccactagatctcaggcactcctccgagcatgcttgctgtcttgactccatattgactaccgcaaa

SEQ ID NO: 160897 - DNA, 274 bp, Zea mays
  Clone ID: MRT4577_78319C.1
aaaaaaaattccaattttttttatggggggggattacaaaaaaaattgtttcaaaaaaattccaatttgaatgtttaaaaaatttataagtttaaaaaaacatgcttgtttaagggacaatcctaaatggggaagctaaagaggggattttcttatataaaaagggcgggcccaccgggttttaaccccctccaaaaaaaaaaaaaattacaaccggggaaaaacactacgttgggggtggaaattgacaaccacttggggaggattttccatt

SEQ ID NO: 160898 - DNA, 948 bp, Zea mays
  unsure (1)..(948): unsure at all n locations
  Clone ID: MRT4577_7831C.1
tcgagggccggcnncggggcggccctgcnttaggtgcaccagaagacagcggcaccgcaccgggcgcaactaccgcgtccgtgccgtgatccactccccattgccccccgaccctcgtgcacgcgcatcgaggccggccgggcagggaatcggctcagaaacgcaggcagcccagcccacgccgcgaggaagcctgaggccgagagaggactgagcaagcgtcccgcgagaaactggtgttccggaccaccacgcggatgggctcgggcgacccggcggccgaccccctttcttccttcctccgccaccccggcgcgttctccttctcccgtcgcgtcgccatggcgcgcgacgccaccgccacatccgtgccagcgctccgcccctggatcgttgacctcctcccgctcctcgtcgtcctcctcatcgccgcccacgtcctcgccctcggttactggatctacaggctcgccacggacgggtccaggcagcccgcgcggagcaagaagcactaaggggacggcgcccgcggccggatgcttgaaaccagtttgttatttcagtcctgcatccttggcttgttgatctccaaccttccaacgtcagatgatggcgtggaaagttcctgaaagaactaggacagggaaccgatcttatccaatggtttgttcagatgttggtgtcaaaagtgacgatagctgaatagctgatatgtggaaggaggcccttttgagcataaatagttttcggttgctggataggtttgacatctctcgacctctccgtgtaaagaacagtagctagacagatgtgccgtttcatatgttgtggcctggtgggcttttgtaattcatgagcagcattttattactgggcaattaagttaacgaggcatactataatgaaaaaaaagagagcaaaaaaaaaaaaaaaaaaagcggccacata

SEQ ID NO: 160899 - DNA, 333 bp, Zea mays
  Clone ID: MRT4577_78320C.1
gttcaatgtcactctcgcctgacttggtcggatctggggcagcattgtgctgcagatcgtctgactggtgaactgtgagcctgacgctaattcatcaggactcttgggatgatggtatgctctgtactgtgtgacctgggtgggatcttcaccccctgcatggtgctcaggctgatgcaagtgtggcaagtcctgctcctcattgtgtgttgggttctgggcctgacttgctggggccatgactcttcttctcccagagatcaatggcgtggctctgactgatactattgaagaagcagagaagctgtggagaggaaatcataggccagagat

SEQ ID NO: 160900 - DNA, 379 bp, Zea mays
  Clone ID: MRT4577_78321C.1
atgtaatctaactaatagtattaaattataataactaaccaaatatttacttattctaattaactaaatcaatctaatttactctatcctaatggctctactcaggggtggatctagaattttcctatgactcaggccaaacctactaaatttccttctcttccttttatcttaactattttatactagattaaataaatacttatgtagagtagttacatggatcaagccttgggccacggaccgggtggcccggggtgtagatccgcccctggttccacttgtcataacactactccactccatcatagctcttcctcggggttgtgctgttggtcatggctgcagatttcaatgttcccatggcgacatgtgtaca

SEQ ID NO: 160901 - DNA, 385 bp, Zea mays
  unsure (1)..(385): unsure at all n locations
  Clone ID: MRT4577_78322C.1
tttgggctgatttatgtgcttgtttatgtgcttgtttatgtgcttgttgcgcttcatgagtagctgtatgtaagcgctaagagatgaaatggctgatacggtctgtatgtaactcgttgcagtggctgttgcggcggttgtggcgtcgtcgtcggtagtggtggtgatgattctggaggttgttactattcgtgggtaggcgagtcttgttactgtgtttcgttctcttcatgtttgtggtatggggcttggttttcttgtgcttcgtcgcagtggtgctaggaattctaagagtgttgttagtattgttgttgataggtgtgttgatcgtaatcgttctaagaatgttgntaggggtgctagtggttctaatgttggtaatgtt

SEQ ID NO: 160902 - DNA, 270 bp, Zea mays
  Clone ID: MRT4577_78323C.1
aagcccaaaatgggaacgcgacccgctcatatcaacattgtcgtcattggacacgtaggggcgggcacgtccaccactactggccatctgatctataaatgcggtggcatcgacaaaagaaccattgaaaaatttgagaaggaggctgctgagatgggaaagggctccttcaagtattcctgggtcttggataaactgaaagctgagcgtgaacgtggtatcaccattgatatctccttgtggacacccccgaccagcaagtactatgtg

SEQ ID NO: 160903 - DNA, 436 bp, Zea mays
  Clone ID: MRT4577_78324C.1
gcacgcctacgttagcggggcctctgggtgcgagctcaccatgctcgagttttctgagtgtagtctagtggggacaggagaatggttatatgatcatgtagtccggtaacatattatgtatgagaatattaaggcactacgcacggcacaacaaagggtgccgagaggggatacatggtgggggaagtcacatggcacacatactgcaagcaaatgagagaggcgataatacgttgcatagatgaggacgtacacacatgacatctggtatgaggtctatactgagacgacaggcattgggatcggatgaagctcgctggaaaaacaactgcacattcttgggaaacttggtggtacgattgagaatatgtagcgtggaattggcaggcacgttcctggggagatcatgtaggctggggataggggtgcggattgg

SEQ ID NO: 160904 - DNA, 341 bp, Zea mays
  unsure (1)..(341): unsure at all n locations
  Clone ID: MRT4577_78325C.1
ctaanggtgncaaaaagtctancattantcnttccattatntatgaagcgccccttntctacaggattgaggaccttcnacctnccnnnanncatnaanaanttccaatcttctgcttactccaacttcncgaaaaagccatcctnatatccttttttgcttcctcattctaaaaatataggatttcttttctgacactttaattctgaccaatctctcttgccttcttctttctgataatcgaccagttccccaatcttgctcctttcactccttcctcctncatctgcagcatttttttcttattcacctactccaattgcttttctttcttcttctta

SEQ ID NO: 160905 - DNA, 630 bp, Zea mays
  unsure (1)..(630): unsure at all n locations
  Clone ID: MRT4577_78326C.1
tcgtttaaatattaatagagctcctgcagagatctgggggggggggggggggggatatctaccatttcgccaccgagggggctacctcccacgtccagatgagcaacgcccgaacgttatcgcgnctccccactgcaggcaccactgcgcgccacctaggacaaacattcgttcccggcccgcctgtcatctaccttacccacaagcctgttgactaccaacactggggcacaaggtattcgtctactccctctaagagtcgacctagaccctagctattactgttcctttgacaaaagtctactacgcctcctaaagaatccatcgtacgcacgagaacagggctatggggttagttcgtcgtgtgaggagtctcggggtgccctaggaaaggtacgtcatgcagacgccggtgagtaactctgggggagtaactaagtctgcgctgctaactgtgacttttgtaacgaacccggactctgcttatagcgccaacgtggcccgggagataactacgtacgcttcgcccacgagtgttaccacgacctagtacgcgcacgcgagccagtagatagtatctaggaccacatctcccagagcgacccagggggtaacgactttgatctgagc

SEQ ID NO: 160906 - DNA, 531 bp, Zea mays
  Clone ID: MRT4577_78327C.1
gtccccgcaaggcccagctcctcgctgctcactccacagcgccgcgcaatggcggccaagcagcggcaccggcagctgccactcctgcccctcctcgccgcggccgtcgcgtggtcgctactgcgcgccgccgccgccgcgggcacgggcactggcacgctcggcctccggcacaagcccgcgaggcagcacaacagcacgcggcacgggggagggcggcgcgcccagcgtggtggcgctcccggcactggcatggcgtcgtgcaacctgttccagggcagctgggtgtacgacgacacgctgccgatgtacgacgcggcggggtgccccttcgtggagccggagttcgactgccagaagtatggccggcccgacaagctgtacctcaagtaccggtggcgcccggcgtcctgcgagctcccgaggttcaacgggcaggacttgctgaggcggtggaaggggaagaagatactgttcgtgggggactccatcagcctgaaccagtgggagtcgcttgcgtgcatgctgcgc

SEQ ID NO: 160907 - DNA, 764 bp, Zea mays
  Clone ID: MRT4577_78328C.1
gaatgctacctacatcattagtgttgcaaggaagattggatgctctgtgtttctgttcccggaggacagggctgtttgaattcggcaccagatcctaacacttactgctagcattatgtattggagcctacagaaacagccccagtcacagtctgaattgacagaacaatcagaaccatctagcatgacttctgacgcagcctctgaagttgcctcggaggatggtgcttcaacgacagcaccgtccgagtcagaagaggtgaactcgctgtctgatagcatatcgaatttgacaacggatgatgctacttcaaacgccccatctgctgaaaacggaaatggtgtggcagggtcctgatggttatgattatgcaaaccctgttctttttttccccatacagtgctgttacaggaaatagtgctttcatgatgcccaaagttgtcgctaccagaagcgatatttttaatacttctgcttcctgagcatggtagcttgatagatacaacagtcacagatagatatagatgccttttgttcattggatccgcttatactatagtgggggaagataatagtatgtgtcgctggctgggtattttctgtatttctggcatacacccatgcaaaatttactacctcctctgtatcttatcggtcaattcgttcgtatgtttattggactagtcaaagcttgtaatgctgttgctgctctgaaccgtgcctgtacataacatatgcttaaaaaggttttgcattgtccttt

SEQ ID NO: 160908 - DNA, 601 bp, Zea mays
  Clone ID: MRT4577_78329C.1
tgggaccctcgaggccggccgggctcacagtcctccacactcgccgagcgacaccgcgcgggacgaccgagcaagcagagcatgcaaccgtcgtgcctgggcgcatgcagcggtggaggactagcactctccgcccgccgcctcctcgccccctcctactgccgcgtcgcgccgcatagggcttccgcctcgtgctccgccggtggcggcggcaaggcatcgccgcgggggaaggacaacgtctggagcgtcgataacgaccgtgccgccaaggaggcggtccggggcccgaagcaccgccgcaggaaacgccccagcggtcgccgcctgccgccgccgaggaggaaggggatggatgcggggtcgagggttctagtgtctggagccatgctcgtggaggtcgaaactgtgctccaaactcaggaacctgttataaagccttcttgggatacatttgcaagtagtttaactggtaactggaagggtgttggagctatcttctcaccaatcacagcagagatggagcccgttggggttgggaacaaagaagagtacctttatgactgctacactctttctcacattgagagatcttttgatg

SEQ ID NO: 160909 - DNA, 1259 bp, Zea mays
  Clone ID: MRT4577_7832C.1
gggtctgtacggttggtggattaggattgctttcttcgtttcaacttcggactgcaattattgaaccctttttaggagaacaattattgaaccctgctcatttatgtatcttctttttatcggtaactgatttgttaagttatttatcaagttatcctgctaaacctggggtttgtttgtctaaactgtggaggctttatcatgtttatgttatattcatgttttgaagagaagtgtttgatcttatgagtgcttcatatgctcccggtcgttattcttgcatttggtatgcattatgctgttgtaagataagttgattttcctctctatcctcaaatatttttatgtttctaatcaaattctgtttgatgatttggagaaaaaacttcctttgcaaagttcgatgtttggtctgttgcattcttaggttggataacaggcagaacccattgttaacatatattttaactttcatgcttacttctatgatggagtcatgttggtatttaaataatcaaacatcacaaatccgtggtgtactcaacattattccgttacttgaatgagtataacatcagtcgagcagtaaccgagagcatgttgcattgcctgttttcaccttaatgctaaagtcactgtgttctgttcttctacattgtcttctttagaagaggtcaacaggaggggctgagaaaaccgtgtcccgtctttttttatatattaagcttgcagtccattttaccatagaacagcaaatcggcgtcttagtttgctccaaatctgcttagtgcttgagtaatatgcaacatcggacagcctctcaaacatctccagtaacccttttgggattgacctattccgtccattttgtttacaggcttgaaaccagtttgttatttcagtcctgcatccttggcttgttgatctccaagccttccaacgtcagatgatggcgtggaaagttcctgaaagaactagaacagggaaccgatcttatccaatggtttgttcagatgttggtgtcaaaagtgacgatagctgaatagctgatatgtggaaggaggcccttttgagcataaatagttttcggttgctggataggtttgacatctctcgacctctccgtgtaaagaacagtagctagacagatgtgccgtttcatatgttgtggcctggcgggcttttgtaattcatgagcagcattttattactgggcaattaagttaacgaggcaaaaaaaaaaaaaaaaaaggccccta

SEQ ID NO: 160910 - DNA, 628 bp, Zea mays
  unsure (1)..(628): unsure at all n locations
  Clone ID: MRT4577_78330C.1
ttctgacgcagcctctgaagttgcctcggaggcgggtgcttcaacgacagcaccgtccgagtcagaaagaggtgaaactcgctgtctgatagcatatcgaatttgacaacggatgatgctacttcaaacgccccatctgctgaaaacggaaatggtgtggcagggtcctgatgcggatgattatgcagaccctgttcttttttcccatacactgctgttacaggaaatagtgctttcatggtgcccaaagttgtcgctaccagaagcgatatttttaatacttctgcttcctgagcatggtagcttgatagatacagcagtcacagatagatagagatgccttttgttcattgaatccgcttatactatagggtgggggaggataatagtatgtgtcgctggctgggtattttctgtatttctggcatacacccatgcaaaatttactacctctgtatcttatcggtcaattcgttcatatgtttattggactagtcaacgcttgtaatgctgttgctgctctgaaccgtgcctgtacataacggttgcttaaaaaggttttgcattgtcccaaaaaaaaaaaaaaaaaaaaaaaaannnnnagtactcttgcgttgttaccactgct

SEQ ID NO: 160911 - DNA, 3208 bp, Zea mays
  Clone ID: MRT4577_78331C.1
acgccacttgccctctgcgcctcggcccccacgaaatctggagaccaggacgccattgctcacctttttccgtccagcgcaaggacaccgcgcgccagagagggtgagggattgccgtgaccgattcgaaagccgcttcgggcgcgggtgggatcggcccgtggccggcggagatgtccggattcgtcggtgtcgtcgtgtccgacccctcgctgcaggggcagttcacgcaggtcgagctccgatcgctcaaggccaagttcgtgtctctgaagagagattccggccatgtcaccactaagaatctcccggtgatgatgaagaagctgagggggctcaatgaggtggtctctgtggaggagatcgcggccttcctgtccgagtcgtaccccgacagcgatcaggagattgaattcgaatccttcctccgggagtatctgaatctgcaggcgcgggtgagtgccaaggagggtggtgccggcggtggccggggtggcaagtcgtcgttcctcaagtccagcatcactacgctgctgcacaacctcaatcaggcagagaaatcttcgtatgtcgcgcacatcaatacttacctccgtgaagacccattcctgaagaagtacttgcccatcgacccgtctggaaatcagctgttcgatctcatccgggatggtgttctgctctgcaaactgatcaatgtagctgtacctgggaccattgatgagagggcaataaatacgaaacgtccgcttaacccatgggagagaaatgaaaatcacacgctctgcctcaattccgccaaggccattggatgcactgttgtcaacattggcacacaggatttggtggagggaaggcctcatttagttcttggattgatatcacaaatcataaagattcaacttttagctgatcttaacctcaagaagacaccacagctggtggagctatttgatgacagcaaggatatagacgaggttttgagtttgtcgccagaaaagatgctacttcggtggatgaaccatcatctgaaaaaagctggctacaagaaaactgttaacaatttctcttcagatgtcaaggatggtgaagcctatgcttaccttttgaaagctcttgctccagagcattcccctgaaactacattggacaccaaggatccgaacgagagggcaaaactagtacttgaacaagcagagaagttggactgtaagagatacttgaccccaaaggatatcactgagggatctgccaatctaaatcttgcatttgttgcacaaatattccagcataggaatggtctgaccagtgacaccaaacaagttaccctcacacagacagcaacacatgatgatgttctattatctagagaagaaagagcctttcgaatgtggatcaacagccttggggttgaatcatatgtgaacaatgtctttgaagatgttcgcaatggatgggtacttcttgaagtgcttgacaaggtgtctcctggatctgtcaattggaagctggcaacaaaacctccaattaaattgccatttagaaaactggagaattgcaatcaagttgtaaaaattgggaagcagttgaagttttctttagtaaatctggctggaaacgatattgttcagggaaataagaaattgattgttgcacttctgtggcaattgatgagattcaatatcctccagctgttaaacaaactgagattccactcccaaggagggtcccaaggaaaagaaatttctgatgctgatattctagactgggccaacagcaaagtgaaagcgtccggaagaacatctcgaatggaaagtttcaaggacaagagcttatcaaatggattgttcttcctcgagcttcttagcacagtacagccaagggttgtgaactggaaagttgttactaaaggggaaactgatgaggacaagaagctgaatgctacgtacatcattagtgttgcaaggaagattggatgctctgtgttcctgttgccagaggacatcgtcgaggtgaatcagaagatgattctaacacttaccgctagcattatgtattggagcctacagaatcagcatcagtcacagtctgaaatgccagagcaatcagaaccatctagcatggcttcagacgcagcctctgacattgcctcggaggacggtgcttcaacgacagcaccatctgagttggatgaggtgaactcgctgtctgatagcgtatccaatttgacaacggatgatgctacttcaaacgccccatccactgaaaacggaaatggtgtggcagggtcctgatggttatagttatgcagacccagttctttttcccacacacagtgctgttttttttatacagggaacagtgcttttcatggtgctcaaagtcgtcgctaccagaagtggttttttttaatacttctgcttcatgagtatggtagcttgatagatacagcaagtgcagatagatatagatgccctttgttcatggaatctgcttagactatagggggcggggcgggaaagatagtatatgtcgctggccgggtagtttctgtatttgtggcacacgcacccatgcaaggttttacctctttatgtatcttgtcggtcaattcgttcatatgtttattggactggtcatcgcttgtaatgctgttgctgctctgaaccgtgcctgtacataacatacactcaaaagtgtttttgccttgtccaaaacggaaatggtgtggcagggtcctgatggttatgattatgcaaaccctgttctttttttccccatacagtgctgttacaggaaatagtgctttcatggtgcccaaagttgtcgctaccagaagcgatatttttaatacttctgcttcctgagcatggtagcttgatagatacaacagtcacagatagatatagatgccttttgttcattggatccgcttatactatagtgggggaggataatagtatgtgtcgctggctgggtattttctgtatttctggcatacacccatgcaaaatttactacctcctctgtatcttatcggtcaattcgttcatatgtttattggactagtcaaagcttgtaatgctgttgctgctctgaaccgtgcctgtacataacatatgcttaaaaaggttttgcattgtcccttaaaaaaaaaaaaaaaaaaaaaaaaaaaaaaaaaaaaaaagtactctgcgttgttaccactgct

SEQ ID NO: 160912 - DNA, 516 bp, Zea mays
  unsure (1)..(516): unsure at all n locations
  Clone ID: MRT4577_78332C.1
ngtgtgtgtggattgntatagccgtggggtggggggctgggatcaggttgagcttgctgttgcttccttactgcgctgcaggtgctctgcattctcggccaaaaattgtgaggcgaggctccgatccgggccgactactaacgcgtgctcttagtaatccgggcgacctgatcgcgcgggggtgcgaggagagtgtgaagcgcggtgccgcggttgcctgtcagcgtgccgccgggggagaaggaagaggagcccggattcgtacgtcccgctggccgccggaccgatggacttcgagcactgtatctcgtgcctggccgccgcgaagcgcttctacgcggtgcagctgggccacagcgatcgggccgggatggatgagctggagatggacgaggaggtcaggcccgagttcctctggccctactggtacgaggaccaagacgttggatccctgtgtgcgcacctggaggaggagcacccgttccaaccccaagccgtggtctgccctggctgctc

SEQ ID NO: 160913 - DNA, 348 bp, Zea mays
  Clone ID: MRT4577_78333C.1
gcgcgtttcgatgcacgcctctagacagattcgcattagtacggttgaatgaagccaaaaacaaaaataaaaacagacacaaaatcaacagaaaataagatggtacaacagagggtggatgcgctagaggatccagccgttcgtacgtcagctcaggacgtcggaggtctcctaaagtgtcagctatttgtcgttcactggatcttcgttatcagtgttcgctgactgggacatcactggcattgcccagtttattacacgttgccaacatcggcctttctccagctggattactagcaaatggggccgcaacggtcgctggtctcaccatttgtgcagctgtaatgg

SEQ ID NO: 160914 - DNA, 846 bp, Zea mays
  unsure (1)..(846): unsure at all n locations
  Clone ID: MRT4577_78334C.1
cttaacttacatcaacactagttccaggggttgccacaacccacaaggccacaactaaccaagcgcttgcgaattgcaaacacgggcaatggtgttgcagcccacaaagagctttgcaaacagtaaagtacacacaagacataaaacaaaggaacagtgagcaccatcaagacatcaacaatctgaaactcgctatttctgtagactgtactgtcttcacttcacttcacttcatctccccgggatcagggtcaggggccacggccacggccctccgctcagcagatgggcaggggctcaccgttccactccttgaggcactcgagcacggcgtcgatgtgcttgcccaggttcattgccacgaacaccttgtccacctcctcgccgggcgacctcgccttctccccggtcaggtactccgtgccgagctcctcgcgcacgaacctgtacagcgggtacgaccggcactcggcgatcctgttccggatcgcggcggtgcgctctccacggccgcgcgggccgcgtccacctcccgaggcagcgcgcgcggagctcctcctcgaacgtggcgaccttggcgaacaccgaggtgtccgggtcgcgctcggcctctccgttggccagggcgtgctcgacgaggaccgaccgcatcttctgcatcagcgggtaggtagcgctgcaggggtcgtccgcgtacgcaaacaccgcctcgcgntcaaccgctgtnagcaggtccttctcgcagaagcgcgcntcgtggagggcccccgtggcgcnggtgctcagggtcttcctggcaccgcngtcacanacctcttcacggggctcctcaggttctcctcgagg

SEQ ID NO: 160915 - DNA, 1447 bp, Zea mays
  Clone ID: MRT4577_78335C.1
tgatggtgatgatgagttcgtcacccaccaccgtacgctatcatccatgcatgttcttcttcctccttcctcccctctcttcaagcagcaaattaagatggtcgtcagtcgtcactatataagcatctcttgttcctcccctgcgccttcctctctctctttccttttcctcccgtcccatctctctctctctctcccttctgcatgacgctgtcaatgctgtagcggcagccggcagtgtatagagctagccatgctggaccacctcgtgtcgtcctacacgcaccgcagtggcggcgaccagcccgcggcgccctcgccctgcgacctcgcgtccgtggacgacgtcccgggcaacggcggccacaagcctggcaaggccgtgaccgcgtccgtgtaccgcgccaagatcgcggggcactcgcgggtggtgacggtgtcgtggtcccgcgacctcctgtcgcacgcgttctccgtggccatctccggcgcggacggcgcgtccgcggagtgcagggtggagctgcggccgtggcagttctggcgccgcgcgggctcgcggcgcgtggagctggtgggcggcggctcggcgtcggcggccgtgcgcgtgctgtgggacctccggcgggcgcggttctgcggcggggtgcccgagccccggtgcgggtacttcgtggcgctggaggccgcgggcgaggtggtgctggtgcagggcgacatgcggcggcggcgcgcggaggccgaggccgtgcccgtggcgcggcgggagcacgtgttcgggcggcggcggttcgcggccaaggcgcggttcgatgagcagggcgacgtgcacgacatcgccatcgagtgcggcggggagggcggcggcggcgacggcgacgtggagatgaccatcgccatcgacggcgaggaggcggtgcaggtgaagcacctgcagtggaagttcaggggcaaccagtcgctgaccttcagccgggccaaggtggaggtgttctgggacgtgcacgactggctcttcagcgccggcaccaggccggcgctcttcatcttccgccccatcgtgctgtccaggcgcgtcggcgccggcggggatgctcgacggcggcgcggtggtgcccgccgccaccacgggcttctgcttgtacctctacgcgtggaagctcgactaaagctgctggctagctagctagctacgccgatcgacattgcagtgtctgctgtctctcccctgccgccgccgccgccatgcatgttgtcggtcgatcgatgggactgctgtctgtgtcaccagacaatgcaaaaatgcattcctgtgaactcaagattatgagtaaggaactttttttttcttttcgttttgtaattttggaaagatatatatatatatataactattaattggatatataattcttaaaaaaataaagaggccattgccaccctgttt

SEQ ID NO: 160916 - DNA, 369 bp, Zea mays
  Clone ID: MRT4577_78336C.1
ctcgatccctaagaaatacaggcttggctgccccctcagccgggcctgcaggaaccctggcggcctgagcaggaagtacggactcatgtgctgcagatagggatctccgcatcaagcggatggacattggttccatcagaggaccgctgaggaggccactgggctactgtggagaactgcctacatcagaagaagatggggcgcttcattagaagggctaagtcatgcgctggagctgtgagctcagaacttgagactcatgggtcaaactcgagttgttaaagtgttgatggatacttagtgcttgctaggaccagctataatcagaggatcgaaatttcctcagaaaaaaaaaaaacaaaccggccc

SEQ ID NO: 160917 - DNA, 342 bp, Zea mays
  Clone ID: MRT4577_78337C.1
aattcccgggttgttgagctcactagatggtggccgccctttttttttatttttttcagagactttttgagtacacaatgccgagctttggcacatcaaaggaagtgggtcctagacacagcagacattgaaagcaagatgtatcgaaacaggggctatatacggataccatacaaacgactacaaggtttaaccagtacaataaaaaggaagctgtaccatctgaggtcacggaaccaaccaagtgagcacacaaacgacctgtgtttacggtaggcagtgaacttaaccgggagaaaaaaaatggggaggccgacccccaactgaacccctcggggatgc

SEQ ID NO: 160918 - DNA, 653 bp, Zea mays
  Clone ID: MRT4577_78339C.1
ctttcatatattcaaggagttcttgctgagatattggagttttgtgatgggtacacgtttgatccaagctgatggggagatttggcgtgttcggaggcgtgttattgctcccgcactacatcagaagtatgtgaatgcgatgatcggtctccttggagaagcttcacaacggctctgcctacaggataagagaatctatatcaaatggcaaacgacgagagccccttatttgtgacaatggaactaacatgttcaagattccgtagcaaagcacggggcactatttattattgggcagctgaactggaatgctgaaccaaccattttttccttgttatgatgaagatattggatgcaaatcagaaatggggagtctgaaccagaacaaagatgtgattctcaccatggtttcaactatgcagtattcaagacgcccaacacctacaaattgttggagctggagttattacatcgaatggatgactggccaacatattgccgcttcttcgctacggaccctttgagttgtaagaccatcaatgagtatccgtttgagttgtaagactttgtgatattttctgaagatttgtataagtttgtaatttattgtgatagtcttagcatttaaatgatgcaattgatataacattatt

SEQ ID NO: 160919 - DNA, 447 bp, Zea mays
  Clone ID: MRT4577_7833C.1
gcgctgtgccgtcgcccagccgtcctcccgcttctgccgccgctgcccagcacgccagccgactcgtggaagtggcgcaacagcgtcagtacagtagcctcgccgcgcagcgcagcccaaccccggcttacagccccaaagccgccggggctgggctagcagtaaatgaccgcgccgccgctagttaacaaagaagaagctagtggcctgcgttcttgaatgcgagagttccatagggattctacatttctacaggacacgaaacagttcatttgctcggacaaaatggtgaagcttcccgcaggattcctattcctacgcgaagatgttgcatgcatgcttgttcgaggccttgatcttttgcaaggatttttcaggtgcacgtgttctcaaaaataaactctggtttacttttcaaaaaaaaaaaaaaaaaaggcccctagggcc

SEQ ID NO: 160920 - DNA, 267 bp, Zea mays
  Clone ID: MRT4577_78340C.1
gtcacgacggtcaaggacctctcctaggaacgggcctcactgctcagccgccagcatcaagggctccgatgaggctgcggctgcggctaccgggcagcccactgcaagtgcctagacctgcagcatcaacgatgaccgccactgctccattgacagcgtgcatgacgagccgcttcatcagctccacgattactataaccccgagatcgtccccgtcaagatcatacacgaggacacgtttacattcgacgcttcagaaaaagagac

SEQ ID NO: 160921 - DNA, 375 bp, Zea mays
  Clone ID: MRT4577_78341C.1
gggtccaaacaggatctttttgcatttacaagattacaagaatacaggaaatatgatgaatcaagataaaggaaaacaattgagaagacaaagaaaaaccaaacatagtacttgattgatttaaacacataaaaactacaaatgtcagccacttgtagctgacctgatatcctgtgagattgactttgtcaagaagcatgtttgtagcagtaacttcatcataactttcaccaagaacttcaggtagtaaaacaccaaaacggtcaacaaattcatcaaatctcctccttgttggatatccaaggcagcttattcttattgcctctaatactcccccacatcgaagctgctggagaacattactgttctcgaaaa

SEQ ID NO: 160922 - DNA, 691 bp, Zea mays
  unsure (1)..(691): unsure at all n locations
  Clone ID: MRT4577_78342C.1
acacaacaccccgcccctgcacttcagtcaggcgcgcaagcccacccaaggcggacgccattgccgcagacaccaaacccatgttcctcgtgcccgaacttcaacctagaccgcactacacccagaggggatggaatcgagctagcaaggaagtcactcactggtgcttgcagcggagacgggtcttccatagtgtgaagcagcgcctcgtcggtgttgaagcccagcgagaaattccgaaggcttcggcgacggcgaaggctcgatggctcaagtctgatgggggaggaggtcgcagggacccgctttcatagcccggaggagctggcgaattggccaaatcggcctaaggatcccgctgcgaagcttttggagtttgttgcaatcggatgaagccgggtatgacaagatgggcccgcttggcagagacaaccagaccaggggcactgggtgagaagttgaccaaggagccctagctatcagcgctgatgtgcagctgggctgagcgcccgcagcatgattaanagggggtgggcgcagtgcagtgggcgcacgatggggtttagtgggccgaggagagggtaattcagcctactagctttttggttttctttttatcttactttctattctccattctcttattttcaaatctcaaactgaattttaaaactctttgttttgaacttcg

SEQ ID NO: 160923 - DNA, 575 bp, Zea mays
  Clone ID: MRT4577_78343C.1
tttgcccgtctgaagctccaacctggggattgcgagagccctttggtttttcttcacttggatgcaggccaaacatgccaactttttttaatgtcattgacctgcacgatgaaggctgtcccacgaatgttctctgggcagatgcacggcctagagccatgtgtgagttctatagagatgtcgtcacacttgatacataatatgaggctaggaaatataatatgcctcttgcaacattgattggggtgaatcatcatggacaatatgtcttgatggggtgtgccctgcatttctgatgaaacaacagaaacctattcatggctacttaaaacttggatagcatgtatgtatggcaatcttacaaatgctattgacactgactattgataggacatccaaagtgctgtatctgagattattacaagagtccgtcatataatgtgttcgtcatagataatgaggaacgccacataacgatgacgtgggctgacatagtacagagctataaacaaggcgatgcataaagctgtgaatgattctctaaccattggtgagtttgaagaagatggaatact

SEQ ID NO: 160924 - DNA, 101 bp, Zea mays
  Clone ID: MRT4577_78344C.1
tcgctagcggtggtagctggccagccaccatgggtgcaccactctagatcccgctcccgcctctcctcatcctactcgttatagagcctctgtttcccacc

SEQ ID NO: 160925 - DNA, 312 bp, Zea mays
  Clone ID: MRT4577_78345C.1
gcagcgtccggacaaaaaaaacaataaaatgaagaaaaaaaattttactttttattacaaaaataaaaaaaaccacgagggccttaaagaaagcatgcaacgggatgtgctcatatccatggccatacatgaataccgcaagcacacccaccctctttatttatgacatcatgacaccaagccacgcaaggcacccacacacatacatatatgtatgaaaatatatatatatatctcacggatagacttcgaaggcaacacgatcttcaaatttcttcaagatcttgtattcgctgaaccctgctttgatga

SEQ ID NO: 160926 - DNA, 356 bp, Zea mays
  Clone ID: MRT4577_78346C.1
gaaaaaaagaaaaaaatgaaaaaaaaaaaaaggaaaataaaaaaaaagaaaaaaaaaaggggaaataaaaataaaggggtggacaaaataaaaaatacacacatcacttctactttacctttaaaaaatcttaatcatcacaacactctattttattacattataaactctcttttaaatcctatcgggcccgcctcttaagaggccccagtcttctctccctctttctgaccttcattccttttttattgggtccccccttatttaaccccgcgcccctctttttccaccctcttccgtggaaataccctttgcgatcccctattttttccttttggtcacattccctctttccc

SEQ ID NO: 160927 - DNA, 294 bp, Zea mays
  Clone ID: MRT4577_78347C.1
gagatacagagtcttcgagatctggatctatacgacaaccagatcaagaagattgagaatctggaggcagctaacagagctggagattctagatatttcttttaatctgctgagaaacatcgaaggggttgaaaagttgacacgactgaaaaaactcttcttggtcaacaataaaatcagtacaattgtgaacttaagcaacttacatcagctatagatgctagagctgggatctagccgcatcagggcaatcgcaaatatcggcaccttaagcatcctggagagtttgttttt

SEQ ID NO: 160928 - DNA, 426 bp, Zea mays
  unsure (1)..(426): unsure at all n locations
  Clone ID: MRT4577_78348C.1
acatacacccactcctccgcattcacacctgccgttctaaacaccaatgcaacatctacccngccgcagcgttttaaaaaagggaggcctaaacacactaacacactacaacaatgctccccaaacagctgtatgccaaccaaaacaatatttgtcaaggctgaacataaacctttttctttagcatggagcaaccaaaccctgtatttctctgtacaaacctaattgcctaaccttttccatttccatccatttttgcttctattttatacccaacatctccagcaaaagaatgctttatttccaattacctttttcatctccccttcaccttatccattttcttacattaccctcttactcctaagaactcttttccgcaccattttacatttcattttaattacttttggatccttttattcc

SEQ ID NO: 160929 - DNA, 444 bp, Zea mays
  unsure (1)..(444): unsure at all n locations
  Clone ID: MRT4577_78349C.1
tttntttcagataaattcacttttatcatcggtccctatacatcgactctcggagctttaccaaacgagcgggccgcccttttttttttttttttttttaacttgaaattcgtgacacgattcatgtttacattggtaacacaggtacaacatatcacttgagcaagcctgcagaacaatattgtcctaccgtacactgcatacacgcttcgatcaagacaagtttatgtgacgcaatacacgctgtcgctaaggatacaaggcctacatcgcagctgtattctggggccagctcagctggcgtccttgagctttcgcttgagctcgtcgacgaagtcgtcgaagttgcgccgcgacgagccaccgggcgccacggcagcctcgagtgtggccctcagcttcctgacctggtccctgagcttgaggccgtgttccccggccatg

SEQ ID NO: 160930 - DNA, 315 bp, Zea mays
  unsure (1)..(315): unsure at all n locations
  Clone ID: MRT4577_7834C.1
cccanaaaaaaattacaatccataccacttattcttcattttttctaaacctcccgggggaaacggcaaatttttcctttttattcaacaaaaccaaccccaggaatcacttcattccttggaacaaataaccgtttgcccattggaaaccccccaaacttctttaaccgcttattgttattaacaccccttccttctcctggggagtaatacccgagaaccctcgttttccgtgccacccggaaaaatttgaaatattttcgcggacgccaaggttctgctcaccaaaattggtgtggagacctttctgcggta

SEQ ID NO: 160931 - DNA, 961 bp, Zea mays
  unsure (1)..(961): unsure at all n locations
  Clone ID: MRT4577_78350C.1
tccctacttccaagcttagtccctgactaactcnnactcacccaagctgactagatattgaagaaccctgacgaaactgaaacaaagaacgattanagactctgaaactgaaactctgaatgcagcatactggcgtctgcatctcactgtcaattctccccctgagatcagtcgccgtcatgcctgaccactcctatcttctttcgaaattcttggaactttgttttccccaacgccttggtaaggatgtctgcacactgctcctctgatcttacaaactgaagctgcacttctccattttcagcacactcccgtaggtagtgatacttcaaatcaatgtgtttgctccggtcgtggagtaccggattcttgctcagtgccagtgctgacatattatccatcatcaagactggtgaagccaagttggtgcccaggatgtcggccaacaaacgtttaagccaaactccctggcaagcaccgactgctcctgctatatactctgcctcacaagatgatagagcaactactcgctgcttttgtgattgccaagtgacaggacattcgttgaggaaaaatatcacacctgtagtgctcttcccgtcatttgcatctccaccatggtcgctgtcactgtacccagtcagacttagttcttcacccatcttgttgtacacaagtccatggttcactgtccctgcaatgtatctgagaactcgcttcatagccaccaagtgttcttgtctgggatcctgcatgaaacgactcaaatatccaactgagaaggcgagatctggccttgtgttcatcagatagcgcagacttccaatcaggcttctgtacttggttgcatcaacctgaggtgaatcactgtccttcagcagcttgagccttgttccattggtgntcacttgngtacaggtgctcagtcctgcattctccaatactttcacagcataggatg

SEQ ID NO: 160932 - DNA, 503 bp, Zea mays
  Clone ID: MRT4577_78351C.1
aaaggaacccacttctcgaatagaaattgagctcaacattgtaaccaatatgtgcccttggccatcatacacaactaacttccaggaattaccataatgtatgaatagataactagacaaccatctaagttcctggtcaccagaaccaacaaaccaagccaacacactactcatcctatagataatcttaatttcgcactcttctgcagcacgcaccttccacctaccactgcaattgattccaatgctaatagtgaagccaatccaattggagagaaactgaaagatggccatggtattggccgcacttcagtattaccaatagcatgtgccaggtcttgcatcgtcgagccaacaccattgttgcaggggggaatgtcagggtagtcgatcagcagattggagcccttgatgtcctggtgaaggatgccccgctcatggcagtgttgcagccccacgaacagctgctgcatgtagcacttgatcaggcatatattgacgtc

SEQ ID NO: 160933 - DNA, 1875 bp, Zea mays
  Clone ID: MRT4577_78352C.1
acattgcggatcctatcataccgacaactggggcggattcttcgatggagcggacgcggctgtcgacgccgatttcgccggccactgggacagcccttcctccaaccccgacgcgactacctgcgtcacaccagaggttgcggtggaatcggtgcacccggccgcacgcggacgcttcttcaacaacgattcgggtgcaccgcttgactcggacgaagacaactccgtccacggcgaccatggatctatgatgtcccatcccctggagcacgagaccgacatcgccttccttccccactcggatcagcgggatggagtcgaggcgcggctcatcctgcgcgggtgcactcctgcctccttcaccgtcgcctccatcggccccaacaacgagatctcgggcgtcgtccccccggacgcgcccgtgctcttcgcttcgagggcgcctagaccatcgctcaagtacctggagctgctcctcccagcggaaatcggctccgaccacatcgaactaccgaccgctgccgccgcggggcacatcgtcgcccaagtcaccggcaacaacatggtgtccgtggcatagggccaactccggtgcgccctcgtcctcacgcataacttcctgtcaggccaccactaggccgtcagcaaggagtgggacgtggtcgccttcgcgcacccagtgtgcaacctggaggaaaagacggtggacaccatctacactggatagatcgagcacctgctgcagcagtacctcaagccttcacctaccttgattggtgccaagctgtttgtggggctgcagcactgccatgagcggggcatccttcaccaggacatcaagggctccaatctgctgatcgactaccccgacatgctcggtgacttcggcctcaacaactacggcgctgggcaccgacaaccgctcaccagccgcgtcgtcacgctctggtaccgcacacctgtgctgctgctgaactccaccagctacggcgtcggcttcgacctctggagcgcgggttgcctcaacgagatcttcttcggcaagcccctcatgcccggcagtggcgagatgtaccagctactgaagatcttcaagctgtgcgggtcacctccggatatggtcgaactccaacagcacatcaacaatggtcacgcggttctaggtgcccaccgtgtgttcgaggaattgtcatcacatgttattgccacctgcaacaatggtgttggctcgacgatgcaagacctggcacatgctatcggtaatactgaagtgtggccaataccatggccatctttcagtttctctccaattggattggctccactattagcattggaatcaattgcagtggtaggtggaaggtgcgtgcttcagaagagtgcaaaattcaaaattatctataggctgagtagtgtgttggcttggtttgttggttctggtgaccaggaacttagatggttgtctagttatctattcatgcattatggtaattcctggaagttagttgtgtatgatggccaagggcacatattggtgacaatgttgagctcaatttctattcgagaagtgggttcctttagatgtgtgctgaaattcatatgggtcctattctggtcgtgggtgtcctagacttcatgatggtactatccatgagtctaaaacagtgtgatacaaaatcatctcgcagagtggagaaaagggagatttctaaaattacagatgcaacaatcatgcttttagaagaaatgaaggcacatggtattaagttgaaaggagaaacctaccattgtctactgaatgcacttgcaacaacaaggcaaactgatcaagcttatgtcgtatttagtggtacgagtgttgctgggcttgtgcac

SEQ ID NO: 160934 - DNA, 348 bp, Zea mays
  Clone ID: MRT4577_78353C.1
gaaccaaccaacctggttaaagttcgaaaacggggagacatttccggccctgcaccccagaaggcaacaaagcctcccccaaccaggggccaacccatttggggggcaaaaagccgcccccctgaaaaaaacaattataattcttatccccccagtcccccccgggccacaaggctttttattaggaccaaaaaccggcaaacccctcgggaggggggggggaaaaaaaaaaaaccctgaaatcggaccccccagggccccaaacacaaacccgggacccccagggggggcccaaagagaaaacccccccgggcccccccgtgaggggcccccctttggggggggggg

SEQ ID NO: 160935 - DNA, 967 bp, Zea mays
  Clone ID: MRT4577_78354C.1
gggtacctcgaggccggccggggagttttctacttcgatctactttcctcaacttcacccgcatcgccatgtcgctcgacacgaagctcatcctcgacgccattagcgagttcttcgacaagttcgacgcgcggtgggccgcgcgggaggcatccaggcgcgtccctgttccgacccagtccacggctgccggagccgatgtggtcgccgacaactggggcgacctctttgacagtggcaacgactccaccgagcagcactatgaggatcctatcatcgccgacaactggggcggattcttcgatggagcggacgcggctgtcgacgccgagttcaccggccactgggacaacccttcctccaaccccgacgcgactacctgcgtcacaccagaggttgcggtggaatcggtgcacccggccgcacgcggacgcttcttcaacgacgattcgggtgcacgcttgactcggacgacgacaactccgtccacagcgaccacggatccgtgatgtcccatctcctggagcgtgagaccgacatcgccgtccttccccactcggatcagcgggatggagtcgaggcgcggctcatcctgcgcgggtgcactcctgcctccttcaccgtcgcctccatcggccccaacaacgagatctcgggcgccgtccccccggacgcgctcgccaaggccgcgcccgcgctcttcgcttcgagggcgcctagaccatcgctcaagtacctggagctgctcctcccagcggaaatcggctccgaccacatcgaactaccgaccgctgccaccgcgaggcacatcgtcgcccaagtcaccggcagcaacatggtgtccgtggcagagggccaactccggtgcgccctcgtaatcacgcataacttcctgtcaggccaccaccaggccgtcagcaaggagtgggacgtggtcgcttttgcgcacccagtgtgcaacctggag

SEQ ID NO: 160936 - DNA, 407 bp, Zea mays
  Clone ID: MRT4577_78355C.1
caaagaaaataagggggggaaacattttttggggcctggggcgcggggagatacccaagcccaggcttacccccccgtatacaaacgaaaaattacgtacccccccttattcgggcgtaaaacgagggcaaacatacgtccccccccaaaaaaaggggggggctggatataattttaaaacacccacgcgtagaaaacggggggggaccaccatccgggggggatcaatcagccgaaaaaggggggttttttttccccgggggccttcgggggggacttgggggccttttttttttcggggggcccggggaagggaaaacccccgggagccgaggccgccccccccgaaacccttttcctaaacttgggggggggggggggctgcgggggcttttttggccccggcc

SEQ ID NO: 160937 - DNA, 345 bp, Zea mays
  unsure (1)..(345): unsure at all n locations
  Clone ID: MRT4577_78356C.1
cgccgtgtgctggnattcgctccttagcagtggtaacaacgcagagtatttttttttttttttttttttttttttggttttttttttttttttttttttttttttttttttttttttttttttttttttttaggcaaaccccaaaaaatcaatcctttattggggccacaaagggggaccccggcccctgcccaagggaccccccggagacaggttttttttaaaaagggatcccccgggaccctggggtggtccccccgggtaagggcgaacccccccccactcccccacacgggccggcggcccggcccgcgtttttggggcccctgtcgccccaaaccgggg

SEQ ID NO: 160938 - DNA, 644 bp, Zea mays
  unsure (1)..(644): unsure at all n locations
  Clone ID: MRT4577_78357C.1
gtaccctncgggtctggccgggatcagacattcactccaccgctctctcgccgcacgcacaacagcgtactgtagtgcatcttctggagaggtgtggggagagtagtaatgagtccgcaatgtctacggaggaggctgctgaggctgacgttccagtcgcactcgacgtggcatgcaggagataccgaagcgccaggtgatgaaggcgcccaaggccaagaaggcgcccaaggatgatgaaggggccttcagagacgagagctaccctgggcaaataaaccagcgggggacgcacctcactaactcgtgagaatagatgtgtgtgagagccagtcgtctgaccctctagagtagagggaaggtgttattactcccacggccatgatgcaagtacgtaagagggagaagacatggtggacaagctacgcaccaactttcgcaagcagttgactgcgcagctgtagaagctcgttgtcgacggcaggctgatgagggggaacaacttcttaatgctgccggccaccgactccaagcccaaggtcgacaatcccatggtacccaaggccgagcccaagcccaagtcctctgctgaggcgaaggccaagaccgctgcgaagcccaaggctgtgttggtccaaacccaa

SEQ ID NO: 160939 - DNA, 353 bp, Zea mays
  Clone ID: MRT4577_78358C.1
ggggggttggaacaaacccagggccaagtatataacagggtggggggccattaattctatacaagcataaacacaacggggtatttacttattggggacgggaggccaggcccctaaatccaaattacacattaaataaggggggccgaagcaccttatataattattacagggcggcagcccgggtggcttaattattccattccaaacgcagggcctcaccgcccaaaaagatcaggggtggggggggttagaccaaccatttggggcgggaccacctaaaagaaaaaccattcttcccccagtttaatccctggggtcagaactttaaggggggggggccctcttagaaa

SEQ ID NO: 160940 - DNA, 252 bp, Zea mays
  Clone ID: MRT4577_78359C.1
ttattgtgaggggaagcgtgctcaaggatgcgggggaatcattgtacaatgctggaaagataagggaacggcaggtcatgatcacggcgacatccaaggggaacatcacggtcctgacgggcctgccacgccatagatacaatggctagttctggtactccggtacccacagaactggtacgatgggggtggaactaatgggaatacttgaaacaaggggtgacattaggccacgtttcgacgaacagtgtt

SEQ ID NO: 160941 - DNA, 433 bp, Zea mays
  Clone ID: MRT4577_7835C.1
ggaaaaacccaaaaaaacacaaatacctgcctataaattttaattccgggacgaaacggacattaccccgagccccttacacaaatgaacatgaaccccaggagcgaccatggatcgataatggggggggcaattgacaagatcttatttaaaccctgcttttatatttatacccctcgggggcgtcgtccttttaaattttgggccccattcccgggccgggcgggccggtttaattgcaatttcaaaaagaacaaccccaattggggccccaattgcaggtgttgaaatcccaacccccccccttgggggcccccttaaaacccccggcgctggccttggggggcggcccaacaaaaaccaaggtcttaaagcttctggcggggggggtctccaccttaggggacatgcaattgcataaactgccccaaaa

SEQ ID NO: 160942 - DNA, 464 bp, Zea mays
  Clone ID: MRT4577_78360C.1
ccggcataaacatttaatggcaggccacccccgggccgccaaaattttagggggccccaacaaaggggaaacaaaccaaacaggccatcccggccccccgggtatttcttttttcaccggtttcccccccgggttatggaccccaaacataggccggacccccgggaaacattacaacaccaacggggtgggaccccaccccaggcattggtcccacccgcatctgggtagggaaccccccggggtacctaggggggggggggggaaaaaaaaccctggccctgctgctgctgctggggccccaatgggcggggccccccccgggctttttcccctttttttttttttgggccttcttcccctgggggcccttggccttgggccccccggacttttcgccgggccccccggggatcttggccttgatcttttccacaaggccccccttgggccccccgcccttt

SEQ ID NO: 160943 - DNA, 296 bp, Zea mays
  Clone ID: MRT4577_78361C.1
attcggctcgaggaccaacgatctgtcatcgctggcctaccaccaggggggggaccggctgctcagcaacacggcatcgatcaactgaccagaccacgtggagctcaagtggccgctcgacccaggcactgacgccaagctgcaggccatctgcggcaccatcgtcttcctgactgcatcctacactagttccaaggccaagagcacggcgatgccaatcaacgcttacgctctggcagcggaaaaagaacgtgcgagcgacatcacctacgacgataggtgtccggctccgggtt

SEQ ID NO: 160944 - DNA, 402 bp, Zea mays
  Clone ID: MRT4577_78362C.1
aacaaaagccaccacttttgcacaaacatggtctcatcttaatgtacaacgccaactcatcatctaaagcctgcctatgcaatgcagcgtgtaaacaagacgacacacatgccatgtgcccacatctatcaatccacgtactttcacccttttcaatccaaagggcaatgacgctgcataggataacgcgcgtgcttagctcccacacaccacattggtggcctaagcccatgcgttgttccttactgactcatcgatgtggacagcacaggttttacatagaccctcgcccgaaaccatgggcctgacgaagaaccccaaccttgaaaacatgtcgaggcggggcgcattgtagctattcaacttgatctatccaacagcctcccggtcatccgacaaacc

SEQ ID NO: 160945 - DNA, 381 bp, Zea mays
  Clone ID: MRT4577_78363C.1
gaaaaactttccacttgctcaaaaaaaaaaaaaaaaaaataaaaaggacaaaaaaactggggagaaacaagcaaaaaaacacatgcatgctcacaataatagggggtcgtgtagcgttacttaacgttgtttctctgaccgtccttgtacggggtcctaactggaaataccctgccggttcctttctaagtggcgttgttgaacatcgtggtgtctccaaatgccatggtcttgcagaggttagcccctttggaccttatcatcatttgcacagtgtgcatggcgattgggacgccccctgggacggccctttgaacgtgtagggggtcctgcctttgaacagggttttcgcttcggttggcaaagctgttgcgcccggtg

SEQ ID NO: 160946 - DNA, 518 bp, Zea mays
  Clone ID: MRT4577_78364C.1
gttgtggggtgtttttttttttttttttttttttttttttttttttttttttttttttttttttttttttttttttttttaaacaaaaaaaaggacacccagttgggcccaccttattgcattatggggggataagggaaaccccaacaaagtccaggggggggggggacattattaaccctggaaccccaaatatacggggggtatacatctccatcggggggtttatatattaacccaagatagaatctatcccgttttaaaggccagagtaactaccccaaagcccacagaaaaaagatgcaagccatagccatcacgtagaaaccaccagtaacgggagcgagcaaaaccccaggaggcgaggcacctgaggggttgaaatagggaacgtacccaccggccccaggaggcccgttgttcggttgctggggaagttgccccccgccaccgccaaaaaaaacaacggtaaccggggggcacggggtctgtaaccccggggccaatggcggtgccgg

SEQ ID NO: 160947 - DNA, 1450 bp, Zea mays
  Clone ID: MRT4577_78365C.1
ggtacccctcgagccggcgggtcctccaaaaaaatccgcgcgccgaccacgcacgctagtgtcagtggcacgcaggcagccgcgcgcaccgaggggaggccagagctagcggcgaggccaagggcacgggcgagggcgcggacggcaatggcgagagctggaggcggcggtccggtccgcggcgcggcgctggtggtcgtgctgctaggcatcgtcgcgggcgcggcgagggcgcagctgcggctgaactactacggcagctcgtgccccagcgcggagtccacggtgcgctccgtcatctcgcagcgcctccagcagagcttcgccgtggggcccggcacgctccgcctcttcttccacgactgcttcgtcaggggatgcgacgcgtcggtgatgctgatggcgccgaacggggacgacgagagccacagcggcgcggacgccacgctgtcgccggacgccgtggacgccatcaacaaggcgaaggcggccgtggaggcgctccccgggtgcgccggcaaggtctcgtgcgcggacatcctcgccatggccgcacgtgacgtcgtctccctgctgggcggtccgagctacggcgtggagctggggcggctggacggcaagacgttcaacagggccatcgtgaagcacgtcctcccgggccccggcttcaacctggaccagctcaacgccctcttcgcgcagaacggcctcacgcagacggacatgatcgcgctctcaggcgcgcacacgatcggggtgacgcactgcgacaagttcgtgcggcggatctacacgttcaagcagcggctggcgtggaacccgccgatgaacctggacttcctgcgctcgctgcggcgggtgtgccccctcagctacagccccacggcgttcgccatgctggacgtcaccacgcccagggtcttcgacaacgcctacttcaacaacctccgctacaacaagggcctgctcgcctccgaccaggtgctcttcaccgaccgccgctcccgacccaccgtcaacctcttcgccgccaacgccaccgccttctacgaggcattcgtcgccgccatggccaagctcggcaggatcggcctcaagaccggcgccgacggcgagatacgccgcgtctgcaccgccgtcaactaagcctgcattggctgcttgctgcttgcgtgcgtgggtttcacttatttcacttcttctttctcttgtttatatacgtacgtttgtcggatggattttggtagccatgagatgacatccttgctctgagctagcggacctgccccgactggatgatagagattgatccagatgttcttctagtagattctaattctttatggatgtttcccattgacacgcggttacgcgctcttcaaccgtaacgcagctcaagaacttcctctacctctaaaaaaaaaaaagggcggccgccaccgcggtggag

SEQ ID NO: 160948 - DNA, 382 bp, Zea mays
  Clone ID: MRT4577_78366C.1
cttcaccgaccgccgctcccgacccaccgtcaacctcttcgccgccaacgccaccgccttctacgaggcattcgtcgccgccatggccaagctcggcaggatcggcctcaagaccggcgccgacggcgagatacgccgcgtctgcaccgccgtcaactaagcctgcattggctgcttgcttgctgcttgcgtgcgtgggtttcacttatttcacttcttctttctcttgtttatatacgtacgtttgtcggatggattttgttggtagccatgagatgagatccttgttcttaactagccatgatagagattgatccagatgttcttctagattctaattctttatggatgtttcccattgacacgcggttacgcgcgcttc

SEQ ID NO: 160949 - DNA, 682 bp, Zea mays
  Clone ID: MRT4577_78367C.1
ccgggtgcgcgggaagcttgcaatgtgggaggaagatgagacggggagcagtggcaagtgggactgggtggatggtgttcctggttatgatgatggtgtgtatcgtggatttgtgttcgatagtggattcacagcgattccttgatgcacatggaaaacaggaataatgggaggggagcaggtcagcaaggccaagactctgcagctgctgctgttcctgttggttctgtcgcggtggccagcgcagagcttactctggtcattcacggcacggccgatctgtaaggggacagcagcagtagtcgatttgagggcacagagcaacaaggaaagggaagagaagtgacaagaatgaaaagtttcgggtggcggcgcatctggagagcgggagggagtatgtgggctggggcaaacacctcattccctgtccctccccttccattctgctgttttgcagtttgttagatcggtatggcgtcgacttgccttgtaagtgcctaggtgagattggaagggggtggtttgcacctgccttatcgccttaggccttgtttggttgcatatggattgagggggattaaatcctcttctattcaattttgactagaaaggtatttatctgctccaaaaaaaaaaaaaaaatcctaacagaacaagtccttaaggatcatggttttagcct

SEQ ID NO: 160950 - DNA, 241 bp, Zea mays
  Clone ID: MRT4577_78368C.1
tgccggcggaggcagcaaggctgccgaacctgatgcgccacatgttcgggtaccgtcggatctccgttggtgatcctatacgcgtgtgctaagtaggatgtacgggaaagatcaccgaggtgtgtagtactgtgtagcgatgtttgtctgtcttcctgtttgttcttttttgttttaaatttatacgatgtatctgtttctagactttgatagcttgttgtgatgccggaattgtacatat

SEQ ID NO: 160951 - DNA, 1766 bp, Zea mays
  Clone ID: MRT4577_78369C.1
caacgccgcgggcgcggaggcgggcgtcggcgccgccgtcacccggcgcatcatggcgtcgctcaagatccccggggacgagtacgccatggtgtgcacggccaacaggaccgcggcgttccgcctcctcgccgagtcctactcgttccagcccggcaagcagctgctccccgtgtacgactacgagagcgaggccgtgggcgccatggccgacagcgcgcgccgccggggcgccgaggtcgcctccgcgaccttcgcctggccgagcatgaggatccacggcgccgacctccgcaagaggctggccaggggccggcgccgcggcggcgggggacgcggcctcttcgtcttcccgctcgcgtcccgcatgacgggcgcccggtacccgtacctgtggatgagcgcggcgcaccagcaggggtggcacgtcgcgctggacgcctgcgcgctcggcaccaaggacctcgacacgctcggcctctccctcatccgccccgacttcatcgtctgcaacttcttcaaggtgttcggcgagaacccgtccggcttcgcgggcctcttcgtcaagaggtccagcggcctcgcggcgctcgagcgctccgtcatcgcgcgcagcatcggcatcgtcagcatcgtgcccgcccgccgctggtcgctgcacgacggctactccaccgagctggagcactcgcggagcttccccaagctcgccgccgacccggccctggacgacgccgacgtcgagaccaagagctccttctccggcccgctcagctccaccgccatcactcgcagcaggaccctgcagtcggacgcggcggagaacggcgacgcccacgcccacgccccggagatccgcgaggtcggcagcacggcagagaacggcttctactcggaggaacccagagcagaggaaacagagcggctggccaaggaggagcaagacggggaggggagagagagcgtgatggaggtggagtgccggggcctggaccacgcggacgcgctggggctcatcgccatcggcaaccggctgcgttgcatcagcaactggctggtggtggccctgcagaaactgcggcacccgcacgccgataacgggcacccgctggtgaggctgtacggcccgcgcgtcaagttcgaccggggcccctcgctggcgttcaacgtgttcgactggaagggcgagcgggtgtcgccgctgctggtgcagaagctcgccgaccgccacaacatctccctcacctgcggtttcctgtgcaacatctggttctcggacaagcacgaggccgagagggccgtcgtcctggagcacagggtcgccggcgatcccgtcgccgcgggcagcgccggagggaagaggaggaaggacgccggtggtggcgacgtggggatcctcgtggtgaacgcgtcgctgggattcctgagcaacttcgaggacgcctacaggctgtgggcgttcgtggccaagttcctggacgccgacttcgtggagaaggagaggtggaggtacaccgcgctgaaccagaagacggtcgaggtgtagacgaaacggagagcgctgcagtagcttcagctcagcttggcatattggtacggttcagttcactgtctgtaaagcaccattcttttaggatcagctctgccatcccctccagccattctttcagtgtaaactgtaaggtgtaaagtgtttccataatgatgatatcatttgatatatgaaataagtttcacttttcagcaaaaaaaaaaaaaaaaaaaaa

SEQ ID NO: 160952 - DNA, 222 bp, Zea mays
  Clone ID: MRT4577_7836C.1
acggtgttcctttactatcttgttcagtatcagcttaattttaataccattcacgttctatttcagtggactattcattttaacgtctattgtaactactttataatataccaaatgtatgatcgtcatcaaccaaatttgttctttcttttatacttgaacacattaatgttctatcacttttaaactacaatactttctaatgaacaccttctatttttt

SEQ ID NO: 160953 - DNA, 1302 bp, Zea mays
  Clone ID: MRT4577_78370C.1
cggttcgtcctcgccctcgcgtgctcgcgggcgggcggagcgaggaggcggatcggggagcagagatcccggccggagggatggcgaagggtggcggggagaggggcacgctgctgccggtctcggcggacgacgggaagggcaacgacggagggggaggcggcgacgacgccgtgctgttcaagggttccgccatgacccgccgaggtggcgccgctgcgctctcctacatggcatgctccgtgctgctagtgatgtttaacaaagcagctctttcttcatacaaattcccttgcgcaaatgtcatcacgctccttcagatggtgtgctccacgtgccttctttatgttctgagacggttaaagatcatctccttcacaaatagtgatccatcagtgccttctgattcactattctttgtgccgtttaggttattgttgcgcaccacacctctttccttggcttatttactctacatgctagcttcgatggaatcggtccgtggagttaacgttcctatgtatacaactctacggcgcacaacagtcgtgtttacaatgacaatggagtatttcctggcaaagcagaggcacaccccacctataataggcagtgtggctttgattgtattcggagcatttgttgctggagctcgagacttgtcatttgatgctcgtgggtatgctattgtctttgtggccaacattacgacagctgtttatcttgctaccataaaccgtataggaaaatctagtggccttaatagctttggcctgatgtggtgcaatggtcttgtctgtggaccttcagtactgttcttgacttatattcagggtgacctaaagaggaccatggaatttccataccttcattctcttgggtttcaggttgtgcttctattttcgtgcatcttagcatttctactgaactacaccatcttctggaacacaatcctgaattctgcactcacacaatctatgtgtggcaacttaaaggatttcttcaccgttggaattggttgggtgctatttggtggtcttccttttgatcttcttaatgttatcggacagggactaggctttctgggatctggattgtatgcctactgcaagatcagagggaagtagacggaaattccattcaggggccagtgtgcttaacaaagtagcgttgtttatgctatttgctcctacatatgggagagaaattttgtaggtgtcctatatgtattgaacttcagtcctcatgaacactacaaaactgacaaggaaatagagtataccgaaattttgctgttgcttt

SEQ ID NO: 160954 - DNA, 471 bp, Zea mays
  Clone ID: MRT4577_78371C.1
accaaaaccgggctctgcttttttttttttgggaatcaaacctcagaaaataaaaatgaaaccccttttttttttaaccaaacccacctaccaaaaacacccggaaaaatttcgatttttagatctaaacatttttgaccaccggtcggggtcgggttgttaccaaccggttttggtttacataaaaaccaaaactttttccgggggcaaattttgaagcagtttcctgggacacttgaccaaattttttgcttcactcgccggcaagggatgcaacaacaactcggcactcctgggtgcccgggggggggcaacccaccccagttggtgggtggggccagagcttcaccctggggtccgggtcccaacctccttgtcccggcccttggcgggcttgttggttgccccggccacctgtgccggtttcttcactttattggggcccctgtaccagtacaaaacaatgccccc

SEQ ID NO: 160955 - DNA, 436 bp, Zea mays
  Clone ID: MRT4577_78372C.1
cggacgcgtgggcaacgacggagggggaggcggcgacgacgccgtgctgttcaagggttccgccatgacccgccgaggtggcgccgctgcgctctcctacatggcatgctccgtgctgctagtgatgtttaacaaagcagctctttcttcatacaaattcccttgcgcaaatgtcatcacgctccttcagatggttattgttgcgcaccacacctctttccttggcttatttactctacatgcttcgatggaatcggtccgtggagttaacgttcctatgtatacaactctacggcgcacaacagtcgtgtttacaatgacaatggagtatttcctggcaaagcagaggcacaccccacctataataggcagtgtggctttgattgtattcggagcatttgttgctggagctcgagacttgtcatttgatgctcgt

SEQ ID NO: 160956 - DNA, 394 bp, Zea mays
  unsure (1)..(394): unsure at all n locations
  Clone ID: MRT4577_78373C.1
cgggncacacacacacgacacaacacatctcgtaggcagcgagcgtctctcctcttcctgtggccacgcaccgcgccaaggaaggcagagagagatcgtcgttcctcttctctgtgtcggtggtgcggttgaccgccctcctggagcgagatctcactgctgtccctcgagatctggtcacagatatatccgacaagatggtgaagatctgctgcatcggtgctggctatgtccgtggcccacccatggctgagattggcctcaagtgcccagacattgcggttgatggtgttgacatccacaaacaacgtattgaggcctggaacagcgacaccctaccgatcttacgaaccccgcctgcatgatcttgtcaagcagtgctgcggcaggaacc

SEQ ID NO: 160957 - DNA, 1597 bp, Zea mays
  unsure (1)..(1597): unsure at all n locations
  Clone ID: MRT4577_78374C.1
cattgggtacctcgaggccggccgggagcttccgcatccgctcccattccggcgtccggagtcgctgaccgccaagtcagtcagtcgccgaggcgaggacgacgaggcagacaacgcacccccgcacctgttgttaccagcgcggcgcacgagtccagtcgcgtgcaggcgcgctgcatagggccagagccaagtaagtgggtggggacagaaatatcctcctgctcctcggcctcggcgtgctcgcgggcggagcaggaggggctaggaggaggcggatcggggagcggagatcctagccggagggatggcgaagggcggcgtggagaggggcgcgctgctgccggtctcagcggacgacggcaagggaaacggcggaggggcaggcggcgacgatgccgtgctgttcaaggggtccgccatgacccgccgcggcggcaccgccgcgctctcttacatggcatgctccgtgttgctagtgatgtttaacaaagcagctctctcttcgtataatttcccttgtgcgaatgtcatcacactccttcagatggtgtgctcaacgtgccttctttatgttctgagacgattaaagatcatctccttcactaatagtgatccatcagtgccttctgattcactattctttgtgccgtttaggttattactacgcaccacacctctttccttggcttatttactctacatgctagcttcaatggaatcggtccgtggagttaatgttcctatgtatacaactctacggcgcacgacagttgtgtttacaatgacaatggagtatttcctggcaaagcagaagcacaccccacctataataggcagtgtggctttgattgtattcggagcatttgttgctggagctcgagacttgtcatttgatgctcgtgggtatgctattgtctttgtggccaacattacgacagccgtttaccttgctactatcaaccgtataggaaaatctagtggccttaatagctttggcctgatgtggtgcaatggacttgtctgtggaccttcagtactgttattgacttatattcagggtgacctaaagagggccatggaatttccgtacctttattcccctgggttcatgactgtgctgctattttcgtgcatcctagcatttctactgaactacactatcttctggaacacaatcctgaattctgcactcacacaatcgatgtgtgggaacttgaaggatttcttcaccgttggaattggttgggtgctatttggtggacttccttttgatcttcttaatgttataggacagggactaggctttctgggctctggattgtatgcctactgcaagatcaaaggaaagtagacgctgatgtctagtgggatcaactgggggtagacggtggtgtgacttggtgtttcattcagggccagtgtgcttaacaaaagtagcgttgtttatgctgtttgctcctacatatgggagagaaattttgtaggtttcctgtatgtattagacttcagccctaatgaacactgcaaaactgaaaaggaaatagagtataccgaatttttactgttgcttttnnnannnngnnnnngggttaat

SEQ ID NO: 160958 - DNA, 318 bp, Zea mays
  Clone ID: MRT4577_78375C.1
ggggcctgaaccccagggctttattggcccggggggccagggcgcaacccaaccacacctttggggggggcccacgggccctggccttaaacattatcccggggacaagggcccgggccgggggtcctattttggttgccggctaattaaggaaccaggggggcccctcccccccccccacccggggcgtgccctttttgaccgggacccgttgtagaaggggctgggaccgttctggcctgggccctctcccggtgtggctccactttgttcttggggggggtgcccctcagggcggggaaccctctggggggggcc

SEQ ID NO: 160959 - DNA, 274 bp, Zea mays
  unsure (1)..(274): unsure at all n locations
  Clone ID: MRT4577_78376C.1
cccacccaacgcacccagaccancgacaccaaaaacaaanacagttttntttacngcnnnganaacaaaaacactcgcccgttttatttaaaatttcaaaaccccaccaccncnncanaananaaattcaaagagattgtcaagtcttacgaatcaattaaatcttatagaaaaaactctttaaatttattcaaacttccacttttatcttatcaattgttaaaaactcttaccttatcactctcgaattaatttttccttttatatttaatca

SEQ ID NO: 160960 - DNA, 286 bp, Zea mays
  Clone ID: MRT4577_78377C.1
acttcatatattctttttatataatatggttttttgattacactaagatctcttttgtcacatttgatatgacaggcggacgatcttaatagtattgacatatctcacgggaaaaaaactacgagagaaacaacacactgcgcccgattaagacgataacatgggacaaagccgccgaagacctacatgtgggagggggcctgaaaatgtacacaacctaagtccacaccggcggaatgatgtggaaaaagcaccaaacctgggggggaatccaggccacattata

SEQ ID NO: 160961 - DNA, 250 bp, Zea mays
  Clone ID: MRT4577_78378C.1
ctcacaaatatttttgcgcaaccatatacccctgagaagccaactgcacctctgaggtgctcactccatataccacgccccgttcatacgtttatgttgtagaatgacccgccaaggccgccgaggtataaccacacggcgttgtcgatgccagaggcccacggaagcctttttgccaggggtcgtgataccacgagaggctgaatcccacacatccccccccttgtctaggagcgggtgcgccttcacc

SEQ ID NO: 160962 - DNA, 286 bp, Zea mays
  Clone ID: MRT4577_78379C.1
ccacgcgctcgcttgtctgggctacacactctctcgacgagggggggggagttgactccgggtcgccgtcttcatctgcaacgacggtgatgagccgggatggccgcgcgtagcccctactttagacacgggagcgaggggaaccgaaacggggagcccccatgcgcggctgtccacacgatccttgcaacgcccggggcgcaccaggccgcctgcggactcgacgggctcggggaacgcctgatccagcgcgcggggaatcccaactgctttatgggaagtttgt

SEQ ID NO: 160963 - DNA, 290 bp, Zea mays
  Clone ID: MRT4577_7837C.1
actacaaattttctccggcgaaaagggccttgccaatcagagttttattaatacatgtatatagaacccacacacccacaaagctgtttgttgaactggcgtaatacactgcccaaacattactttatatgtataccctacctcgctgtagaaattaagggcgcgattcataacaccgatcctgcgtggacgaataggaaaccagcccatataattgccttcttaaaggggcgaaaatttctcctaccgtttgatgaaccgtatgtttgcaaccatgaagcaatgggctt

SEQ ID NO: 160964 - DNA, 169 bp, Zea mays
  Clone ID: MRT4577_78380C.1
gtcagcctaacaattaggctcatcgactccagattgggagaactcgacaccatgaaggtgctgatcgttgcccttgctctcctggcgctcgctgcaagcgccggctccaaacaagcagggtgggctgcagacaccacgtgtattacgctcgtcattccgctcggaatct

SEQ ID NO: 160965 - DNA, 276 bp, Zea mays
  Clone ID: MRT4577_78381C.1
gtattacaatggaaaaggaaataatcctcccgcaatgctttggctgccacggaccgaccataattgatggcccgcccgcccaaacctgaaaactaaaactgcggggaaggacaaagcaaccccaaaagggcgagagagtcaaaacgagcctttgagcacccagcctttgaggtttcctggccgaaaccattggccaacacatttacagccattccgaaccaacccggtgcaactatccccttgcctgcaaggacgccacagcctttgggcgtgctt

SEQ ID NO: 160966 - DNA, 442 bp, Zea mays
  Clone ID: MRT4577_78382C.1
tttcccaacggcactcagccctggccggctacgataggcgcggcctcaacggcgcgtgcgggtagcggggcactggcggctcgagcacggctcgcggccagacgacatgcagcctcggccaggcgggcggcctcggcgcgggtgcgcgacgcgcgacgcgggcgcgcggcctggcgcggccccggccccagcggctcccgtcccagcgcacctccccgtggcgcggcggcccccggcctcaacggctcgggcgcggcacgaccatggcagcgcagggcgcggcccctggcggcgtgggcgcgcagcctctgctcgctggcaggcggccatggcgcggtataagcgcgcggcctccctcgtggcgcggccctagcagcgcgctgctacagcgtgtcgcgcgggcgcggtccaacgaccagcagcccccatgccgatgcctgca

SEQ ID NO: 160967 - DNA, 314 bp, Zea mays
  unsure (1)..(314): unsure at all n locations
  Clone ID: MRT4577_78383C.1
agagacgggcaggggaggaaaggaaggtaacaaaagcanccgccgcgcgaggccccgggggaagcgaaggcggcggcggcgaggcagcgggggacggagaagnggcacaacgacaccaagggcnncgggnncaacacccccgaggacggcagcgaggaacncnncgngcaccagncgncgancaagncggagggccaccgcncgcacgcggagggcgaggaggaggagaanaccgacacggagggggacgacggccgcacnaaggccgncgacgngaccggccccgacggaaccnacgacaggggcggcggagg

SEQ ID NO: 160968 - DNA, 238 bp, Zea mays
  Clone ID: MRT4577_78384C.1
gcagcctgactgccttcttgtcgcttacaccgttgctccagattcaccagatctcggaatggaccccaactgctcctgctccaccggcgggtcctgcacctgctccagctcctgcggcttcaagaactgcaaatgcacctcctgcaacaagatctgctgctcctgctgccccgtcggctgctccaaatgtgcccagggctgtgtctgcaaaggtgcctcggacaagtgcacctgctgt

SEQ ID NO: 160969 - DNA, 1942 bp, Zea mays
  Clone ID: MRT4577_78385C.1
cacgaacacgcccccccgggctgcagcatcccgctcccagatctgccgaagaaccctaccacccaacgttctagaacttcccctctttccccgcatggacggcctcgtggcgccgtcgccatcccactccggcgccacctccggcggcggggcctcccaccgcaagcggaagctcccgccgtcgtcgctctccgacgccaccggcgacgaggacgacgacaccaccgctccgtcatccccctccacggccccatcctcgccctctcgcccgtcatctccatcttcttcgcactccgacgatgacgacgacgactcgctccacacgttcaatgccgcgcgcctcgacggcgcgccgagtgggggctctgcgtccggccgtcctcctaagccggattcctcatcagtgtctgctgctgcggcggcagccgcggctgcggtgggtggaggacctaagccggagcccggctcggcgaacgccggcgacgggaaggaggacacaaaggggctgttcacggacaacctccagaccagcggcgcgtacagcgcccgtgaggagggcctcaagcgcgaggaagattcaggaaggctgaagtttctctgttattctaatgacggcgttgatgaacacatgatatggttggtagggttgaagaatatcttcgcccgacagcttcctaatatgcccaaagaatatattgtacgccttgtcatggatagaactcacaagtcaatgatggttatcaggaacaatattgtcgtggggggcattacttatcgcccttatgcaagccagagatttggagaaatagcgttttgtgctatcacagctgatgagcaagttaaaggctatggaacaagattaatgaatcatttgaaacaacatgcacgggatgctgatgggctcacacatttcttaacctatgctgataacaatgctgttggctattttgtaaagcagggtttcacaaaggagatcacattggacaaagaaagatggcaagggtacattaaagattatgacggaggaatattgatggagtgtaaaattgacccaaagctgccatatgttgatgtggcaacaatgattcgacgtcaaaggcaggccattgatgagaagatcagagagctttctaactgccatattgtttattcaggaattgattttcaaaagaaagaagctggcattccaagaagactgataaagccagaagatatccctggtctcagggaagctgggtggacgcctgatcaattggggcattctaaatcacgatcatcattctccccggactataatacttacaggcaacagcttactacccttatgcagacagcgctgaagaatctgaatgaacatcctgatgcttggccattcaaagagcctgtggattcacgggatgttccagactattatgatatcatcaaagatcctattgatttaagaacaatgttaagaagagtcgactcggaacaatattatgtgaccctagagatgtttgtagccgacatgaagagaatgttcagcaatgcaagaacttacaattctccagatactatctattacaaatgtgcgacacggcttgaaaacttcttctcgggcagaattactgtactgcttgcacaactctcaaccaagagctaggctggcgtgggctcactggactgggcactactgtcgcatgttgtaaaattattattggctcactggactggacactactgtcgcatgttgtaaaattattaagttgtattgatatagttgtcaccttgctgaatgttcggcacggtgatgaacttttagtttagcatgtagtttttattttaaccaggagggacactgattgatctttacatttcggtctcaacctggccggcctaataatatagattgaggagattcttcagtttctaaaacctatgggtaaagatgttttgcatcctt

SEQ ID NO: 160970 - DNA, 500 bp, Zea mays
  Clone ID: MRT4577_78386C.1
gtttttgtttttttttttttttggccacaacaaacataaaaatggtaagcggttcacggttactcgtttttttaagtttggtgccaacaaaatcatcttgtatctgtcggttctcatgggcgatggtgctgttcttagcacacatgtgtgctgcaatcttgcggacagacgatggtcgcgctgcccgccagaatttgcgccaaagggactgcgcacccacgccgtcgagggctcgcccgcctaacagcggctcgccgagcacagagaccacgccggcacctcgccggggccacacgcccgcggcaaggccgcgtgcccgcgcaagggccgcgcctggctggcagtgcccgcgcagggacgagcgcccgcgctgtgcgaggccggggccacgacgctcgagcccacgccggggccgagaccatcgtgcccgtatgctctgcatgggcggtagacacgcccatgccaccagttggaccgccaactgccgttggcgccatgcc

SEQ ID NO: 160971 - DNA, 1842 bp, Zea mays
  Clone ID: MRT4577_78387C.1
aaaaaaaaaaaaaactccctacacgtatcttcttcacctaacctctcttccttaccctccctcatagcagtcgcctgccgtgatctggtgacctccccacgatgcctcccgggaagagatctacacgaccctcacagaattccgaagaagaccctcgtactgaatacgagaaaatgagggctatgaatatgatgaagaacaatcaattgtttcaacggctaggccttggacaattaaaaacaatgatcaccgcaacaactgcaaacaacaaacaaggcagtcctcaggaattaggttctttatatgatggtgagaacgttgaggattctggtgaagaggatgttggcatggaattcgaagctcgtaagggtgtccctacccacatctccaatgatggtgaacagatgtcaacaaaagtaacaagaggaaataaaagaattatggcacctgtgcaggaacgaccagttagagtcactagacaaagagttgctgaattaaaccaagagtctacccatagcctaaatgtttgtacacaacccagttcaagtgccgccacaaaccatgatttgacccacaaccttattgttcctacacatcctagttccagtactgccacaaaccatgagcccatccaagacatggatactgttgcacaacctactttccaaatacaggagggtgataaccacactgggaatcaagaaatcataccaaggagaaaaagtatgggcaggcaacttgaatcgttaagcagaggactgggaatcaagattccaatccaaatcagtgaagggaacaaaaggccagagccacctattcaagctgctaagtttgcatcagagggtggaatcaccttgaggcagcacattccaatatttaaccactggaaggaatacaagaagagagagaatgaacctataataagaaactacattggcaaagttactgctaatttcaccgtggacagtgagagcaagacagtggaagatgcatgtctagacatgctaaagagtggacaacgccaaatgaggtatagactgaaacagaagtacttcaatgggatacctgctaatcaggtgaggactacatcacctatttcaagcatgtctgacaatgactggagaaagttggtggagaagtggtctaccccaaatcacaaggaaagttgtgtgaagaacaaacttaatcgtgaaaaagtacagtatcaacaatgcacagggtctcagtcctacattgcaaaggcttatatattggttgacttggaagaaattgtggcagcaccagttcaggatggacaacaaccaaaatctcctacaaaagttgtttctaatgtgctatcgagctccagtgtgttcctatgcaatctggtcttcataccgcctccaagaaaagctccgcaatgacagtttctgcaaaggttcaacaactttaggatcaactagaggtcgagcaacaagaaaaagatggacttcatgaagaagtggaaaccttagagactggagcatctcaggacaccattgatagtatgaagaggtcaatgaaaggaaataacaatattcttcatcaactattaagcttcaatcgaggccaagtttttccatcttaactccgcttgaccccaataggacctgcaaccttatgactactttagtagctagttacaatagctctggatttgtagttataggattattttcaattatgcttactgtttaatactttgagttgaagttattggattatatttggattttaagttaaaggatttgcatctatatgttttgaagttatattattatactgttggatgaaatatttgtgttaacaaaaaaaaaaaaaaaa

SEQ ID NO: 160972 - DNA, 600 bp, Zea mays
  Clone ID: MRT4577_78388C.1
tcgagcggccgcccgggcaggtacaagcttttttttttgaacaagcttttttttttttttttttttttttttgagctttttcttatttttaaatctattagagggcaccaccaatgatgggttgtttggtaagaacagctaaggggattcgggaaagcaggccaggctgaatggtggcaaccgtggcaatggtaaaagggtgccaacgtaaggcgcaacgtgctgggacaaccacaacaattgtggctgtgtcgagacagaccacggctcagactaactagatggctgaatgggaggagttgatgctgctggaaataagcacgagagttgaaggctgccaggtgatagaatggaacaaaggcaaagtgtaggccgcacacagctggctgaatggtagatgctgctgcaaataataagcagactcaatgcccctagtagggagaatggacacaactgttgctgttgacagtatgcaccatggttagctagcaaacctgttgtaccagctgcgccctgaagtgggcgccaatcaagcaacgcagttactgatctggcctctatcacctaaggcgaatgactcgcagtggcgggcggtactag

SEQ ID NO: 160973 - DNA, 1258 bp, Zea mays
  Clone ID: MRT4577_78389C.1
acacgatcttcttacctaacctctcttccttaccctccctcatagcagtcggctgccgtgatctggtgacctccccacgatgcctcctgggaagagatctacacggccctcacagaattccgaagaagaccctcgtactgaatacgagaaaatgagggctatgaatatgatgaagaacaatcaattgtttcaacggctaggccttggacaattaaaaacaatgatcaccgcaacaactgcaaacaacaaacaaggcagtcctcaggaattaggttctttatatgatggtgagaacgttgaggattctggtgaagaggatgttggcatggaattccaagctcgtaagggtgtccctacccacatctccaatgatggtgaacagatgtcaacaaaagtaacaagaggaaataaaagaattatggcacctgtgcaggaacgaccagttagagtcactagacaaagagttgctgaattaaaccaagagtctacccatagcctaaatgtttgtacacaacccagttcaagtgccgccacaaaccatgatttgacccacaaccttattgttcctacacatcctagttccagtactgccacaaaccatgagcccatccaagacatggatactgttgcacaacctactttccaaatacaggagggtgataaccacactgggaatcaaggcaagtgggcatcttaactttttggactgcgatatctatcattactaggataatatcatgaatgattttggcgagtcacaaatatatattgagaacctatacttaccccatttgtgtacaacttcaatttgaactcaattattcatatgttgtattatgttttatcacaactaatgtttagttatatgcaacattactcatataaaaacaatatgtctatacaattaaataattatttatatttgacactaattgtgtaagataatgtacattttttggtatgaccacaaacaatagaaatcataccaaggagaaaaagtatgggcaggcaacttgaatcgttaagcagaggactgggaatcaagattccaatccaaatcagtgaagggaacaaaaggccagagccacctattcaagctgctaagtttgcatcagagggtggaatcaccttgaggcagcacattccaatatttaaccactggaaggaatacaagaagagagagaatgaacctataataagaaactacattggcaaagttactgctaatttcaccgtggacagtgagagcaagacagtg

SEQ ID NO: 160974 - DNA, 594 bp, Zea mays
  Clone ID: MRT4577_7838C.1
attgggaccctcgaggccggccggggaagctgttcctccctatttatataatattgtcgcatctacgaaaattaacaaatagctctctcggatcttcgtcataatcttactcttggcttacttaaataccagccatagcgacaacaaccaattcgcccgagaacatgcaagaacccggcgaagctgatgaatcacatcttctacctcgagtgcacctccaaagaagatgaagcggaaggagcgaaagcgagagaagaaggagaaagagcagaagctgctcgaccagaatgcctatcgacaaggtgatcttggacggggcccgcatctacaactagaacctcttctgctatcgcacggagcagatgaactacctctccctcgcttctcggctcatacgacgacttgatgcgccgtcgacctccttggcatgatgtcggtcctctcaaagcacatgaactacatcagtcaagacgatcagattccggaggtcgcacacagggcaacctcgagaagatgtgccatatcatggaccactccgagcgacgagctctgtcacttgaagagtccagcatcgtatgtgtcatggagggcgcc

SEQ ID NO: 160975 - DNA, 313 bp, Zea mays
  Clone ID: MRT4577_78390C.1
acggacgcgtgggcagacatcctggtggagatccacatgtgttgtctggactccttgttgacaagacgaacttcacgaaaaccaacaaatgggcgaaatatatgtgaaacctcccgtcgtgtgcagtttgcaggtaagccctcaatatatagagtgcttgatgcatcaggcggaagaggtggctcaggtctgccaccatatcccgtcgtgtgcagtttgcaggtaagccctcaatatatagagtgcttgatgcatcatgcggaagaggtggctcaggtctgccaccatatcccatccctctgctggtccatac

SEQ ID NO: 160976 - DNA, 2083 bp, Zea mays
  Clone ID: MRT4577_78391C.1
ctcgaggctttgccggggcataacctccctacacatatcttcttcacctgacctctcttccttaccctccctcatagcagtcggctgccgtggtccggtgacctccccacgatgcctcccgggaagagatccacacagccctcacggaattccgaagaagaccctcttactgaatacgagaaaatgagggctgtgaatatgatgaagaacaatcaattgtttcaacggctaggccttggacaattaaaaacaatgatcaccgcaacaactacaaacaacaatcaaggcggtcctcaggaatcaggttctttatatgatggtgagaacgttgaggattctggtgaagaggatgttggcatggaattccaagctcgtaagggtgtccctacccacatctccaatgatggtgaacatatgtcaacaaaagtaacaagaggaaataaaagaattatggcacctgtgcaggaacggccagttagagtcactagacaaagagttgctgaagtaaaccaaatgtctacccatagcctaaatgtttctacacaacccagttcaagtgccgccacaaaccatgatttgacccacaaccttattgttcctacacatcctagttccaatactgccacaaaccatgagcccatccaagacatggatactattgcacaacctactttccagatacaggagggtgataaccacactgggaatcaagaaatcataccaaggagaaaaagtatgggcaggcaacttgaatcgttaagcagaggactgggaatcaatattccaatccaaatcactgaagggaacaaaaggccagagccacctattcaagctgctaagtttgcatcagagggtggaatcacattgaggcagcacattccaatatttaaccattggaaggaatacaagaagagagagaatgaacctataataagaaactacattggcaaagttactgctaatttcacggtggacagtgagagcaagacagtggaagatgcatgtctagacatgctaaagagtggacaacgccaaatgaggtatagactgaaacagaagtacttcaatgggatacctgctaatcaagtgaggactacatcacctattccaagcatgtctgacaacgactggagaaagttggtggagaagtggtctaccccaaatcacaaggaaagttgtgtgaagaacaaacttaatcgtgaaaaagtacagtatcaacaatgcacaggctctcagtcctacattgcaaaggcttttatattgaagcaagaaaaatataaggacgcggaacctagtgcaatagatcttttcaaggagatgcattgtagcaaaaagaaaggttttagtgaaaatgttcagaaagctattgttgacatggaagaaatggtagcagcaccagttcaggatggacaacaaccaaaatctcctacagaagttgtttctaatgtgctaccaggctccagtgtgttcctacgcaatgttggtcttaagtctgcatcccagaaaagctccacaacgactgtttctgcaaaggttcaacaacttcaggatgaactcgagaccgagaagcaagaaaaagatggccttcgggaagaagtggaaaccttgaaggctcaagcacaagcatctcaggagactgttgatagtatgaagaggtcgatggaagaaaataacaacctccttcgtcaactattaagcttcaatcgaggccaagtgcctccatcataagtctggttgaccactataggacatgcagccttatggctgttatagtggctagttatagtagctctagatttgaagttataagatcatttttcaattctgcttaatttttaatactttgagttgaagttattggatttgttttggattttaagttaaaggatttgcagatatatgttttaaagttatattattctcttctagatgaaatatttgtgttgaacaaattcatatgatattttggttctgatgtgtaatattctatgatgatatgaatgcatatgatgtattccttgcgatgatcaaaaaaaaaaaaaaaaaaaaaaaaaaaaaagtactctgcgttgttaccactgct

SEQ ID NO: 160977 - DNA, 319 bp, Zea mays
  Clone ID: MRT4577_78392C.1
gaacaagtttaccgtwggwgaaagtagrggatggaaaattggggtyaamtacgamaactgggctagttgbaagatttttacggatgtgagatdagctagtgttyaacttyggdacdgggagctacgatgtggtggaggtggacaagagtggataygatggytgctyyaawawcaacgswgcgaacaaaatwwaaaawggkkwcgctaawgttaatdttatttttggtasttactactaaatttgsgggattagcgggcactgcagcggcgggatgaagtttgytgttawtgttggttttggctttggctttggctttgg

SEQ ID NO: 160978 - DNA, 613 bp, Zea mays
  Clone ID: MRT4577_78393C.1
ccggccgggatctgtgataccctcaggagtttctgttcccggccggccttgattaatttctctcttttccccctcatattctcaacatgtctcctcctggtggtagtgagagagagtctggcctggctcgtgtgcttggttccggttccgctggtatcgctgagctggctgtcttccaccctgtcgacaccattgcgaagcgattgatgagcaaccagtctcgtatctctggttccagccagttgaaccaagtcatcttcagggacacggcctccgctactgtcggaaagaagttcgtttctctcttccctggtctgggatatgccgccggttacaaggtcctccagcgaatctacaagtacggtggtcaacccgttgctcgtgatttcttggccaagaactatggctccgacttcgagaatgcctttggcaagaagaccggcaaggccatcatgcactccactgctggaagtttgattggtattggtgagatcgttctcctgcctctcgatgtcctcaagatcaagcgtcagacaaaccccgaggctttccgtggccgtggtgtcctcaagattgttgccgatgagggattcggtctgtaccgtggttgggg

SEQ ID NO: 160979 - DNA, 249 bp, Zea mays
  Clone ID: MRT4577_78394C.1
accaggcgggaaccgggatggggcttatttgagagagcggcacctccttaataacatatctgctcgaatctctagggccaaactttctaaaaccgcgagccatcattacctatcaattttggcctaactctttactattacagctactatgtaacatccccaaacaaatactaccaagttatggtactgcaaaggaatctctcttcaaaggacacattcattggctctaactcacacaattgcgatgca

SEQ ID NO: 160980 - DNA, 470 bp, Zea mays
  Clone ID: MRT4577_78395C.1
cccacgcagcccgcgacacagcagctccgctcgccgatcagccaccgggagaccacacaccgccagcgggcgccggacgaccagaccgcgccgccgccaccgccggacgagacaggggagggagaggaggaaaaaaccgcgccagtgcggtgggtacaggaggaacaagagagacccgagaggtacaggaccagagcgcgcacggccgaggccgaagaccgagcccatcgtgggcaaaaagcaagacgaggcgcagggaaagcagacactgcggcggacgggcggaacacagcgacgacgcaccggcggccgagaaccacgccggcgacgggagaaggagccggaggaggaggaccaacagggccggacagaggacaggcacagcagcgggagccccgaagcacaggagccccaaggacggcagaatcggcgaggagacaacaacagaaacgcagccgacaaggccagga

SEQ ID NO: 160981 - DNA, 1156 bp, Zea mays
  Clone ID: MRT4577_78396C.1
ccggccgggatcgcggccgtatcatcgtcgctgcacgtcggcaaggcggggccgatggtcccaccggcgcgtgcatcgctgccatcttcgggcagggaggctcccgcaagtacggcctcacctgccgctggctgcgctacttcaaaaacgaccgcgaccggcgcgacctggtgaccatcggcgccggcgcgggggtggcggcggcgttccgcgcgcctgtcggcggcgtgctgttcgcgctcgagtcgctgtcgtcgtggtggcgcagcgcgctcatctggcggtcgttctttacgacggcagtggtggcggtggtgctgcgcctcttcatcgagctgtgcgggaccgggcgctgcggcatgttcggccggggcggtctcatcatgtacgatgtcagcaccgtgttcgacgacctcatgacctaccacctcaaggacgtccccaccgtcatcctcatcggcgtcaccggcgccctgctcggcggactctacaacttcctcatgataaaggttctccgactctacaacgccatcaacgagagaggtggagcgcacaagctgctgttagcggccaccgtctccatcgtgacgtcgtgctgcgtcttcggcctgccatggctggcgccgtgtcggccgtgccccacgacgggtccactttcgtcgccggacgggacctgccacgcgctgaaccgtttccggcggttccactgcccaaagggccactacaacgatctcgccagcctgttcctcaacatcaacgacgacgcgatccgcaacctctactccaccggcaccaacgacgtgtaccacccggtttccatggtcatcttcttcgtggcgtcctacgcgctcggcgtgctcagttacggcgttgtggcgccgtccgggcttttcgtccccatcatcctcacgggcgccacctacggccgcctcgtggcaatgctgctcgggggccgctccggcctcgaccacggcctcgtcgccatcctcggctccgcgtcattcctcggcgggacgctccggatgacggtgtccgtgtgcgtcatcatcctcgagctcaccaacaacctgctactgctgccgctcgtcatgctcgtgctgctcatctccaagacggtcgccgactccttcaactccagcatctacgatctcatcct

SEQ ID NO: 160982 - DNA, 392 bp, Zea mays
  Clone ID: MRT4577_78397C.1
taaataaagagaaatttgaattatagatgatggtaccagttctttgtttgttattagcttccagtataaaatgtatatgctctactacaataatctacgatgtaaaaagaatgtgtaaaatattgtttgtatatcataagtgaaaaattagagtatagatgatagactctgatgacctattacaagactgaacaatggatgtcacacaaatcatatacatgcaggctccattgtccccaatccaatgctctgcgttaggaagacccacgctccgtgccacttagtaagtccatgtgttagagaatgtgttagagaatttgggcttgacccaaataataatttatgtatatcccaaaggttcacccacatatgtatggtatggtgagaatttt

SEQ ID NO: 160983 - DNA, 134 bp, Zea mays
  Clone ID: MRT4577_78398C.1
attcttgttgctgctaacatggatatatatcttattgtgtctgctaacatataaatcacatattttcccaatactgtttgcatctcgaaccagattgttcaatatcccaactcgacacatacgtcatattcggc

SEQ ID NO: 160984 - DNA, 243 bp, Zea mays
  Clone ID: MRT4577_78399C.1
acaaataaaacatgtggtgaatgcaaagctttttatagatttataaaacattatcgccaaacttaataacccagtagggaagggggggaataaagtcttacaacgtaagttgtaaaccacacaacggcggattggtaagaaccgaccgaaacataacactattagaaccacctcatggcagatcacaggatatcagtggtacacaaacccgacaacgccgtgcaattagaacgtcaaaaaccg

SEQ ID NO: 160985 - DNA, 155 bp, Zea mays
  unsure (1)..(155): unsure at all n locations
  Clone ID: MRT4577_7839C.1
gggtcgagtcgagcgctcgagccgatggngtgagaaaagaatcgccagagctatagacagctgagagactacaggaaagttcccagcgctaaggcattacgcccacggctatctgggaggggacaaggacggggagaagtacagtttcagccaaa

SEQ ID NO: 160986 - DNA, 790 bp, Zea mays
  Clone ID: MRT4577_783C.1
gcaagcattaaaagccaaaattcaggtctggcctcgaatctctctgctgaggctggggggaaaggtgcagataagaagaaccttactgaccaaagagacttgtttcaacgaatcttagattttgtcaagtatggtgaatgccctgaagaatcaatcaagattgctggaaaacgtgatgttttaagggtgtcatcgtggtctgaattaatccagttgaatttcttaaaacggttcctggggaaaggctttctgaagcatgtgcaggagaatggacttcttcaggatatctttgacattaaggttgacaaaactgaaaccttgtcgtccactgataagaaaatttttaggtctgaagaggaaaaagaaagagctctgagattaaacaaggaacgtcgtctagcccaggtaaggaagaatgccgtcatgttggatgagtaacaaggtcaggaggagaaggggaaacaacatcgatttctgtatctcatttcatccgggcctttgtctgtttgcacatccattggaggatgtgccttcatgatagtgtactttaaggatactggagttttatagtgcatttaaccgatatgctgttgttcgtgcattttgaacgtcagcataatttgtgggaatagttaagttgatttggagtttagtaatagtaagaactaaggtgctgtttggttcattaaatgtaacgtaagtatgaaatgtaatgtaagtgtaatgatttatactctaaacaaaacaaacatgttttaacgttatcggatattcattttgtcaaaaaaaa

SEQ ID NO: 160987 - DNA, 220 bp, Zea mays
  Clone ID: MRT4577_78400C.1
attcggctcgaggcgcaacaccgcctatatcagtccggtcggaccacgaagagactgcaccatgcaacgcattcccccccacagttacgtgacacggtgccacacgcgctacataagaatatttgtgcactggaccctaaaagcgctctacaaggagcgcatcgctgatcattacagcaccgtccacacaattttagcatgaggagagaactgaccgagg

SEQ ID NO: 160988 - DNA, 267 bp, Zea mays
  Clone ID: MRT4577_78401C.1
ctgatggtcttaactggattacaaaaagcaaatactagaacagctagctcttcgttcaccctttgtacttggtatttttctgcaccggtttaatcatgcttaatactacaaaacaaaaataaattcttcacagtggttggtttgttttgtttttaaaccacagtttgatttagttagccttgctggggccataatatgcttcagggtgtgtaaaagaagaaatctctttgtggctttcatgggcagggaatcccagagatagcaaat

SEQ ID NO: 160989 - DNA, 832 bp, Zea mays
  Clone ID: MRT4577_78402C.1
cattatcagcgaggagctgagactcaaggatattgagtttgtggagaaggctcttgagaaccagaagaagaagacccgcatgggcggccagagtcttgagctgaagaaggctaagatcgaacaggagatgattgagaaggtcctggcttggcttcaggatggcaaggaggtccgcaagggcaactcggcccccgaacagattgaggtcatcaaccctctcttcctgctgacggccaagcctgtcgtctaccttgtcaacttgtctgagaaggattatatcagaaagaagaacaagtacctccccaaggttgccgagtggatcaaggagcacgccgagggcgaccccatcattcccatctcagtctcgttcgaggagcgtctgacccgctacgagaccgaggaggaggccaaggaagagcagaagaacgttggcgccgagtccgccctgcccaagctgattgtgcagatgcgcaaggccctccagctgggcagcttcttcacaacaggaaccgatgaggtccgccagtggactattcgcaacggcatcaaggctccccaggctgctggtgtcatccacaccgactttgagaagacctttatccaggctatcgtctacaacttcagcgtcatcaaggagcttggcgacgaagcagaggtcaaggccaagggtaaggtcatgaccaagggtaaggagtacgtggtggaggatggtgacattatgctcatcaaggccggtgctgccaagagctaaatgtgtcgtatctgcagtagcgctcatgtagtgagatcatttttttctcaggttaggaaaataaaaagtaaaataccaccg

SEQ ID NO: 160990 - DNA, 435 bp, Zea mays
  Clone ID: MRT4577_78403C.1
atatagatcgatcgcggccgcgccagagagagagagaaaaaaaatcttctcgtcggtagggtttcgggggctgcgatggcgatggaggcgcggatgaaggggacggtcaagtggttcaacgacaccaaggggttcggcttcatctcccccgacgacggcagcgaggacctcttcgtccaccagtcctccatcaaggccgacggcttccgctcgctggccgagggcgaggtcgtcgagttcgccgtctcggagggcgacgacggccgcaccaaggccgtcgacgtcaccggccccgacggatccttcgtgcagggcggcgcgggcggtggcggtggcgggggcggcttcggatcccgtggcggtggcggatctcgcggcggcgggggcttcggcggccgcggcggggacggatctggcggctacggaggtgggtac

SEQ ID NO: 160991 - DNA, 473 bp, Zea mays
  Clone ID: MRT4577_78404C.1
ggccgaggaaatggaccccatttatccaaacaacagtctacagacccgattgggcttgggaccccacaacggtcccaccataacctactaaaaagcaaacccatacccaaaaaaaagggcttgggatttttgaaaaatttaacaacaaacatatcgttacaaaaaaaatcacaacaaggccctcctattccggggggcacaaggacctaaagcctgaccccccccgagctacaggagggtatatggttccataccgcccctggacagaacccccaacctgacgtgggagggaagccaaactttacaaaaaaaaaaagcttcacgatctgggaaaccaccctacaaaaacaggttagcccgggaaagctttcacacgggaggccacccccctgacttgattcttgaggcgttcggggttgcaaaaaaaaaaacaaaaatttgcctctccttccccccttaggggcacaatttta

SEQ ID NO: 160992 - DNA, 755 bp, Zea mays
  unsure (1)..(755): unsure at all n locations
  Clone ID: MRT4577_78405C.1
aattcggcacgaggcacgtctcgcgccctcgtccgctccccgccgatgagctgccgcgcggcgccgtggagtcgcccgtcgcacattgctggtccgcgtgtgcccaccccggcgcggccgcgcttcgcacttggaagtaggaatctgtggaagaactcatggacaattggtgctggtgtttcaaatatgtttgcgctgccatcaacactgtttaggtgcatggcttcaagtggctctggtgatggtgattttgctcggtctacattgactgacgaagcagcaccatttccattatactcttggccagataagcagagaccacgagtgtgcattttaggtggtgggtttggtggcctgtacaccgctttaagacttgaatctcttgtgtggcccaatgataagaggcctcaggttcttctggttgatcaatctgataaatttgtatttaaacccatgttgtacgagctattgtcaggagaagtggatatctgggagatagctccatcttttacagagttgctgaaaaacactagtgttcaatttgtgagagacagtgtaaagcttctgcgcccttctgatcacttaagaagaaaacctggagaaccatgcactggtnggagttgttcatctggaaagtggcactgtcattgaatatgattgccaggctcgttctagctttaggggctgaagctaaaattgaatgttgtcccggttctgctgaatatgcgcctcctttcacgacattagaggatgcc

SEQ ID NO: 160993 - DNA, 1002 bp, Zea mays
  Clone ID: MRT4577_78406C.1
ccggagggtccctaagccgacgagaggtgtttcttgaaccttgaactgctgacctggccaaaggagagaatatatggaaaccaaggagcgaagactcttcaagcctcattacctcatatctatttaactatagtgaaaaaaaaatccgaacaaagaatccatggtggtggaatttcggatcaatataagtggcggagttgggattggttcttggtgcaaaagcaagagcaaaagatcacctctatccgtatcctagctttggtggtccgcagaacaggtggttaagaatagggagaaacaagggttaggtggcagaggaggcagtgaaatccggccaaatctcgacgcaatttttcttgccgattgttggtgcgtagtaagatcctagttgaatccgtaggacgggcgctaatcggaggaacttgcatcgattcttgcgtgctgacggtaccggcaaggcggcaagataagagttggtgcctgccgattgcagggacagggacggtgtttgtggaattgcctccttggaggaggctggtgagagggagaaaggatgacgatgccatggggtctcgcggcctgcatcgtggacatggtgtgggcggtgctcgccggctgggtgtccacctgcctggtcatcgccaacgaggtcgcccgcggcatgcgcagtggcgagatcggtccgttcgttgtcggctgagttattcgatcggctttaggtggctcagttgttcctgcattctcgatagtgtatttttcgtaccggtacatttcatacacatcgctatgctgtacagacggcgttgaggactggagaggatgacttttgtttctaggatttttgagttgtagtgagtgtttgtgcaatcacacaagaacaaacatgtgaatatgtgatgtacttccagtggtatataaacgggatggtcctgtaaaataattctaaattgaattcaatatctaatccttttatgttccaaaaaaaaaaaaaaaaagccccta

SEQ ID NO: 160994 - DNA, 487 bp, Zea mays
  unsure (1)..(487): unsure at all n locations
  Clone ID: MRT4577_78407C.1
aaaacatatcttattttatgaagaggttttattgctgatgtacaacatatgagaactgtaccataatgttcatgatacatatatacgctctacacagacactcatagctgaacctctaatgcctcagatccacttgaaactaaaagcccacacctgctcttgagccaggagcctcttacctcaccgtatctggccaaaacatactttcgcagctccgccaaatggcccgctggctcataagccatgtatccaagacggggacgggactttattctgggcatgaatgctgaggctggaataagctggtgtgagctcattgcgacatggcttggatcggatgtccatatttttaatgccgcgaaccttataagtatcccgatcgtgacttgcctctgagatccccatttccagaaattggcaaacaatgtaccactccggcctgtctccctacggaattgntggttctttcacaccatgcctcaatgaa

SEQ ID NO: 160995 - DNA, 248 bp, Zea mays
  Clone ID: MRT4577_78408C.1
aaacaagattattttacccagataggaccccaattaaaaaaaaaacaacggggggggcagaggggccgccatagaaacaaaaaaagggggaaagggattccagtcttaaaactaaaacacttaaagggggggggctaacaggctaaaggcccaaaacaagggaaaaagagttttccatccaccaaaaatacttctcgaaggggcaaggcccccgggaaccttgggggggaaaccacgggttcccgggt

SEQ ID NO: 160996 - DNA, 211 bp, Zea mays
  unsure (1)..(211): unsure at all n locations
  Clone ID: MRT4577_78409C.1
tttcttttttttttttttcctcttacaattgacacaacaccttactaccgtactacaactcattgccatgtctaatcaacggcgccaccctatgatcgtgcatgtcttcctaaaagctgatccgtccatgtanaagacactttggtcgttctggccagggatgtgtggcatctcgcactaaatgcgctccgcgtttatgtcgcagaagttg

SEQ ID NO: 160997 - DNA, 311 bp, Zea mays
  unsure (1)..(311): unsure at all n locations
  Clone ID: MRT4577_7840C.1
gccctctttaattcgtaattacgcagagaatggagtgcgagtactctattggcggcacccgcgccacngaacataccaacatcataatccaacatctgctccccgatatgtaattcggctagaatgctccatggtttgtgaacaaagcaaaagacatattgatgtgatggacaagaaaaaaaaaaaaacccttggatctttttttctaacgacccgagggtattctgaaaaagtaagtgaagcctacacatcgatggcatttcttctcgttggcttggttccataaatgtagcagctacaaggactgggct

SEQ ID NO: 160998 - DNA, 205 bp, Zea mays
  Clone ID: MRT4577_78410C.1
cacgcaactagcaatgcatttcagtcgcttgaaaccttaaagaccttgggaacatccacgggaaacctgtcgattttgtccattcacgggttccgttcctccgccgggttaaacgaccggagcgcccctcaaacggctctgttgaacttgaaccctgacccgaacgcgatctgtcaaatccgggggcggcgccggattctctcct

SEQ ID NO: 160999 - DNA, 1658 bp, Zea mays
  Clone ID: MRT4577_78411C.1
tttgttctcgccggaaccaaaaaccgtccgccccgcccgccggtcacgcacgccgtctcgcgccacccagccgtccgtcggctggtccgctgactcttcgccccccgcgtgtcctgtctgtggtggcgcggcgcgggacggaagcacgcagcagcagcaggtcaggtggtggtggggatgccggccgcggctctttcttgtacgtggacctgcgggtgctgcgcgggcaggaggcggaccagcggcggcgctgcgggcgacacggccggcgcgtcggggcgcgccgccgagaagggggacgagtggagcctcttcatccacctgcccgtcttaacgctgtctccgacttcgacatacagtctaaaccatctactgtgctgcggacagcctaaaaaacactatggggtgatggagaacgggcagcagatcgctgtgaagaggctgtctctggggtcacggcaaggcgtgcgcgagttcctgaacgaggtccggctcctgctcaaggtgcagcaccggaacctggtgtccctgcttggctgctgtgcttcctcaggccacaagatgctcgtctatccctacttccccaatagcagcctcgaccacactctcttcggaataagtgtgccgcgctagattggccaaaacggtaccatataatcgtgggactggcaagagggctcctctacctgcacgaagagtctccggtaaagatcatccaccgagacatcaaggcgagcaacgtgctcctggacgaccagctgaacccgaagatctcggacttcggcatggcaaggctcttcctggaggacgccacgcacgtgaacacgttcaggatctccggcacatatggttacatggctccagagtacgcgatgaacggctacctgtccgccaagaccgacgtcttcagcttcgggatcctggtgctggagatcgtgagcgggcggaagaacatcgtccggcatctggacgacgagaaggtcgacctgttgagctatacatggaagctattcggagaaggacggtccctggagatcgtggacccgtcgctgtccagccccgacagcgatcaggcgctgctgtgcatccagctcggcctgctgtgctgccaggccgcggtgtcggaccggcccgacatgcacagcgtgcacctgatgctgtcgagcgactcgttcacgctgcccaggcccgggaagccggccgtccacggcagggccggccggtggacggcagcgacgacgacggcctcagggtccgcgtcggcgtcgagcgccacgaacaccaccagcacgttcgggttcggcaccgacacgaacacgaccagggcctctgcggctgcgctgctggccagtgtcgccgaggacgagtcccggaactccatctccatatccttcaccactgatggccggtagaaacaaaacagagtgtataagggaacgatacatgagtgagtgaaccagagtgatttgtgaggagggtattgtttggtactcctagctagctaggtagattaggttgattttgtagaatcccagccatatggcgtacagttggggcttgggagaattttctttggtttgttctgaattggttgcatcgtgctattgttgattatgtgtgaataataagcattttaatcttagtttgattgttttttc

SEQ ID NO: 161000 - DNA, 284 bp, Zea mays
  Clone ID: MRT4577_78412C.1
cccacgcgtccgcagaatgttcccttccaagaaggccactagtagcgcagccgcagccgctgccgccgtgagctcaaatgatagcaggcagcaggcgatgtgcgtgcaggccgactcggggtcgggcctcgtcctcaccaccgaccccaagccccgccttcgctggaccgtcgagcttcacgagcgctttgtcgacgccgtcacgcagctcggtggccccgacaaggcgacttccaagaccattatgagggtcatgggagtcaaggggcttaccctctaccacc

SEQ ID NO: 161001 - DNA, 588 bp, Zea mays
  Clone ID: MRT4577_78413C.1
aagtcagagaagtcattgcacacgctttacttggtcgttgtacaatcaaaaagagggcaaacaacgtgccacaacaaacttgtctattctacttagtcctggaccgctcagattaacctattcgaacgtgcatgctgactggtgagaaagttcattcatgatgcaacaactccaaaacggcacaatctaaggcttcaaaaactgtgcatagtgctatcgtacaacaaaactggcattccttttcgtcggcaaaattacccgagggggaaaccagaagctattccactgttgaaattgctcaatttgtcatgtctcatttctcgacccctaaggctaagctaatatgccatttacactctctttcttaatatattcttgcgtggctcctttttggtcggtgccatccctgaacccagagaagtcatccctacagcgctctggtataagtcatttaaccttggcatactgatcaccagtgcaaccacagaaactccaacaataagcggaaaaactggtgctggggtcagttcctgcttttgatgacgctcctcagttttatatttgaggggaccaacatggatttgggga

SEQ ID NO: 161002 - DNA, 2884 bp, Zea mays
  Clone ID: MRT4577_78414C.1
ctcgtccaggttacatccaagggatagcatcttgttgagcttcgatctggccttccatcacatacacataggtttgaatcggagttagtcgaagtagatctggaaaaggatccccaaatccatgttggtcccctcaaatataaaactgaggagcgtcatcaaaagcaggaactgaccccagcaccagtttttccgcttattgttggagtttctgtggttgcactggtgatcagtatgccaaggttaaatgacttataccagagcgctgtagggatgacttctctgggttcagggatggcaccgaccaaaaaggagccacgcaagaatatattaagaaagagagtgtaaatggcatattagcttagccttaggggtcgagaaatgagacatgacaaattgagcaatttcaacagtggaatagcttctggtttccccctcgggtaattttgccgacgaaaaggaatgccagttttgttgtacgatagcactatgcacagtttttgaagccttagattgtgccgttttggagttgttgcatcatgaatgatcgtgtagaggtgaagaattctttacccgaaggcttagctaaggatgattggtgctgggaccagagtatcttgaatatagatgttggtactgatgatgtgagagacattgtgtttgtacaaaaaggctattggattgagctagtttcaactcatgatactaatgcttatattcagcagccagattcttctagacttgatttgttgataaagaaaggatcacaaagaatttgtgttgaaacttcagggcaacatgagattcatttaactaatccttgtatttcctttgggacctcgtctgttttgtttgatacagctaatttaatgccgatccatatcaatgcaaagaagtatcttgtaaaaggtgaaatccatgtggacatgagctccattcaggaaaacattgattccaaggacatagtcgtggatatcttgaagagtgatggcagtttcatagaaaagatatccacatcacttgttcttggaaaggacaatcaaaatgacttcactgcctttgagtactctatttgggctgaccttggggaggacttcatctttgtcccccatgattctagcattggaaggaacaaagtcctattttatccagcaagacagcagtattcagtttctatgaatggatgccaagatactgttcctctaatcactgcaagaactggtctatatcttgaaggatcagtgttacctgcaacttctgatgttgacatcaagattctagcagctggaaagagcaactatgcccatctgaacaaaggggatgtagcaacagaggcaaagacagattctgaaggatcattttttgcaggtcctttgtatgatgacatagtatataaagttgaagcttcaaaggatggttaccatctcaaacaaactggcccatacaccttttcttgtcagaagcttggtcagatattagtgcggatttatggtgaaaattcagagcttttaccttcagtattattatcattgagtggcgagaaagggtacagaaataactcaattagtagttctggtggaaccttcacctttgacaacttatttcctggaagtttctatctccgaccacttctaaaggaatataaatttaatccgtcagcagtagctattgatcttaattctggagagtctagggaggctgaatttcgtgcaaccagagtggcttacagtgccatgggttctgtaacactattaactggccaaccaaaggagggtgtttttgttgaagcaagatctgaatccacaggtttttatgaggaagctaccacggattcttttggtagatttcgtcttagaggacttgtgcctggatcgacttactctataagagtggctgcaaaagataatcttcagtttgcagcagttgagcgtgcttcacctgaatatttgtcagttaatgttggtcatgaagacatgactggtattgattttgtggtttttgaacgccccgaagtaacaatcttgagtggccatgtggaaggagatggcattgatacgttacatccgcatctctctgttgaaatcagatcagcaacagactcttctagagtagaagctgtacttcctcttcctctttcatactactttgaagtccgagatttgcccaagggcaagcatcttgttcagcttcgatctggccttccatcacatacacataggtttgaatcggagttagtcgaagtagatctggaaaaggatccccaaatccatgttggtcccctcaaatataaaactgaggagcgtcatcaaaagcaggaactgaccccagcaccagtttttccgcttattgttggagtttctgtggttgcactggtgatcagtatgccaaggttaaatgacttataccagagcgctgtagggatgacttctctgggttcagggatggcaccgaccaaaaaggagccacgcaagaatatattaagaaagagagtgtaaatggcagattagcttagccttaggggtcgagaaatgagacatgacaaattgagcaatttcaagagtggaatagcttctggtttccccctcgggtaattttgccgacgaaaaggaatgccagttttgttgtacgatagcactatgcacagtttttgaagccttagattgtgccgttttgcagttttagactataaagaaagagttgctgcatcatgaaaaaaaaaaaaaaccagtcagcatgcacgttcgaataggttaatctgagcggtccaggactaagtagaatagacaagtttgttgtggcacgttgtttgcccctctttttgattgtacaacgaccaagtaaagcgtgtgcaatgacttctctgacttaaaaaaaaaaaaaaaaa

SEQ ID NO: 161003 - DNA, 410 bp, Zea mays
  Clone ID: MRT4577_78415C.1
cgaacgggccctttaatttatataatcggaacagattataatcccaaacaaacacccccaataactaggggaacatcatttccacccaaatggttaattagatgggggcagatcaccaaaaatcacaaccgggagaaaacagcacgtttgggtaaagacaacaatgggacaaaaaatatttccttcaccccaactgagcgcatgggtgggatgtacattggaacatcggacccctggtttacccaaggtcaaggggagggcctggaccaagactccaaaaaaggccctggcttcgctatatttggttggaaaaagcattttcctcgaacccaaggggtttaaagcaacccccatttccaggtagttggtccccaccactgggattctttaaccgagaaaaagggtttttg

SEQ ID NO: 161004 - DNA, 664 bp, Zea mays
  Clone ID: MRT4577_78416C.1
aagaacaagcaggcacgacctcccttctcgcccatccccactgcccataactatgccgaactcctcatagtcagagcgagagatctctccctgattgttccatggagaaggagatcgaccggaagagcgtggtccacgcggacctcctcgcctccgcatccagtcatgcccagctatccgcggcggcgagtgcgaacggctacagcgccgtctacgatgggagcgcctgctacaagcgacgacgtcgtcatcgacgttgtctaccggacgcctatatgcaaggacaagcgagggggcttcaaggacatctacccgaacgagcttcttaccccagatgtcgaggatgctctggacaaaattgtaatcgacccaaatcaaatcgctgatgatcgtggtggacaaggtgataggccaagtctctggaagcgacattgagagcacgactgaatgtttggaggacgttattaatgacagcgctaatgactaagatgctgacggccgatgctcctagtggctagacgtactgaagaatggtgctactgatacatcacatgttttcaatgacctcaatgctgatgcactgcctgaatatgtgatcatctgccatgataatggtctggtgcccattgtacagcctgagatcctagtagatggagctcatgac

SEQ ID NO: 161005 - DNA, 571 bp, Zea mays
  unsure (1)..(571): unsure at all n locations
  Clone ID: MRT4577_78417C.1
cttctgcttgctctgggggggtggtgggggggngnagcgagaaaagagagagagatctagtagagaggctagtaggtggtcctcgaacgaagatgttggcggtgttcagcgggcaggtggtggaggtgccggcggagctggtggcgttgggcagncggactccttcttctttgggggagtggggggggtnntnnntctctttctgtctcttttctaactaaacaaatacgttcagtttggtgaccatggtcactttgnttattgttatattaactaggcggtgttttgacttaggtcttttttgtgcatagactaggtgttntgtctgttttaaggggtgctggacaacctgggttgggtgagccagaagcactggctgttaagcaagggtgccaacgaggtggttttggttatcgagggctacaagacgctgtgcgattgggcgccctacccggccagctttatgctttgtcaggtcaactggtcctacgccttagttttttttgacgaagttcaccaactcccttcttgttggaattgtacctttaggcagggttgcctctctttttgg

SEQ ID NO: 161006 - DNA, 771 bp, Zea mays
  Clone ID: MRT4577_78418C.1
ggtcgcccctactcagatttttcactgtcatgcgcgctgcttccttatcttcttcccctggctgcagcttccttatctcctccctgcagcgctcggtgccagtccatctctcttcctcgcggagctcctggcgccgcaagccctcccaagccaaggcccctcctctcgatctcccatggctggtgtgtggaccgcacttctgctccagctcgctcagctcggagtcctttcttttctctctatcccagacgctcagctgcctctggtctccaaactcgccgtcgagctcccctgtgcgcccagttcttcctcgtgcgttgccgtcctctgctaggagcttccatgccgcgcgtcctgcttgctccgcgtgcctagtagccgctctcttttgctcactgcatccactttgctcaccttgcagctcgcccaggcccatctccctcgactcccttcagctcagattcgccgtcgcgttctgttccctggtggccgagcatagcccttgcgctcgcgacttctctgttcaatttttaaaacacctaggcatgcccatggtcgctcccttcgtctttggtgttcggctccctgtttcagcttgctgtgtcgcacttgttcaaatcgccgccatggcgtttcctgtcgagctcctctgttgtgcgcgcaaagttctctactcactacagcgcgtcgagctcccgcgtcgaatctttttctagcctgccgcgacgctcgatgtcctgcctactttgctcacccgcgtcggctactcgc

SEQ ID NO: 161007 - DNA, 219 bp, Zea mays
  Clone ID: MRT4577_78419C.1
acaaattcaacagtcccattgaataagggtgccgatacacgatgaccaagctatggaccacttttggccaatcagagtgcaccatggacccagagctaaatggaatggcagcccaaagctaattggtatgccgcattaagccataactaaacaccttagatcccaatatctgatacccattattttgcagcaatgttaacgtttgcgaccttaccatct

SEQ ID NO: 161008 - DNA, 197 bp, Zea mays
  Clone ID: MRT4577_7841C.1
gggcgggctggcctggccagccactgccgcaagcccgcaccgcaactgcagttgagggacggcaggccgtgccgtgccgtcacgacagaccagaccagagagagctagtgcgtgccagcgcgcggtggggagagagagacttcgttctagagctcccttggagacgatggagcgcggcagtttcctggcgggttacg

SEQ ID NO: 161009 - DNA, 142 bp, Zea mays
  Clone ID: MRT4577_78420C.1
gacctgttcaaggccgctgcggtcgactgttccgtttccctcttttgcaaggtgcctccggcccggcttcctcggaagaacttcccgaaccaattaaggaccttattcctgaataccggtccgccgttaccaaaccggcccc

SEQ ID NO: 161010 - DNA, 545 bp, Zea mays
  Clone ID: MRT4577_78421C.1
cctcgaggccggccgggagcagcaagagtgagtagcctacctctatagctcgagtattgcttgctctccacaagaaacaaggcagagcaccaacaatggccgccgcctcctcgtcctcggtcctcctgctgctcctggccgccgccttggctggcatgagcgccaacgccgccaccttcaccatcaccaactactgcatgctcaccgtgtggaccgcggccaccccggtgggcggtcggcacgcagctgaacccggccgtcacgcgaaccgtcaacgagacgggcggcaccagctccgaccgcgtgagaagacgcaccggctgctccttcaactgaaacagaggaagctgccagacggacgactgcctcgttgcactggactgcacactgtctgggcatacgccgctgacaatgaacgagctcaccatccacggcaatcatgacatctacgacatctcggtcatcgacgaatacaacctcgccatggtcttctcctgcaacaccagtgagcggctgccgtgcacgtaccctggatgacccgacgc

SEQ ID NO: 161011 - DNA, 310 bp, Zea mays
  Clone ID: MRT4577_78422C.1
gcaaagctgatcaccctgatactgaacacccagggaacagtcatcaggggataaattatactgtagatatttaaatcacctatattgtttctccaacctaacacattcatgttactgaagagataagccatgacacgcttaaactgttggtaagcatgtttgtttttaaatttaggctgctgctatttttttatgattttggaagccagtcacagtgcttttgagttttacaagtggcaaagttatttttctgttctttctgcgacactcactttgtccagtgtttgatgcaaaacgaggatgacaatga

SEQ ID NO: 161012 - DNA, 272 bp, Zea mays
  Clone ID: MRT4577_78423C.1
ttgatcttttaatctagatcgctagcggccgcgcttctttaatagattcggggggtgtctttttttaacatttaaccattttccaataacaaacaaaaattttcatgaccaaggccaaaacatttttaaaattgttaaacaaagcgataaaattgtaacattaaacctaaacttgctattgcgcttccatcaaatattataaattatctctatagaagaatctactactatagaatcagatcaatcaactcattgagtccatggatccaata

SEQ ID NO: 161013 - DNA, 1096 bp, Zea mays
  unsure (1)..(1096): unsure at all n locations
  Clone ID: MRT4577_78424C.1
ggagctccctcatcccctcctctcggcgtcttctccctgctgtgctcgccggctccctgcacgcaaccgggccgcgcggctctctggagctcgcccctggctcggatttccttccccaaccgagatccctccgtgttcgtctctgctccggcgtccggtcaagctccccgtggtgccgtcgccctcaagctcgcgccctgctctctctgacgcgcgtctgctccagctcgcccagccgtcgagctcccttgcgcgcgcgtgctccctgcctgctccatcttctcgtgcgcgcgtcctgctcaccctccagctcgcttggtccctgcgcgtgtcgaacttctgctcggcgtccagcttctctttttccccgacccgcatgaccagccgagtctgactccgccgtgagctcgtccctggcgctcgacgtgctgtcgcccagctcgcggagctcccttgccgtggccgttgcttccctgcgcccagcctttactcagtctctgtgcgcgcgaggcgcgagctcgcccgtgtgctgctggtctaacttggatctcgcccatggcgtcgatctgtccgtcctgtcgtcgcttagctcgtacgcgccctgtgtattttccccgctcggcatactccctcgctggtggccgaacatctcattcatggtgtccagctcgaacaagtcgtcactcgtcattctcgtgcgcgacaaaaaagctcgaacaagtcgtcaatcgtcatcctcgtctacgctaagccccaagccgtaaagacactctggtgctagccatgcgtcaccagctcggcaaaaaggaatccccggattgtatgcctcgctcgcctgacgtgtgtgatcaatgacgtcaaccggaaaccgtcgtcgtgcttgcgactatcgcgtcgaattagtcagggtaagttcatttgtttttcgcgttagtggattgatggatggtttggctagatataatatttattaaattgcctaagtcgctttggtaattggtcgatgtcgtaggatgaaagaggtcacagtgtttgcgggactataggtgttaaaactggggaagttttantaatatatatgatacacaggttaacc

SEQ ID NO: 161014 - DNA, 300 bp, Zea mays
  unsure (1)..(300): unsure at all n locations
  Clone ID: MRT4577_78425C.1
aggagntgaagatggagnnnttgatttgaataaagnagnntgagagnnggaggttttttttttgaggatntatgatataaaaaatgtgggtggaggtgttnatttaattgaaaaggganttaagaatatggttggttggaagggatttganatatngaagnntaaggatatagaangnnaaattttttnattgaaggaagaanttgaatttttttntgatgaagagttaaggttggatgangaaataagggaagnaaaagaaaaaatanaagnttttgnnnttgatggggattaaagaaa

SEQ ID NO: 161015 - DNA, 201 bp, Zea mays
  unsure (1)..(201): unsure at all n locations
  Clone ID: MRT4577_78426C.1
gggaccctcgaggccggcctggccgggattctccccctcgcttcgcctagaagaggactgaagaacagagataagcgcagaacggcgtcaccgtactctcggggctgtgcaacngttggcaanggcctcggganagggcgncgcgaagcgtcaccgaganggtgctgcgcgacaacactccagagcatcaaccanccgggc

SEQ ID NO: 161016 - DNA, 449 bp, Zea mays
  Clone ID: MRT4577_78427C.1
tggatccgctacaccaaaacaggagaaaaggtggacagagccgtggtcatcttatcagaagaacatgacgcctcagccacatcctattgatgtggggacattgtatctttccagctgaggaagggaacaaacccgtgtctgaagtgctactctactaacaacgcgacttgtcaaccaaaagatcgaagactactcgagctcttgcatactatctagggtccagcacagccatataaatgacttcagcaactcagaatgttcatagacaccttcgttataagaaagctggtcgaaagaacgcgtgcccactagataacgcaaaatgtcttctttgcctccaaatcctgtgaaaaactgagacccttcttgagatttgacaggaacatactaaagcgcgctcccactctttgtgaactcatgggcgaaccattccaagagcaaaattttct

SEQ ID NO: 161017 - DNA, 320 bp, Zea mays
  Clone ID: MRT4577_78428C.1
aacgcggagcagagcacagagtgccctgccgccgccgatgcgccggggtacacgtcggcggcgtgcggggaaatccactactcaactactgcgcgatcagtagtagaagctccaagaacaagccgaagcatttttttcttcccaccacgaatgttgtacaaaatttgttcttggccgttaaggccttcccgattctttggtccgtggtagtgagtaattgatcaactgtaaatacaagataggtgtagtacgtacattttttttctttttcatcaaacattgttacgcattcattgtactgtctcaagaaaatacaaagg

SEQ ID NO: 161018 - DNA, 177 bp, Zea mays
  unsure (1)..(177): unsure at all n locations
  Clone ID: MRT4577_78429C.1
gatctactaagattcagcctgtgtatgtaatcgatgttgctgctgctagtaccgtcgncactgagggatgtcacaatagcagcagcaacatcgattacatacacaggctgaatcttagttgctgctgctattgtgaactccctcaaggatgacggcactgcaaggggaaagatatat

SEQ ID NO: 161019 - DNA, 360 bp, Zea mays
  Clone ID: MRT4577_7842C.1
cggatgagcattcgcttgcccgggcggagcgcctgacaactgaaaggaatggaggtactcttccgaggaacttactggtgtcgtttctgggggatgcttcaaaggcataaagtggacactagaagcatgagggaggcctgcagacttttggagacatcgatgatgcaagtcttctcgacgcatggttggaccttctgtaatagattaactatgtgatgtttgtctattctcccaactgcgtttgggttttgtggccaaatgtggcgttgtttcggtaccttttgttggggtgtgtggacggccgtcatcagctgatgtaggtcgggatttggttcccattatctaaaaaaagagatgatc

SEQ ID NO: 161020 - DNA, 427 bp, Zea mays
  Clone ID: MRT4577_78430C.1
gggcaacccccacatggggggaacccctttttggaagcattttataagggggttttaccccaaaagctgggccattaaatgggaaaacccaacccaaacaacaaagcaactcaaaaacccactttgttttgacactgaccccggccgttccaaaaatgaacactgaaccccccatgttaaaaaacaacccaggggcaaaaactccttccaaaggtgaaatttcctggcctggggccaacgcatccttgattggggttttgaaataaaaaacgaccatgtattttgggttgtaaaaaaaaaaggggttggcgccttaaaaccttaattttgccttgactcctttcttcttaaaaaggtcctggaattttacaaggggggacttccagaaaaactggaaaacttccactggggggggtaaaccactacc

SEQ ID NO: 161021 - DNA, 341 bp, Zea mays
  Clone ID: MRT4577_78431C.1
cggcgccggccacggttccggccttgcccttggccttgccgacgacccgtgcctggacgggcacaatgccgacagacagcgcctggttctggcagaacagggcctgctgctgcgtgctgtcttcgccacctgacaggcaggtggacgccgccaagaccgccacctgcttggagttggaggacgaccggagcgtattcaggcacgaccggagcgaacacgtcaggaggtccgtcgacacgtggcacaaaccggaggttctcgccgcatgacatgttggcggctagcaggcccgtgaagcagtttgcggcgacgcttacgtgctcgatggacgggagctcgag

SEQ ID NO: 161022 - DNA, 647 bp, Zea mays
  Clone ID: MRT4577_78432C.1
ccgggctcttagaatcctagtgccctgctcctcgcttagtcgccgccaatcccttccggtgctgcgcaaccgctgagtgagaagaagagatggccggccagggcgatggccgcgggtatgggtatttatctcggcacgacgtactcttgcgtctgagtgtgcgcagcacgaccgcgttgagatcattgtcaacgaccagggtaaccgcaccacgccctcgcacgtcgtgcttacctactccgagcgcctgatcggtgatgcggccaacaaccaggtcgcggtgaaccccatcaacaccgtctttgatgccaagcgatctgatcggcaggaggttcaccgatgcgtctgtgcagagtgatatcaagctgtgtcccttcaaggtcatttctggtcctggcgagaagccaatgattgtgtggcagcacaagggtgaggagaagcagtttgcagctgaagagatctcctctatggttcttatcaagatgcgcgagattgctgaagcttaccttggtagcacgatcaagaatgctgtggtcacagtccctgcctacttcaatgactcacagaggcaggccacaaaggatgctggggtgattgctggccttaatgtgctgggtatcatcaacgagcccacagctgcagctatc

SEQ ID NO: 161023 - DNA, 799 bp, Zea mays
  unsure (1)..(799): unsure at all n locations
  Clone ID: MRT4577_78433C.1
ttgggtacctcgaggccggcctggacctgtgtcttcccgttgcgcttgtcctgcagtcgcaagcctgagcattccactgctacggcccgtgccgccttccatcgacacaccatggggagcccgccagctgaggctgtccagctcaaggacgagggcaacaaggccttcaagaaccaggagtgggacaaggccctcgaattctacacaaaagccatagaggcatacgacgcagagccctccttctataccaatcgcgcacagacatacatcaagctcgaacagtacggatatgctatacaagacgcagacaaggccattgaactcgaccccaacaatgtcaaggcatactttcgtcgcgcctcggccaacacggccatcctcaagcatcgtgaggccctccgcgactggaagctcgtcgttaagaaagcccccaacgatgccaacgcaaagctgcgcatggccgagtgcgacaagattgtcaagcgagacgccttcctcaaggctatcgaagtcgaagatgcgccctcggccgcagagggcctggacctcgaacacatggtcgttgacccctcatacgacggcgcaaagctcgaggacaagatgacactcgagttcatagaggacatgattgaaagatttaagaacggaaagaagctggccaagaagtacgtctaccagatcatcatcgccgtcatggacattatcaaaaaggagcccaccatggtcgagcacgacgttgagcaagggcatgaaatcacagtctgtggtgacacgcacggncagttcttcgatctcatgg

SEQ ID NO: 161024 - DNA, 718 bp, Zea mays
  Clone ID: MRT4577_78434C.1
gccggcctgttcgggctctatcacctaatctgctgctatattctcagccgacgacaatacattcccgagctccgaaagcgctgagtgacaataacagacgagcggaaaaggcgatggcccggctatcggcatcgatctccgcacgacatactcttgactaggagtgagggaggacgaccgcgtctagagcattggcaacgaccagggcagccgcaccaccgcctcgtacgccgccttcaccgactccgagcgcatcatcgcagatgcgaccaagaaccaggtgcaccatgaaccgcatcaacaccagcctttgatgccaagcgtctcatcgccacgaggttcagtgatgcgtctgaccagagagatatcaagttgaggcccttcaaggtcatttctgggcctggtgagaagccaatgattgttgtccagcacaagggtgaggagaagcagtttgcagctgaagagatctcctctatggttcttatcaagatgcgtgagattgctgaagcttaccttggtagcacgatcaagaatgctgtggtcacagtccctgcctacttcaatgactcacagaggcaggccacaaaggatgctggggtgattgctggccttaatgtgctgcgtatcatcaacgagcccacagctgcagctatcccctatggtcttgacaagaaggctaccagtgtcggagaagaaaatgtcctcatctttgattctt

SEQ ID NO: 161025 - DNA, 643 bp, Zea mays
  Clone ID: MRT4577_78435C.1
gctcttagaaaccctagttctctgctccattcttagtcgccgccaatcccttcccgtgctccgcaaccgatgagtgagaagaagagatggcgcggcaaaggcgatggccacgcctatcgggctcgatctcggcacgacgcactcttgcgtcggggtgtggcaccacgaccaggctgagatcattggcaacgaccaggggaaccgcaccacgtccctctggacgtctgccttcagccgactgcctgaccgcctcatcgcagatgctggcaataaccaaggcgtcatgaaccctatcaacaccgtgtttgatgccaagccgtctcatcggcaggaggtttagtgatgcgtctgtccagagtgatatcaagctgcggtccttcaagggcatttctgggcctgttgataagccaatgattgttgtccatcacaagggtgaggagaagcagtttgcatctgaagagatctcctctatggttcttatcaagatgcgtgagattgctgaagcttaccttggtagcacgatcaagaatgctgtggtcacagtccctgcctacttcaatgactcacagaggcaggccacataggatgctggggtgattgctggccttaatgtgctgcgtatcatcaacgagccaacaactgc

SEQ ID NO: 161026 - DNA, 645 bp, Zea mays
  Clone ID: MRT4577_78436C.1
aaaagccttagaaccctctcgtttatacctcgctgcactgcatctcgccgcgtccacgcaggaaccatcacgcgctcgcctcgtcggagcagccgcaggagcatcgttgcgtccgcgcttcatcctcgtcgtcgtcgagtcgtcacttcggagctccgctagactccgcgatgtcgccttgccgagtcgccgacatccatggcgccggagttctctgccgctgtctatgttccatcctcaccggcgtcgacgtcgatgagcccttctcttctctggcgagcccttcgtctccaatcgtgatctgttcccgagcttcgaggaatcgacggtcaagcttcagcgaccaagagatcaaactctacgagttctacgaggcttaaaatcctgagcatctatttggtgaaggttgtccgcgtcgcaaccactgctcaggagaagatgaagccgtggaagaagacttccaggagttccaagagtacgacgagttctaggcgtgggttagcggcaaacccccagtcggctgcctgtgtaggtcgtgtgtatctacgtttcttttccgcactttgattattgttaaagactatgtggatgttttggacatcatgatgtaatcgactattataccctcttttatgtcattatttg

SEQ ID NO: 161027 - DNA, 605 bp, Zea mays
  unsure (1)..(605): unsure at all n locations
  Clone ID: MRT4577_78437C.1
acattttnnaactggccagagagcagtagcgggtgacggagatgggtgcccggcccggtcaccancttaaggaagaggatatcagcggctttacacctcacagcgatggatatcacggatgtaatctcggagcaccacacctcgctcgtgctggcggcactctgaccccccccagattcttgctgaacacccccggaactcttcctcgccctcctactgcacctactcccactccaaccgcctcatccaatatgcctgcaaaaaccaatacgccatgaaccccatcaacaccgtctttgatgccaaccgccccctcatcaggagactcacagatgtgtttgtccacagtgatatcaagttgtggcccttcaaggtcatttctgggcctggagagaagccaatgattgttgtccagcacaagggtgaggagaagcagtttgcagctgaagagatctcctctatggttcttatcaagatgcgtgagattgctgaagcttaccttggtagcacgatcaagaatgctgtggtcacagtccctgcctacttcaatgactcacaaaggcacgccccccaggatgctgcggccgattgctgcacttaatgtg

SEQ ID NO: 161028 - DNA, 472 bp, Zea mays
  Clone ID: MRT4577_78438C.1
acgcgtacgtaagctcggaattcggctcgagcgacagtcgtcctatatttctttggaccccgtgtaggcagcaccgcaggcatactgagttagcatgttgatcggataaacaacgttggcattggagtgtcttaacaattgcagttctcaaacgtctacatcgcaatgtttcggaaccctcgccagtcatctttagggtttcatgtaacaaagttcggtccctcccaaatcgaaggagctagcatgccatgatcccttttccttttcggggtcaccgcctccaccacataccttcttttggtggtttctctataccctgccaggtgctccaccaccaatttggctggtaggccggaagtcgatgtgcttcttttagtcaactgttaccatgaatgagggaatggtgacatgttgcgcttccaactctaaagtggcgttgtctgatgagcacacgagcgtgatgaatggactt

SEQ ID NO: 161029 - DNA, 492 bp, Zea mays
  Clone ID: MRT4577_78439C.1
cgcggtggcccgggcaccggggcgggcaccactgaaccgggcgacgggccgcaacgtgccggtggaccagtcgcggtgggggccgaccgtgctcttacggacaggggagctgcaacagcgactggggggcgtggctgacgctgcggcagccgcgtgacgctggcgagttaccatcgcggagcaggactcacgacatctggtatcgaggtacacctcccatggctttcctgacaccggcgtgcggtgggtgacggacctggatgcccgacctaccacaacccccgacatgaagaccatgcatgtggcggaacagaactacaagtacttctgccggatcggcggatagctctgcattgatggctaggattgatttgcagaatattctgattgatttgacatataataaggtcatacactgcaccattgatgtacccgttacgtgactacgtactgattgtgtgctgctcgtccaatttatagataacaattgac

SEQ ID NO: 161030 - DNA, 105 bp, Zea mays
  unsure (1)..(105): unsure at all n locations
  Clone ID: MRT4577_7843C.1
tgcgttcggaactggctgtatggtagcaatggttggtgctgtangaaggcagggaccgatttnttaggcactgttagaggattaagtttctggtgtgttgttgta

SEQ ID NO: 161031 - DNA, 691 bp, Zea mays
  Clone ID: MRT4577_78441C.1
gtcctcgtcggaggacccgtcactttcccccgggtatccggcggcgtcggcgacctcccctgggcggagccgttcaacgcggtgtccggccagctcgcggcgctcggcgacggcgaggtggcatcgttagacgaggccgtccggaggctcgcgtcggcgctggacgcctccggcgagggtgctgccgacgacgaggcggccgtgcgcgctgcggcgcaggaggcggagaggcgcgccgaggaggtcgcgccgctgctggaccacctgtctgacgccgtcggcggcgtgttccgcgccgcgctgggcctccgcaacgccgaggtggactccttcatggtgggacccgcgggtaagccgtgtagcacataaccgtcgcttcgtgtggactactcgtagctgtctgtctgtatagtgtatacagtagtgtactgggataggggtactgctacagctcagtggagagttgagtcgtgcagtggatcagtggaaatcatgtatgttagtgtcaacgacgaggatgaggccacagatcatacatgcactagttgcatcatcttgggtacgtggcatcctgtgctgtacgggaaggggagaacgttgcaatctggccgtgcagtttcgcggcacgtaacaacaacagtatgtgtgtataatttgtggagaagtgagttgcacttcccttttcctctcc

SEQ ID NO: 161032 - DNA, 335 bp, Zea mays
  Clone ID: MRT4577_78442C.1
ggctaagggaacaaaagcaccatttcccttcgaaggccggggtaacatagttcaaagcagaagcatttcatcagcaagattttgggggtttttttttgtgaggccccgcaaaataggggctaaaagcatttggacaaaacaccatacaaccggccccagaggggccccaaagacttggggaaaaaaacccatcggatatggggaaaaccccggggctggctgggtctgattccggccaccccggagaagggaaactatggaagggcctagggacgctaaacctggggaatggaaccgggttccccagggggaaatcgaagaagcccggggcgacc

SEQ ID NO: 161033 - DNA, 450 bp, Zea mays
  Clone ID: MRT4577_78443C.1
gccgtggctaccggatctcacaacagaatattggtctctgagggtgcggcaccgccgctagagtcccactcgtgcattctccggtagcccgcgaatacctttcctcttcttcccattacccccagcgtgcgttctctcctctcttggcggcgactcggcgaccggcgctgccaccccatgtttggtgcccaggtcttcctggggcccttcgccggcgacgagcatcaccagatgagggatcgagggcggcgcaggcggcgagctcgtgggcggaacagactggtgagattgaggatggatcaggagcttgagccctagaccattatccaaaaaaaactatggtgcattgctgcaaactacaaacaacatccaaagtgtgctcagagatggcgaggataccgtctctgaagagcctaaatgcgtttccacatgcagaggaacacttgttga

SEQ ID NO: 161034 - DNA, 387 bp, Zea mays
  Clone ID: MRT4577_78444C.1
atcggctgctcaagttaccccatgcttctggcaaggcgcacagcagaacaagatccctgccgctcgcggaacttctggtccagttgccagcgttgcagaagctgcttctcaggcttatttactgccagcctgaaggtgcagcctgcacaaactacctcgtacaatatgcgctggctcttgttttgaaggaaagtttcaagatatactgctcaatcaatgatggcatcattaaccttgttgacatgtattttgagatgccgaagtatgatgcaatcaaggcccttgaaatctataaacgagctggtcagcaggcagaaaaactctctaacttctatgaccactgcaaacttcttgagctggccaggactttccaatttcccactctga

SEQ ID NO: 161035 - DNA, 1040 bp, Zea mays
  Clone ID: MRT4577_78445C.1
ggaactacagtgaaagataaatgtatgcatattacgtagagaaatgaaagataaatgctctggcatatgtatctgtacgtagactcagccagtcggctcgagccggccgaggtctcgagcggcccgtgcccgaacgtgcgctgtctctcgatcctgcatctctgcacctgctcgcctccccagggaggcagggacaatcgacttcgccgggcgccggctagccccaccggcgacgacaggcacagtggaccacggaggagaaagtactctgctttgaatgggaagtgccatgaacaaagacaaagttcatgacaaggagactcacggaacaagtagtgatataactgagaaaacacctgtggaaacggtgaagggtcccaatctgcttgagcgagcaaaggaagagatcgaggcccttgccggagctgttcatactaagatggagcaccattccagtccccacgcgaagaaggatgaatcacataaggaagacaaggaggggagcctgcacaaaataaaagcccacacggatgaaactcacggaacaagtgctgacataaatgagaacacaccagttgacaaagtcaaaggtccgaatgtgtttgagcgtgccaaggaagagattgaagctattgtggaagctatccatccgaagaatggatctgacagtaagtgaagactgaaacccctggggctgttttgccttaactggctgcaaaagccttaacgtgaggccatgtgctaccagatagataaatgctgtcaaagacgttcacccaatagtctttttatacgcgctctggagctgtaaaagctaagagcggacttgtttttatgctacactgttttccgttgtatcattgtggtttgtttgtccagaggtgtgtagaaatactcaacatggaattgtgatgcttaaattgttgagcttgacaggacattatattgtgccaccaactcgccatggtctggaagttgtaataagagtgatcatgaaacagggcataaatctattgctagtacttttttagtggaaaccc

SEQ ID NO: 161036 - DNA, 1855 bp, Zea mays
  Clone ID: MRT4577_78446C.1
tccacccacgctgccggcgagccggccactccatgatccaaatcacgacccaacccagatccagatccacctagctcagtgcagccgtggctaccggatctcacaacagaatattggtctctgagggtgcggcaccgccgctagagtcccactcgtgcattctccggtagcccgcgaatacctttcctcttcttcccattacccccagcgtgcgttctctcctctcttggcggcgactcggcgaccggcgctgccaccccatgtttggtgcccaggtcttcctggggcccttcgccggcgacgagcatcaccagcgagaagatgagggatcgagggcggcgcaggcggcgagctcgtgggcggaacagactggtgagattgaggatggatcaggagcttgagccctaggtaagccattctgaaaataggtatcgcgctgatttacccgctttaggatttgtggttgttgttcgtttctcaatgcgcttggttatcgatgcagctacctcatggtcttagtttagctgagttcacttgactaggaccagcatgtgcaatagaaaatccctggttaattatgggtccttctaacctccgttcgttgcttcaatttctcgttatacgtgccatgttccttcaagttgtttacttacaatcacataaagcttgtggtgttacgcggaacatgctaatttatttggatgttagcatgtgaacttgtgagtcagttcattgctcatttcattgaacctatgctgccatgctggtgaacagacaatgaagcagccggttggtgctataaacacaatacacctctgttttctaatccgtctgcttctcatagttgtagataaccttgtcatttcatcttatattgtgatgcacgggctagctagtagccgcaaaacagttttatatatttgttacctcgtagcatacaccacatgatcttgggtgcttcagactgatttacctccatggtaacagaccattatccaaaaaaaactatggtgcattgctgcaaactacaaacaacatccaaagtgtgctcagagatggcgaggataccgtctctgaagagcctcaatgcgtttccacatgcagaggaacacttgttgaagaagacttactctgaagagtctgtgatgttttatatgatatctaggattcatctttctcccaagtaatcgctgagacaccagtctcgacaactaaactttagcaggatgtgtttacataggtcacatttggatgcctcgctctgcataactttatttctttttgtcctatgcaaatagaaagctttgcaggcgcatctagttgaagtttctgtagaaagggtgaaggcatctgaaaccatatagtctctataggtaactttgacgtttagcatcattttattatcataaaatcataatttccaggtagtagttagttgtgctagtctattaggtgaatgcttttaatcattatacaattttctgttgtgctttactaaggaaagtagtgactcatgagtagctgaacaagactgatctcaatatgctggcgaaaaaatggtgaagttgcccgacttacagctgctctggaggagatgaaaggggagcttgctcatctaaagggagaacatgcttacacagacctgttttgacaagagccgagcagcgatgcttccatttcgaaccacgacctagctaaaggctaatggttccaagtgtcatgtcaaaaaaatcgtgtatgattgcaacaatattggcaaaatatcattgtactttatattttgatataccgtgaacaaaacaagtgtcctctgagaccatcctgatttatgcattttcaaactaaattttacgac

SEQ ID NO: 161037 - DNA, 749 bp, Zea mays
  unsure (1)..(749): unsure at all n locations
  Clone ID: MRT4577_78447C.1
annnnnnnnnnnnnaaaaaaaaaaaaaaaaaaaaaaaaaagcctccccctcatttctccctgcccttgcctcttctcccctgtcgccggcgagagctcgggcggagacgccgcagcacccgcaggagagcttttctccccgggaaacaaggagacctccggagggctcttccttccttccacgagggctgcggctgttggattgtgctgaaagatctcagtttttatctccaaggaaggattactcatcgcgaatccggatctgtcggtggtggaaactggaaagttgccacttttatgaggcgaggctgtgaggaacccgtgtccctcccgtggatgtggtgagccctgattggcgcaccgggcgagaaggggcaggagcccagtagctggtgacagagcagggtgagggggagaaccggagaagagaggtagccggtacacaagacaagcaggcaactataggaaggacgaaggagaaggagaggagggagctctccatggaggagcccctcctcgcctccctctctatggagaacagtaacagccacccctgcacgctcctctccatggaccctgccggctcgcacccggcctccatcgagtcttcaggccggcggtagcgccgcgaccaatggggctggtaatggtgttgaccgggaactcttcgtcactccgcggcgtgagtcggcgcaccctggtccgccggacatcaacctcccgctctctgcagatcactcaccgctgcct

SEQ ID NO: 161038 - DNA, 1084 bp, Zea mays
  Clone ID: MRT4577_78448C.1
attaggacttgggtctctttcttgggcgggacaccaaatccatgtatctttaccgattaaccaatttctcgactctggtgttgatcctaaagagataccacttcctcatgaatttatcttgaatcgcgaccttttggctcaactttatcctagttttgccgaaggagcaaccccttttttcaccttgaattggtccaaatatgcggaatttcttagttttcgcggaggactagatccaataaccggtggtctatggttgagcgatattgcacaccatcatttagctattgctattcttttcctgatcgctggtcatatgtataggaccaattggggtattggtcatggacttaaagatattttggaggctcataagggcccatttacaggacaaggccataaaggtctctatgaaatcctaacaacgtcatggcatgctcaattatctcttaacctagctatgctaggctctacaactattgttgtagctcatcatatgtactctatgcccccctatccatacctagctactgactacggtacacaactttccttgttcacacaccacatgtggattggcggatttctaatagttggtgctgctgcacatgcagccatttttatggtaagagactatgatccaactactcgatacaacgatctattagatcgcgtccttagacaccgcgatgcaatcatatcccaccttaactgggtatgtatatttctgggttttcacagttttggcttgtacattcataatgataccatgagtgctttaggccgtccccaagatatgttttcggataccgccatacaattacaacccatctttgctcaatggatacaaaatatccatgctggcgcgcctggcgtaacagctcctggtgcaacaacaagtaccagcttaacgtggggaggcggcgagttagtagctataggcggcaaagtagctttgttacctattccattaggaaccgcagattttttagtccatcacattcacgcatttaccatccatgtgactgtattaatacttttgaaaggtgttttatttgctcgcagttcccgtctgatacctgat

SEQ ID NO: 161039 - DNA, 375 bp, Zea mays
  Clone ID: MRT4577_78449C.1
gttgcttgggttttattgtgtaatttggtccggttattgtaggcgggctagctcgggcgggggggaggggggtgaaaggggggcgtaacacagggggacagggggaggcggggagaaatagcttgcgggaaacaaggccacaaacatacgaggccggaagaaaaaaggggaaagccaggggggcaaaatgagggagctaaaacaaataaaaaaagtggcggaaaaagaaaaaaaatcaggggggaaatccgttaagacaaatacataaatcaatcggccaacacgcagcgagaggaagccaggaaaaaagacaaaaggggggggccgctagaaaagagggaaacgggaaaaaaggaaaaggcaacaaccgatcga

SEQ ID NO: 161040 - DNA, 316 bp, Zea mays
  unsure (1)..(316): unsure at all n locations
  Clone ID: MRT4577_7844C.1
ctgaccatcaacggacacaggaccatcgtctggcaaggatccctggtgttgatcaagagcgagggccaacattcttacgggggcgagatcctcccgaattgcttggtgctggattttgtgacgaacgtccacatccgctggatcacacttctcaacaaaaagttcttgcacctaaacatcttcgagtgcaagaacatccttatcgacaaaatgactgtcttggtcccgctcgacaggcccaacacagactgcatgcacatcnncnncnccagcaacgtgaccatcatgaactccaccatcggcatgcgctactact

SEQ ID NO: 161041 - DNA, 477 bp, Zea mays
  Clone ID: MRT4577_78451C.1
gctcacagagatatttattttattttttcggggaataaatggcccatcgccacgtggattcttacatagcagcagataagccactgtccacctgagcaaatcagtatttcctaatacaaaaaggttatactaagacaactcctttggacacgacacggtaaaggctacagaccaaaatcaacaacaggaggggttggctgctctattaaaagactactggtgatgcgctctaccgtaaccataattatgtttactgcgacataggtagatagctctataaccatatacagcactggccaactggtaaattcagaacgcgatacagctcctagccataatgcgtatgccacacggtggaatgataaggacttgccgatggaccctaagcacatataaaaccgtcacgtgctggggaagcagatgggtcttctctgctctagcctcccctgggatgactatttctgcaataaatgcaac

SEQ ID NO: 161042 - DNA, 234 bp, Zea mays
  Clone ID: MRT4577_78452C.1
gcacgaggtgtaaagcttgatgccgatcgatatcatcgccatgcacgtgaagtggagcctccccacgccccacatcaagagcagctgagtactcccggttccatcccctagttttcagtcctgccatccgtgtgttaatatgcacacggactgaaacacaggagagatcgagagattcttgaaccagatgagaaagctggtaaaagatgcagtcagagagcaaaagtacatgaa

SEQ ID NO: 161043 - DNA, 401 bp, Zea mays
  Clone ID: MRT4577_78453C.1
agatcaccatagtacttatactgaaagtgaagaggatacaacacaatacaatacaatggtgttaatcagtacaccaccatatacgtatgttcatacggatacaatgatttgctgcagcagcgactcgaaggcgctttggtggatggatatataccaaatataattgcgaattcgtgattttggtgaagctataacatggtcaggcagtgcaggatgtattctccccccttaatttcgacgaaattgcatcgatcagatgctctgcagctcgccgttcccgctgaagatccggttgaggatcgccgccagcctgacgccgccctgagcgatcctcttctcaacaaccggcagcgccgcggagtagtagtcatctcctaaggtggagtcctgcttgacgccct

SEQ ID NO: 161044 - DNA, 191 bp, Zea mays
  Clone ID: MRT4577_78454C.1
aatggtttccttcttttttcactcttcattttaacttttacacatatcacttttaaattcagattccgttcatttgtacacggccttaacctactacaacactatcccaaactcaacatccatctacaccagcaatcactctattcacctataatgacctaatccatctaaatcctctaacatacactcaa

SEQ ID NO: 161045 - DNA, 118 bp, Zea mays
  Clone ID: MRT4577_78455C.1
aaattaattaaagctcggtaccccattatcttaggctaagaaaaccttctctttgaaacttccactactacgccttaactgatcattgctatcttgaagatactcattacaaccctgc

SEQ ID NO: 161046 - DNA, 663 bp, Zea mays
  unsure (1)..(663): unsure at all n locations
  Clone ID: MRT4577_78456C.1
cggacgcgtgggttcaggaagcgttgaataggatcatgctggacaggacaacacttgtggttgcacatcgcctgagtactgtgagaaatgctgattgcatatcagttgttcagcaagggaaaatagttgaacaaggtccccacgatgagctggtaatgaaccctgacggtgcttattctcaactcattcgtctccaagaaagcaaagaagaagaggaacagaaaccagagcggcacgtgtctgattcaaggtctaaaagtagaagcctctcactgaaacggtcgataagcagaggttccatggggaacagtagccagcattctttgaccctccccattggcatgcctggctcagttgaattgctggaaggcaacgatgagaattgggaggaggacgagaaagagcaggctcgtgacggtgaccgtgaggccccaaagaaagctccgatgggacggctagccagcctaaacaagccagaggtaccgatacttgtgttagggtcgctagccgctggagtccatggagtgctcttcccgttgtttggcctgatgatctccaacgccatcaagacgttctacgagccgccgcaccagctgaaaaagacgcgagcttctggngctttgatgtgtgttgtgcttggcatcgtgtcgatactgtcaatac

SEQ ID NO: 161047 - DNA, 1435 bp, Zea mays
  Clone ID: MRT4577_78457C.1
gggtacctcgaggccggccgggaaaaagccgcgcgtctactgctgatggaggctatggatttcaccgtcgctagcgccgacacggggtgccaggaacctccgaatacgctggtggactgggcgctggagatcctctccacagccgatccggacgagaaggcccgcctcggggacctcgccgcgtcgcggtggctgcgcggcgacatcccgctcccctacgacccgtcccgccccgcgcgcccgccgcccgaccgccccgcccggagcgccgaggtgcggctgctcccgccgtcgcggatgccgaagctgggcaagggcggcagcgcgcagagccgtttggccatgctccactcgctggcgcacaccgagagctgggctgtcgacctttcctgggacatcgtcgcccggttcggggcggccatgcggatgccccgcgacttcttcgacgacttcgcgcgcgtcgcgcaagacgaggggaggcactacacggtgctctcagcgcggctgagggagctcgggtcgcattacggcgccctcccggcgcacgacgggctatgggactcggcgatgcgcacctcgcatagccttctcgcgcgcctcgccgtcgagcactgtgtccacgaggctaggggattagatgtccttccaacaaccatatcaagattccgagcaggtggggatgagcaaacagcgagactactagaagatattatttatcctgaagaggtgacacattgctcagctggtgttagatggttcagatacctgtgccttaggtcccacggtaatcacccaacctcatatccagttcctggactggaaccccgttcctctgggctgccgggggatggcactgctgatggtaagacagctagggaggctgaaggtgaacctacacccaaactggcgaaagacgtcaggggtgacgacaagatggtccagcaggtggaagatgaactgccatccaggattgcacaggatgctaatggtcgatctaaggtgaccgaacacgtcgaggacggattatcaaagtgcaaacttgatgacagtattgagaaatacgaagagttggtcattaggactttccacagggtggtaagagagtatttccggggacccctgaagcctcccttcaacacggaggcgaggaaagctgccggctttgagcctgcctggtatgaacccctggcagtgaaggaggcatgcatagagggggagacaattgagtgatgaatttgcactgttgttgtactagtgtctgtgctatgtagcaggctagaaggcatatttgaaaatttgctgcgactagcgttccagtaccattatttgtttagcagatggtgcagcgctgagccttttttctaatcatgtttgtttgtttgcttgccatggagacgcatgaacctaaaagtgtgaaagcctttgttcagctccc

SEQ ID NO: 161048 - DNA, 396 bp, Zea mays
  Clone ID: MRT4577_78458C.1
attgccgggtacgacaccacgcgctccggagagagaggagggaaaatgctgctttctacgccgcccgccgcctcgtttcccgcgccggcgctccgcccaccgcgcgcggggcgctagacacagcggagatgactccacaatgcccacttgctccaagatccattattacactggaaaaaggtcgccccccataaatgggcttcgaacacccagctgtgcaagcgcatacgcgcccacaaacaattgctgcgagcgttttacaacaaccaatcaacttagttgcttcaacaaagcttggcacatctaacaatacaaaccatcgcatcatagcaccaacaacaaatcctaccagcactgagccacctagccatggtgaaccctgacgcctacttgcaa

SEQ ID NO: 161049 - DNA, 206 bp, Zea mays
  Clone ID: MRT4577_78459C.1
gaaaatattatcttttttttgactcattacacagaagactgcagtgtggccggctgagactttgaagacacggaacgcactcaccttatcggactttatttatatctgctcagtaaccatccaatggtatctgatgacatagaaccttctcgatggacaatgtttgtatgaaacaaagggctacaattgcataccgaggcaaacga

SEQ ID NO: 161050 - DNA, 398 bp, Zea mays
  Clone ID: MRT4577_7845C.1
tctatgcgtccgcggacgcgtggggttgttctttttgttttttacagaagaaaaaattgtaccatgtgtatgtattgcatgaataatgattgtgggagcaacacaagaaattttagagcaaaggttcagagctcaagctcaatcgctggtaggactagtggtaggcatgaatgaacgaagaaataaatctagctgatgctgctctacatcatctagatgaactgtagccaccagatctggcgctgaaagttcatgtgcgcgtagaacctggcaatgaactcgtacgccttgacgttcacccaggcgtcctctacggtgtacgctgccaccgaccgaccggacgtgctcgcgcggtatgactactacaccacgcgctatagtaagagttcgccatctcc

SEQ ID NO: 161051 - DNA, 248 bp, Zea mays
  Clone ID: MRT4577_78460C.1
tgctgctgaaggtagtagcagtcatgttcaatcatcatccggttctacgaagaagttggatggacattgtaaagcctgtatcagtaggccaggcacttattccaaaggtgccaaactgcagattgactgactctgctcttccaatatttagaggtccatagattggattccccacagatttcttattactgttgtcagaactgcattttccatctccactagactcaactggccgttctagatcgcga

SEQ ID NO: 161052 - DNA, 339 bp, Zea mays
  Clone ID: MRT4577_78461C.1
caaaccaaaaaccttttttttggacctataccccaaaaaaaaccaaaaggggggcccccccaagggggggtggggggaaaacccccgcggggtttgcaaaaccaggggggtgaaagggcaccaatggtgccagttgaaaaaggggcccagcgttgggcccaccgggctggaaaaacggcaacaccgggggttgtataaaaaagggagcggggcccaccccacctagcgggctaaagggaaaaagtggtccctcctgaaaaaaaccgggaaagtccaaggctcccagtgggttgaaggaaaaaaattgcggggggaaggcaccaggaacccgcctaaagg

SEQ ID NO: 161053 - DNA, 288 bp, Zea mays
  Clone ID: MRT4577_78462C.1
agaggcactcccgcgcggtacgcatcgggggggggggctggacgaggggtccacggcgaaacagtcagggcaggggaaacactagccaacaccctgggaggccgccctcccgcgcccttcccttacaaacacagcaaaagcccgacacccccgccagatcagagagccggcgcgcgctcgctccgcgtccctcaggccccagagaaaagcccaggacccagagccgcgcagaaaacacacttttggtgatgaccctccttcgcgccctcctgtgctacctgctggtga

SEQ ID NO: 161054 - DNA, 243 bp, Zea mays
  Clone ID: MRT4577_78463C.1
acccttgtacaacatatctctcactcctttcttatttcactgaccgaccaaactctgatgccgatgaaaaccaatactgggacgggcatcacaaatccactaaatctcatcatcttttctctccacacactcaactctgtatgatcaaaacctgacctttttccattcactttgactttccatgatcccttcatgtatactacacttccttaccaaatgatcattttcctcaataaaaaacat

SEQ ID NO: 161055 - DNA, 450 bp, Zea mays
  Clone ID: MRT4577_78464C.1
agtggctcggcaagctgatgagcacctatgtacggtgacatgcacactgagtagaatgttatacaggtaaatgcaccaatgactcctaattactacaggagatgtgcagtatgacatctcagggggtatcagtgtctatatataacgggtacaactcctgcgtgtggcgtacagagccataccaaaaggtgcaaacatctaaacacccgctaaatgctgttattcaacctggccttgattagattatgattcatacgactaggctaatgccggacactgctcgttagctccatatataagggtaactgcatcagcctgatgaggccagaccaacttttgctgccagaagctattttaggatttgtaggcaggacagaatgaccgctttgactagtgggtgttgctatacactggtcataaattgcttgataagacggtgcatgaatatat

SEQ ID NO: 161056 - DNA, 1465 bp, Zea mays
  Clone ID: MRT4577_78465C.1
ctcgaagccggccgggctccgatcaaatttcgtcgaggaggtacctcaccatggacggaacgtggtggacaagcggtcttcctgccggccgacgcgtcgaggtcgggttacaagttccaaccagcccaaaccactcccgtcgtcggccgtttccccgtgctccaccacctgacctgtgccggcccatcctccccgcctggcccaagccaacgctgcccttgccgtgccgagtaccagccggatgcccggatccccctcaaagcacgaccgacaaccccacgccgccggcaccgccgcaccaccgaaactaaccctacccaaaccagatcggatccgatccccttctccttcaccaacgctcccctcgcccaattcgcttcgatccgccgggaccgagatggacgacgacgacatcactgccgccctcctcctccccgtcgccgccctcctcctcggcgctccctgtggacggccccgtcaccgtcgccgctgcaccatagccgggcgctgccatggtggtcgcgctcccgatccataggaccgcggcgtccttgtacgccagcgccgccgccgccggcggcgggggcggcgggagggaggacgcctggagcgacggcgccacctccgcgctcatcgacgcctggggtgagcggttcgtcgcgctgggccgcggcagcctccggcaaccgcatcattgtaggagtcgccgacgccgctccgataattcatggggttaattaattggatctctatgccatgggataaaaaaaaaaaacccaggtccgatgtccagtgcaagaaccgcatcgacacgctcaagaagaagtacaaggtcgagagggccaagccggtctccgcctggcagttcttcgaccgtctcgattttctcctcgcgcccacatacggcaacgaccgcgcgcgcgggctccgggagctggcgcatgcgatacggcgcctcggcgaggcgtatgagcgcgtggaggccgcgaagctggagcaggccgccgagatggagcgccagcgcatggacttcgcgcaggagctggagtcgcagcgcgtgcagttcttcctcaaccacgcgtctcctgccacggtcgcgcgccccgccgctggtggctcgtccaggaggacgtctgtggttaccgacgccggcggcagcagcaatcaccatagctgttaccggatcagccatggcgacaggcaccgtcacgctccacgctcccattaccagccagccgcagtaccatgacaacaatcacgcgggggcgggggctgcaagtgagggtgagcagtctagtgaggaggaggatgattacgtagaagagagccattaattgtagccgagattcgccataatttaggccatgtttggtttcaattagtcctagactaaactttagtcttaaggctaaactttagtctctacatgtttgattatatggactaaacagattataaagtcatt

SEQ ID NO: 161057 - DNA, 580 bp, Zea mays
  unsure (1)..(580): unsure at all n locations
  Clone ID: MRT4577_78466C.1
ggtcatgtctctagcacttagataaacatgttagtaacaaaaaacaattgactaagtccaaagacatacctttctttttgatttgcacatcttacttagttagcacatatgaactcaaaacaatgtgttgggcatctaatcaccaaaacaattatagaaatgtcctaagggcacatttccctttcaatctcccccttttggtgattcatgccaacacattaaaaagcaactaaaaagtgcaaattgaagaccaaatttaatcacataggattttggcatatttggattactcttgccaccacttggtttgtttttgcaaattaaattcgttttcctatctctaagtcaaacacacttgtttgggcaaatatagagatattgcaagagtaaaaatgattaagtgtcaaaaactcccctttttcccataatcaaaattctccccataagaggccaagttttacaaatgagaggatttgggacaaaatacaaatttcaactctattatttttgaaattacatgtggttggctgatccagttgctttggccttaatttctncccctttggcattaagcaccaaa

SEQ ID NO: 161058 - DNA, 433 bp, Zea mays
  Clone ID: MRT4577_78467C.1
tggcctggaacctttgggctgatttatgtgcttgtggatgtgcgggtggatgtgcgggtggacgtgcgggtctgtgtgagatcggatctagacggacggttcgcaccccagccgcagaagggggtaaacccgtattgcagcattacggtacggtcacacgtggaatcgccgaccgacgagctgccgcatggcccgctgatccgacgacacgccgacgcgggagttttcgaacgaggtggcaccaacggaaacacaggacggtaacgataactaaaaaaaaaaaaaaaaaagggtggttgtctcagaggacttaagtccatgcatgtgcgtacgtgatgctacagtctcctcacagcgctattcaaacctaacctatcggttgctgccccataatgctgcgatcgggaaaatttcggtgccatttaatccaact

SEQ ID NO: 161059 - DNA, 765 bp, Zea mays
  unsure (1)..(765): unsure at all n locations
  Clone ID: MRT4577_78468C.1
gctgaaattaaccatctagtctagttgttaataaagacggacaagattaaaagatagagggcacataaagacatctgcttgcagatttaattgcaatcatggcatgagagttttccagtggatgtaggtgatccactcttgacactccgcacttgttgtgcatgggccatatgagctaaacggcgcgtgtatgaatttatatttttatacagatagagtttcgtagcaacatgcatgctctatcttttcattttcatctattaatctacacacatatataagttccatcttggaaaaagaaaagaaatttgagattaattttgatgtagatgtgggaaactagtatacacatgcttggtaccggcctgtcaaaattgagcaaaaatagaacatgcgtgatttttaattacttctagaaatcatctgtagtagggataatatcaaatttctaccatcaacacgatactcttaattcatattgattaattaaatatctgttatatatatattacctctagttatactattatatgaaaccgaagaacagagaactacttatcaccacaaatttttttattttatctttaggntatctcctcaaatttattaaaaacaaatatagctctagctagctcacacaagattatgcaggtcatctgcttggaaaaaactaatttaactagatttcttgatgcatgtgctcgaacanaattattttcccacaaactaacacacgcgccggaaataacacatataaataacaaa

SEQ ID NO: 161060 - DNA, 318 bp, Zea mays
  Clone ID: MRT4577_78469C.1
cggacgcgtgggaaaaaaaaacaataaaaaaaaaaaaaaaaaaaaaaaaaaaaaaggtgggaataataaaaaaaagaggaaaaaaactgaaaagcaatcttaaactacaaccaggataaactaagccatggcgccctttctttcttcctgcctttgcacgtcgttctctctatacgctttcttctgcactggtgctataaacctaaataatggggccagtatcttcaaatccagtcacgctaaatcccattgcgttactaactttactaggggagtgcgcgctctcaatttccgtaacgccgacttcatcatatgcaa

SEQ ID NO: 161061 - DNA, 403 bp, Zea mays
  Clone ID: MRT4577_7846C.1
cctatctcgccgtaccccggagccccaccggaagcgcctcaccgccaagaacgcgccagcagcgcgggcctcccaagcaccgacacccccgccgtcctcgacgacgcccagaaagaaggcggcggcccagcaggcttcagcttactccgcggcttatccgacgaagcctacggagcagcagctgctgacgaccgatgttcggcggaggggcctgtgatacacgccgcgttgcccaacgatcgcaccggaggaccggagcgttagttgatacagcccccataccgcgtgggcagggctcttagaacgactcatgtcacactcgtaaggcagctggagatgaaactcagcgcccctgatgtggtaattggtcctacaaggaggattgtcaggccacccaagaagg

SEQ ID NO: 161062 - DNA, 463 bp, Zea mays
  Clone ID: MRT4577_78470C.1
gttactgaagcgcgagtgatcacggacagggacactgggaagtcaagaggatttggctttgttaactacaccagcagtgatgctgccaatgcagctatatctggaatggatggcaaggaaattgatgggcggccggtacgtgtcaacattgctaacgacagacctgcagggaaccgcggtggaggtggctatggcggtggtggtttcggaggtggtggctatggtggtggcaaccaaagctatggtggtggctattaagctcattaacagtcaagatatttgaaataatgaactttaggacctggcatggggcttatgtgaagcctttcatattttgatatttgtgttatgttgaactgttggaactcctagattcatagactgtgccgcagagtattacctattggttttggttgcttcgttaagtgcaaatgcaagtcgcatgtatttctgttgagtggat

SEQ ID NO: 161063 - DNA, 685 bp, Zea mays
  Clone ID: MRT4577_78471C.1
agctgaatcccacagcatgaatcttctgtcagcattagaaaactgaacaaaacctgaagattcaattgtctaacaaacctaaccgaacgaaacccagtagtgcagcggctcatgtgaaatgaaattgggggcgatctctaagaattcacctgactggtttctaatactcggttcatactagttcaccgcagcgagtggtgtgaggccttattgcatttgtaattgtagggatgtcccttctctgagcaatctgaacatgctccccgtttgtctgtgctgcaaattgcaatgtatcatccagcctcgctccaaaaaagaaaaagaaaaaacgtacgtctgagaacaatgcctgatatcgatgagatttgggggagaacatgacatgattccacctggcgagtggtgagtcccgatataagtatataaggatcgatgtgttatgatgatggcggcgcaggagaatatggtggcaccggagactgaagatgaaaatggcggcgtcacgaactgaacaccagcgagctgaggaagaaggtagggtgcgaagagtgtttgggttgaagtaatggccggttagcaggccgtgtaattgtggtacatgggccacgtcatataattattgaactatgttgttaaccggtaacgatgaaaatagaaccttccctcgcgaataaaaaaaaaaaaa

SEQ ID NO: 161064 - DNA, 334 bp, Zea mays
  Clone ID: MRT4577_78472C.1
atgcgggaaatataaagtgctgtgtgaacatattagattgagaaccaggcctagtagaaaagttaagaggaactgaatgagtagcatgtagttcattagctcagaaggtgtttttgggagttcagtactatccataaaacatgggagatgaatcgaatgaaatggtgtatgcctgagggttgctcatacgagcattatgatgcatgagacgcctacgacaggttcgtttgttatgatcaaactccgtttaaccatgaaaactacaaacagagaaggtttaaagaaatgagggaaatgggggcgaaattatgtgaacgaacagataaaaaggtaa

SEQ ID NO: 161065 - DNA, 438 bp, Zea mays
  Clone ID: MRT4577_78473C.1
gatctgcccagccgtccacccaaccactcctctcctccccggtcctcctccccttcctcggcagatccgccgccgcccgttcccatgggccagtgcgtctccgccccgcgccaccgcaagcccccgcccctgcctctgtcgcccgcgctgtcctttcggccgcagatcctctcttccatcgccgacgccgtcggggaggatcacaccgccgacctccctgaggagctcctcgccctcgtcttcggtcttctcggctccggcgaccgcaagcgatgttccctcgtgtgccgccgctggccggtcgtagaggccgcctcccgcttccgcctcgcgttttttttcaggccatccccgctcgccgaatccgccctcccccgcctcctcgcgcgcttccccgccgactccaagctcgcgctcaagtgcgaccgtcgcgccgag

SEQ ID NO: 161066 - DNA, 732 bp, Zea mays
  unsure (1)..(732): unsure at all n locations
  Clone ID: MRT4577_78474C.1
cctcgaggccggccgggccttcgtttgcttttgacttggggtagttggcttttctctcccccctcgccttcctccaggctttggggatttggttgcttcctgtcggggtttgagaggagcggcgctcttgaattgttgctttcaattggtccgtttggcagggtttggcaatagaaagatttgttgccggagatgggcaagccgtcgctgaagaagaagagggcctccggcggcggcaagtccggcgaccacgggggcaagccggcgtcactggagcggtctggttccaaggtcctcgacggcgatgagaccctcttcacggacatggcgcaggagcacaaggaagagggcaataagctcttccagcgccgggactacgaccgcgcgctgctcaactacgacaaggccataaagcttctgccccgggcgcaccccgacgtcgcctacctccacagcaacatcgccgcctgctacatgcagatgagcccgcccgactactaccgagccatcaacgagtgcaacatcgcgctcgaagcgtcgcccaagtacaccaaggcgctgctcaagcgggcgcgctgcttcgaggctctgggcaggctcgacctcgcgtgcagggacgtcaacaaggtgctcgctctggagcccaacaaccttactgcgctggatgtatccgacaggatcaagaagactatggaggagaaggggatcgttctggacgacnaggagatcatg

SEQ ID NO: 161067 - DNA, 473 bp, Zea mays
  Clone ID: MRT4577_78475C.1
ggggcaagggtacctatttttttttaaaaaaaaattaattgtttaaagggtgggaaaaaaaccacaaacacaagtcttttttaagattaaacaaatttcttttttaccccaagcaaaaaaacaaattgccccaaaaaatcgaaaagaacaccttttcctaaaaaaagcaagcaagaggcccaaaatttgtttgacaacacgggcgggggaagattggagcaaaatccccccccccaatgcaggaggaactaaaaccaccaccaccaccggggggatgacctatagttaggggccccacggacgggggttgaaaaaaatgcaccccggggggggcgcccctaccccccggggggggggtccttggggcgggggcccaagtatcccccgaactcccccccgtaatccttgacgggggtgggggggtcggaaaaccggttgggcgcgtaatccacccgggcgggccccaagggggg

SEQ ID NO: 161068 - DNA, 230 bp, Zea mays
  Clone ID: MRT4577_78476C.1
aataagagccaaccacagaaaccatataatctctttccgccgccaaccgagagaacaagggaacccatggagtcctttatgcaatccttctcccacctaccacctccaccgtaggagctagatggagatgaagaggatcctttttgccgttcctcttcgtcatcgccgcctcggccaccgcagtgctggcctctaccgaagcctccgcctatggctccccaactgtcttc

SEQ ID NO: 161069 - DNA, 509 bp, Zea mays
  Clone ID: MRT4577_78477C.1
atgacttaatttaagggcacgagaatcttaattatacaatagtttttgcccataatattcgggttaattatataatagcctccgtttccgtaaaaaaaggccattctagctaccataactgccattttttcggggggggggagaatttccttctaaatttcgacgtcagtataaacttcaaacttcaaagcttggaggtacccatggacacggcctgctttacaagctcccgccgcaagatcttcccagcaggcgatttggggattgcagaaacaaaggccactcgacgaacttttttgtagggtgcgacctgtttagccacgaaatccatgacttgttgctcggtaaggtttgaccctggtttcctcactataaaagccattgggagttgcccggcgtcttcgtctggataaggaataactgctgcgtccatgatatcaggatgagaattcaggatatgctccagttcggcaggaggcacttgatatcccttgtactttatcaacctt

SEQ ID NO: 161070 - DNA, 637 bp, Zea mays
  Clone ID: MRT4577_78478C.1
gtgcggcgctcgagccggccgttcgagtgtccgacacccggccggccgggccggaccacgctgtgagtgactcggtcgcatcttccccattctccatcgacgcaccggcggcggcgcaagtgaagcgaagaggaaaggaagctacgagatgtcggcgaccactgcagcggtgcccttctggcgggcggcggggatgacctacatcggctactccaacatctgcgctgcgctggtccggaactgcctcaaggagcccttcaagtctgaggccgcgtcccgcgagaaggttcatttctccatctccaagtggacggatggcaagcaggagaagccaactgtccgcacagaatcggatgactaagggctggcgcgccatggcgacatagtccttcctacagatgatttgaagcgtcgttgcaagtttctgagacttgttatttagttggcttgatttgtaatcaatgctgaagaataaatactttttgcgacaatggtctttttacaatgtcgtgttgttttcgttgctaattgcacttgcccttcccaaatcaagcatgtgaactaatggaatgcttcagttttgtgcaaaaaaaaaaaaaaaaaaaaaaaaaggggcggcaaaaaaaaaaaagcggcc

SEQ ID NO: 161071 - DNA, 457 bp, Zea mays
  Clone ID: MRT4577_78479C.1
aacctcttcgctgaacctttgggctgtcttatgtgcttggctctgccgatttgctgcttcttcagtcttgcgatctgttagctgttacgggtaagaccaagactggaactaatggtcctggaaggactggtaggtctgcggttagggctgtttcttagagtgaggacgctgagtctgctgttgctaatgattttcctactattatggatcatacgattcatacgcctaagcatgatattgcttatggttatcggaagtatagtgatactatatctaaggatcttaagatttcctctcctggcgataagttggctattgctcccggtactaggaatttcgaggaaactttgcggggcgaggtcggtgtcgagcacgctgcggagcatactggtgctcctatcgataaggataaggtcgtcgtatactctaagggcggcgttaaagagggccgcactct

SEQ ID NO: 161072 - DNA, 266 bp, Zea mays
  Clone ID: MRT4577_7847C.1
ggatgggaaatttttcccgctttgagctcattgcatgtggctatgtttcagtttggaacaacaatattatttgagactgaaacacaaccgtttagagcatggaacctaggtcctgaactatgatttgtgacaccaaattgaacacatgcttttccaaaagctttcttcaaaaaagcgagccacattcgatataggaagttatttattctacaattgcgcgcacgatgcccaccaaaaaaaattgtccctaagtggggcttttttaa

SEQ ID NO: 161073 - DNA, 1149 bp, Zea mays
  Clone ID: MRT4577_78480C.1
gtcttggagggggtgacccttggagaggggccagatcagcatgtgtggaagtttactcaatccgattgctacactagctaatcagcctactctgctttctttgaggggtctgtcaagttcagaccttggagattaatttggaagagttgggctcctctccgctgcaagttctttctttggcttgccaggaacaaccgatgttggactatggatcggcttgccaaacgaggcctttctcacccagattcatgtcccttgtgtgaccaagccggtgagacccttcagcacattctaattggctatatcttctctagacaaatctgggccttgattttgcaatccttgcatctagaggccattacgcccaatgggggcagagttgggcagagttgggtttcttctcatggtggacgcgctctgtcaagatggttcccaagaacattcgaaaagggtggaacactctttttattctgatagcctgggaaatttggaaatttaggaacttgtgtgtgtttgaaggctcccagccaaatgtggaactcctacataggataggaagtgagggtcttctttggtgtgctgcaggagctgcaaggttgcttgagctcctgaataggtcgttatccccagcctcctaggtgctggtggccctggtcgtcggtttttgttgttcttttgtgtaaaacctagctgtctgtacttgggttgggtcattttgaccttgttgtctttttttaaatgaaatgacatgcagctctccccggtcgttcgagaaaaaaaagatggcatgaacatgtccaattcatagaacattgaacaactaagttatttttgtgtttaagttttctttacattaacctttttttcctccaaacaccccgattctattttgttacactcaggatgttggggggtgttaacacacggcgactctgaattggccatgctaaggaaaacgatagtgcgatgtgaagtatatgtattttctgaaagccagatcgtttgggtctagccctgatgtatgcagaacaagtgattattgtaatggatcctgattatcctcatcatccaaaaaaaaacaaaaaaagagcaaacaaaagtggaggggggcgcccctctcgacgaaaaaaaaaaacctacccaaggggc

SEQ ID NO: 161074 - DNA, 821 bp, Zea mays
  unsure (1)..(821): unsure at all n locations
  Clone ID: MRT4577_78481C.1
cattgggtacctcgaggccggccggtatccagagagacggagcagagcaggcgaagcaagcgaaagccacaaccaccgcaaaagcgaaaggcggaggagcacaaggagatgagacgataccactagactaaagcaaagccgtgggcattagagagatacacagagagaaggcgcgtggggcggccggatggcgatgcacttcggcgagatcacgacggccttcccaggcggcggcggcattgccggggcgtccacggccaggacaacgccggcggcgagcccgtaccaggcggctgttgaaattgaagagcaaatttattccccagcatttggcaacattgaggtccaggatagtcgtggttgctgcagtggtttcacaggcagtgtaacgaagttgctgttcatctttcatctgcttgctttcattgccctcacagcattcctaggcgtccaggcctcttaccaccagaaccctgcctacaagcccttctccaacttcatccctctggtatcctctgtcatagtatccacaattgctgcatgcttctgggttatccttgctgtcacaaacccgccaaaagccatcaagacctctctctgggctgcccctgtttctgcacttgcttgtgatgtagtcatacttcttgttggcaatactgctgcacttggcattggagcgcttgtagttgtattcgcaattgcagcaggattatacagttgttgggccactggcccacgtctcaagcatgcctctgatatgctttccgtttctgtcatcggtgcacatttaccgcctgctacttcatgccttgntgtctatg

SEQ ID NO: 161075 - DNA, 1595 bp, Zea mays
  Clone ID: MRT4577_78482C.1
ccggccgggaaaaaaaaaaatccgacacccggtcgcgcgggccgcgggacgctgtgagtgactcggtcgcatcttccccattctccatcgacgcaccggcggcggcgcaagtgaagcgaagaggaaaggaagctacgagatgtcggcgaccactgcagcggtgcccttctggcgggcggcggggatgacctacatcggctactccaacatctgcgctgcgctggtccggaactgcctcaaggagcccttcaagtctgaggccgcgtcccgcgagaaggttcatttctccatttccaagtggacggatggcaagcaggagaagccaactgtccgcacagaatcggatgactaagggctggcgccatggcgacatagtccttcctacagatgatttgaagcgtcgttgcaagtttctgggacttgttatttagttggcttgatttgtaatcaatgctgaagaataaatactttttgcgacaatggtctttttacaatgtcgtgttgttttcgttgctaattgcacttgccctaccctaatcaagcatgtgaactaatggaatgcttcagttttgtgcagtttggtatattgtgctgtgcggcagattctgcctagtcctctacactaacggatgcgctgcgctggtacggaactgcctcaaggagcccttcaagtccgaggccgcgtcccgcgagaaggtccatttctccatctccaagtggacggatggcaaacaggagaagcccactgtccgcacagaatccgatgaataaagctctggtgccatagtggcatagtccttgctacagatgatttgaagtgttgttgcaagtttccggaacatgctatttagctggcttgattttatagtcaatgctgaataataaatactttttacgacaattgtctttttcgttgctaattgcactcgccctacctgaatcagtcatgtgaacatcatggaatgcttcagttttgtacaaactaaaggttacctcgtggccggccggaaaaaaaaaaaaaatatagatcttggcgccgaggtagggcgagtgaggtagcttcttcgccattcccattcggccattctccaccgtccaaccaaccaccggcggcggcacaagggaagcgaagaggaatcaacgcgatgtctgcgaccacggcggcggtgcccttctggcgggcggccgggatgacctacatcggctactccaacatctgcgctgcgctggtacggaactgcctcaaggagcccttcaagtccgaggccgcgtcccgcgagaaggtccatttctccatctccaagtgggcggacggcaagcaggagaaacccactgtccgcacagaatccgatgaataaagctctggtgccatagtggcatagtccttgctacagatgatttgaagtgttgttgcaagtttccggaacatgctatttagctggcttgattttatagtcaatgctgaataataaatactttttacgacaattgtctttttcgttgctaattgcactcgccctacctgaatcagtcatgtgaacatcatggaatgcttcagttttgtacaaactaaaaaaaaaaaaaaaaaagcggcc

SEQ ID NO: 161076 - DNA, 428 bp, Zea mays
  Clone ID: MRT4577_78483C.1
acgcaaggaacacagaactccgttgtgtttgggctattatcaggaattacagggggcagtggataaaatgggtaaaaggattctatctagtaagagcaccgccccaccaagggggctcatgctcagccagcgagggcgctgacaccggcgaccgtctcggggatctccccggtttatcttggactggcgctggcggttatgggttatggataggttcttcggatgcttgatggccttaggcctggcgctactcatggatcatatccatacggtgagctttgtgtgaaatcgctactcgatgacaatgtgaaactgcctgctagcgtaaagcaataaacagcaaatgctggatctgcatgatgagcctgcttaacactacactacttggcgataagggtctatggcccgcttcttcaccttgtaaacct

SEQ ID NO: 161077 - DNA, 514 bp, Zea mays
  Clone ID: MRT4577_78484C.1
gaaacatatctccgagcccccgcgcgatagttaatatagataaattctaacacgacgacgtcatccaagggctacgtagctgctttatgagctccacggagccggcacaactggaatctttctgcatcctcctcctgaacagtctccttcgcggactactggctggacgatggtctgtgcccgcgtcttgcgtagccactacggcaatgctgtagacatctacatacccgcacaaccgcctgactggggatgcgcgggggctcgagatcgtgatggacaattacgacgacgacgcccgcaatgtcattgccaaggtttgacggcatgacgtccgatggtggtgcgctcatgggggagactgccaaatactgacccactgctgaaaagattcatagggggaagattgcagaagaaaatccagagccaaggggtcggctgcagaagccatcagaccaagacagaggcatcgagaagatcatctggatagagactatataatgtgaagacacagcag

SEQ ID NO: 161078 - DNA, 1526 bp, Zea mays
  Clone ID: MRT4577_78485C.1
ggggcgcgagggttaccacaatccacagggatcaaccggacgccgcgggtgaccaacccacccgcgcttaaccccgtcagatccccagatccccctcccagctagccatgggcgcgctccgctccgggcggaagaactccgcccgcattgccactgttagtgccatggccaccgcctgccggagcccgctcgtctggctcttcgcgctcgccgccgcgctattcttcctctcctggtacctcctcctcaactccgccgcgggcccaaccgccgcccgccgccccaaccaggggctccgcctcggcggcgccggtaggaaatgcgaccccgcggaggcgctgctgcgagtgttcatgtacgacctgccccccgagttccacttcggactgctcgactggaagcccccgggcttcggcggcggcgtgtggcccgacgtcagggacggcgtgccggactacccgggggggctcaaccttcagcacagcatcgagtactggctcaccctcgacctcttggcctccgagcagggcgcgcccacgccctgcgcagcggcgcgggtgcgccacgcggcggacgccgacgtcgtcttcgtgcctttcttcgcctcgctcagcttcaaccgccactcccgggtggtgccgcccgcgcggaacagcgaggaccgcgcgctgcaacggaggctcctcgagttcctcgccgcgcggcctgagtggcgcaggaccggcgggcgggaccacgtcgtgctcgcgcatcaccccaacggtatgctcgacgcgcgctacaggttctggccctgcgtcttcgtgctctgcgacttcgggaggtacccgcccagcgtcgccaacctcgacaaggacatcatcgcgccctatcggcacctcgtcgccaacttcgctaatgacaccgccggatacgacgaccggccgacgctgctctacttccaaggcgccatctacaggaaggatggtggttccattcggcaagaactgtattaccttctgaaagacgagaaagatgtgcatttctcatttggaagtgtagctggtaatgggatcgagcaggcaacacaaggtatgcggtcatccaagttctgcctcaacattgcaggtgacactccatcctccaaccgcctcttcgactccattgtcagtcactgtgttcccgtcatcatcagcgatgagattgagctcccgtttgaggatgtcctcgactattcaaagttcagcgtcatagtacgtggcgcagatgcagtcaagaaggggtttctaatgagcctgatcaaagggatcagccaagaagagtggacacacatgtggaacaagctaaaggaagtagaaaagcacttcaagtaccaatacccatctcagactgatgatgccgtgcagatgatatggaaggctattgctcggaaggtgccctctatccgtctgaagattaacagactacggagattttctcggtttgatactaataggacagatgaaactctacccagtccttcttggctacagaatcaggcttcttga

SEQ ID NO: 161079 - DNA, 1170 bp, Zea mays
  Clone ID: MRT4577_78486C.1
aaattcgaactttcgtcgaaatcgtctctattcatatgtatgaaatacatatatgaaatacgtatgtggagttccgtagaatttcatgtgattcagtaaacagaatatggattccatgattgctagattgatccgtagggattgatgaagagtgagctgataatggaatttttcttctataaataggaaacttaagattcaaatgctccggaatggaaatgagggaatgtccacaatacccggatttagtcagatccaattcgagggattttgtagattcattaatcaaggcttggcggaagaacttgagaagtttcccacaattaaagatccagatcacgaaattgcatttcaattatttgcgaaaggatatcaattgctagaaccctcgataaaagaaaggaatgctgtgtatgaatcactcacctattcttccgaattatatgtatccgcgagattaatttttggtttcgatgtgcaaaaggaaaccatttctattggaaacattcctataatgaattccttaggaacctttataataaatggaatataccgaattgtgatcaatcaaatattgctaagtcctggtatttactaccgctcggaattagaccataagggaatttctatatataccgggactataatatcagattggggaggaaggtcggaattagcaattgataaaaaagaaaggatatgggctcgcgtgagtagaaaacaaaagatatctattttagttctatcatcagctatgggttcgaatctaagagaaattttagataatgtttcctaccccgaaattttcttgtctttcccgaatgctaaggagaagaagaggattgagtcaaaagaaaaagctattttggagttttatcaacaatttgcttgtgtaggtggggacctggtattttcggagtccttatgcgaggaattacaaaagaaattttttcaacaaaaatgtgaattaggaagagttggtcgacgaaatatgaatcggagactgaatcttgatatccctcagaacaatacattcttgttaccacgagatgtattggccgctacggatcatttgattggaatgaaatttggaacgggtatacttgacgatgacgatatgaatcacttgaaaaataaacgattgtcggtttataacacatcagtgaactg

SEQ ID NO: 161080 - DNA, 716 bp, Zea mays
  Clone ID: MRT4577_78487C.1
ccggccgggatccgacctcctcgatcgggacgcgagcgtcaccacagtccacagcgatcaaccggacgccgcgggtgaccaacccacccgcgcttacccccgtcagatccccagatccccctcccagctagccatggccgcgctccgctctggtcgccgcccgcactgccactgctagccatggccgccgccgccgcctgccggagcccgctggtctggctcttcgcgctcgtcaccgcactcttcttcttctcctggtacctcctcctcgactccgccgcgggcccagccggcgcccgccgccccaaccagtggctccgcctcggcggcggcgggcggcgctccggtcccggtaggaaatgcgaccccgcggaggcgctgctgcgagtgttcatgtacgacctgccccccgagttccacttcggactgctcgactggaagccccccggcttcggcggcggcgtgtggcccgacatcagggacggcgtgccggactacccggggggcctcaacctgcagcacagcatcgagtattggctcaccctcgacctcctggcctccgagcagggcgcgcccacgccctgcgcagtggcgcgggtgcgccacgcggcggacgccgacgtcgtcttcgtgcccttcttcgcctcgctcagcttcaaccgccactcccggggtggtaccgcccgcgcgggacagcgaggaccgcgcgctgcagc

SEQ ID NO: 161081 - DNA, 750 bp, Zea mays
  unsure (1)..(750): unsure at all n locations
  Clone ID: MRT4577_78488C.1
aaattaaaagctctgaattgaatctatcctacattggtgcaaaagaaagggtacgatagacgaccaaattccaaaggttgcttccaattcgaaagtggcagatgtgtcacctccgtatagaccagcggcccgtacgatgaacccagtaatcagattaagaagatatgaagaagaaagctgatatcataaacgtatggtgaacccactcttcaaggtaaggatggaacccgccatcttgtaccaatatgagcttctgctcttggatatatagaagatcaagaaacaaggcatgcaaaacaaaaactctgggaaaacgccaaaaaaggaacacaatgtggcataatcagacataactcgcaagcccctgcccgaacccggcactactttcccttttagcgcttccacttctattcactcaaaccggtactatgaaatattctgattcgtcaagaaggccacaaagtcatgattgagggacgtttgttctttggacatgatggacatgactgcataatcctttgatatcatctttaataactcgtcgtttgcgaaaggaagtaaggttccggcctctgtttaattccttgatgaggagcccgtcgtcccggctcgattgatcaacggctctcgcggacgagtatcacggccacgagactgttcgagcggtgcagtgttctctcgacgtaacgatcggattgacanaggaggaacaggaggagcatggctaggcgattgntgagttcctgcaat

SEQ ID NO: 161082 - DNA, 303 bp, Zea mays
  Clone ID: MRT4577_78489C.1
atatgttaacattttattctccatgctgtacttgttacaaaaaaggcctcactgaccagcacggtgactgcggaaattacgaagattctgttgaaagggggggggggggggaagaagaaaactatctatgtatgccggtcgctagcaggctgcatctcaccatttcataaggatgaggacgtttatcctgcaggtgctggagtgaagcaccagcggcggcacagcaaggagatgtggagatctattatgaatgcacctaatgccaacatcgaggggcgcttacttatgtattaatttgctagt

SEQ ID NO: 161083 - DNA, 320 bp, Zea mays
  unsure (1)..(320): unsure at all n locations
  Clone ID: MRT4577_7848C.1
ggttcgggggtcgtgcttnnccntgntcggggcncccgtttctttcgggggggcggcggtttcccgggtgttggccgggcgnttntttcgtngctggngttcttgtctttttttccctggggggggtggggggcctggtcgttgggggtgtncttgccgcgctgcgcccgggggttggccttggcgcgcngtccctgcgcgtcctgcgccgccttggccttgtccggctggccgcccccggtcttggggccggggttctgctgcgcccgcgcgttggggttgggcncgtgccccgggttgggcccctggttcttggcgtt

SEQ ID NO: 161084 - DNA, 583 bp, Zea mays
  unsure (1)..(583): unsure at all n locations
  Clone ID: MRT4577_78490C.1
cattgggtacctcgaggccggccgggatggaatcggccggtctcctccctccaccgcacctgcagtcagcagcagcctcctctccacccaccaagggcaccaacccaccaccaccactcactcaaccacctctcgtctctctccagcgcgagctagctgctagtgctagttcgctcgtcggccaagatccaagacagcagcagggcttgtaatgccggggagcgtgccgctgggtctgtgcctggacacggcgggggtgcaggtgccgtggtacttcaggtgccccatctccctggagctgatgcgcgaccccgtgacggtgtcgacggggcagacctacgaccgcgccagcatcgagtcctgggtagccacgggcaacaccacctgccccgtgacccgcacggcgctcgccgacttcacgctcatccccaaccacaccctccgccggntgatccaggagtggtgcgtggcgcaccggtccatgggcgtggagcgcatccccacaccgaagcagcccgccgacccggaactggtgcggtccctcgtggcgcagggcccgggggtccccccgctgcggaggctc

SEQ ID NO: 161085 - DNA, 349 bp, Zea mays
  Clone ID: MRT4577_78491C.1
atactttctagatcatgatgaatggttcgtaaacaaatgcagaaagtccaaaactccaattaccagtgccgggaataataatattgctcattgaaccgaaaagacctgggataaaaacaataggagtttttccttttctcatattcgtatctcctttaactgtttagtatcaataaaaataagaaatacatttcgtatgaaaacatatttaaatgaaacactacgaaatagtaaggaatatgattggaaggaaaccaaaatgattaaaaaaatattaagagttacttctattattattgctattttcgtttttattgtaatttgtatgcatatcgatgtacaactcttg

SEQ ID NO: 161086 - DNA, 162 bp, Zea mays
  unsure (1)..(162): unsure at all n locations
  Clone ID: MRT4577_78492C.1
aggaagagccngngaagaaagaggcngacaacanngncgcagcaaggaagcagngaagnanancagcaggccgancgaggccannnngncgaagnannanagccgnagcncnnnnangnaccnngncaggcaggcgggccncncgagacgnnnccggcaccg

SEQ ID NO: 161087 - DNA, 417 bp, Zea mays
  Clone ID: MRT4577_78493C.1
cggacgcgtgggcggacgcgtgggaaatttctagaagccagcgttaatggtttgttcatagggttctttcaaacttttgctcactgaccttggcaagttccagcccatagtgatgccttgtacctgcttgcattcagaggagtatttcatgcccatagtgatgtctttgtccctgcccgagttgtggggtgtccatggggccagagaccactttaaaaaattagaaaaggacctaagcgtgggttcccctttaccggggggaatcttaaatcaaattaaggtattttggggggtaaagggagaattatttttactggtcatattaaccaattccttccttggatgggttacacttattctttcaacaccatttttgaactggtctttcttctaacatggggtgggatattgggggta

SEQ ID NO: 161088 - DNA, 285 bp, Zea mays
  Clone ID: MRT4577_78494C.1
gccgttgcaaacggaggagacaagaagtaggagtccccaagaacgacttctagtaagacgtatcgtccgccggaacatcacgctgagtgtcacctgaacatagcctagccaccggactaccgattgcatgtggccagagctggcacccctgcgcaccctgcctcgcgagctacggcgaccaactacggctggagccagccggcatggcacctcgcggctccagtgattccgtctaactgttagaggcgtggtcgcgacgagcacctctacagacacaggaggacg

SEQ ID NO: 161089 - DNA, 517 bp, Zea mays
  unsure (1)..(517): unsure at all n locations
  Clone ID: MRT4577_78495C.1
gggtttgacccatcgcgtccggntcttgatnaatctattttgataatgggctctgatagtattcttnctggccatctgtttcataggtatgtatctctgacaatagtatacttcagaagcggtattattcatgtgtgaattgcgaacaacatttactggatatgattggtaccccattccacatccatatttgcatagggtgctatcgtggatgttcacatgcattcccttggttcaatcttatatgctgaactgcggagattggtcatgcttgatatgatacttggaaccgcttgcagtcatgctattcgaattcctacttgttaggcttgcccaaacttttacaactaccaagctgcagcacctttttcttctaaataattatgacatggccatctctgtcctgaaggaaactggcgatgaagccaaaaaactgcaaaaatattttgaagagaagttagaaagtaacatgatggcctttgtggatgatttgctgatgaacatttaagtgacttac

SEQ ID NO: 161090 - DNA, 412 bp, Zea mays
  unsure (1)..(412): unsure at all n locations
  Clone ID: MRT4577_78496C.1
ggaatcctcttgttctctttcgtagggaaagtgttaacatgcaaccgattaatgacacatttctaaagaatttaatcactagcgaatccataccntantcttatcccttctagtgcatctcctccatgtctctagggccatactctatcatgcttaaatggctcctgacttattatttttggtaggtatggaaggcagactctaccaaactacttcttcacgctttattttgacacaaatcaatcaacctcacctcagatacctcgattttcacccctattcccacattcatcacacactctctgcactttggatagaacgaacttcgttccttctattcgctgcactgattcatgtatactccttaataacacatatcttttttactaacccattcctcgcccactccttt

SEQ ID NO: 161091 - DNA, 1470 bp, Zea mays
  Clone ID: MRT4577_78497C.1
ttcagctacaaattgtctcgtgggctacgggctacattccatctagccagcccaatccacatcaccagcccacctcgtcgaactcgtcgtcttccgtccatccatcgtcgtcggcggcggcggagagagagcagatgacgtcctcggggacggtcgcgcagcagctgccgcggacggaggcgcggtcgctgtcgggtcacgagggagcggtgttggccgtgcggttcaaccgggacggcaattactgcctgagttgcggcaaggaccgcactctccgcctctggaatcctcacacaggcgcccaggtcaagacctacaagtcccacgcccgcgaggtccgcgatgtgcactcttcctcggataacgccaaactggtgtcctgcggtgccgacagacaaatcttctattgggacgttgcctcgggccgcgtcatccgcaagttccgcggccacaacagcgaggtcaattcagtgaagtttaatgagtacaatgctgttgtagtctcagctggttatgaccgtacggtgcgtgcatttgactgcaggtctcaaaacaacgaccctattcagacaattgatacttttcaagatagtgtaatgtcagttaacctaacaaagacagaaataattgctggcagtgttgatggtactgtccgggcatttgacattcgcatgggtagggagactgttgataatctagggcatcctgtgaactgtgtatcattatcaaatgacaacaattgccttttagctaactgtttagattctactgtgcggcttctagacaagtcatctggagaactgttacaggagtataagggacatacgtgcaagtccttcaagatggattcctgtctgacgaatgatgatgcatttgttgttggcgggtctgaggatggttatattttcttctgggagttggtggatgcacctgttgttgcaagattcagggcacatagttctgtggtaactagcatcagttaccacccaacaaaggcctgcatgttgacgtcttctgtggatggctctattcgtgtttggacctgaagactcttgaatggttgatgtgctattcgtactgttcctccaaatcatccagttatctagcagcaaggattcgacagtatgaaagatgaacgcatgtctaacctaatgggattcatacacgccttgctgcagagagaagaaaatgcgctgctgttgggctgtgtagcacacagctctgaggccaaaaccttttgaagccggtattctgtcatctatgaagtttgtgagccttttagatgattttggattgtacctgaagacaacttgtgagttgcatgaaaagtaacatttgttacgaagtttcttactgcaagtgtcttgtctccatgttactgaagacaacttatgggggttgagaaatgtatcttctagttcctttttttttgttttgatttggaatggaatgactaatgagttcattgtc

SEQ ID NO: 161092 - DNA, 139 bp, Zea mays
  Clone ID: MRT4577_78498C.1
cagcctctgccagccacctccccgtcgctctcacgctctttgtgcccggcggggggggtcttccgctccagctgactccttccgtctgacgcacatggccttcatcgccagatcttgcggtctattcttcgccatgcct

SEQ ID NO: 161093 - DNA, 1272 bp, Zea mays
  unsure (1)..(1272): unsure at all n locations
  Clone ID: MRT4577_78499C.1
tcttagtggaatcacttggttacaatttgctttctgtaagtcaattatgccatatgggtcataattgcttatttacaaacattgatgtatatgtctttagaagaagtgatcgttcattagcttttagaggtgtattagacggtaagctctaattggttgattttctaaagagaatgctgatctagatgcatgtctaattgctaagattaacttgtgctggctctagcaccgccatctagcacatgttggaatgaagaatcttcataagcttctaaaggaagaacatgtgttaggactaacaaatgtttgtttttgaaagaaagaccttgtgccgcgtgtcaggcaggaaaataggtgggaacaaatcatccaagcaagaacgtgatgataacatcaagaccactagaacttcttcatatggatatcttcggacccgttgcttaccttagcatcggggaaagagcggtattcagctacaaattgtctcgtgggctacgggctacattccatctagtcagcccaatccacatcaccagcccacctcgtcgaactcgtcgtcttccgtccatccatcgtcgtcgtcggcggcggagagagagcagatgacgtcctcggggacggtcgcgcagcagctgccgcggacggaggcgcggtcgctgtcgggtcacgagggagcggtgttggccgtgcggttcaaccgggacggcaattactgcctgagttgcggcaaggaccgcactctccgcctctggaatcctcacacaggcgcccaggtcaagacctacaagtcccacgcccgcgaggtccgcgatgtgcactcttcctcggataacgccaaactggtgtcctgcggtgccgacagacaaatcttctattgggacgttgcctcgggccgcgtcatccgcaagttccgcggccacaacagcgaggtaatgcatcagatcaattgatgccccctcccccttatttttggagtttcagccgtcttctgatggctacactgtaatcaagtagtcccgtgctaattgtgtgggctacctgaaccacgggcaatagtgtatcgttctcattgctgtaataccaactgtatccaaagcagtgctctgaaccatacttctggtggttgcactcttgtgcttttatctgatagttccacttgcatttagcagatgccattgcacagtggttcaactgtgtgattatggtcaggcctgtcggtgatgctaaaaattgatagacagtctctggnggaataattttgtaatttttgag

SEQ ID NO: 161094 - DNA, 312 bp, Zea mays
  Clone ID: MRT4577_7849C.1
aaaaaaactttaaggttttccaggcccgcccaaaaaaccaattaaggttggcaaccctttttacgaaccgggggttaagacagaaacaggggggttggacatgggttggggccacaacatacaaggggggggggcttttcccaagaagattttagggtcggggggaacaaacaaacgttttttggaaatttgccccacattttttgggaaagggggggggcattttttgggatttgggaacgcccggggacttgggaaacccttaaagccttttcgggggaaaattggggggccaggtttgtggtttttttt

SEQ ID NO: 161095 - DNA, 547 bp, Zea mays
  Clone ID: MRT4577_784C.1
gtacgcatagtaaatcgcttacgtgcactatatcagtataacctcagtgtctcagtactatgacggcacaacctccaatggatgtgccagtaaatagtagtttacacagacaacggcccaacatgacagcccagtaaatagtagtttaaacagagacgcggaatggctgttgccttcccacccttgtgaccttgttagtcgtccaacatgacagcattcttccttacctgggctagacgacgttccttgttcaatttcagagctcttcctttttcctcttcagacctaaagattttcttgttagtggacgacagggtttcggttttgtcaaccttaatgtcaaatatatcctgaagaagtccattctcctatacagaggaattcaaaacttgtcatgccatttactaaatacatggtttacaaataacctttcagaaaacactaacctgaacatggcttcagaaagcctttccccaaaaaccccttttaagaaattcaactgggttaattcagaccatgacgacaccctttaaaacagcacgttttt

SEQ ID NO: 161096 - DNA, 439 bp, Zea mays
  Clone ID: MRT4577_78500C.1
gggattcatgccactaccttccatattttagctcatctcccgccgactagacactgcaagcctctcgacgctaggcatgtgcgcttccaagaggtgccgccgcgcgagacgagacacgtcgccgccaccgactccgtgcaggatgctctccagaagatctccaagatctctcccctgctcgaggtgaagaaggtctccgagaagggcgtgctgccgtcccgcgggtccgctctcggcgccggttacgaactctctagtgccgaggagatgctgctgccggcgcgtgaaaatgtgctcgtggcgagcgacctcagcgtcgacatcccgcacggtacctacgcgcgcatcgagcccaggtcggggttggagctgaagcactccatcgatgtgggagtcggcgtgatccacgcgtactaccgaggccccgtcggcgtcatcc

SEQ ID NO: 161097 - DNA, 558 bp, Zea mays
  Clone ID: MRT4577_78501C.1
gtgcggcgctcaaggcggccgtcaactcaccgaataaatctaggagatatgcttagagctaagaggttcccaccaaaaactcccacagatgactccttgtggttcaaactgctcttgctgtgcttccggctcctgcaggggttgaactgcgcacaagaaatgatcgtatggagcgatgctaacttactgaatataaacccgagtgtgaaaggatcaaaccgaattgctccccaattggctcggtggctgactcggtcccagtagtataccgccatctacgctatccgctcatgtatagacctccgccaacagtttttacactgttctgttcaattcttgaattgtactccatcatccgactcagagaattcccggtgtcagcatcatggtcatgacacatgagcaaccatccccagggtctccgagatgcaaaatgaaaaaaacaaagaggcccctagacaacgagtacgatctcgaactaccggatcccccgactagcactaattcgatctaagataatcgatagcgtctagctctctgaaccacccggtacccaat

SEQ ID NO: 161098 - DNA, 209 bp, Zea mays
  Clone ID: MRT4577_78502C.1
atcatggtgtgcaatgattgataatttgatatgatatttaatataacgaaacaaatcgagaaagacaagagctttatttcgttatattaaatatcatatcaaattatcaatcatggtgtgcaatgacatttcacgcgaattctttttttattcttaccctttcttgtttctgtcctcggacaatttcacatggaggaaacttgtatcag

SEQ ID NO: 161099 - DNA, 393 bp, Zea mays
  unsure (1)..(393): unsure at all n locations
  Clone ID: MRT4577_78503C.1
ccgctctgtgctaatgctcctgctgagaaaggaggcaagaacttcatgattgatttcatgatgggncggtgtattcacgcctcttggcttcaccaacacttgctgcctgatttccatccgaacctgagaagctggttattcagaaccaagatatgaacattgaccacgggcggctctccgagccgtccaatggtatatgacggtcgttccacgcctaaatttcagacgcgcggatctttttcttgtggaggggtaacactgctaatgttattcgttacttccctactcaggctttgaactttgcatttaaggactactttaagagggtgttcaacttcaagaacgatacggatggctattggaaagggtttgctggcgaccttgcctctggtg

SEQ ID NO: 161100 - DNA, 102 bp, Zea mays
  Clone ID: MRT4577_78504C.1
ggcgggtgcagaacgcggcctgcgcataatgtacggggccgctgactgctccttgctgttactcgtacgcatagtacggggtacccataccatggggaggga

SEQ ID NO: 161101 - DNA, 700 bp, Zea mays
  Clone ID: MRT4577_78505C.1
ctagacccggaagtggctcgtggtgtggcaggtcgtgcaggagctctgcaccatccggggcacctgcgccaacggcagaatctgcgtccccgtcggcgttgacagcaccacttgcgtctgcccgccgggctaccgcaacgccaccccgacggacccctgcacacccaagaaaaggtacagcggcaggggcgacgacgacacgttcgtgcggatggacttcgtctccttctccggggccgccaactcctcggcgtcggaccccgggccgctgatgaccaagctgacgccgcagaacctggcggactgcgagagactctgccggagtaactccacctgcgtggcgttcgggtacaagttcggcggcgaccggacgtgcctccagttcaccgggctggtggacgggtactggtccccggcgacggagatgtcgacgtatctgcgggtggtggcgtcggacaatgacagcaacccgttcacggggatgacgaccatgatctgagacggtgtgccgcgtgcagctggcactgccggtgccgccgaaggagtcgcagacgacgatccagaacgtggtcatcatcacggcgctgttcgtgatggagctgctggccagggtgctgtcgttctgggcggttctgcgcaagtactcccagtgactgtagatggcgcgcacgctgtgactggagtacctccccgccgaggg

SEQ ID NO: 161102 - DNA, 437 bp, Zea mays
  unsure (1)..(437): unsure at all n locations
  Clone ID: MRT4577_78506C.1
gcgagccgccacggccgcccncgccgccgccnccgcgaagcccgcggccancaagggccccgccggcagcnccancaccggaaggaagcccgccgncgccaggccgncggcccgcaccagccgcaggccccgcgcagccgccgcggcggccaagcacggcgacaagagcgcccaccccgaccccgacgacancggcaacaccaccggacagcgggacccccacggcacagacgcgccgccgccccacaacccgccacagagcaagcccaacgagacgaacgcggctccgaacaccaaaagagggcagcngcncaagcccccgcagccgggcggcgacacacaacnggccgacgncagcgcgacggcgccaccggacccccagccgaacaagaaggcaccccaggagccgccgcagccgggcccgcgcggcaagaccc

SEQ ID NO: 161103 - DNA, 362 bp, Zea mays
  Clone ID: MRT4577_78507C.1
gagctacgacctacgcgtccgcccacgcgttcgtgataagattgcctttgttcccatttctggttttgagggggacagcatgattgaaaggtacaccaaccttgactggtacaaaggcccaaccctgcttgaggctctagaccagatcaccgagcataataggcctttacacaaacctctgcttctgccacttcagcatgcacacatgattgatgccattagaacagtaccaacatgacccagaggagactcataacatgaatcctggtatggaactcacctaacgtgcaactgagctctatacttacgaggattatgcctatatgcaccaaagagcacttcaggaaagcttttaccatgac

SEQ ID NO: 161104 - DNA, 725 bp, Zea mays
  Clone ID: MRT4577_78508C.1
attggtacctcgaggcggccgggaaacgttctcgcttctacataagtatccacatacacaacagctcgaaggaacttgaagagcgcccactctagggctgatcctgtgcattcttccctgctctggtcatgggcgtgttatccgatttgcatagagaaaatgctcgtggctgagattgaggccatcgacgtcgacccggggacacatcttttgctgccaccaactgaaatcttctccatctctgtcatctacaccggctatgacctcaaaactgaccgccatgccgtcctagtgaacatggacttcggcgacaccacacaatcgtcacgactgtcaacatgacccacactagagcctgacaccttcctcatgtgtgccacacacatgagatacaccagtagatgaagatcttcgcaaatgctgactagctgcatatagatgtctgttcgttcaatactcacatgtcgactgcactggccacgactccacatcgtgacgtgtgtcgcatacctacagatcacttgactagacttcgttgtgtgttcacgctcatgctcatcactctacaaaggccgtgcacgacatcaataagacgactgttgacatcaatgaacatgactattgagtgatctttggactccagggctgaaaacgatcgccggacttgggggtgcctgagaggtccgtctcctgtcgtccccaggatacgagcctgaacattcgga

SEQ ID NO: 161105 - DNA, 488 bp, Zea mays
  unsure (1)..(488): unsure at all n locations
  Clone ID: MRT4577_78509C.1
ttgggggcgagggctgaaccgaggcgggcacgtgccaaccacgtgccttacccgccccgcccgcgtcgnccaggtccaactcgcgacgcatctcgatggccgccaccgacgacggtgccgtggactccgcctccgccgcggccgcggccagggccgtcgaggaggcgcgcgcgctggggggcgccccggcgccgtttttttacgacgaggatctcgaagagcgcgcgtacgaggcggctgagaaggtcatcgtgtccatctcgggcgggccggacccggaggacgtcgacggcgacggcggcggcggcggcgcggagctctgctcgtcctcggggtcgtccccgccgcccttctcgtggcggaagctctggctcttcacgggccccgggttcctcatgagcatcgcgttcctggacccgggcaacctcgagggcgacctccaggcgggcgccgtcgccggggacacgctgctgnggctgctcatgtgg

SEQ ID NO: 161106 - DNA, 343 bp, Zea mays
  Clone ID: MRT4577_7850C.1
gggagagaatttttccacttccggggggggggtttttttggaaaaaaaaaagggtttggaaaaaaatttatttgatttttccgaaatttttaaaaaccaacccccccaggggaaaaagaaccccccaaaaaaattggtcaaaagccgggaaaaaaaaaaaaattaaagggggggggaaaatagttaattgccggctcccacttgattgaggagaaagggtttttttagcccggaaaaataaagggggaggcctaaaaaacaccgccgggggaagggggtcgaaaaaagaaaaaaaaggcgccccccttggtaataaaaccccggaaagggcggtctttggcaa

SEQ ID NO: 161107 - DNA, 195 bp, Zea mays
  Clone ID: MRT4577_78510C.1
gtgtagagctgaccgcgagatgcatctgaagagactaacctacatcgggagacggactgctgattctacagatcatctgaatctcgaacaaagcttactgggctgtgactatcattatgtcagccactaattggggtctaaggtatggagctcaaggatggaccgacccatgagccagctctccttgcgcacaca

SEQ ID NO: 161108 - DNA, 670 bp, Zea mays
  Clone ID: MRT4577_78511C.1
gtaggagggtcggcctccgctccccccgcgcccaggtccgagcgtttccggaccaagttcacggcggagcagaaggacctcatgcgcgagttcgcgcaccgcgtcgggtggcgcgtccacaagcccgacgccgacgccgtggacgccttctgcgcccaggtcggcgtctcccggcgcgtcctcaaggtgtggatgcacaacaacaagcacctcgccaaggtcccgccctcgcccccatcctcctcctacccacagccactgcctcgccaccacccgcctccacctccgctccacatccaccatcatccgccgccgcagcagcagcagcagcagcagcatgatgcatgagtatcgagtagccgcagagcagcgcgagaggatcagacgatgccattagcttattagctcctttatttatccttcttcttcttcttcttcttcccttgtaatttcagtgacatcccagttgttaaggagttgactcatcatgcagcagttaggagggattaatatgattgtgtgacctaatctcatctcagccatactcctactacaagtcttcccctcgtcctcgttgctttcttggacgacctacctccattattaggttattagcgcttgcattggtatcttgcttatggtaatgacctaataatgatcactgtgtttt

SEQ ID NO: 161109 - DNA, 637 bp, Zea mays
  Clone ID: MRT4577_78512C.1
acatccacctcataccttgaacgcctctcttgctacgccaaaagccaaggaaactctaagccatcgtccaaccgtgcgtcgtgcgtccgccaccggcctaattcggtccgcatcatcagctaggccgtagcgaggcaccaagagattcataggagtcttccaacgctggtcatggcatctccataggcggtgatcgactagagcatggtgaattcatcgtcggagcactccaccgccgcgtgaccgccgctcaccgaagtcagggaactccactgcgtggaggccgcagcaaggtcatgagaaacccgaagactaatttggtgaagtacctgggatctcaagtccaaggagactttgacttcgggatgaaagacctctcatgataaaggcttgtgtgatatgaagatacaacccgaaggtaacatggatggacgctgaaactatggctaaaggagctttggcttgatatgatagcaaagatgaaggacgaaaccgacctaagagggaaaatactacttagtccttgacaactcgcttaataattaagagtaaatgtcacgggcatagatgtaattttgaccgggctacgtctcgtgcctataaatagatgaatagtagcaccatattgttcacgttg

SEQ ID NO: 161110 - DNA, 1157 bp, Zea mays
  Clone ID: MRT4577_78513C.1
gatcaggtcctcacaatttatttatattcatattcatgtacaagaattaacattaatgatatttataatacaatgataccttcggttcgcaagaaggtgggaatgcaaagatgacgcgagagagagattacaattcaacgtgaacaatatggtgctactattcatctatttataggcacgagacgtagcccggtcaaaattacatctatgcccgtgacatttactcttaattattaagcgagttgtcaaggactaagtagtattttccctcttaggtcggtttcgtccttcatctttgctatcatatcaagccaaagctcctttagccatagtttcagcgtccatccatgttaccttcgggttgtatcttcatatcacacaagcctttatcatgagaggtctttcatcccgaagtcaaagtctcctgtaacagtccatgccatactgaaaacatatgattagtcacgttttttaggatcttcggaaggagaaggcccccaacagtcccattccacccttatggtagcactgttttccagggtggtcactcatgttccaattaacataataatcttatcatgaacggaaaataatcatttgacaataaatagcatgatcatgaataaaatgtatcttaatacccaaaaccacatagtggaatagcacaaactacccaaaagttcagttgcaagcaaggtataaagtaactcaaactagggtgacctattggatcccatcaaaattaacctgagcatgccacagtgattaatagtaacattattgggtaaagaagagtgaccaagggcacaacttgccttggacttgagatcccaggtacttcaccaaattggtcttcgggtttctcatgaccttgctgcggcctccactgcgtggagttccctgacttcggtgagcggcggtcacgcggctgtggagtgctccgacgatgaattcaccatgctctagtcgatcaccgcctatggagatgccatgaccagccttggaagactcctatgaatctcttggtgcctcgctacggcctagctgatgatgcggaccgaattaggccggtggcggacgcacgattggacgatggcttagggtttccttggcttttggcgtagcaagagaggggttcaaggtatgaggtggatgcc

SEQ ID NO: 161111 - DNA, 384 bp, Zea mays
  Clone ID: MRT4577_78514C.1
ttggtacaaccgccccagccaccgtaggggagggggtccaagaaaagcggggcccgacaaaaccgaagagaaccgcaaccggaagccgccatactggcagcggcacaacaatcagtactcgccaaacgcgcagccctaccgaagcggaagacgcagtcagcatcaccgggagaattgaacaataatgcaatataagaacggacgacaggagcccccgagcccaatggtgccaaggaacataggaagagcaggagcatgccggcacgaaaaatgcggagcctgccccccacagcggcacaacagcacatgaaaacaacccatccaacaaaggcgacacgggtataaaaagaaacaaaaaacggccgggaacccacaaacaaacaa

SEQ ID NO: 161112 - DNA, 935 bp, Zea mays
  Clone ID: MRT4577_78515C.1
ctcgaggccggccggctcgactcctctcttcttcctccgctccacttcctgcacccgcttcttcccccaaaggccaaaaccctaaatctcctccctccctccctccaagcacctagctgccgccggttcccgcgtatgggagggtcgcggcgcaaattgaagcgctcccgcactaaggtccgcgtggggcttccccgccggaaacccaatgaattcaaggcggccttcgaactccccgaggcactcgccgccgccgccggggccggggcgggctgggacgcggagggcagcgtagtgaagaactacgccgcgttcggggtggtggccaacccaaacctactcggtgcgcactcccgcggcacgccgcggctcgtccagagcgcggcgctgcaggcgcccgacgtcgccgccgcgcatgcacccgtcccggagttcgagccaatcgataccggcagcgacctcgaggacgacgacctgaagtctgctcttgggaagaaaaggaaggatggcaaatctgcaccgttgcaaccacttactaaagttcaacgtgtttgcattggcagattaatagagaagtacggtgatgactacaaggccatgttcatggataccaagctgaacgcaatgcagcactctgtgggtacattgaagaaactatgcgaaagacaccacgttgatggcaagatcttcgtctatccactgtagtattgtgctggcacctacttcagcctcagtgtactcttttcgccccgttaatggaacaagaacaattttgcaatgtgccccaaagaggaatccgcaattcagaactattgtgtacttcttttcgagagttgtcttatctcccaaaaaaaaaaaaaaaaaagggctactggcgcattgggggccgtactcatggtcgttactctacgctggctgagtgtagtgatgcctgc

SEQ ID NO: 161113 - DNA, 510 bp, Zea mays
  unsure (1)..(510): unsure at all n locations
  Clone ID: MRT4577_78516C.1
cactcctataggcgattgggattcccatccgcacgcgggcgcggcnctgccaacggatgttgcgggcggcgtcatcccatccgaatctcccccctctcccttgatacccaggttcgtcctcctcagcactgtctcgattcgttgagggttcgttggatttgggggacggtcgtcttgtggtcgccacgctgccgtccctacttctcctagcggtcgccctgccaaccgcaatgtcgtcgtctgcaacttcgactctgccgtccctttctactcagtaggcgtcattttctccggacctcttggacacggatccttcaggctctcctccaggctcaagctacgcctcggccgcgtgccccctggtctccagacatcgtgcggtaatctccctgtgatgtgcacactgctccctctcccttttcaactgccgatcagtgaagaaggtaggattgggccgctgctccccctgatttttgcccgacatggaaggcccgctagtggcccgtgcca

SEQ ID NO: 161114 - DNA, 378 bp, Zea mays
  Clone ID: MRT4577_78517C.1
ttgcttttcgctcttgcctccaaaattcacggggggcgattgccgccgtgggcgcgggcgatttctttgcggacgcctcgtaccacctccgtcgcattctccgctgactcccccctcggcggcgtcccaatacgctcctcaacagcctgctccgttcccacgccacctcctctcgctccgctgtgaccaccgaggaccaccagagcgggacgctgcggaactcgtcggccacgtcctggccgtcgcgcatgctgacgactaggctgttgccctcccgggcgccctctgctcggagctcgcacgcgtcctgcgagcgcgcggcgccgctgaggcaccgggcgcgccggcggaggaacaagttgaagtatgtccggaaca

SEQ ID NO: 161115 - DNA, 129 bp, Zea mays
  Clone ID: MRT4577_78518C.1
cagccaacacagcgccgctaagatcccagagcgaggaagcgagccagagcagcggctggcgatgacgatacacgaaggcgaaggtgagcaaggccgagagcgatgccagcatgccgcgaggagaacgag

SEQ ID NO: 161116 - DNA, 133 bp, Zea mays
  Clone ID: MRT4577_78519C.1
ggaaaaaacatgcaggtaaacaatgtccccccccttgccaggttcaacccatatttaaaaccccggggagagagataatccaatgcaatgcgacaggcgacagcccccaacatgtttcggttgaacccattga

SEQ ID NO: 161117 - DNA, 182 bp, Zea mays
  Clone ID: MRT4577_7851C.1
aaccccaggttcgagccacgcgtccggtcccgaggaagtttgttttgtcgtcatggggccgtgcacacacaatggctggtgcgcgccaaggaggcggaggatcttggcggggccccaattggctaggccctgccgatgctgacgcgagcatacacccagcggaggcggggcctctatggccc

SEQ ID NO: 161118 - DNA, 761 bp, Zea mays
  Clone ID: MRT4577_78520C.1
aattcgctcccttcctttcccattcgcctcacctcgtctcgctctcgcctgccgcctcacctcacctcgccccgctccggccgcagcagccgccccagccctccctccggaaaatcccccaaaaccctaaataaatcctcgatcggaatccacggatgggaccgcggccggcagctccgtagtggactggaggtgctcggtcaggctcggctgcccgtttgatgccgctgctacggagtctcctgcaagctaggtttccagtggcttagtgttttggtttggtctgtttcttctgtccgaggattgaaggaaaccaggaaggaaggaagcacgttgaaacaaagacagagggctacggcgatggctccatctcaagcggcagcgggtggctggccccacctttgaggacctcgagcgtgacctgcaggcagttctcatggaccaaaaccacacgtcccccacggacgacctcagcatattccgcagcggcagcgctccccccacagtcgagggctctcgcacagccattggcgcgctcttccctggtccgcagcttcacgccaacagccttggtgatggcggcggcggcggcgggactgatgctggtgttgacatgctcactgaggaggagatacggtcacacccagcgtatctgtcgtactactattctaatgagcacctcaacccaaggcttccgccaccaatggtttccaaagaggactggcgtgcagcgcagtggttccaggctgtgtctggaggta

SEQ ID NO: 161119 - DNA, 915 bp, Zea mays
  unsure (1)..(915): unsure at all n locations
  Clone ID: MRT4577_78521C.1
gntgggaccgcggccggcagctccgtagtggactggaggtgctcggtcaggctcggctgcccgtttgatgccgctgctacggagtctcctgcaagctaggtttctagtgccttagtgttttggtttggtctgtttcttctgtccgaggtaacttgatgcgccagctccctgtacttctctttccttaaaggcgggacttgtaatcccggttctttttaatagaattaacggaggaacctggtattcaaacgatttcatgtggtctctaatcatgatttctcataaagatgcatcgatcattcttccagttcaattttcatgcataccttcggattacaactccgctcgatacaagtttttttttggggggggggggggcggaggcggtactgatcaccatcttcttactggtttaggattgaaggaaaccaagaaggaaggaagcacgttgaaacaaagacagagagctacggcgatggctccatctcaagcggcggtggctggccccacctttgaggacctcgagcgtgacctgcaggcagttctcatggaccaaaaccacacgacctcagcatattccgcagcggcagcgctccccccacagtcgagggctctcgcacagccattggcgcgctcttccctggtccgcagcctcacgccaacagccttggtgatggtggcggcgccggcgggactgatgctggtgttgacatgctcactgaggaggagttacggtcacacccggcatatctgtcatactactattctaatgagcacctcaacccaaggcttccgccaccaatggtctccaaagaggactggcgtgcggcgcagcggttccaggctgtgtctggaggtatcggggataggaggaggccttcggaggtcgggagtggaaactcgctgttctcggtg

SEQ ID NO: 161120 - DNA, 478 bp, Zea mays
  Clone ID: MRT4577_78522C.1
ttcatgaagagaaaggccacttgacatttgttcgtaaattcactgattatggaaatgccaacaaattgaggttgacaagaaggctaaaaatggaactagtttaattgctgaatgacaaacaaagcgaacctaatagaaggagaagtacagactttaaactcacaaacgacttataaggagttcgcagcgtttacctggagtcctgatgatcttatttatgggctggatgtttgacctctgatccaatgtgcctgcgaattcactgactgatcttttctttctacggagcaagtcacgatgtgagcatatttacagactctctgctcgatacttcactgaacgctgacaactagactagtacttgattgtcagaacacaagtatgccagcatgtgtagggatacaagaagagatcgagaatatgattggcataggcgtgacctttctcttgaggaggactaatgggagggagatggggg

SEQ ID NO: 161121 - DNA, 425 bp, Zea mays
  Clone ID: MRT4577_78523C.1
atttttctatcccgttcaacatatcctggaggtcccacaaattaaggaagaatatacctcacctccaacttgaactagactctttcataatcaccttatgaccatactgcactccaaatagtcacaaacttccacattagatgcgttgttaatccattgatcatcatacactattcacaaataatgcaacaactaatctacgtgaggctgcccattgtcactcctaatcacactaaacctattaatgacatcacaaactacatcgttattaactacctcacatccagctacactaagaaccacaagctcttccatctttatctcactaacttctctgacaaaaatcattgttaatatgtctttgcaccacattgaaatcctattttaccacaggccaattttgacatgttctacattcaccccac

SEQ ID NO: 161122 - DNA, 230 bp, Zea mays
  Clone ID: MRT4577_78524C.1
cgcgaaagcgacttctacaccaccaccgctcgtgcttatactcctgctcctcgtcggctgcttccctggcgggccacgtgccacaggcggcggcttcccgttcaacaccacgctggtcgcgctccaatcggggatgggctacgcctttcgcgcgccggccctgttactcctcgccatgacacacttctactacttccacaagaacggccgcgcgctcgccgtcctgggcc

SEQ ID NO: 161123 - DNA, 178 bp, Zea mays
  Clone ID: MRT4577_78525C.1
gagagagaaatactttaaaaatccacactttttgttaagaaggaaacatttagcatttatatatttgtgtatggaaaacacttgatattttatccctgttgcatctggctgcacagagcctctcctcaaagatgctacaaaacttgaatataacacattttggaaggctgactaacct

SEQ ID NO: 161124 - DNA, 195 bp, Zea mays
  Clone ID: MRT4577_78526C.1
aaaataagcaatggggctactggccccatacgaaatgaatgaaccaattgggggttccacttccaccgttgaacttggagctgaaaccaaaacttgaccggtgaagaaatagatccgccgcccgcgcgcgcagcggtttaacgcggtcatgaggaggcggcggacccttgggcggacccctgggcggacccgtgg

SEQ ID NO: 161125 - DNA, 380 bp, Zea mays
  Clone ID: MRT4577_78527C.1
cccacgcgtccgcccacgcgtccgcccacgcgtccgcccacgcgtccgcacgaacgcaggctcccgagaacagcagcccccattggatttggaagcttctccatgggacaccgagcctcgtagacgaagcagaggggaccagagaaaccgaggagcaagaagcagggagccatggcgttcctcctacccaagctcacaacgccgtcctgcaagttgcccccgagccccctcctcaagccccagctcgtcccgccgggccacggcggcggcaagattcaaggctcctccgtctccggctctggcgcggcgcaggtcgcgggcccgggccacctcagcctcctgctcctgctcagcgcctcgcagcaggcggccggccccgc

SEQ ID NO: 161126 - DNA, 354 bp, Zea mays
  unsure (1)..(354): unsure at all n locations
  Clone ID: MRT4577_78528C.1
cgcgagtcctgactgctaaccatttggcaaaccctacccataccaccgccgccgacgccatgccgnccaagctcgacccgtcgcaggtggcggaggtcttcgtccgcgagacggtcagcctggtcggcgcggcgtcatccctggctcccaagatcggtccgctcggtctctccccgaagaagatcggcgaggacatcgactaggagacggacatggactggaagggcctgcgcgtcaccgtcaagctcaccgtccagaacctgcaggccaaggtctacgttgtgacttccgccgacgcgctcgtgatcaaggcgctcaatgagcccgagagggaccggaagaaggtcaagaaca

SEQ ID NO: 161127 - DNA, 307 bp, Zea mays
  unsure (1)..(307): unsure at all n locations
  Clone ID: MRT4577_78529C.1
cacaaacgcacggcgcaaacgtctcgcccgagtccgacgagatctgtcaatgtccccatatcgcgaacacctgtncgacgcntcacgcgcntactcgtgtctcttaccgaaggtcgtcgcgcgcgagttgacttgagaggagacgtggctgatgagggagtgcatctccgtccacatcgggcaggccggcatccaagtcggcaacgcgtgctgggaactttactgcctcgagcacggcatccagcctgatggccaagtgcctggagataagaccgcgggacatcacgatgatgccttcagcacttct

SEQ ID NO: 161128 - DNA, 294 bp, Zea mays
  Clone ID: MRT4577_7852C.1
agactatttttttttctatttattttaattataaatctatgaaagaaaaaaaaatggacacaggactaacttcggcgaaggtcggagcataaaatgaaaccaaacatatttgtatacatacatgatttacctttacgattagattatattacaatataaaattatgaccggaaaatggactgtaatgcaatggatagaactgaaagaaaaaatgtaaggtgggattagaatgagatatattatactctaaatctaaaagtgaaaacaccaaaaaagaatctaaaaacttatgta

SEQ ID NO: 161129 - DNA, 520 bp, Zea mays
  Clone ID: MRT4577_78530C.1
ggcgcacacataccgggcagattttgattttaaagacaggatgcttgttccacattgccaggcatactacactaaattagaacaggcgtcagtacagggaactttgaccagatacccgctacatgggcgtcgaaacagcttgcacatgtatcctgcttccgccttcacaaccagaatattaccaaacaccgaaccagctgagagcagttgggatccactagatttgctgctcactcttaaggcattggtatttccctttaacaatggtagaaatgggatattttcagactagggggcatataaaaatagttcataaatgacgcctaaaaggtcatctcatttgatgggggcaatccattacactcagttgctttctaactgccaaatggctaagggggaaataaatgacacaggcgagcttatgttctcctggcataactgggggacaaaccacaagaaccccctctctagtaaccctgtggcaacagctgcccatggtgaaccatctcaccttcttcgg

SEQ ID NO: 161130 - DNA, 708 bp, Zea mays
  Clone ID: MRT4577_78531C.1
acttcctgaaccgcaaaaactttgccttccccgtgtccgactactactgttggagcgctaccctattcactcctctgccctctcagatcccgaactaccaaacccccttctcgtcggggaaggaaggtggatggcaggacaaaagagatcacgatcgctaatccgagacggcggtggtaggtatggtggcgtgactatgtcctggcggtgtgacggaagtatgacaaggggctggagacgcgtacgaatagcccgtatctgctggactctctgggcgcgctctccagtttctacgtacagaacaccccgctaggtgcgccgcaatctcaaatcctcgcattgagcagcgtgcacttggcatcaatacccacttctctctacgcctcactccccgatcacaaggcgctggatcgcgtccagggagaggtgcacgggctgatagactcctggaagaagaactaggaagcattgaacagatgcaatgcaagtactggggacatcatgaacagaacagagaggttgcaccggaacttgaagtgtatcactcagaggcaagatattgtgtcgtgcttcctgcgcgattaccaattttcgaatgacatagataaatgcacttcgggaggaggagatagatgaccaattctctcaagcatctgctgcatgttcaagagatacactacaactgcaaggtcctgctgtgaacacacc

SEQ ID NO: 161131 - DNA, 1047 bp, Zea mays
  Clone ID: MRT4577_78532C.1
atgagtggtgaggttgaggcactggtgccccttgtgatcaaggaagtaaccaaggaagacatagcgggaggagtgggaggcaagtttacggggagcggtggcagaaaggttaggataacatgcacacccaaatacacgaagatggtcgtaggatggaggggtgccaaagagagcaaagcggggtgtgggagtgctaatcaccttggtaggaaggcgattaaggaggtaggaggtggtgtggaggctttcagcccagtagcgagcaggaacggaggtgtggaagagcatggagccatggagcacatgatgttattctataaaagcatgacaacttgtaacatggataacaagaatatggaaaatctaggagtggagaagggagactgcatcaactcatcgagcgtcaagcggctaggccctgaccggttgcgtgcgactcaagcgacccgcgaccgccgaatgacggggcgcaaaggtcggatggcggacaacacccgatattggccagctagatggcgatgtgcgcgtctggcggtttatttggatgtattttcagtagtagttattgtacttggtggtgctctggcatgttacggtgcagtgttattctcgaagatgagcaaagttcgttctgaaactgtatcaactgagaagtggaaggttgccagtttagctgctgtctcgctgatctgtttctcgtcttctgctatacttgcacttgtgactaatgttccagtgcttttgtattggtactcaacagatgtggacatcatcaacaatgctgttattttgtttatatattacttcatagcttattgccaagctgtattttacgaagcaaatgacatgctgcttggctcgtcagtgccatcaggatttgttctatggatcatgagagagatgcctcatcggcagggaaagaccatcaactacgcaggatccacagtggaggacagctgtcacatcctcaaacaagggtcacaactggcgtctgctggcattgcgctaactgatgcatttagaactgaaggttggggccatatttga

SEQ ID NO: 161132 - DNA, 153 bp, Zea mays
  Clone ID: MRT4577_78533C.1
atctcaaacgtgactgaaaaaactacatagtaatatttcaaaaaaaaaaaaacctgcttgcttggaaaatctcctcagttgcacaagagatggttctatggggtggttttgaacgagaaattgaggttggccccgggagtacacaaaaagatt

SEQ ID NO: 161133 - DNA, 230 bp, Zea mays
  Clone ID: MRT4577_78534C.1
cagaacgaggcccaagcttgttttttctttatgtactagctttcgatttaccgttttaaaccccgaggctgtattcggtggcatatattactggtacatgccacacatgataagggggggggggttcctgcgttcctccctctctaagtggggggggggggggggagaacatcctccggtgctgtgttggtggagtgggggggtctggttgtggtgaggcggggggggtt

SEQ ID NO: 161134 - DNA, 137 bp, Zea mays
  Clone ID: MRT4577_78535C.1
gtagccggagcagtagcaactttgttgaaaaatacattcatgctgtggcgtttttcttattcaatcgtaggtccttatactgctacagtgtaaatcatcattgcaatataatcaaggtttttcttttcgtcgctgtc

SEQ ID NO: 161135 - DNA, 361 bp, Zea mays
  Clone ID: MRT4577_78536C.1
ctgggtttttttttttgagaccaaaaggctactcaacaagaaacgaaccacaggggctctgggctcatacaccgcgtctctgtagagagaggcacaaagcaagcgactctggcggaacaacgcccaccgagaaccaactcaagcctccctccttaacacggggaacggaggcatacatacgtctcatgcgtacaacactgaacaccggcgggggaggaggagtcctgataccttccacactgggtcctcggcgatccagaagtcggtctccacccacagcacgaagaggaccccgccggaggaaacctcccctggaaccagggccagggacagatgacccggtccacggaccaccttgccc

SEQ ID NO: 161136 - DNA, 440 bp, Zea mays
  Clone ID: MRT4577_78537C.1
aataaccagcggagtagatcatctatgttccacagcagggtaataatgatctaggagggccattacatatccggcgcgccggatttattgggcaggccacctatctactaggacagaaaaggtggggcgctctggggaaaggacacagcaaataacccttctaacagatccgctgatcccgcatcgcgctcagttgctggtgaacttggcgacggtcttggtttcctcttgaacggcgtgcttggcgagctctccagcgaggactatgagcacggggggctggatctcgagggacatgatggcgggcttgttgttgtaccacgccatgttggcgggcttgccggccagcttcttaaaaatggcgatgatgcaaggtagttcatgatggaaactggtcttggatgatatgccgatgacggggtgcacctgctttagcacct

SEQ ID NO: 161137 - DNA, 300 bp, Zea mays
  Clone ID: MRT4577_78538C.1
gttatacaggatcttcaatggattcacttgatatggcaaaatttagagtaaacattcatgagaagtggctcatggtggcacacacaaaactgcatcgtggaactgaaagggtactcagagaacaagacacatgaacgagccgacgccgctgtttacagaggaggcgccaccaccagataaaaggttataaaaggcggaaaccggagctaatcataaaacaaaaccttggcaatatataaggccgacttccttaacaaaaagaggatatggttctcgcccatgacaccacctttgacgatg

SEQ ID NO: 161138 - DNA, 109 bp, Zea mays
  Clone ID: MRT4577_78539C.1
gaaatctataccgtgcttctttctttagctgtggttcctgggaggcagggcacatgggctgatagcacaaccctcaacagacatgggcgggagcttccacgctttggac

SEQ ID NO: 161139 - DNA, 1381 bp, Zea mays
  Clone ID: MRT4577_7853C.1
cattgtgggcctcgaggccggccgggtattattattattatatacacggtgtggtggccatagcatatggggaaaatatggtatagagcctcagctctgcaaatcgcgaactgaaacccaagctgccagtctgtggcatcttcgataggcgattctcaatccactgccaacatgtccggcagcacggcgccgccgcacgtcgtggaggacttcttaggcgtcatccagatcttcagcgatggttccatcgtccgcggcgacgagtcgaccatcatgccggcagggccgtgcccggacgtccccggcgtccagtggaaggacgccgtgtacgaggcgactcgcggcctcaaggtccgcgtgtacaagccgccgccgacccccggcggcggcaacaagggcaagctcccggtgctggtgtacttccacggagggggctactgcggcggcgcctacgactaccccttattgcactcctgctgccagcgcttcgccgccgagctccccgccgtcgtgctctcagtccagtaccgcctcgccccggagcaccgcctccccgcggcggtagaagacggcgccgcgttcttctcctggctgcggtcgcaggcgcaggcgcagcctgctgcaccgggcgccgccgccgccgccgacccgtggctcgccgaatcggccgacttctcccggacgttcgtgtccggcgggtcggccggcgccaacctggcccaccacatcgtggtccggatcgcctctgggcagatcgcgctcggcgccgcggtgcgcgtcgccgggtacgtcctcatctccgcgttctttggcagcgtcgagcgcgtggcgacggagtccgatcccccggccggcgtgtacctgacggtggagacgattgaccagctctggcgcatggcgctgccggtgggggccacccgggaccacccgctggcgaacccgttcggcccgggcagcccgagcctggaaccgctgccgctgccgccggcgctcgtcgtggcgcccgagcgcgacgtgctgcacggccacgtgcggcgctacgccgccaggctcagggagatggggaagcccgtggagctcgccgagttcgcgggagaagggcatggcttctctgtcggaccgtggagcgaagcgagggatgagctgatgcgaatcttgaagcgcttcgtgaaccagggcgctggtctcggctgaggtgaatctgtcgctaagtccagctcgcagttgacacgtcgcaataagaacctgtacctggaatggacagtgatgttcacatttatcgtttttctctctctcatatatataattgatgaaactttcgtttaggaggttgtaaaaatttaatttcttttaggaaggagtaatttagaggaattttagc

SEQ ID NO: 161140 - DNA, 484 bp, Zea mays
  Clone ID: MRT4577_78540C.1
gtactttcgtcccgcatacttacggcaacaaccgccagctggatgtgatccactcccgctgggccatgctcggcgcgctcggttgcgtcttccccgagctgctctaccgcaacggcgtcaagctctgcgaggccgagtggttcaaggacgactcccacatcttcatcgagggcgggcgtggactaccttggcaaccctaacctgatccacgcgcagagcatcctcgccatatgggcctgtcaggtcttgctcatgggcgccctcgagggctaccgtattgacggcgggccgctcatcgaggtcgtggacccgctgtacccttgcggccgcttcataccccctcggcctggccgaccaccccgaggacttcgccgatctcaagtgaaggagctaaaaaacaggcggctaagcatgttatccatgttcggtttcttacgtcaagccatcgttaccggtaagggcccgtttgagaacctctctgacc

SEQ ID NO: 161141 - DNA, 101 bp, Zea mays
  Clone ID: MRT4577_78541C.1
cgacaactaggtctctcgatataatgagtcaaaggaggaaattggtgagcatatgaatgacgaatatgctcagcacgatctcatgctatccaagggacaat

SEQ ID NO: 161142 - DNA, 529 bp, Zea mays
  Clone ID: MRT4577_78542C.1
ggaccaaacaaaggacttatcacacaaccccacgttgacccaaaggcatcaatggaaaactttgcataaaaggcttaaaatatagccctcccaatcccacgacacttgcacggctcaaaaccccaactgctccaagctaaattaaattaaaataaaaaaaaaggatgccctcccaccacccatgccaacattttattgcacccccggggcgaaatacccccgaaagctaacttaattaacccaaacaaacccgctaatcttaaaggcgcaaaaacggcccctaaaactcgatccacctaatgacccgaaaccggggccgtcaaccccaagggggacagggcctgggggcaacggaggacctccggccatttaattgcccttgccaacaaggccctgggcgggggccaccgagggcagcccccgaatggcccccttcttggggggccaaatggccccgcaggctttgaaaaacttgggggcctcgcggagcttctcctcgttggggaaaatagagcctcccttggcaacc

SEQ ID NO: 161143 - DNA, 496 bp, Zea mays
  Clone ID: MRT4577_78543C.1
ggatccggggggacaaattttaacaacctcatttggggggggttgggttttcgagccaattcaaatttcacaaaggggccggtataaaaacctaatatcctaggactaggatagtaccaccaaaccattattcctgaatccccccccccccccaattttttttggcaacaaaacagcagtaccagttataacaaccaaggaatcggtttcaattaatacggccggaagggggggttgcttttgtttttggcccccctggccctcggggggggattctgaatcggccttggcggcgaatccgtggcgtgggccggcggcaaaaataagggccccccccttgccctcggcggggccctcgtcgtcgtcgtcgtcgtcggggaaaaggttaatccaaaaccacccctcaagggaggcaaaaaaggcggaggtgacccttgcccccccccaggtcccccatctttccatggccaatctgttgttagggttacggggcggg

SEQ ID NO: 161144 - DNA, 297 bp, Zea mays
  Clone ID: MRT4577_78544C.1
gtaaacgcaatatatggctgacataaatggaggtcctgtttacatacaggcatcatgcttgctaggggcagctcgatggttggttcacagcacacaacaaatgggaccaactggccggttcagtgaatcttatacagcgaacaatgtagttgtagcaggaatacccttcaatccattaccagatccagaaccaatgttaactagtgattaccgttgaaacatggtactgcataagaacatatctagtttacacatgctggtactcgacaatacatgtcacctgcttccaccactcat

SEQ ID NO: 161145 - DNA, 103 bp, Zea mays
  Clone ID: MRT4577_78545C.1
ttggttctatctcttgttcacgcgacgacctgagcagatataaaccatcacgattcgttgtgcaggttataaggttgacgaacacgagcgtgatatcacgcca

SEQ ID NO: 161146 - DNA, 1069 bp, Zea mays
  Clone ID: MRT4577_78546C.1
cattgggcatacgtcgaggcaagtttgtcaggcggccgggcaagctcccgagcaatttggagggactccatttttcttctgacgttcaccccgagtgggcgaccgccgccgccgccgccgccccacgccaggtgcacagatcttcgtcgggcccttggccggcgacgaacgcccagcagattatcgggtatacatgcgcacaaccatgtcctttaccgggtccgcccctgccaatgatccctgcctcgccaagatcctgtccaagcaaggggacaacaaagttctctttgcggacaaggtattaaagttcacccaatctggaaagatgaaaagacgcatcctagtgatcacagactttgctctataccttgttgaccccgaggccaacatattgaagaggaggatagcacttgcagctgtggataagctatgcattagcaacctcagtgataacttctttgcgatcattgtgccgactgagtacgattgtttaatggccagcactagaaagaaggaaattgttgatgtcattgttaaggctatcaagagcacatctgagtatgaacctgaggtggcttcctctaacaggtttgagtatcatgcagctgctgaagttattaaggtggttgaatttgaggaagtcgatggaggcacgaaaaccaggatcacgaacagggagaaatcatgattcagatctcatggatgggtggtttcctgtaaactgtatagctctttcgtttttcatggatgggtggttttttatcttcacatgtcacgtgtagtgtgtaccgcaacctcaatgtcagttcttttttgttttgctctgtattattttactagaaaactgcatggcgctggcgtcccccattcgcatcgagcccatgaatttgtcgatgccctgtaactggacaggatcaggcaattgtttgcctgctgctgaacccctggaacattgttaagcttgacattcgagatagttccaacaaggctagtctgtttggtgaaaaaaaaaaaaaaaaaaaaaaatggagactagttacctcgtgccgaattcggcacgagctcgtgc

SEQ ID NO: 161147 - DNA, 313 bp, Zea mays
  Clone ID: MRT4577_78547C.1
ggggggggggggggggttttttttttttgcttatattttttttcttttgttttttgttaaaatttttaattgttcaaccttgcggcaaaatgagggtggggaattaaatgaaataagttagggtggctgcatggggttaaatacccaaatttaattggggggccgtttttccccatttttaataaggaaaccagaggtggcctggggattgaaaaatcgcgaattggcccggggggggggtgttgcgttaaacagctcaggggggtttttcttttgcccctcaaaagggggaaccttttgggtctccttcccg

SEQ ID NO: 161148 - DNA, 864 bp, Zea mays
  Clone ID: MRT4577_78548C.1
gccggccgggaggcaagtttgctcagggccagaagaccagaaccaagcaaccgagcaagtttggagggactccatttttcttcttacgttcaccccgagtgggcgaccgccgccgccgccccacgcaaggtgcacagatcttcgtcgggcccctggccggcgacgaacgcccagcagattatcgggtatacatgcgcacaaccatgtcctttaccgggtccgcccctgccaatgatccctgcctcgccaagatcctgtccaagcaaggggacaacaaagttctctttgcggacaaggtattaaagttcacccaatctggaaagatgaaaaggcgcatcctagtgatcacagactttgctctataccttgttgaccccgaggccaacatattgaagaggaggatagcacttgcagctgtggataagctatgcattagcaacctcagtgataacttctttgcgatcattgtgccgactgagtacgattgtttaatggccagcactagaaagaaggaaattgttgatgtgattgttaaggctatcaagagcacatctgagtatgaacctgaggtggcttcctctaacaggtttgagtatcatgcagctgctgaagttattaaggtgcttgaatttgaggaagtcgatggtatgtttaatgtcgacattacacaatatagttggaggcacgaaaaccaggatcacgaacagggagaaatcatgattcagatctcattggatgggtggtttcctgcagactgtataaccttaggtttcatcggatgcgtgggtttattatcttcacatgtcacgtgtagtgtgtaccgcaacctcaatgtcagtgctttttggatttggctctggatta

SEQ ID NO: 161149 - DNA, 904 bp, Zea mays
  Clone ID: MRT4577_78549C.1
ctcgaggccggccgggccatttttcttctgacgttaccccgagtgggcgaccgccgccgccgccgccgccccacgccaggtgcacagatcttcgtcgggcccttggccggcgacgaacgcccagcagattatcgggtatacatgcgcacaaccatgtcctttaccgggtccgcccctgccaatgatccctgcctcgccaagatcctgtccaagcaaggggacaacaaagttctctttgcggacaaggtattaaagttcacccaatctggaaagatgaaaagacgcatcctagtgatcacagactttgctctataccttgttgaccccgaggccaacatattgaagaggaggatagcacttgcagctgtggataagctatgcattagcaacctcagtgataacttctttgcgatcattgtgccgactgagtacgattgtttaatggccagcactagaaagaaggaaattgttgatgtcattgttaaggctatcaagagcacatctgagtatgaacctgaggtggcttcgtctaacagttcaacacggtgctttatcatcctgcaggtttgagtatcatgcagctgctgaagttattaaggtggttgaatttgaggaagtcgatggaggcacgaaaaccaggatcacgaacagggagaaatcatgattcagatctcatgggatgggtggtttcctgtaaactgtatagctctttcgtttttcatggatgggttgttttttatcttcacatgtcacgtgtagtgtgtaccgcaacctcaatgtcagttctttttgttttgctctgtattattttactagaaaactgcatgacgctggcgtcccccattcgcatcgagcccatgactttgtcgatgccctgtaactggacaggatcaggcaactgttt

SEQ ID NO: 161150 - DNA, 421 bp, Zea mays
  unsure (1)..(421): unsure at all n locations
  Clone ID: MRT4577_7854C.1
cggccgctcgagcgccgaccggnacactcaccaacgtcttcacagcgccggctctcccccgctccgtctccctcccccctcctcccccgctccgctccttccgccgccagatcccgtcgagtccccccgcgtccccgcgtcgaagatgagggagtgcatctcgattcacatcggtgagcgctggtatcgagtgtctgtattgtgtgctgggaagtttactgtatctagcacggcgttgtgcctgacggccagacgaccggccccaacaccaccggaggtgctgctctctccttcatcacattcttctacaagacaggagacggaaagaacctgcttcgcgagttcatcaccaaaaatttagtccaactcagattgactcacgccctcaccagcccctactgtcttgttcctccacccctta

SEQ ID NO: 161151 - DNA, 565 bp, Zea mays
  Clone ID: MRT4577_78550C.1
gcctgcaaaagtgagtttgtcaaggcgtctaagcgccacctcagtgatctgaaggacctgcagaagtgacccccccaacacacgcagtgcaggtcctgcctggtgatgacccgtttcactggcaagcaacaattctgggaccacctgaccgtccctcagctggtggtgtttttttaagtggacaattcaactttcccgccaagaataacccctttcaaaacctccaaaagggtttcttttcaagaaaaaagtcttccatcctaatatcaaccgcaatggaagtatatgccttgacattcttcaaaagcagtggagccctgctttgacaatttctaaaggtcctgcttttcatctgctccctgctgaccgaacccaacccggacgaaccttttgtcccggagaatgcccaaatgtacaagaaggaccggccgaagtacgaatcgacggcccgcaactggacgcaaaaatacccgatgggctgaccaacgcttttctgcttgtccaaccgaatggcgttttaagaaaatcgttcctgggcgccattggtcccttggatttggtggtg

SEQ ID NO: 161152 - DNA, 845 bp, Zea mays
  Clone ID: MRT4577_78551C.1
cccacgcgtccgcccacgcgtccgcccacgcgtccggtcgcctaattctttcgatcgaattaggcgccttcttcgtcccacgctccgtctttatttgtaatctgaagcttacaggaacatttgagtggatcatggacggattggtaggcctcttgaaagtccgggtggtgaggggcatcaaccttgcctaccgcgacgcaagaggcagcgatccgtatgtcgtcctacgacttggcaagaagaaacttaagacgagcgtgaagaagagatctgtgaaccccatctggcacgaggagctaactctgaccgtcacagatcccagcctagctctgaagctggaggtgttcgacaaggacacgttcagcagggacgacccgatgggggacgcggagatcgacgtggcgccgctggtggaggcggcgaaaccgatccgcccacgcgtccggaggaacggcgccatcatcctgtcggtgcggccgagcgccacgaactgcctcgccgacgagagccacgtgtgctggaggaacggcaagttcgcgcaggacatgatcctccggctcaggaacgtggagagcggggagattcagctgcagctgcagtggctcagcatccctcctgctgcagccagcaggtgaaggaaacgaagcaatcgcattttcaacctctttgtgaatgtcggattgtaacaacttaaaccagcaattaatggggtcagggtcagtcagggtagttcatgtgttgccctattaatgtacagttggggacagcatgaaattcaagccaagtcactcaagtgttgtaggatcctaaaaaaaaaaaaaaagagggcgcccgctctagaggac

SEQ ID NO: 161153 - DNA, 1181 bp, Zea mays
  unsure (1)..(1181): unsure at all n locations
  Clone ID: MRT4577_78552C.1
caggccggtctgaattacggggggtccggaggggcgggaacacaacacgctctagtagcgagaggccaagcgacgaaagaagtcgcctaattctttcgatcgaattaggcgccttcttcgtcccacgctccgtctttatttgtaatctgaagcttacaggaacatttgagtggatcatggacggattggtaggcctcttgaaagtccgggtggtgaggggcatcaaccttgcctaccgcgacgcaagaggcagcgatccgtatgtcgtcctacgacttggcaagaagaaacttaagacgagcgtgaagaagagatctgtgaaccccatctggcacgaggagctaactctgaccgtcacagatcccagcctagctctgaagctggaggtgttcgacaaggacacgttcagcagggacgacccgatgggggacgcggagatcgacgtggcgccgctggtggaggcggcgaacgcgagcccggaggcgagcctgaggaacggcgccatcatcctgtcggtgcggccgagcgccacgaactgcctcgccgacgagagccacgtgtgctggaggaacggcaagttcgcgcaggacatgatcctccgcctcaggaacgtggagagcggggagattcagctgcagctgcagtgggtcagcatccctcctgctgcagccagcaggtgaaggaaggaagaacaggcgacacgaagcaatcgcattttcacctcttgtgaatgtcggattgtaaacttaatggggtctgggtcagtcagggtagttcatgtgttgcctattaatgtacagttggggacagcatgaaatccaagccaagtcactcaagtgttgtaggatccggctggtgccgctcatgctttgttatgtatgggaggacatgcatcataattgaagtcaagtgataggatcctcctgttttttaagtaaaaaaaaaaaaaaaaaaaaaaaaaaaaaaaaaaaaaaaatttgcggccggtccttgctgtttgtgtttgtgtctggtctgctgcgggtgtggtggtgctgtgcggccgtgctggggtttttgagcccttccggttcctgcctttgggctgngggggtcggggtggttgggttttataccctgtcctccggtcgcgtgcgggttgngtgttgaacagagggaaaaagggggggggcggccgctct

SEQ ID NO: 161154 - DNA, 228 bp, Zea mays
  Clone ID: MRT4577_78553C.1
tactttttcaagcacacgatgcttacgggggggaatttgttagacagtctggttggaagaccaagccaaagaaattggtccaggagtgcaagaaacaacaacgcggacgacaaataaagagagccgccatgaaccgcttcctaacacagtccaatgtttacctcaagagtactgacttatgcgcctacctgcaggtcacatctaagccttttgcgctaaagcattgct

SEQ ID NO: 161155 - DNA, 184 bp, Zea mays
  Clone ID: MRT4577_78554C.1
gacctcttgttaatgaacaccttatccggaagatcatgaatggtccccgctacatcatccctttatgaactaaactggaccaagggaatcaaaaatgtcatactcgcaataaactcgacatgcagaccatcgcaaataagctcactcttctacggcaggtggatcactcactatatcacatgct

SEQ ID NO: 161156 - DNA, 245 bp, Zea mays
  Clone ID: MRT4577_78555C.1
ggtgtaatgtttgaattttgttattggtatattttttttgaaaattaagttaaattttgataatagtacggaggaaataaaaagaaccggaagacaggaataaaacactgtcaaaacaaagatggggtcaacataggaagatagtggagatcaaaagaggaatgtataagctcgcggagcgccttatgtcaaaaaagatattaattgcgatcagcaaatagtcatagaacagtgcagaacttatt

SEQ ID NO: 161157 - DNA, 1728 bp, Zea mays
  Clone ID: MRT4577_78556C.1
atggcccaccttaggtgcaccacacgtaagtcgatgatccctttcctgccctaccaccttgcggagcgtccacttcaccgcacggtgtctgaacagttgagccacttggagagactgcaccactgcctacgcgagaagcaggactcttccccctcacctcaacaggaggtggagtctaggaggcatccctcctctgtgccccagctagaggtgccccttgcaccactacaaggcaccctagctgctggacaagaccccgacgaagatgacgacgatcgtagttcgagccacaacacagagccttttggggtggctgacggtctcaaactgaagtactacccctgttgttcgaccggcagtaccgggagtgtgattgtatcactcattggtgagggcaatcccaagttgagcagcatgatgtttgacaataggcgccaaggctggaggcgtacccaacaagagcaagagaaggttctgtacggtccccatctactaaggggagtagctcagtcctggtgggagtcctacctcgccacccatgccaaccatgaagctatcacctgggaggagttcaaagacaacttccgccagtatcacgttccagaaggcctgatgatagtgaggaaggaagaatttctagcactaaagcaaggacccctgtctgtcagtgagtacatggataaatttatgcaactatcttgctatgcactcaaagatgtcaacactgatgcaaagaggcagccaggagcagcaatcgtccccgtttctcaggcaatccaccctagcagttcaagcagagccaccctcaaggatatcagcaccagaatcagcatcctcatcagtagcaattccagaggtagttcccttagcagcaacagcagtaccgccagcacaactaaccaagaggaagtcagtatcagaggcagaatagtctggcacctcaccttcctaccccagcaaccaatcagaatagccagacagccccagcgcaaggaggaagccgaggatgcttccattgtggagagcaagagagcttatagagtgtttgcaccagaattggtggaactcaagaagcagatcgacgagctgttagagaaaggttacatcagactaagtacttcgcgttgggttgctccagttctgttcgcggagaagaaatatgggaccaagagaatgtgcatagaccacagagctctgaatgaagtcaccatcaagaacaagtaccccctaccaaggatagaagacatgtttgatcagctgagattctcaaagatagatttgaggtcaggttaccatcagctcaggatccgaacttcggatataccgaagatgacattttccaccaagtatgggctatatgagtatacaatcatgtcctttggtttgacgaatgcatcaaccttctttatgtacttgatgaataatgtgttcatggactatcttgacaaatttgtagtgaatgaggaagagcacgaggagcatttgaagatggttttgcaacggttacgggagcatcagttgtatgccaagctgggcaaagtgacatatattctggactggaaagcgccgagaaatgcccgtggggtcaagagtttcattagaatggccggatactatcggcatttcattgaaggtttctccaagattgccagaccaatgacagccttgctagcaaagaaagttgagttcaagtggacacagagtgccaagagtcctttgaagcgttga

SEQ ID NO: 161158 - DNA, 270 bp, Zea mays
  Clone ID: MRT4577_78557C.1
tcagcccttatatctattatcccttcaatcgatgaaaaacacaccttggcgggaccttacactctggagttccatagacggtctatcttggaaaaaaaacaactcgcttgcaaactgccagattactaggacttccatctctagttggcgcccctataagatggttattgcatgcctggccagcccgtgacgacctacgtatagactcgctcaggcgcctgagctgaacgcctcgtcaccccggcgcatgcctatcctgctgcctgcctg

SEQ ID NO: 161159 - DNA, 402 bp, Zea mays
  Clone ID: MRT4577_78558C.1
tgactgcacacgcacgcgtgcgtgggctcggatccgctgacggccctcgtcttttttttttttttagaaaaaaatgtcgcaagctttggacctatataatccgggattatataatccaatttatataatcttatttggtacataagtactcactaagtttcaagggtagtgaaggtaaaacgccaaaaaataatctaaaataaacatccaatgacctgcttacaaaaggccacaacatttccctcctacctcggtcggtacctccagtctgacagaaaataaacagctgacggtgcagcttcatgttagcaccaagataacaggaaaccttccagctttaacaggggaccaaaaagcacaaggttgctggctgtaagaaacagcggtgcgactagaaccctc

SEQ ID NO: 161160 - DNA, 770 bp, Zea mays
  Clone ID: MRT4577_78559C.1
ggccgctttttttttttttttttggagggaaagcggatagcgacgcttgaacaactagccccacgcagccacgaaacaaaaaggccgaaagcgaagaagatctacatcagacagacacagacagataccgtagaacagaaagaaaggcctcccgtccagagtcgtgtcagcgtaaagaaattccacagccaacaagaagccttctcgcctccttgactccttcctccatcctatcgagaaccatgggcaagctgtgctgcagccaggaagatgacgagccggcgttcaaccttctggggctgctcgtcaccgtcgtcctcgccttgctgctgctcatgctgtgcacacctccccggcgcaggcgctgcgtcgcatactaccctccttgctgctaggaacattcgatttcaaggtagggactagctagggagggcgtggtcttctggtgggtgggggcggggaggtgaataggaaggagatgggcaccgagctaggcttcgaatgcggagcttagctaaagtcccaagttactatgaaataaattgcgctgagtttgtaaagcgttctgttagtactgtcaaatgtgcctgatctgcaatgcaacctgcctgttccgaatgtttgttgatagattgaccacgtactgaaacctgtcggtctggtattccagtcgccttccgcgcgcgagatctatccgtccgtccgtgtcgaattttctgtcaggtcaggaaagagagataatctgatgaggcaccgaattccgtcgcgtc

SEQ ID NO: 161161 - DNA, 324 bp, Zea mays
  Clone ID: MRT4577_7855C.1
ttcaagggtttgaacaatggtccttggcttcgagaggttcacaatccttccttccaaggtggctgaaaatgccccaagccaaaggaaattggattcctcggatcaatcaaggaaggatgattccccctcaacccctggaacaaggatgggaatccttgcaaggaacggcgaaattcccccggatggtttaatgtgcccggttggctgaaaattgcccgtggataacaatgccagcttggtgcaatcggagggaagaagcaacctgggcaagcaattggaagcctgaataatgggaacggcttcggttaaggaacggtacaatgt

SEQ ID NO: 161162 - DNA, 658 bp, Zea mays
  Clone ID: MRT4577_78560C.1
cactcagggccgctgtccgcacagccccggcgcatcgacgagttcctgctgcatagccacgagcagcaggtccggcaagctggtcgccggccatggttcaagaaaggcagcaagaaggagcagcacagatggcagaggcacggcatgatcacattgaaacggcgtgatcaaaacaggagatgctgcgagcagatgaaagggatggaacgagttgggccatgagctctcctgatgagcaggtgtttttttcagggctggacagacagacagccccatgccatcagggaaagctgagatggaagtggaagctgttgtagtggggttttcaggtttcatgcaaccagattttgctctacctgaactagacaacaatgttgttgctgctgctgttgtacaagatctttttttgtgctcgcttgtgatgataatatgcatggcaagctccaaaatgtggtttccaatttatgtatagcaaggggttacaaaagttggtaatcataatgcttgtgccctgtagtatcatactattaccacgccaacttaatttcttgttttaaaaaaaaaaaaagatgcacaaaaaaaaagaaatcaatccatagaagcccggaaacccttcttcgtacaaaaaaaactaagggggggtcgttcaaaaggaccc

SEQ ID NO: 161163 - DNA, 258 bp, Zea mays
  Clone ID: MRT4577_78561C.1
tcccgctcccttccacgggactctagacaatggttggcgatcgccaacgactcgcactgtataaatgcatacgcctcagatccgccatggcgcgcccacgccaccagccgaccattcggctgccgaacgagcgctcgacaggcgactacgccgtactgacccagaggaccgtgctcatcagcggcttcaacggctactacaactaccggcaccaggcggacatatggcatgcataccagatcatgaagaagggcggac

SEQ ID NO: 161164 - DNA, 812 bp, Zea mays
  Clone ID: MRT4577_78562C.1
cattgggtacctcgaggccggccgggatgccacaacaagacccagaacccacaatctttctttgtgcacagaaagaagaaagaacctatggcacagtcgtcgtccgcctccgtcaagctgctggttctggttgtcctccctgcgctcctcctgctcctcgtccaagcgcaaggggctcggccagcggcggcgaacgcgacgaccccgacccccaccaccaccaccgggtgcgcggcgtcgagcgtgacggtgtcgcagtccaacacgggcgacagggccgggtacgacccggtgttcgaggtgacggtgcgcaacgcctgccgctgcgccgtccgcgccgtgcgcctccgctccgagggcttcgccagctcggtgcccgtggacccgcgcctgttccgccgcgccggccgcgactacctcgtcgccgacggccgccggatcgagcccggcgccgacgcgcgcttccgctacgcctgggaccgcgccttccggatgaccgccgccgccgtgcgcgacgactgctcctgatggagtgagtgagtgcggtagctcctgcctgcaacgagtgaattgcagtagctcctgtccttcgtgagagagagagactcgctctgtcgtgatccacagggaatttacctcggttttacgcttgtttattagcgcttcttcttaacgtattggctagttcgctggatcatacttcgaataaaaaaactccctctgccgcccgaacaaacaaaaaagtatgtttttttttcagtatcgtaaacaaagtcaatggttcacagtaaaaaaaaaaaaaaaaagcggcc

SEQ ID NO: 161165 - DNA, 514 bp, Zea mays
  unsure (1)..(514): unsure at all n locations
  Clone ID: MRT4577_78563C.1
ttggnggaaaggtgcgtatggntgtngttaggtgttgttttagatcccagatataaattnaggtttnttnttgtttgntttaaggaagnntttggtagtnatgnnaaatggttcatttttgaagtgtgaggaggggggggggagttttttnttnagtantnttgtnatgttgatnaanaaaatagtgaaagttttgattagagaannaatgatttanagttggatananatggtagnanannagtgnatggganaagtnaaaatttnattgagnaagnagnaaatgaggaaatgggagaagtnattagatannttgaagnagaggttattntttaaaatgnnaattttgatattttgaaatggtggaaggaaaatgnttttgaatatttagtttttgnnaggntggnttgnganatnttagnaattnntggatntgnggtttttgttgaatntgnatttgatgaaanttgatgaagggtgggagtttttaatttgaagttgagtnntgaattag

SEQ ID NO: 161166 - DNA, 796 bp, Zea mays
  Clone ID: MRT4577_78564C.1
ctgcacaatctttctttgtgccagaaagatttccacctatggcacagtcgtcgtccgcctccgtcaagctgctggttctggttgtcctccctgcgctcctcctgctcctcgtccaagcgcaaggggctcggccagcggcggcgaacgcgacgaccccgacccccaccaccgggtgcgcggcgtcgagcgtgacggtgtcgcagtccaacacgggcgacagggccgggtacgacccggtgttcgaggtgacggtgcgcaacgcctgccgctgcgccgtccgcgccgtgcgcctccgctccgagggcttcgccagctcggtgcccgtggacccgcgcctgttccgccgcgccggccgcgactacctcgtcgcccacggccgccggatcgagcccggcgccgacgcgcgcttccgctacgcctgggaccgcgccttccggatgaccgccgccgccgtgcgcgacgactgctcctgaatcctgatggagtgagtgagattgcagtagcccctgtccttcgtgagagagagagactcgctctgtcgtgatccatagggaatttacctcgcgagtgaatttgtttagctccgctccttcttgaaaaagataagtaacgtgctggattgaaccccagggaattccccccggttttaggcttgtttattagggctttttttaaacgtattggctagttcggtggatcaaacttcgaataaaaaaactccctttgccgcccggacaaaaaaaaaaaaaaaaaaaaaaaaaaaaaaaaaaaaaaaaaaaaaaaaaccccccccccc

SEQ ID NO: 161167 - DNA, 374 bp, Zea mays
  unsure (1)..(374): unsure at all n locations
  Clone ID: MRT4577_78565C.1
cccacgcgnccgcccacgcgnccgggacagngcncccncccgnccccaagggggaacaggcgagcagcaaacacacacgcncgaaccgagacaagccaanccaanaacggggagggcgccgagcagcgagaaganggggcngaagaaggggccanggacgcccgaggaggacaaggccccggncgcccacagccagagcaacggccacagcaacnggcgcgcgcagcccaagcaagccggcaagccgcggggcggcaagagcagccggcaccggaggaccaacnaccggcgcccggacaacaagcgcggcaacaacagcaaggaggaggaggacgccaaaaacagccagcacgagcagcacggcaacaggggga

SEQ ID NO: 161168 - DNA, 138 bp, Zea mays
  unsure (1)..(138): unsure at all n locations
  Clone ID: MRT4577_78566C.1
ggcccctactatgatcccacccatacgaaacaaatcccgctttttgtacctggaatttattacatccccctagcaattagtagagacccatatcacctgattaaccggggccaaccctggggcggccaacangtacgc

SEQ ID NO: 161169 - DNA, 361 bp, Zea mays
  Clone ID: MRT4577_78567C.1
aaatattcaatcataggagggtttttttttatggggggcgggacgataaaatgtaccattcataacacaaattaaaaacatgttactctgcgtcagaaaacacaggtaaacactcatcattccaacaacttcaaaaaaactacataatattattataatggattaacactacttggccattctaacttcacatcctaaaaaacaatatccactccaccacttcccttgttttaaatatttttcttcacccttcactacaaaaaattcatagtattggctttacagtaaaaaaaaaatttacttcttagactccacccttaccatcaataatgtgtcactaactaaaatactttcaaccctc

SEQ ID NO: 161170 - DNA, 323 bp, Zea mays
  Clone ID: MRT4577_78568C.1
catggttcatttataaatttcaatgaatagaatatgaaaacattatggtctatagagcacattcacatgttacacacttccttatgactgaacaaggagatcagattgactctgtataaacgaaacaaacgctcgggttacattttttgccagtgaaaactgcacttcacactacacataaaagcccccgttttgggcaaatagagttcttgccagggccgacgaaaaaaaagtaggtgccccaggccccattgataccgaacaaaacgatttttcttttggaccgccccggggaggggcctaacttccttgggggcccaaaa

SEQ ID NO: 161171 - DNA, 177 bp, Zea mays
  Clone ID: MRT4577_78569C.1
caaaaagcacaaagagctggggctgaggcaggaagcaggggccctcctggcagctcctctgagtggggagaggttgggcagtgagtgagggacccctaatgcagggactagaagcctcagtttccccattttacccttccactcaatagcctctgtaggttaggctgccccatctca

SEQ ID NO: 161172 - DNA, 726 bp, Zea mays
  Clone ID: MRT4577_7856C.1
tgggacctcgagccggcaggccggggaaaaactttgctcatcctatctcctcaccgcgcgctccctaccgcttgtccgtttcttcctctcccgaagtagcaacgtggtgagtgagaccgccgctactctgctgctgcggaggcccaagccgaccgctactcataccctttcgctttatccatcttctagcttcttcattcacctgttccagaatcgggccaggcttgcggatgccggggtgcggagtagcggggagaggggcgtgggggtgtcgtcggccgcacgccccactccgcgccgcccctgcctctggatgcctatcgctcgcggctacgggaggcaacctgagctgaaatattgcacatcatcacaaagcaagtctgtgttactaggagcaggatttggtcgacatgttactaggagcaatccttatctgctccaaaattccagtagcactacaatggcaagactgcaaaagtctgggcagtttcagcaacttgtcttggacccttcaagaaactatttgactaagacattctacaatgcaaacatgaagaggagagttctgtcgagggttgagtgttttgtgtcttcagatccaataaacaatggttggttgaaaccaaggagggctgagaatttcactagcttggagagcgcatgtgtccagcgagaatacaaactaccagtcagaacacgtggtgactgtaaagaaaagcagaatga

SEQ ID NO: 161173 - DNA, 534 bp, Zea mays
  Clone ID: MRT4577_78570C.1
gacatgaattacatgatgggaaccgctatccgctaataccagagtccataaacaaagcgctccccaaacacgaaaacaaaaccgttcatcacttgctcgcgatgatgggaggaggacacggcaaaggggggccaaacggtccaaccaacaaatgtgcaccaaccgtgcctttgcgcgcgcaaagcgtgcaaaaactgccaaggcactcacgggttcgtcgtgcgcgtctcgctgtcctcctccgctccgcgccacatgcacaagcaggccggtcaccactcaccatgaccacccccactagccactgcctagcgtggcaacgccatgggggtagcgtagctggcgtgggccgacagcgacaaggcgccccgcgccgtcccagcccagggcaagccccagcaagaccagagcctcggccgcttctaggcgccgtcggcggcgatcgacgacgcaccaggcgggggtgcgtgcgcctatgtaagtgacgagccggccgggcccacaggcgcacctaactatcgcgggcgcgtttcc

SEQ ID NO: 161174 - DNA, 1107 bp, Zea mays
  Clone ID: MRT4577_78572C.1
ccccgcgtccgcccacgcgtccgcggacgcgtggggccgccatcaagaggtagacgcagacctgccacccgacacacacatccatattattcatccatcctccacgggctttgcttgtgttccgtgccagtctgaacaacactagctagctaggtcgtcgttcctaaagatctgaccttgcagcaggcaccacagcacggggagcataaagctgggcgtgccgcaccggagcgccggcgcggacgagcgcggcgagagctccgcgccggcgatggccggcgtgcagcgggaggtgtactcgaagaagggcgtgatgcggcggctgatgcggtggagccggccgcggtgggccgcggcggagcaggcggagtgcgcggtgtgcctggacgagttccgcgcgggcgacgtgctggcgcacctgcgctgcggccaccgcttccactgggcctgcgcgctgccctggctcgagggcacctcacggtgccccttctgccgcgccgccgtggacgccggcgccgccgccgacggcgcctagaagcggccgaggctctggtcttgctggggcttgcccgtgggacggcgcggggcgccttgtcgctgtcggcccacgccagccacgccacccccatggcgttgccacgctaggcagtggctagtgggggtggtcatggtgagtggtgaccggccttgtgtggcgcggagcggaggaggacagcgagacgcgcacgacgaacccgtgagtgccttggcagtttttgcacgctttgcgcgcgcaaaggcacacggttggtgcacatttgttggttgggccgtttgccccccctttgccgtgtcctcctcccatcatcgcgagtaactgatgaacggttttgttttcgtgtctggggagcgctttgtttatggactctggtgttagcggatagcggttccatcatgtaattcatgtcaaaaaaaaaaggtcgtctgatcgatcttggagaaagaactgtaatttagatcaagaccaatccacatctgtgtacagtctcagtgttgttgctctgaacttgtatatttttctgtttgctcagttgaaggtaaatgcagttggaggtgaggtctctttag

SEQ ID NO: 161175 - DNA, 551 bp, Zea mays
  Clone ID: MRT4577_78573C.1
ggcgaagccataactaatatgcatatttgaagcagagctttgtgagctcgtacagaacttaggccacatccaaacaatcggttgcctacgcatggtttcctcggattcttaacacctagctggaaatgccatcaccctgtttgctgtttttcgctgacccatggcgctagactagtacacattgcatccaatcaagactctgacacggagatgaggaaagcaagatatactatagagcataggattcttcgctggctggaaacatgaatatactccttctgcagaagacaaaagagcaaacctataaacgctggagggagcaaagccatggctcctataacaggagctgttggtctcaagaaagttctcattcttccgcggtgccatggccaccaagcgaggcctctgtgtcaccaggattgtcagtcaccaacctttcctcaagaacactctcaacactctaccttattcttgaagccttgttaggatctgatatcgtgagggcgactgccaaaggcctagagcttgcacacaacagcctatcaaacagg

SEQ ID NO: 161176 - DNA, 309 bp, Zea mays
  Clone ID: MRT4577_78574C.1
gccgtccctttgggcggggtgcggtgccctcctctcggcgaactttgtacaattttgcaaaagggaaatgtgatgtgctgttgtggggcacctggcgattgctaatcccagaattgagcgcgcgtgacattcaccccgattgggctgacaggcccctgcattacacctgctgagagttggacatgcggcaggacctttttacctgtgttaaacacgtgtgagtgctttttgtcggacaccaccaacgggctgactgcaggtgcacctacatggagacactgccgatatcgatgtcaattgaagattgtg

SEQ ID NO: 161177 - DNA, 616 bp, Zea mays
  Clone ID: MRT4577_78575C.1
cgggcgccgagaacggcctacctttttgcgtgatgatgaggacttgcacccggggcaaacttagcggccaatgctcgtcttcttgacatgacctacaagccggaaggtgtctgcaggtggatgcgtcgtagtttgcgtatgacgaccaatggaaccgagcccgtttaagttacacgtgatctttctaggtcgtaacggaagtatcgcatcgctctgacacaactagagggaggactatagactgctgtacgctgacgagctttatatcatagtatggtaatctactttacccttggacatacttgccgatgctggggtgtattcctgggcgaagctttacctgctattatagtgtgtattcaatttcttacactgtgacaccacccttgagattgaacaatgactgaactagctgaacatttgcaagctgaactagctcacctcacataatacttaccgttgccattaccaactgcggtttggcgtaaacatgcgcgattctggggactcagtgacctgaatatctgaaaccgctgaaacaatacgactcacatcctctatgagtggaagagcaggtagctactatttataccggaacgagaggatatcttgattc

SEQ ID NO: 161178 - DNA, 1117 bp, Zea mays
  Clone ID: MRT4577_78576C.1
atttgagtgaactcctgaaaattttgcaagacaactgtgtcccatctatttttatccagaagatatttacccaggttttctcatttatcaatgcacaacttttcaatagccttcttgtacgtcatgagtgctgctctttcagtaatggagaatatgtgaaacaagggttggcacaactagaggtgtggtgtggagaagtgaagccagagtatgcaggatctgcgttggatgaactcaagcatatcaggcaagctgtcggtttcttggtcatattcaaaaagttcaggatttcatatgatgagattgtcaatgatctctgcccagtactaagtgtgcagcagctttacaaaatatgcactcagtactgggatgataaatataacacagagagtgtgtcagaagaggtccttgaggagatgcgaacattgatgaccaaggaatcaagcgatgaaactctggggaacacctttctactggatgatgaaattagcttgcccatatcacttgaggagatagcagattctatggatgccaaagaatttcagaatattgccccaccacaagagcttactgcaattcctgcctttcaattcttgaagagctaagccctggaaggcctaggcctacgttgctgcacgggcatacgcaaatacatctagattcttccatcagatgttatagggtttcgattctccttgtgctgtgtaattatgttgtccttgtagattggttttgttgtgttaagtttcagttggctcggttggcattagataagttgttagttgaggttgggataggttttttttttgttctgcctcctgatatgcgtttgtgcagtacacttagactaaaatcttcatgtttttgttatatatgacggtggaagctagggatccgttggaaatcattcttttatccagatttgattgggtttggttatgcagagaaatgtcaataacttgtaatggctggggcagctagatcgtgagttgttgcctccatgggggcagttgtagacttgtagtggcgtgagtttgtggcagtcactgccctgggctgtttatatttgcccactttacattttatctctcttatgcagctctaatgcgtattcaag

SEQ ID NO: 161179 - DNA, 455 bp, Zea mays
  Clone ID: MRT4577_78577C.1
gcacgtgccgaaatacaagggttccggtcgtatctctctctctctgagacctaaagaggttgagtctatatatccgcaaaccaaggggacctacataatgtgcggctgcggcgcccgtcgttgattcattgcgtggctcaaactgtattttggtgcggggtgaacagccatctcaagctccgtttcgcatagaatgatgagagcctctgagttctgagctacgcgggctggctgttgcagctgagatgaatctggtaaagaatcacagctctgcatcacctgacactccgaattttacagtgaatatcagataccatggggtctggatcaaggacacctgatccgaaaatactagtgaaacatgcaaaaaacacatacgttgatacctgctgccctcgctcagattcgctataccatgattacactcgcgaacgtcaaaaagaaaaggattttgt

SEQ ID NO: 161180 - DNA, 593 bp, Zea mays
  Clone ID: MRT4577_78578C.1
cggtcgttttttttttttttttttcggaacaaaggggctcaaccctttcgtttcatgattattataacaatgaggatcaccaccgtttgttatctatgctggtactatataacataacatctcggtttacgttttgcagaggctgccatgccaaacatttattgtggacgtgctagctctaccaggacccctgggtacatctgtgtctccgcccattaccaagggaggtggggccctggttagaaggggagctgctgacagtgctgctggctataccatactctcgcgcgcatacggacggagttgctgctgcggcactggaaggcccacggacacgacgtcatggtgggcctcgaaccttagactcctcttacggcgagtgcaagttactacctaaccagatcccgcgagtagaaagcgatcacagcgaccgtgcgccaccaatgttgtggagccatgagccttgccgaacgacattgttgatcccgtcggactcgtaatcggagcccccagagatgagcatatggaccagcccgacggactcgagccacaacccccgcgcgaagtggctgatggtgcacacatggaacacc

SEQ ID NO: 161181 - DNA, 831 bp, Zea mays
  unsure (1)..(831): unsure at all n locations
  Clone ID: MRT4577_78579C.1
cttggcagagcctgaggtccattccatctcgatctcggcgatgccgcgcatggcgcgacgcacagcaatgacttcgcgaagtcgcgaagctgcacgcgtctagcgagcgcgtgtagctcgcccccccctggcggaagccgccaccacaggcatggcatctggctggcggagcattcgtctggccggcgtcagacatgacgcggccgagatcaagccggagacggttcgtggcctcttctcaccaccacagccgcagcctcccagtcgccaggatactaggatgcgctcgtgaagactttccattacgttgaatcaaagctatgtcctcctgtcctcctggatcccaaggaaagagctgaactgcggacttcacgttggatgaaaggtgaaggaggaaccagcccgttcttatgttgggtatgcagcccccctcggcagagaggtataacctcgccggagaagacaactatccccatggaccgaaggtccatgacattgatgtactatatctactactggcgtctcaagtaaagcttcactaactgcatgtgaagtatgtgttgtaagttgtaacaaagctctgcttaatccgcgtgtcacaatgaaccttgggaaatttgggctactattagggctagtttgggaacaccattttcccaatggattcctattttgcccaagggaaaataaattaattttcctgggaaaacaaaaatctcttgggaanatgtggtttccaaatcagcccttagaatggtgaaatgcattgngaagcttcctatgccattcgtgctcaacatgaaaggtcactagataacactagtaactaat

SEQ ID NO: 161182 - DNA, 545 bp, Zea mays
  Clone ID: MRT4577_7857C.1
ctgctgttcaggttctgtgactttggttgtggctgatctatctggatgaaacgtggctgtttggacttcgtgaccaattggtgactgggatgcattttttgatctttgttattaaagaatgggctaagctggcctgaaataaaaggttcgtccatgatggcatcctcgaacagtggcaggttgtttctggttggctagcattatgtgctccatgcttaatatttctgatgctccttgatatgtgtagttgtcacacctaaccacatggcttgtaactcgagctcctctgggtacatgcgcaaataggctgttgcctaggtgacctcgacaggagtcgcaacaagctggcactaatgattctaataaagcaataccttccaacacgttaaaacggggtgcaaaattcaccatgatttttaagaatctgtacaggtgatggaaacgtatgctcattgcaaatcaataacatgtactccgtctcaaattaaaattttatcagcatcttctagtggatatatttatacaataattaatgtatgttctat

SEQ ID NO: 161183 - DNA, 551 bp, Zea mays
  Clone ID: MRT4577_78580C.1
caataaaatttcaagtaacacaaaggagggatggggggtctccatgtgtacccaatgttcatctcagcagatgtgcaacatggttaggcataagcaaagtactatgccaccaagcacgtgcaatagaatatagggtgaatgatgaagcaagtccaatgccatgaaagatgtatcaactatgtatttcttatggctacaaacaatcatcaaccaaagtatgcatagagccagcatttaggctgcctgcagtgggcagctttaaacaatacgctatgtggatagtgctacgcatagagtaaaaacccactgcagtggatcacctcaacggccactctaaatgcatggaagagagagagaacgccatatatagagtatatacacctctactccaaatctctctccgcttggcgttttggtctgtattggtgagcggtggtatggaggctggccggtgctgtgcctgtgtgtgcagtagtggctttggatgaagccatacaataggggaacttttgctttgcaccatggcctcaattcgtctgagctcccatgta

SEQ ID NO: 161184 - DNA, 112 bp, Zea mays
  Clone ID: MRT4577_78581C.1
gacattaaacaacctatgtcaggacacaagcaggaatgacgtactgggtatctaggaaacaagggcgtatataagacgtcccaccggggatggaaacaccctaaaaacacca

SEQ ID NO: 161185 - DNA, 465 bp, Zea mays
  Clone ID: MRT4577_78582C.1
gccggccgggccggaatcatgcagacgaaatctatatagatgtcagagatccctcgacaagattgataaggaacactgacgtgtgcggcacagcgcactccaccgctgtccccgcacggcaagcgacaccccgatggcggatccggcgcaccgccactcatgacctccacctcacgcaccgcaataacctgtctacgctccctctcctcgtccaacattgcccgcagggtgtacgtgctgcacgagaaggactcctccgacaactacccagacaacgagcgacggacgaccgtcatcaagcgactatgagagccgacggcgacgccgtggagaacaacagcactgttctcacctacaccacgagaatgacgacgctctatggatgaccaccgctgttcgcgggcggcatgaagtccgagccgctgttccacaagatcatgcagctagtgtgtgtcggctacaccg

SEQ ID NO: 161186 - DNA, 875 bp, Zea mays
  Clone ID: MRT4577_78583C.1
ggcccgctcgagggccggcgggccgggaaatcagtatcgacaagacgtcaaaaccctaggccggcgacgcgttcccctctctcgccgccggattcccctccgcccgcgcgtctcgcggacgtcttcgcgctctccggctgctctccccggttcgcccaccaccagcaatgtcttctcagatggataaccgcatccagtccgctggaaagcgcgcgcgcacagacggtagccggcgtgaggacgactggatttgccccagctgcaacaacgtcaacttcgcgttccgcaccacctgcaacatgcgcaactgcgaccagtccaggcccgccgatcacacggctatgcagactccaccccactactcggtgccggggcggtacatgccgccggggacgcctccgtccatgtacctcaccggggctcctcccccgtatggctccaacctctataatgggcatcccatgccacgctatggcattcctcagctccctccgggctctggatatccgtatggctatggcgggcgagtcccgatggggagcccctatgggccaatgcatatggcggcgccacccccgtattctagtggttctatggttggtgcaggtggaatgtacagcatcagcatgcccatggatagatatggcttgggctcacccgctggtcctggggcaatgggcacaagggctggttcctattctgacgaaggctcacagaagaaatctgctggagctggacgtgataatgattggaagtgtcctaattgcaacaacattaacttcgcctttcggacagtctgtaacatgagaaaatgcaacacaccaagacctgacacccagggatccaaacctgacagttcagagctccaaaaccaa

SEQ ID NO: 161187 - DNA, 275 bp, Zea mays
  Clone ID: MRT4577_78584C.1
atgtttgaccaagacactctgggggcattcacagggaggaagatgtgcagggtacggcgtcactgcctgaattatggaaaaagcgacaggagcaacctcctaggagggaggaggacacatgcaaatcttctcggcaaaaatgataattcgaactgatctgtacggatatatgtatgatgtgcggatggtatcaacacgggcacctctgcaagccaacaactgaggcaggtttagacggggtccctccgctgtatggggccattgtagacgtcctt

SEQ ID NO: 161188 - DNA, 358 bp, Zea mays
  unsure (1)..(358): unsure at all n locations
  Clone ID: MRT4577_78585C.1
ggnagccacagcgttgtgagccccgctgccgaggttgttacaaatccaagtaacttatgggcatgacgagggtactcggtatcctgttcgacggcgcgaccctagtagccggcactcactcatcccacgagcaccatggtgaggctcccacctgccccgggagccgactgtacctactgggagacttcccaccctgggaggtgaccgagctcccacacaacgaggactgggaaagcgttttggatactgaggcaacgctgctgccggctgtacactcagacaaagatccagcctactacggcggttagatcgtcgtaaacgctgctcatgactgcgtctagcaatgcttcttggtgca

SEQ ID NO: 161189 - DNA, 246 bp, Zea mays
  Clone ID: MRT4577_78586C.1
cccactcgtcctcggacctattaaaatacgcccactcgttgtcacttctcctccctcctcccatccatagcatcttgtccctcttcaacattcatctcttcaccttttcctcccccacattgatccttgaccctcgtactcctttcttgattcctactccgattaatctcttaccaagattaaccttccccttctccacgctcgcactctcactctcacatacattcttcttaccacatctttaaa

SEQ ID NO: 161190 - DNA, 581 bp, Zea mays
  Clone ID: MRT4577_78587C.1
ccggccgggacgcttccgctgtgcctgccgttaccttgcgcctactggatcgaccaaccctctcccgctcatcggacggcgatgcaggtcggggacggcggtggggactcggcggacttgcggggccgccaccggatccaggccgagctcaagaagctcgagcaggaggcgcgcttcctcgaggaggaacttgaagagctcgataaagcggataagtcctgggataggtggtttgaaggtcctcaagatctgcgcggatgcaaatgctggtttttgtgatactgggcaatattatcaagagaaacagcaagaggcgattcttgctaccattcaagtgtacatcattttttttgtccccgcagtataaccagtatccatttgaggcgaggattctggatggcatcatccaaagatccgtgtaaggcgtgaaggactcaggaaatggcctgagaagtgaggacagaaatctggaattcaaaagtgacaaactttgtcctaacatgttctctgtagactgaactgaactcttgttgactggcaatcagtttgttttgtgtaaaaaaaaaaaaaaaaaagcggcc

SEQ ID NO: 161191 - DNA, 781 bp, Zea mays
  unsure (1)..(781): unsure at all n locations
  Clone ID: MRT4577_78588C.1
attgggtacctcgagggcggccggggcgggagacctttctggtctggccacccgcattccgtgacagttcctcgtcttcttcctctccgcctgctcgcttccccaacccactcacgcttccgctgtgcctgccagttaccttgcgcctcactggatcgcaccaaccctctcccgctcatcggacggcgatgcaggtcggggacggcggtggggactcggcggacttgcggggccgccaccggatccaggccgagctcaagaagctcgagcaggaggcgcgcttcctcgaggaggaacttgaagagctcgataaagcggataaggtatcatctgcgttgcaagagtttctaatagcaatggaaagaaaagctgaccctctacttcctgtatctgctggacctgtgaatcagtcctgggataggtggtttgaaggtcctcaagatctgcgcggatgcaaatgctggtttttgtgatactgggcaatattatcaagagaaacagcaagaggcgattcttgctaccattcaagtgtacatcattttttttgtccccgcagtataaccagtatccatttgaggcgaggattctggatggcatcatccaaagatccgtgtaaggcgtgaaggactcaggaaatggcctgagaagtgaggacagaaatctggaattcaaaagtgacaaactttgtcctaacatgttctctgtagactgaactgaactcttgntgactggcaatcagtttggtttgtggttattcaaaaaaaaaaaaaaaaaggcccta

SEQ ID NO: 161192 - DNA, 468 bp, Zea mays
  Clone ID: MRT4577_78589C.1
acactcaactccttttaagtgatcgcgcagagacaaacatatcggacatacaagacatgagtttattggtgttatcggcaacgatatttttcacgtaaacatacaagagtgtgtagtcatactaaactgaggtaaaagggtgatggggtggatgatgaatacctggttgttaggctgttatgagtacaaggcaccgcctgggcgctacctgtctttattccgagtgtaaaaggtaccacaaatttattccggaaagaggatgccttgtttaaaggtggggttttgaggtcgatagatttatggtaggagggcacacagttctagtttttgggtgaggtggcttcatgggtggaccgagagatttatgccatatatgtgacaggcgtgagtgactcaacacatgttcacttctggcagatattggtgctgccccgagaatttgggagggcctggtatccatggccttta

SEQ ID NO: 161193 - DNA, 553 bp, Zea mays
  Clone ID: MRT4577_7858C.1
gcacgaggaaacactcagacagatgctgtgccgtgctgcagtgcgcccgtagcagcacagacactctgccgcacgcacctgcgcttgtcgcttcccctcttgctatatctcctgctgcttttgctaaagccggaaaccaaaaagaaagttgagcttttcgtcacaattttgctttacttattaagtgctagtccgttttgtttatacgaccttactattagcttctagcccggattcaaagtgctacagtgcgttttcactaacaacatttaggattatagcacatcaaatttgactagtgttacaaaaatatatattagcatcatacatatttagttaaagttaaaaatatttaatttgtatgaaaaacaagagtgacactctctatgggataggccgagtacgcaccatgcatgattactactattaggctatctccagcagcgttacctattctaccttctatttcaaactttacttcgtaaacagtataatttgtaatgcaaaacaatgttttatacggtcatatacacggttcgctagccacagccta

SEQ ID NO: 161194 - DNA, 243 bp, Zea mays
  Clone ID: MRT4577_78590C.1
aacaccttctgaaaacaacaccttctgaaggcggtgtgtccagcttttatgtggagggctcacactgaaaagctcacaaaatattgacaatttatctggtggggagaagacacttagatatctggctttggaggaggctattcaccactataaacctactcttttatatgttatagatgacagtgacgctgcttcggactttaagaacggataattgtgggacactatgtgaaagatagaacc

SEQ ID NO: 161195 - DNA, 491 bp, Zea mays
  Clone ID: MRT4577_78591C.1
gagatttaaatttatttccgcgttccaaaggattctaatggttttacaacagcgtagtttgtgtacgcgctgtcaattgatgatgacaacgtgttccaagctttgtccacatgctgctgttgttagtcagcttgcctttttttcagcccgtctctcgattttagaagatttcagtcaatctctgactttcttttttttaaaaagagagtagatggaaaacaattcttgtgtttcttgtgcgtgcgatggaccattgcgaagctagaaagaaaaggagagagtgatataagtagagcgggttacttgagtatcatcttttatacctctgtcccttgcccaataattgaacatgtatactgctgctggtccctgctttcattcgatgcgtgcacctacatatagtacactacaattcccgtgttctgtgtccttggctttaatccatactgttttttactatttctacagtgtttttgtctatatgcctatat

SEQ ID NO: 161196 - DNA, 400 bp, Zea mays
  Clone ID: MRT4577_78592C.1
aattgttaaaagtataatcagggtttggttttaaaagttagaatacgggggcatgttaaggagaaatactcggggggggggggggggacgggcggcaatttagcgtccaaaagggaccgtaaggcagggacgccaatcttagtgaagaaagcacaatacagaggaacggccggtgaaaggagccacgctgcaaaagaagcactcatgcgagggctgggagagggccttgatgaacccatcagatgaggaggagaacacatgcctaaaccggctatctcagagccggggcgatggaggctactgagcaatataacaaggctcgcaacgaactcatctaactttgaaaagatgctctcccacagaggttggaacctggcttgccacaagggagcaagaagca

SEQ ID NO: 161197 - DNA, 812 bp, Zea mays
  unsure (1)..(812): unsure at all n locations
  Clone ID: MRT4577_78593C.1
attgggtacctcgaggccggccgggggctcttgttctcctcctcctctgtaattctccctattgcaaacgactctacttttcatttcaaggaacacaactgtgtaattaagagaaggaacgggacaagatgttctttcagaggaagaaatcaaagaaagccaaagactccggaggatcgcagaagaaggggaaagatgggcgtgggaagaacgccaagggaggagggcttgatgccctcgcaggaagcctccagtcagccaagaaggacgccgagacggcgactgagaagcttcaaggggatgtgaagtcgggcatggaaacgatcctgcacaagggctcaggcctcctcgagaaagccaaagaagaactcgggagtcactccgacgccagccgttcctcaaaggaactagagagaggaagcgaggaacaggggaacaacaaggacatggacgctttcagtgcagtgatggacaaggtgaagggccacccagaagcgatggagaaggtcagcgctgtgatggacaaggtgaagagccacccggaagtggtggacaaggtcaaggacgaggtgatgagcctcgctggcgctctccgtctgcggagacatggatccgaagataaagaagctgagtccgaagagaaggcagaaggagcgcagagcgccgacgagggtgcctctgatggcatggctggagaaacctagtgtgttggagcaggccgtgcnagaagattcaggctgtcgccgcagctttgcagcagacagctgaaccccgagctgnnaatncagctgagaccgctgctgctgctgctg

SEQ ID NO: 161198 - DNA, 722 bp, Zea mays
  Clone ID: MRT4577_78594C.1
tactacagaagatcgccactctcgacgatacattagccgccgcctccgcctccgcagcacactccgaacgaacacccatgacgatgtcatgaagcgcacatcgcttcggtcgcggatcccgaagctgttgccgcgaccgttactatacagcaatgcctgacttccggtcaccacgtgcttatgaacgtaccactttcgagactactccgacactaatgcgatagtgcgctgcgtcccaattcatgacgcacaagttgtacaatgctcgcaccggacatgcatgtaacagtgacgaaaagcggcttcgggggtacacaccaacaatgaggtgaatgctctgatcgtattgaaccgtatacatggagctgctccacatgagtgacgtgctcatcgcatgcctacacggagttctggttgatgaatgctcaatagaatcagcctcaagaggggtgcctcggaccgtggtgaggtgatcacgaccccgacgaaggctgagggacccatacttgtcttcatggatgaggcgagtgtatgcttgagaccgcgactccgtagtgcgctatgatgtgatatatgatatgacgttcgcgtacatctgatgatgatgttacctgagatgactccgtatgctgccagaaatagctatctgagtctatgtgataggtgcctaattatactgatctagagcgttaagcctggaacattgatgatatttgtgtcaa

SEQ ID NO: 161199 - DNA, 231 bp, Zea mays
  Clone ID: MRT4577_78595C.1
ctatccttttaatagcagaaactacatatacatcggggtttctcgaccattcatggaagtaatatgctctcaaaaatcatgaattatatacatatatacgtattgaattgatgatatcaagaaccttgctatttacaaaaaaaaaaaaaaagggctgtcgtcttctattaaacttgtcttatcccataattaattctttaccagttccttcatacctaccagctttcccta

SEQ ID NO: 161200 - DNA, 1035 bp, Zea mays
  Clone ID: MRT4577_78596C.1
ttaaaaaaaaaaaaactgaatacgctcttgttctcctcctcctccgtaattctccctattgcaaacgactctacttttcatttcaaggaacacaactggatcacgagaggattgaagtggattgagggagaattgaactaatttattcctcaattccctctaatcttccgtgatctctggtcaccaaatcagcccgcatgtgattatattatcgcagtgtaattaagagaaggaacgggacaagatgttctttcagaggaagaaatcaaagaaagccaaagactccggaggatcgcagaagaaggggaaagatgggcgtgggaagaacgccaagggaggagggcttgatgccctcgcaggaagcctccagtcagccaagaaggacgccgaaacggcgactgagaagcttcaaggggatgtgaagtcgggcatggaaacgatcctgcacaagggctcaggcctcctcgagaaagccaaagaagaactcgggagtcactccgacgccagccgttcctcaaaggaactagagcgaggaagcgaggaacaggggaacaacaaggacatggacgctttcggtgcagtgatggacaaggtgaagggccacccagaagcgatggagaaggtcagcgctgtgatggacaaggtgaagagccacccggaaatggtggaaaaggtcaaggacgaggtgatgagcctcgccgctgacgctctccgtctgcggagacacggatccggagataaagaagctgagtccgaagagaaggcagaaggagcgcagagcgccgacgagggtgcctctgatggcaaggctggagaacctagtgtgttggagcaggccgtgcaagagattcaggctgtcgccgcagctttgcagcagacagctgaacccgaagctgaaattccagctgagaccgctgctgctgctgctgcagaaacttctgctggaggagacaagcctgaagaaacgaacggggaggtggagcaagatgacccgaagaaagcgctcgacttcgctgggttcttcgccatgctgct

SEQ ID NO: 161201 - DNA, 1268 bp, Zea mays
  unsure (1)..(1268): unsure at all n locations
  Clone ID: MRT4577_78597C.1
gcttgttctcctcctcctctgtaattctccctgttgcaacgactctaattttcatttcaaggaagacaactgatcattatattgaactcgcaactcacgtataataaacagctgccgaggcagagaagatgctgacatggcagatcgtcttcaaaatgtaattaagagaaggaacgggacaagatgttctttcagaggaagaaatcaaagaaagccaaagactccagaggatcgcagaagaaggggaaagatgggcgtgggaagaatgatcttttcgatcgtgccaagggagggcttgatgccctcgcaggaagcctgcaggaagccaagaaggacgccgaaacggcgactgagaagcttcaaggggatgtgaagtcgggcatggaaacgatccggcacaagggctcaggcctccttgagaaagccaaagaagaactcgggagtcactccgacgccagccgttcctcaaaggaactagagcgaggaagcgaggaacaggggaacaacaaggacatggacgctttcagtgcagtgatggacaaggtgaagggccacccagaagcgatggagaaggtcagcgctgtgatggacaaggtgaagagccacccggaagtggtggacaaggtcaaggacgaggtgatgagcctcgctggcgctctccgtctgcggagacatggatccgaagataaagaagctgagtccgaagagaaggcagaaggagcgcagagcgccgacgagggtgcctctgatggcatggctggagaacctagtgtgttggagcaggccgtgcaagagattcaggctgtcgccgcagctttgcagcagacagctgaacccgaagctgaaattccagctgagaccgctgctgctgctgctgcagaaacttctgctggaggagacaagcctgaagaaacgaacggggaggtggagcaagatgacccgaagaagcggctcgacttcgctgggttcttcgccatgctgctcgagaggttctgctccccggccagcaagaagaaagattaagttggttgcaggtccggcttgtggatttctcgttctgtcttctgtgatcttcgacttggacattacatggagtgcgtgggattgtgggtggtgtacagtctgcagttgtgttatcttaaaacaacaaatcagctattggttttttactaccttactttgatgacggggcaatggctacgttttacttgatgtaattatcatcgccattgtggatttaatttattatatctctactatnnnnnnng

SEQ ID NO: 161202 - DNA, 389 bp, Zea mays
  Clone ID: MRT4577_78598C.1
tttccatttatagtagtggtatataaaaagttttatataaacaagatgattttaaaatatggggttattacagtaagtacaaaaaaatcttgaataattaacctttgaaaatcactgcagtaaagctaaagcaacagtaaatggttataattaagagacttggctcttgaaaagcctcaccaatatctattcttttaatttttgttttctttcttctgattttacagctaacccacaatgtgacacgtatgtatatacaaagtggcacgtatgtatataaaccttaaattgtttaagatctatgtgagctgtgttactgcattatggggaacaacattaacgagtatctttcatgtctgtttcacagctaactactgtatttccagatg

SEQ ID NO: 161203 - DNA, 875 bp, Zea mays
  unsure (1)..(875): unsure at all n locations
  Clone ID: MRT4577_78599C.1
attgggtccctcgaggccggccgggaatctccctattgcaacgactctacttttctttcaggaacacaactgatcattatattgaactcgcaactcacgtataataaacagctgccgaggcagagaagatgctgacatggcagatcgtcttcaaaatgtaattaagagaaggaacgggacaagatgttctttcagaggaagaaatcaaagaaagccaaagactccggaggatcgcagaagaaggggaaagatgggcgtgggaagaacgccaagggaggagggcttgatgccctcgcaggaagcctccagtcagccaagaaggacgccgaaacggcgactgagaagcttcaaggggatgtgaagtcgggcatggaaacgatcctgcacaagggctcaggcctcctcgagaaagccaaagaagaactcgggagtcactccgacgccagccgttcctcaaaggaactagagcgaggaagcgaggaacaggggaacaacaaggacatggacgctttcggtgcagtgatggacaaggtgaagggccacccagaagcgatggagaaggtcagcgctgtgatggacaaggtgaagagccacccggaaatggtggaaaaggtcaaggacgaggtgatgagcctcgccgctgacgctctccgtctgcggagacacggatccggagataaagaagctgagtccgaagagaaggcagaaggagcgcagagcgccgacgagggtgcctctgatggcaagctggagaaacctagtgtgtggagcaggcgtgcaagagatcanngctgtcgcgcagctttgcagcaggcagctgaacccgaagctgnaattcagctgagaccgctgctgctgctgcagaaacttctgct

SEQ ID NO: 161204 - DNA, 636 bp, Zea mays
  Clone ID: MRT4577_7859C.1
gtccatcgtttccttccttccttgcacacgcacgaactgatgaacgagctgacgccgtgctttgtgattgtgactgtcgcgcatgttcttcgtgtcactgtgacaactttcgtgacgaccatgtgcatgcatgcatgatcgaccggaccgacgcatgcagtacgagaggcacgaggcgaagaaggacccggagcacgcgcagcggcacaagatcgaggagggcgtggcggcggtggctgccctgggcagcggcggcttcgcgttccacgagcaccacgacaagaaggaggccaaagacgcggcggaggacgccggggaggaggaggagtccggccgccgcggcgaggggaagaagaagcaccacttcttcggctgatcgggctgctgctcgatcgatctacttgcgtacgtaggctgctccccaggaccagaaggagcatgcatggagggcgaacgaagtcacgggggtttgattgcccgtctatgtatatcatgtgtagttactgatgatgtgtgtgcatggtacttcgtacgcgtgtttggtgatcgatgtgtggtgtgtgtgtctctgcatggacattttcctactctgcgttttttctctctctactgatatagtatatatgtggtgtgtct

SEQ ID NO: 161205 - DNA, 974 bp, Zea mays
  Clone ID: MRT4577_785C.1
ggctcctgcggattaagtggctgtgtatttcgattccatagcttctcttttgataaggaatcccgaggaacataagcatatcccttaggaagacgttgattctgtgtagaagcttgatcaaaggcgagcgcgagagaaacctgaaccaacttcccagacccgctactccctcgccgcgatttcctcacatggcagcgctgcgcctccgcgaatcactcgagaggaacggcccccgcttctatttatccggcccttgtccctgcgccgacccgcgttgccccagtcccgatctcgccgcccccttctcctccctccgcgtccatcgcacccgctcctgatcccgcttgcttgctctggttctgcttccgccgtttgtctcgcgggtcctgggagctcctgagccctggttctgtctctagcctgtcttgccatggggaagagcaagaagagcaaggcccgcggcggcagggacgacctgctcgacagcagcgacgccgacagcgtcagctcctcgtccaccgcactgtcggatctctccatctcgtacgctaccgagcacgttaactagaaggagttcgcgctgaacaaggacatgggcgacgctctacgagaagagggcgactacaagagaggcagcattgggtaaactggttgatgcctttgaaagttttatgctccatggccttgtggaggacaagtatgccactctgatgagtcaattcaataattctgtgaaaaggggatctactaaggaggtttttctggcatctcattccattgggttattggctattacactcggtgttgggagcagttcacatgaaataatggaggagtcacatccccaactttgtaggatacttcaagcttggtccgatgcatcaaagatgatatctgcacttgattgtttggctgtcatcacatttgttggagcatctgatctggctgaaacagagttatctttgaaagccatg

SEQ ID NO: 161206 - DNA, 480 bp, Zea mays
  Clone ID: MRT4577_78600C.1
gtaaatgtgttttaaacagcaaacatttccaataattcaccacaacataattgcctcacccacgataatgtcaacattggggttgggcccaattccattagcaggggttgaagcttttgctcccagttgctgggggtcaacacacgacacacacgaacattttcccccattcaagcaatcccaacaacccaaattccatgagccgtttgatttttactcatgggaatacaagctttttttccctttttcctttgttaaacaaaaaccttttcccatgatcatggggaacactaacagcaggggtacatcacttgccattttttctgcccctaaaaaaataacccagtgaaaagtccccacctggagctttttgcaccttggtcgacggacggtccctaaggaaatttccacaattttggccttcaaatcttttggaattggttgatttactactttgaataccaacagcgatttttttta

SEQ ID NO: 161207 - DNA, 320 bp, Zea mays
  Clone ID: MRT4577_78601C.1
aagcctaaccctttaattaacattaaactggggagcaactggggacagggggggacaaatacaattgggtcttcatgccaaaacacttcggggtgggggaatttagttttggaacgtttcaggaaacttgcccgccaaccttaaacctttgggacattataagctgcatttgcagctttggggggtttgatccccatggtccctgggaatttttaaaggggtaaaatgaacctacaacgggcctggtttcctacttatccactttgaaaactttaaggggaaaacttggttttattggaataaaacccattttttccaat

SEQ ID NO: 161208 - DNA, 377 bp, Zea mays
  unsure (1)..(377): unsure at all n locations
  Clone ID: MRT4577_78602C.1
cagtccacaagtccttattccaannccagnccggagcnagagcgcatctcataagttctagacctcnccccncacccaccaccaccaccagcagtccagcaccatgggcgacgccctgatcgtcgcactcctcctcactaccatgcccctctcctagaacaacggcgcgcacccaggctactccaacaccgacaaaagcgcaagcacagaggacgcgagcgcggagctgctgcggcagctgtaggagctcaggcccggcaggcgcaacagaagggagaggacgcacttctacactccttaccacattaaccatacccacttcaccaccagcctttacacaaacactctcgacctccacactcttaacagaccatcat

SEQ ID NO: 161209 - DNA, 368 bp, Zea mays
  unsure (1)..(368): unsure at all n locations
  Clone ID: MRT4577_78603C.1
cggccgncgggcagggacgcggggagcgcnnnccgggccgacgcccagccgncgncggcngcggaccccgccnccagnnnggncggggncnngcaagnngcncnngcggnagnncccccaacgggcaccangcagaacgaggagggnaagacgggggaccnggagggggccaggaagngcncggccacaaacaggancancacngccaaggaccangccncngnccagaacaacannggccacnnggangcgaagggccngnanganggncacnncacaacannngcncncncngggnnngnccgngcncagggcgangcagacagcnccnnggacaggcngnggcagaagaaggcnganaccaagca

SEQ ID NO: 161210 - DNA, 1697 bp, Zea mays
  Clone ID: MRT4577_78604C.1
gccgggaaaaaaacgttcaaggtctcaatctcgcggtaatggcgaggccacacgtcgtggttgtgccgtacccaggctccggcaacatcaacccagcgctgcagatcgccaggctgctccaccgccacggcgtctacgtcaccttcgtcaacaccgagcacaaccaccggcgcgtgcaggccaccgagggcgccggagccgtgcgcggcggggaggggttccgcttcgaggccatcccggacggcctgtccgaggccgagcggggcaagcaggactacgggcgcagcctggccgtgtccacgagcacgcgctgcgctgcgccgctcagggacctcatcgcgcggctcaacggcacgccgggcgtgccgccggtcacctgcgtgctgcccaccatgctgatgagcttcgcgctgggcgtggcgcgggagctcgggatcccgaccatgtcgttctggacggccagcgcggcctcgctgatgacgcacatgaggctccgcgagctgcaggaaagagggtacgtgccactcaaggacgagagtttcctgacgaacggctacctcgagacgacggtcatcgactggatccccggggtgccgccgatccgcctcggcgacttctcgagcttcctccgcaccaccgacccggacgacttcggtctgcgcttcaacgagtcggaggcgaacagctgcgccaaggccggcgccctcatcctcaacaccttcgacggcctcgaggccgacgtgctcgccgcgctgcgcgccgagtacccgcgcgtgtacaccgtcgggcccctgggcctgctcctccgccaggacgacgaccgagacagcagcgcctccgccagcggcagcaccgagtcgaccggcctgagcctgtggaagcaggacgccgagtgcctcgcttggctggacgcgcaagagcggggctccgtcgtgtacgtcaacttcggcagccacacggtggtgacgccggagcagctgaacgagttcgcgtggggcctcgcggcgagcggccaccggttcctctggtccatgagggacaacctcgtccgcggcggcggcggcggcggcggcgccggcctggacgcgatgccctcgaccttcaaggctgagacggcggggcggtgccacgtgaccgcgtggtgtccccaggagcaggtgctgcggcacccggccgtcggctgcttcctgacccacagcgggtggaactcgacgtgcgagagtctggccgccggcgtgcccatggtgtgctggccgggcttctcggaccagtacaccaactgcaagtacagctgcgaggtctggggtgtcggcgtccggctggaggcaacggtggagagggagcaggtcgccatgcacgtcaggaatgtgatggcaagcgaggagatgcggaagagcgcggccaagtggaaggaggaggcggaggctgcgggcggccccggcggttcgtcacgcgagaacctgctgagcatggtgagagcgctcagctccgcacccaactcaccagatgcttaagagcccaaagatcagtagtcacactagaacggaatctagaatcatgaagcaatactgttcatgatcgacgccagcaaagttttagtctcctaataatagttggcatatttcagttgattaaaaaaaaaaaaaaatatttgcggcccggtcctcacctggaaaaaaaaaaaaaaaaaagcggcc

SEQ ID NO: 161211 - DNA, 153 bp, Zea mays
  Clone ID: MRT4577_78605C.1
cctatagcttcccgttcttccccgcatacctgtacatcacattatagacttcagtatgtcgaaaacccctagctcttcgaaccatatagtgcttcaacaaagcaaatcgctagcaagcaaacataccctttatcagccctttgttgtttcaac

SEQ ID NO: 161212 - DNA, 293 bp, Zea mays
  Clone ID: MRT4577_78606C.1
attagcatcttatatttttttttttttttttgaaccggaaacaatcgaggttattaaggccggtaatctgaagaaagacttgcacaaagtcaggtggggttaatccctgaacctttcttaaaatatattatatagagggaacccatctaactgaaaaaaaatggctcggggtcccaacataaattaagacccccacggcactttaaaaatctcaacaaggggggcgagatcccagaatttggtcacgtctcaagggacactgttcctccattgcacctttacattaaggaaca

SEQ ID NO: 161213 - DNA, 328 bp, Zea mays
  Clone ID: MRT4577_78607C.1
aaaacaggaaaattggggggattactggattatcgaccccgagaattacgtatactgaaacggggacaattcccaataaaaaaacaagaacgggacattaatagttcagtacagggccaaaaaaaagccaaaaccggggattgatagtttaaagctgcgcggcgtttaccatatgatgattggaacgggggttcggcccccccctcggtggcagtagggggggccaaacaaccggggcagcaggaacccaggggattatgttttttttcttcttcttctttttttcacttgacccggggggagagcgtgaccccgtcccccacgggga

SEQ ID NO: 161214 - DNA, 831 bp, Zea mays
  unsure (1)..(831): unsure at all n locations
  Clone ID: MRT4577_78608C.1
ccggccggggaaacaagaagctttcgcaagctggccagctagccccctaccgactagataccgaggagtgacggatcaggatgggaggggtgacctcgagtgtggcggcgaagatggccttcttcccgccgacgccgccgtcgtacgcgctggtggaggacgccggtgcgggggtcaccacgctcagcggccagccgcaccgggagaacgtcgagttgctgcgcttccgcacccgcaaagggaacacgctggcggcgatgtacgtgcgccacccggacgccgcgtccacggtgctctattcccacggcaacgccgcggacctgggccacctctaccagctcttcctgcatctgtccttcaacctccgcgttaacatcctcgggtatgactattcaggatatgggcaatcatcaggaaagaatattgataaaatccctcaagttacatgtcctgtgctcattatacatggaactgctgatgaagtggtggattggtctcatggtaaacaactttgggaactttgcaaagacaagtatgagcccttatggctcaggggaggaaagcactgtgatttggagctctttccggaatacatccggcacctcaagaattttttccactcactagagaaatcgccatcccataggcaagcatggagggagaatgtggaccggattgaaccctcgcggaagagcactgatttctttgaaccctcgcgaaagagcacagaccaaagggaaaaaatcaaggtcaactcgagantagacgagaaacactgaacatagatatagcaacgtcgagaaggtagacaagctaaagatatcatttgat

SEQ ID NO: 161215 - DNA, 264 bp, Zea mays
  Clone ID: MRT4577_78609C.1
caacaactaggactaccattcaggcagttcagcttctgcctacccccatcagggggtgccattcaaccagctagcatcttttaactctcctgactatgtacagtagcaacaactactaccatttcatccagctagcttgttggagcccagcttgcttcttgtcacagcaactatttgttgttagtttacctgtacgctttgccttaagttggcacgatgtatcaacttgcttcatttgctgccttttcaaccaacttggtttta

SEQ ID NO: 161216 - DNA, 361 bp, Zea mays
  Clone ID: MRT4577_7860C.1
ggcttgaaaaattaaacagactacaataactcaataagattacccagcatccagaaaaacgaatgtgtaaaaacaaaagagcgagacagagctgaggcttgggtcgtttggattcgcatgtatctacctcaatccctatgattagtggtttggtgtatattttaaactaaattctacacaccaaaccactttatcctgcttagattaagttgaatactatatgcagccaaacaagacctgaatgtaatccagtgttggatcatcgttcgaggagaaataacagcatgattgattggcatgaaatctggaacaggtccctttgttcctgatgcactttacggtcttaggctcggcctgggct

SEQ ID NO: 161217 - DNA, 1586 bp, Zea mays
  Clone ID: MRT4577_78610C.1
ctcgaggccggccgggccggggcccggtattgtgcatctgtgcacgggccgtcgtttgtagagccgatatagagctaaacacttcagcagcagtgcatggggaaacaagaagctttcgcaagctggccagctagctccctaccgactagataccgaggagtgacggatcaggatgggaggggtgacctcgagtgtggcggcgaagatggccttcttcccgccgacgccgccgtcgtacgcgctggtggaggacgccggtgcgggggtcaccacgctcagcggccagccgcaccgggagaacgtcgagttgctgcgcttccgcacccgcaaagggaacacgctggcggcgatgtacgtgcgccacccggacgccgcgtccacggtgctctattcccacggcaacgccgcggacctgggccacctctaccagctcttcctgcatctgtccttcaacctccgcgttaacatcctcgggtatgactattcaggatatgggcaatcatcaggaaagccgagtgaacacaatacttatgctgacatagaggcagcttacaagtgcctcatagagaaatttggtgccaaggaagaagaaataattctttatggacaatctgttggaagtgggcctactgtagatttggccagtcgtttatctcagctgcgagctgttgtcctgcatagtcctatattgtcagggctgagagttatgtatcctgtgaagcgcacatattggtttgacatctacaagaatattgataaaatccctcaagttacatgtcctgtgctcattatacatggaactgctgatgaagtggtggattggtctcatggtaaacaactttgggaactttgcaaagacaagtatgagcccttatggctcaggggaggaaagcactgtgatttggagctctttccggaatacatccggcacctcaagaattttttccactcactagagaaatcgccatcccataggcaagcatggagggagaatgtggaccggattgaaccctcgcggaagagcactgatttctttgaaccctcgcgaaagagcacagaccaaaggaaaaaatcaaggtcaactcgagataagacgagaaacactgaacatagatatagcaacgtcgagaaggtagacaagctaaagatatcatttgatcagttcgagaaatccaggagaagtgttgatatcttcgagaggccaaagaggaacattgagcagctggattgtggccggaagagtgtcgacagattggacaggatctgggctagttaattcctttctttcacatgatatacaggttgggcttcggttgttttgggggattttacaggtgtggcgttaagagttgattcaccgacactaaaggagccaagcgtcgttgacgaggcttcgtgtagatgtgatggcttgtgtggtgggagaagtgtatgttgttggtcttcaaaaaaattgttatctggtcttaaactaaatgacactggggaggagtccatggcagcattgtgtataatctaatgctttggatcaacgatgtttttttcttctttttccattgaatcgaacttttccttccatggatatt

SEQ ID NO: 161218 - DNA, 504 bp, Zea mays
  Clone ID: MRT4577_78611C.1
aaaaaaaaaaaaaaaaaaaaaaaaaaaaaaaagaaaaaaaaaaaaaaaaaaaaaaaaaaaaaggttggtccttggcccgaaccccccttagggggaatttttgaaaatttccttaacattgggggccgttcaaccttgctttaaagggcccaatttccccttttagggagcctttttccatttaattggccgggtttttcaaccgtgggaattggaaaacccttgccttaccccactttattcgcttggaagaaattccccttttggccagttgggttattaccaaaaaaggccccccccgatcgcctttccaaacatttccccaccttaattggcaatggacccccccttttacgggccctttaacccggggggttgtgggggttccccccatgtgacccgttccctttgcaaggcccttacccccggttctttccgtttttttcctttcttttttgcccagtttcgcgggttttccccgtaaagttttaattgggggcttcc

SEQ ID NO: 161219 - DNA, 251 bp, Zea mays
  Clone ID: MRT4577_78612C.1
aggcataccagaacacgggcaccataagtgatggaattactcataggaaaccagaccaacatgagtagattgcctaaagctaaagattcatataggggttgaaccacggtgaacattacaacttgactactatataagacaactgcctaccgtttacaactcaaatttgctccaatcactgaagatatggcacttttatatttttcctttgccaataatgataataggggggggtctacagacggtccttt

SEQ ID NO: 161220 - DNA, 156 bp, Zea mays
  unsure (1)..(156): unsure at all n locations
  Clone ID: MRT4577_78613C.1
tctctctccgccgccctcatcaaccanaagatgttgtgtagatattgtgcgagatcccacncnacnccnnntccttcaatgatttgctcattctttaccctttctgtccttattatgttctcgccttctatcttgttcacctttctgaccttcttt

SEQ ID NO: 161221 - DNA, 535 bp, Zea mays
  Clone ID: MRT4577_78614C.1
aaaacccggccaaaaagacccacggggaacaaggggggaagcacaaaagttggtaaagccttacggctctaagggggcatatcccccattcaaaaacaaagttcgttcaggagaaagccttacggctctcagtgggcaaaacccccattaaaaaacaaagttttttcagcagcaggttcgcccaaatatcgcccccttccgggggccaagaaatcgggcggcaaattatcaatccgggaagcccatttagacagggccctccaaaaaaaaacagcttttccggcaaaactggggcaaactcccttacgggggaacacccgtttcatcagaaagattcccaaattggcggccccttttaggggaaggcagcacagactctggaaccatgacggttttgtttcagcccaaggccccattactctagggcttcacatactgggggacaccccccattactaagtggggccccttccttggggggggggggccataagggttaacctgggcaggggttttgggaaaaggccgggtggga

SEQ ID NO: 161222 - DNA, 258 bp, Zea mays
  Clone ID: MRT4577_78615C.1
tggcatcctactagctcacctacgcggctcgaacatctcccccttccaacatgtgcctgccgtgagatcaccgctccatctctcacgcaaagacgatgagggagagcatttccatgcacatcgaattcgctgtgtacgccgtagagcaggccatgctgatagctgccacggagcgagcatggtcttgaagctgaggctcatatgcacacggacaagaccatgggggcagttcatgatggttcccaaacattctgccgt

SEQ ID NO: 161223 - DNA, 322 bp, Zea mays
  Clone ID: MRT4577_78616C.1
gaacactagtccatccgagtcagagtcatctggatccaagtcgccctcactgtctcctcttcttcctccgctgaccgcgccgtagcggaaagatagggaacaggatgacgacaatgcaccccaaggtgaaacgaaccgtccgcatgctcctctgctgagctatgaccgcctccccgaaaaagctatctgatgaaggaactggatacattgacgagaatgatcacattgacagagatactatcaacaacaaacacacatctgttaccataacaacatgtgagagaaacgacactatgtcatcgctgattgaagactatgttga

SEQ ID NO: 161224 - DNA, 874 bp, Zea mays
  Clone ID: MRT4577_78617C.1
ctcgaggccggccggggccagcgttccctcctctgcaccccccatcctcggacatcctcgcctgcagcagaccctcctctggtgcgcgtgcgccaccggcgagatgtcgaagaaaatcgtggtgaagctgcacctgcaggacaacaaggacaagcagaaggccatgaaggctgtctcggcgctcaccggcatcgacgagatatccgcggacatggcgtcgcacaagatgacggtggtcggcatggtggaccccgtgagcgtggtgagcaagctgcgcaaggcgtcgtggtcggcgaccatcgagtccgtcggcccggccaaggagccggagaagaaggacggggaggcagccaagaaggacggcggcgagggggagaagaaggaaggcggcgagggggagaagaaggaagcaggcgagggggagaagaaggaagcgggcggcgagaaggacaaggacggcaagaaggcggcgccgccgacgccgacgccgacgccgacggagcagcaggtccagctggccgagctgttgaaccagtattaccgggcctcctcctactacccgtacccgcccgtggccacgcattaccacgtccagagcatggaggaggaccccaactcctgcaccgtctgctaaggcgactcatggcatggagaatgatctacgaaggtgaagaaggtagtgttgaaccagcatgcagtttctttttttttcacttctagatcgcgttctggctgctcatggaggatacgcagcgtgtctgtatgtacagtacatatagaataacacgtacgtacgtgtggcggtatatgtgtaagtgggacttcgctttctgggataaccagagctgtatgtagctaatacagttttggattt

SEQ ID NO: 161225 - DNA, 376 bp, Zea mays
  Clone ID: MRT4577_78618C.1
atagttgggctccacaacgcaacgcctagggtttcttgcacgagcagatgaagcggcagccaccacaccctcgcagcggcgacgactcgccggccggcgagagaggaagcgacggagggttgaagaaggggaaggggagagggaggtggggcggcgggagtcggaggcggaacgatcagcggctgggcggcggcggcggcggggcgctctccctcgccgccttcgccagcgccaagtcccggaccagcggctacaacccggcccttatcaagaagcaaaaggagttctacaagaatgctaaattaattagcaagtgcaaaaagacaaagaagcaacaaagtcagtcaaacaaccattcagaaatttcagttcatga

SEQ ID NO: 161226 - DNA, 413 bp, Zea mays
  Clone ID: MRT4577_78619C.1
cccctaccacgggaataaacgaaaaaagggggggttcggccaaaacgggggggaccaacccgggaaacaaaaacgttaaacggcgacgttggggtttaaaaaaagcacaggcccctaaaatggggagcccaaaaaaaaacggggggaaaatcacaaccaacccaacaaaacgggggaacaggggttaaaaaaccaagggggctacacgtaaaaaggggtacaaaaaaaaaaagcggcaacgaatcgaagggaaggaacccaaacggaacactatagaaacaaatccaggacccaggggggacaaaaggggcaaacccaaccttaacccaaaggggacggcacgggtccagccccaccgaggggggggggggatctctggggagccccccacgccacaaaaaacccaaccgggg

SEQ ID NO: 161227 - DNA, 578 bp, Zea mays
  Clone ID: MRT4577_7861C.1
gcaactgcaaagcagcaagctctactcttcttctgtactgaacgtgtgactagataacaataagcgtgaaccatggcggacgagtacggccgcagcggctacggcaggtccggcgccggcgacgactacgacagcggctacaacagcaagtccggcactgatgactacggccgtggcactacggccgtagcggcggcgacggaaggtggctacaacaagtcgggcggcgatgacgactacggccgcagcggcggcgatgggtacggcaggtccggcggcgacgactacggccgtggcaccggcggcggtggctacaacaagtccggcggcggcgatgactacggccgtggcaccggcggtggcgggtacaacaagtccggaaacgacggctacgacagcgggtacaacagatcgggcaccaccaacgacgacgaatacggccgtggcaccggcggcgggtacggcagcaagccctctggcgacgacgcgtacgccggcggcggcggtggcgggtacggcaagcagtccggtggaggcgcggaccagggcggagagtacggctcctcccgggacgactc

SEQ ID NO: 161228 - DNA, 523 bp, Zea mays
  Clone ID: MRT4577_78620C.1
agatttcccattctgtgcaaacctgagtttagaagaatgctatgccttgatctttgcttctgagaaaaaaaaaaaaaaaaaaaaaaaaaaaaaacgtttcttccagcagttacctgttttcactacctcaattgtttcccctcatgagtcatgaccgtatttcagagtttatgttggccattcctgcactctaggtagccgcaactggcaccatttgtgagagttaaactatggttgttggttgcattatctctgtggcctgtgatagcacccttcttaaagcatgattcttgccaaaaaaaaaaaaaaaaaaaaaaaaaaacgtttcttccagcagttacctgttttcactacctcaattgtttcccctcatgagtcatgaccgtatttcagagtttatgttggccattcctgcactctaggtagccgcaactggcaccatttgtgagagttaaactatggttgtgggttgcattatctctgtggcctgtgatagcaccctttttaaagcatgattcttgcc

SEQ ID NO: 161229 - DNA, 705 bp, Zea mays
  unsure (1)..(705): unsure at all n locations
  Clone ID: MRT4577_78621C.1
gtaccctccgattttgccgagctggtaggcgatccacccactacccgacccccactcctttttcctcaacttgtaaaccgtcgccccgactactcactctaccactgcaatcgtgtcatcattaacatttcttcttcgttcttttcagggccgtcgaggatcgatcaggcggtggcgccgtcgggcagaagcggtcgtcaccggacaagatgcacaggtccaccatggacgccgtctaccaccaccaccaccaccaccaagagtcgccgttgacgggcaacgtcgccgccaccgccagcgccggtaagaagctgggcgtggagcggttcgagttgccgccgatctacatctcgctgtcgcggaaggagaaggacgacaatttccttgcgatgaagggcaccaagctaccccagtggcccaagaaaagggccaagaacgtggagaccctccaagtattaaacacctggcctgagatcgatttgatcctctatttctaacccgatccaaatcgatctctgctctcaaaacttaaacatgtgccccttgctttttatcatgcagtttatcttcctggggatgtggtggggtaggggccataggatggatttgaattcatgatagtatctacacatgtacactgcttaaagatactatgtacgtatctatatctattacaattttgtataaatactttttgatagttnt

SEQ ID NO: 161230 - DNA, 377 bp, Zea mays
  Clone ID: MRT4577_78622C.1
gttgcccctcccgttttagaatcgttctctctggtctctcaagtcccgtctctcctccctctgtctctggcatttcatcgccgccgccgcgccatgcttcaatagccctggtgacgaagatgcagttcatgctatcgcctaagcccaccctacctagtctcggtggcatggagctcgccggcaatgtccctggtcaccaagattcacttcgtgctaatatgccacccttgaaaagacgttgtgagtttcccaatgttgagctctcccccgagccagttgaaacccatggacacgtagatctgtcagctcatggtggtgttcatagagtgggatttggttcctgctatccttgcgacgatttccctacgacgccaatg

SEQ ID NO: 161231 - DNA, 2574 bp, Zea mays
  unsure (1)..(2574): unsure at all n locations
  Clone ID: MRT4577_78623C.1
gaatcggaagagtagcaaatatctcatgcctcgatcccggccgggccgggacctctcgttcccgtctccttcctctattcgtgttgtccgttcgctgccgccgtcgcctggttcgcatcgcatacagcgcctcagtccagatcgatcctccctcttcccagatcgggtctagttggacggcagcagccgccgccgcggcatctgtcatattcacgccgcgtgtgctctctctttctgtctccctctctatctgcgacgactgggtgtgataccgcagccgccgccctacgctgggttcccgagccttcgccgatctcttctccggcgaagagcgcccaccagatccgccgcgcatcgatgtctcctttggctcttctccaagctctcatcttcatcctgtgctgctcgcctctggcttctgcttcctcgtcggagctaacccttgcaggagctgcttgtggagatgatcagcttgtcatcttcgatgcttctgatggcctccttaacctgtcggtcaatggggttctgatgcaagatcgcgtttttgcctgccagaagctcggcttctactttggcagtggatgcctccgctgcagcaacctttcagatgcgtggaggagtgccgtaaagcagtactgtggtgaagggagcgaaaagagccatgcaactttacatcaagatgtgccaaggaagctcttgaggtggtccacagaaaatagctcaaggaatgcatgtgaaaggtctgggttgaatgaaaataatcaggacattggtgattcttcagaaaagcaggagcatctcctggctgtgccaggtgtgattctcttatgctgtggccttatgttaccatgctttcatgctgaaaggaaagaagtcagcaggcatgacaatgcaaccattcagcgcaacgcacttgaatcagtttcatcctatgaaggaagcatgtcatctgagaaagtcccaccaactccacatcgaatacctccaagtccctctagatttgcgccgtctccacagatagctagagttggatctgtcaacttaagcatccagcagatcctcagggcaactcagaacttctcaccttcatttaagttaggtgaaggaggatttgggatggtctacagggctgtattgccagatggcaatgttgttgcggtcaagagagctaaaaaggatcagtttgcaggtcctagggatgagttcagcaatgaagtagacttgcttgctaagatagaccaccgaaatttggtgaggttactgggttttactgataaaggaaatgagcgcattatcatcactgagtatgttccaaatggtactcttagagaacatctagatggtcaacatggaagagtcctagattttaatcagcgtctagaaattgcaattgacgtggctcatgcacttacttatcttcatctgtatgcagagaagactataattcatcgtgatgtgaagtcatcaaacatcctgctgacagatagctatcgggccaaggtgtctgactttgggtttgcaagaagtggccctagtgacacggagaagacacacatatcaacgaaagtgaaaggcacagctgggtacctggaccccgaatacttgaggacataccagctaactccaaagagtgatgtcttctcatttggcatattgcttgtagaaattctttctgctcgcagacccgtagagctgaagcgaacccctgaagagaggatcacaatcagatggactttcaaaaaattcaacgaaggcaacacgagagagatactggacccattgctggaagatcacgtggacgacgaggtgcttgaaaagctccttagcctggctttccaatgcgctgctccgacacgggacgaccggccgaccatgaaggaagttggggagcagctgtgggagataaggaaagagtacggaaagagtgttaggaaggtgtgaagatcatggaaaacatttccctgtttctcaagactttccctggaccaaggggactaagggggtgtttggttttatagggattaaattttagttcttccattttattctatttaagtccctaaattaccaaacacggaaatcaaaactttattttagttttagtatttggtaattcagagacttgaatggaataaaatggatagactaaaaataagttcctagaaatcaaacaccctctaagcatgcgaagtatttgtgcccattggataaacacctgatcatctatgtttcttggaagatgtgacctgaagaaatgtacagtgcgataacaccgccatcagtttgtgctttcttgtctatcagtttgcagtgcactccctctatggagaatgtatattttggaattctcgcatttcttgattctattgatatggcattctgatggatgtaaccgcatacattactgcaaacggtctgcaataatacacgaagggaaattgtttgtattggaaaaaaaaaaaaaaagggcggccgccgactgaaaagaataacaaatattgaagttnnaacctttggaaatcggggattacgaaactaccttaaacgaagattttgacttggaaaacacaattg

SEQ ID NO: 161232 - DNA, 309 bp, Zea mays
  Clone ID: MRT4577_78624C.1
acgcctacacgtacgacgtcgcgctcaagctgccgttcctgatccaatccgacgtcgcactgatcagcgacgctaactacacggccgacatcctcagcgcgatcaacgcgccgaccgaggtggccttacaggtcttcctgagctccatggtcaatatgggcgccatcgaggtcaaaaccgactaccgaggcgataccaggaaacactgctccctcgacaacaggcactaagccgccgaattcatgcgcgacatggctccattgctcgcatacaatccttgtgagacacacaacatgctctgcatctgca

SEQ ID NO: 161233 - DNA, 151 bp, Zea mays
  Clone ID: MRT4577_78625C.1
gcgtggacgcgtggcccaggcggctgctgagatgtgtctctcgctatgctggatcactgctggtgccgcgcagatctccccccgcgagacgcctctgtctcaacatgccctcccaccccgccgcgggtcacgaactgtctgacgtgcatcc

SEQ ID NO: 161234 - DNA, 385 bp, Zea mays
  Clone ID: MRT4577_78626C.1
cttggttgcttttttagccaaaaagcctgttcagagggaaaaacttttttttgaagcggaaaaatttaaaaaaacctacgcggggcgaaaaaaacactgggccggttctataaacccaacgggttgtctggggctctcgaaaatgcccgccgtccactacggggggtgaagaatgtttataagccccccgttccatacaaacacattttcccagcctagggccaaatttgagcgcggaaaaacccccttcccgtcctattgcggagaccccccgcgaggcccatggaaagaactcccttcccccccccctgtccgggggggggtcggggcttggggggccccactacatgaccgctatatttcaaaacctcggaaagtgctcccc

SEQ ID NO: 161235 - DNA, 735 bp, Zea mays
  Clone ID: MRT4577_78627C.1
gggagacccttttggtctacttgcttttctgatgaaatcttttgatctggaagaactccttcatcaatgcagacatccttgacaaaatggacaccgtaatcagaagaaagatctgtgtctggcagtttgatctctacaacatccttgtcataggagtaatcctcaatgcgtgtcttccgaattttacctccattcagatgctcagccttcacaaagctaacttcagattgattggtttgctcaaccattttatctgcctcaattttgtgattactttgtctttcagcctcacagtctaatttaggactgccgttagatgcaagatcatgaaaaatatgagtttggtaaggcctttcgtcatctgcatgccaatatcaaaatcagctgttaagaatgtgaccagagaagagaaaaaaaattcataatgaagcaaacatatcataatcaacatttattgcttcttgtttgcatcgtcgataaatgactaaaactatttctaatcttataatagtaataactgatgaccaacccaaccagggcaagaaatatatggatatgacttattattgttgaagtgtataagcagattgcctacattctctgaagtttttgagttacactgattagtacgtgtacgcccactctaacaccatgtagttccgctctatacacttcaacaattatcatgggaatttacattgaagtactttcaggtaagtaatctgtagttctgct

SEQ ID NO: 161236 - DNA, 834 bp, Zea mays
  unsure (1)..(834): unsure at all n locations
  Clone ID: MRT4577_78628C.1
gggtacctcgaggccggccgggctcgtgtcagcaggccattcttctcgccttactccctcacagaacccagtaaaatatcgccagtcccgccgtcgagatggccccacgccgcctgctcgtcctcgccgtcgtcgccctcgcggccaccgccgccgcggccaactccggcttcgcggactccaacccgatccgccccgtcaccgaccgcgcggcctccgcgctcgagtccacggtcttcgccgcgctcggccgcacccgcgacgcgctccgcttcgcacgcttcgccgtcaggtacggcaagagctacgagagcgcggcggaggtccacaagcggttcaggatcttctccgagagcctccagctggtccgctccaccaaccgcaaaggcctctcctaccgcctcggcatcaaccgcttcgcggacatgggnctggggaggagttccgtgcgacccggctcggcgcagcccagaactgctccgccacgcttaccggcaaccaccggatgcgccccgccgccgttgcgctgccggagacgaaagactgggagggaggatcatgctggaccttcagcactactggtgcacttgaggctgcatatacccaggcaactggcaagcccatctctctctctgagcaacagcttgtntgactgtggttttgcattcaacaatttcggatgcaacggaggccttccatcccaggcctttgaatactcanatacaatggtggccttgacactgaggaatcttacccttaccaaggtgtcaatggaatctgcaagtttaagaatggagatggtgggagtcaaggttttggactcggttaacatca

SEQ ID NO: 161237 - DNA, 242 bp, Zea mays
  Clone ID: MRT4577_78629C.1
atgcggaggccacaaaacatatgtacccaaacttatcgatctgcgcatctccccaccatccatcgtgcaacgatctgattcaaaagcagacatcaatggctatcaactgctgcaacgtcaacggcaacggcaaggctgctccttctgatatggatgtgcctgatatcaagttcaccaatctcttcatcaactgctagttcgttaactcctccttcttcaagacattttataccattgaccca

SEQ ID NO: 161238 - DNA, 477 bp, Zea mays
  Clone ID: MRT4577_7862C.1
cacctcactggcgggccgccactaagggactcaccctggcgaccgtcctacttggacatattggcatatgtgtcgactgcgctagagtggatttcagtcacagacagctgatcatgctaggccttctcataaaatgactgctgcggtgactaatgacgtgaactgactcctattgtatgccaccagcttagctgtgcaacttattcacatcaaccctgacagccccattgaacctatgagaagcacaacgcgctgagatgagcctgggtacacatagtccgtgctgcatgttgcgcgttgcgttgtgcgcttaactgtctgggctagcgcgtcagattgcatagagtcggcctcattgtcacatgagagacggcaactgcagttgtgctcaaagagagagtgtatcgacaggacactgatgtgtgcctcaagccaggatgtagacaccagccgggatgaggacctggtgctggagca

SEQ ID NO: 161239 - DNA, 1446 bp, Zea mays
  Clone ID: MRT4577_78630C.1
gccggccgggccgggtagtgacaagaagagagagttttaggccattgtcgcccactaaaatattgccagtcccgcagtcgagatggccctacgccgccagctcgccctcgccgtcctcgccctggcggcaaccaccgccgcggccaactccggcttcgcggactccaacccgatccgtcccgtcaccgaccgcgcggcctccgcgctcgagtccaccgtcttcgccgcgctcggccgcacccgcgacgcgcttcgcttcgcacgcttcgccatcaggtatggcaagagttacaagagcgcggcggaggtccagaagcggttcaggatcttctccgagagcctccagctcgtccgctctaccaaccggaaaggcctctactaccgcctcggcatcaaccgcttcgcggacatgagctgggaggagttccgtgcgacccggctcggcgcagcgcagaactgctccgccacgctcgccggcaaccaccagatgcgcaccgccgccgctgccgcgctgccggagacgaaagactggagggaggatgggatcgtgagcccagtgaaaaaccagggccactgtggatcatgctggaccttcagcactactggtgcgcttgaggctgcatatacccaggcaactggcagagccatctctctttctgagcaacagcttgttgactgcggttttgcattcaataatttcggatgcaacggaggccttccatcccaggcctttgaatacataaaatacaatggtggccttgacactgaggaatcttacccttaccaaggtgtcaatggaatctgcaagtttaagaatgagaatgttggagtcaaggttttggactcggttaacatcaccctgggtgctgaggatgaactgaaggatgctgttggtctggttcgcccagttagcgttgccttcgaggtgatcactggtttcaggctgtacaagaggggagtttacactagcgaccattgtggaactacaccgatggatgtgaaccacgctgttctggctgttggctacggtgtcgaagatggtgtcccctactggctcatcaagaactcatggggcgctgactggggcgatgagggttacttcaagatggaaatgggcaagaacatgtgcggtgttgctacgtgtgcatcctaccctattgtcgcatgaggcccttacgaagtgttacatggtctgtttggcatcaataatgcatgtttaacctgagcttggcgatgggttatacagaacggaaactctgtttgtgaatagaaaatcatgaagggaaggagttgaccggacccctgcttgtacgtctccccgactgtgtaggtagattgtcagttggggttccgaagtactctactcatacgtgtgtatgacagtttatttatgaaacaaaatacgcattgatcgttatggtgcaaaaaaaaaaaaaaaaagcggcc

SEQ ID NO: 161240 - DNA, 1475 bp, Zea mays
  Clone ID: MRT4577_78631C.1
cctcgaggccggccgggattgtcgcccactaaaatattgccagtcccgcagtcgagatggccctacgccgccagctcgccctcgccgtcctcgccctggcggcaaccacagccgcggccaactccggcttcgcggactccaacccgatccgtcccgtcaccgaccgcgcggcctccgcgctcgagtccaccatcttcgccgctgtcggccgcacccgcgacgcgcttcgcttcgcacgcttcgccatcaggtatggcaagagttacaagagcgcggcggaggtccagaagcggttcaggatcttctccgagagcctccagctcgtccgctctaccaaccggaaaggcctctactaccgcctcggcatcaaccgcttcgcggacatgagctgggaggagttccgtgcaacccggctcggcgcagcgcagaactgctccgccacgctcgccggcaaccaccagatgcgcgccgccgccgccgccgcgctgccggagacgaaagactggagggaggatgggatcgtgagcccagtgaaaaaccagggccactgtggatcatgctggaccttcagcactactggtgcgcttgaggctgcatatacccaggcaactggcaaggccatctctctctctgagcaacagcttgttgactgcggttttgcattcaacaatttcggatgtaaggggggccttccatcccaggcctttgaatacatcaaatacaatggtggtcttgacactgaggagtcctacccttaccaaggtgtcaacggaatctgccagttcaaggctgagaatgttggagtcaaggttttggactcggttaacatcaccctgggtgctgaggatgaactgaaggatgctgttggtctggttcgcccggttagtgttgccttcgaggtgataagtggtttcaggctgtacaagagcggagtctacactagtgatcactgcggaactacaccgatggatgtgaaccacgctgttctggctgttggctatggtgtcgagaatggtgtcccctactggctcatcaagaactcatggggcgctgactggggtgacgagggttacttcaagatggaaatgggcaaaaacatgtgcggtgttgctacgtgtgcatcctaccctgttgtcgcatgaggcccttacggattgtcacatggtctgtttggcatcaataatgcatgcatgtttggcctgagcttggaggatgggttatacagaacgggaactccgttgtgaatagaaatcgtgaagggaaggaattacttagcccctgcgtgtacgtctcccccgtatggctgtgtaggtagattgtcggttcgggatccgaattactgataccgtcatacgtgtctatggcattttatttgtgaaacaaaatacccattaatcgtgatgtcgtagcctgggacattttatcatgaaataatgtaccatacgcagattactatattgtcatgtaatttactc

SEQ ID NO: 161241 - DNA, 198 bp, Zea mays
  Clone ID: MRT4577_78632C.1
cccccaaaacggggataacattaaaatgcgccctggttgaaaaaaaatcttttttaaccatgaataatatccaatttgggcggcccacaaacaaatattcccttccccagccccttatgaaaaaaatcgaaacccccccgtggggtttttgggggacaccaacccctactctaaaaaatgggacaccccttttttttt

SEQ ID NO: 161242 - DNA, 1407 bp, Zea mays
  unsure (1)..(1407): unsure at all n locations
  Clone ID: MRT4577_78633C.1
gccggccggtccgggattgtcgcccactaaaatattgccagtcccgcagtcgagatggccctacgccgccagctcgccctcgccgtcctcgccctggcggcaaccaccgccgcggccaactccggcttcgcggactccaacccgatccgtcccgtcaccgaccgcgcggcctccgcgctcgagtccaccgtcttcgccgcgctcggccgcacccgcgacgcgcttcgcttcgcacgcttcgccatcaggtatggcaagagttacaagagcgcggcggaggtccagaagcggttcaggatcttctccgagagcctccagctcgtccgctctaccaaccggaaaggcctctactaccgcctcggcatcaaccgcttcgcggacatgagctgggaggagttccgtgcgacccggctcggcgcagcgcagaactgctccgccacgctcgccggcaaccaccagatgcgcgccgccgccgctgccgcgctgccggagacgaaagactggagggaggatgggatcgtgagcccagtgaaaaaccagggccactgtggatcatgctggaccttcagcgctactggtgcgcttgaggctgcatatacccaggcaactggcaagcccatctctctttctgagcaacagcttgttgactgcggttttgcattcaacaatttcggatgtaagggtggccttccatcccaggcctttgaatacatcaaatacaatggtggtcttgacaccgaggagtcctacccttaccaaggtgtcaacggaatctgccagttcaaggctgagaatgttggagtcaaggttttggactcggttaacatcaccctgggtgctgaggatgaactgaaggatgctgttggtctggttcgcccggttagtgttgccttcgaggtgatcagtggtttcaggctgtacaagagcggagtctacactagtgaccactgcggaactacaccgatggatgtgaaccacgctgttctggctgttggctatggtgtcgagaacggtgtcccctactggctcatcaagaactcatggggcgctgactggggtgacgagggttacttcaagatggaaatgggcaaaaacatgtgcgcctcctggctcacgagggcctgcatcggttcgaacgcgcgcatctcacttccccgctcatgcagccgaatgcacggtgacctgaactgacctgcacccgcgtatacaaattcgaaccgtgacatgcagtttaccaatcaagtgctcatcgacggtcaatgcatcntggcggttctggatgtggccaaccgagcaaccaatcagccggtaaacgatgcangtgttgctacgtgtgcatcctaccctgttgttgcatgaggcccttacggattgtcacatggtctgtttggcatcaatatgcatgca

SEQ ID NO: 161243 - DNA, 443 bp, Zea mays
  Clone ID: MRT4577_78634C.1
cggacgcgtgggcctatatactggcgagatccaaacaatccgaggaggatgggtagagcagctgctaaccgaatgtacgcaggaagcgcggacttggttggagttgagcacaccaactgctgctgcgggggggtctgtttttacgatggagtgtggagaatgcagtaccatcacctgaactaggattacatctagataggtgagaatgattttgtagaatggcgacatggacaggaaatgctgcaggctgagcgacctagtcacctatgccatgtagtgccatttaaataagcctgggattgtgaatacgtaaaaagaacgcctaagacttaaccatgttattatgtcagctagtgacatggtgactaaaagaatcagaccatttcatggcaaggcgaaaaataaaaataaaagcgccggccattaaaaaagatcctgtaaaa

SEQ ID NO: 161244 - DNA, 752 bp, Zea mays
  Clone ID: MRT4577_78635C.1
aaatcggaaaccctagtctcagagcagccgcatccacaacctgcctctctcgtcccctggcggcgtccgcggcaggatggcggaatctacggcgaggacggtgaaggatgtcaacccgcacgagttcgtcaaggcctactccgcccacctcaagcgctccggcaaggtaacggtgctcgactcgcccccctttcccatctgattcgacgctgtaagcctacaacggatggtcgcgcaccgcggcagtccgcggagacgagccggtgcgatttcatcagattgccgttgcccgagcagttatgagctgttttgtgattacacggatccatcgccctgttattgctctggttataccagcgaacttttcccgcgtcttgcttactctcgttgcgctcgtgattagtgacacggggatacaccattttttgctaaacatgctgtggtgcaggaattatgttctgtggcttctaggcatttgattggtaggttaaagagatttgttcacgtaactaaattcgaatttattagacataggcaatgctgttcttcttgtcttatgcctacgccgtagaatcaattctagatcgtctgtgcagaaaaatctgtatctaaagtgttttatattgtctatatacttcggttttaggcaaaatctaacagtatttttgaagatcccccagcatttcatctatgcagggcctatatgagggtgtgagtattttgtttctattgatatctatcaaacataatct

SEQ ID NO: 161245 - DNA, 899 bp, Zea mays
  Clone ID: MRT4577_78636C.1
aaaaaaaaaaatcgtgccagcaggccattcttctcgcctcactccctcacagaacccagtaaaatattgccagacccgtcgagatggccccacgccgcctgctcgtcctcgccgtcgtcgccctcgcggccaccgccgccgcggccaactccggcttcgcggactccaacccgatccgccccgtcaccgaccgtgcggcctccgcgctcgagtccacggtcttcgccgcgctcggccgcacccgcgacgcgctccgcttcgcacgcttcgccgtcaggtacggcaagagctacgagagcgcggcggaggtccacaagcggttcaggatcttctccgagagcctccagctggtccgctccaccaaccgcaaaggcctctcctaccgcctcggcatcaaccgcttcgcggacatgagctgggaggagttccgtgcgacccggctcggcgcagcccagaactgctccgccacgcttaccggcaaccaccggatgcgcgccgccgccgttgcgctgccggagacgaaagactggagggaggatgggattgtgagcccagtgaaaaaccagggccactgtggatcatgctggaccttcagcactactggtgcacttgaggctgcatatacccaggcaactggcaagcccatctctctctctgagcaacagcttgttgactgtggttttgcattcaacaatttcggatgcaacggaggccttccatcccaggcctttgaatacatcaaatacaatggtggccttgacactgaggaatcttacccttaccaaggtgtcaatggaatctgcaagtttaagaatgagaatgttggagtcatggttttggactcgggtacatcaccctgggtgctgaaggatgaactgaaggatgctgttggtctggtt

SEQ ID NO: 161246 - DNA, 310 bp, Zea mays
  Clone ID: MRT4577_78637C.1
atccttagtgaatctatatctccattttttgcagcacaacaactacaacagggggtgctttcaacaatcaatcaagtagttgcagcgaaccttgctgcttacctccagcaacaacaatttcttccattcaatcaactagctggggtgaaccttgctgctttacttgcaggcacaacatcttctaccattcaaccaacttgtcatgagccctgctgccttctttctgcatcaacagttgctgtctttccatcttacaagttgtggtaattcattgcttcttttttgtaacaacatcaattgttttccattt

SEQ ID NO: 161247 - DNA, 1961 bp, Zea mays
  unsure (1)..(1961): unsure at all n locations
  Clone ID: MRT4577_78638C.1
ctcgaggccggccgggtatcttcttgtggtggtggttgaacaataataatcgaggccgagctggctgccatacataggtattgtgtggtgtgtgtgagagagagagaaacagagttcttcagtttgctatctctctctgcatgtttggcgtcagtctttgtgctcatgtacgtacgtgtgtctacctgcatgttggttgatccgattgcatctgctgtaaccatatattaattggtccacgatgatatgatttgatactatatatatactaaaaccggacttcttattataatacttgtagtnnaaaaaaaaaaaaaaaaaaaaaaaaaaaagctcgtgccagcaggccattcttctcgccttactccctcacagaacccagtaaaatatcgccagtcccgccgtcgagatggccccacgccgcctgctcgtcctcgccgtcgtcgccctcgcggccaccgccgccgcggccaactccggcttcgcggactccaacccgatccgccccgtcaccgaccgcgcggcctccgcgctcgagtccacggtcttcgccgcgctcggccgcacccgcgacgcgctccgcttcgcacgcttcgccgtcaggtacggcaagagctacgagagcgcggcggaggtccacaagcggttcaggatcttctccgagagcctccagctggtccgctccaccaaccgcaaaggcctctcctaccgcctcggcatcaaccgcttcgcggacatgagctgggaggagttccgtgcgacccggctcggcgcagcccagaactgctccgccacgcttaccggcaaccaccggatgcgcgccgccgccgttgcgctgccggagacgaaagactggagggaggatgggattgtgagcccagtgaaaaaccagggccactgtggatcatgctggaccttcagcactactggtgcacttgaggctgcatatacccaggcaactggcaagcccatctctctctctgagcaacagcttgttgactgtggttttgcattcaacaatttcggatgcaacggaggccttccatcccaggcctttgaatacatcaaatacaatggtggccttgacactgaggaatcttacccttaccaagggtgtcaatggaatctgcaagtttaagaatgagaatgttggagtcaaggttttggactcggttaacatcaccctgggtgctgaggatgaactgaaggatgctgttggtctggttcgcccagttagtgttgccttcgaggtgatcactggtttcaggctgtacaagagcggagtttacactagcgaccattgtggaactacaccgatggatgtgaaccacgctgttctggctgttggctacggtgtcgaagatggtgtaccctactggctcatcaagaactcatggggcgctgactggggtgatgagggttacttcaagatggaaatgggcaagaacatgtgcggtgttgctacgtgtgcatcctaccctattgtcgcatgaggcccttacgaaatgttacatggtctgtttggcatcaataatgcatgtttaacctgagcttggcgatgggttatacagaacggaaactctgtttgtgaatagaaaatcatgaagggaaggagttgaccggacccctgcttgtacgtctccccgactgtgtaggtagattgtcagttggggttccgaagtactctactcatacgtgtgtatgacagtttatttatgaaacaaaatacgcattgatcgttatggtgcagcctgggatttcttattatagcataatgtatcgtatgtataaacggaccgtcctcagcacggacctaatataagcacgacctgttggcatcacatcagggatgggccgcatggcacatcgcacctaaaaagatgacaatgggaatccgaatgcccgacggttttactttaaaaaaaaaaaaaaaaaaaaaaaaaaaaaaaaaaccccccccc

SEQ ID NO: 161248 - DNA, 147 bp, Zea mays
  unsure (1)..(147): unsure at all n locations
  Clone ID: MRT4577_78639C.1
aatctccagaacgaggcccaagcgtgatctgttttatctgagtgatgttctcctgtgttctatcctttttatgtaggccgtcngctttccgttntggtnatcctctgtagcttccgaccttgtgnttgcgtggtctgctgctttcct

SEQ ID NO: 161249 - DNA, 1867 bp, Zea mays
  Clone ID: MRT4577_7863C.1
gactgtcacgcatgttcttcgtgtcactgtgacaactttcgtgacgaccatgtgcatgcatgcatctccgaccggaccgacgcatgcatcgaggccggccggcagcaagctctactcgtgctgcaagcaactgcaaagcagcaagctctactcttcttctgtactgaacgtgtgactagataacaataagcgtgaaccatggcggacgagtacggccgcagcggctacggcaggtccggcgccggcgacgactacgacagcggctacaacagcaagtccggcactgatgactacggccgtggcgaaggtggctacaacaagtcgggcggcgatgacgactacggccgcagcggcggcgatgggtacggcaggtccggcggcgacgactacggccgtggcaccggcggtggtggctacaacaagtccggcggcggcgacgactacggccgcagcggcggcgatgggtatggaaggtccggcggcgacgactacggccgtggcaccggcggcggcgggtacaacaagtccggcaacgacggctacgacagcgggtacaacagatcgggcaccaccaacgacgacgaatacggccgtggcaccggcggcgggtacggcagcaagccctctggcgacgacgcgtacgccggcggcggcggtggcgggtacggcaagcagtccggtggcggcgcggacgagggcggagagtacggctcctcccgggacgactcggagaagtacaggaaggaggagaaggagcacaagcacaaggagcacctcggcgagatgggcgccctcgccgccggcgccttcgccctgtacgagaggcacgaggcgaagaaggacccggagcacgcgcagcggcacaagatcgaggagggcgtggcggcggtggctgccctgggcagcggcggcttcgcgttccacgagcaccacgacaagaaggaggccaaagacgcggcggaggacgccggggaggaggaggagtccggccgccgcggcgaggggaagaagaagcaccacttcttcggctgatcgggctgctgctcgatcgatctacttgcgtacgtaggctgctccccaggaccagaaggagcatgcatggagggcgaacgaagtcacgggggtttgattgcccgtctatgtatatcatgtgtagttactgatgatgtgtgtgcatggtacttcgtacgcgtgtttggtgatcgatgtgtggtgtgtgtgtctctgcatggacattttcctactctgcgttttttctctctctactgatatagtatatatgtggtgtgtctatatatgtgtgcacgtggttttcgctcggctttttatcaacgctttgagaataaaagctttctcttcatctgtatattttatttttaatgaaagaaataaaccactatatatttcgacactcttaaaaaaaaaaaaaaaaaaaaaaaccaaagccgaaacttacaaactcgttaaaagaggagtccggccgccgcggcgaggggaagaagaagcaccacttcttcggctgatcgggctgctgctcgatcgatctacttgcgtacgtaggctgctccccaggaccagaaggagcatgcatggagggcgaacgaactcaataaaagaatcagccgggggtttgattgtccgtctatgtatatcatgtgtagttactgatgatgtgtgtgcatggtacttcgtacgcgtgtttggtgatcgatgtgtggtgtgtgtgtctctgcatggacattttcctactctgcgttttttctctctctgatatagtatatatgtggtgtgtctatatatgtgtgcacgtggttttcgctcggctttttatcaacgctttgagaataaaagctttctcttcatctgt

SEQ ID NO: 161250 - DNA, 280 bp, Zea mays
  Clone ID: MRT4577_78640C.1
tataacgaactacggacgaacgtcatgaaaaacatacctggcatcgatcatagacatactccaaatgcaaagaccaaaacatatgaaacaaggggaacatcatgaataacagaacaatgttataatatactgttattgaatcatgaaagaatataaacaaagaaaaattatattcggaccttcgtctagatagaaggtaaaaatcctgaagggacgcgctagtgaatacaagttatcgtgaacagcacaggggtactgcgcatctatttataggcacatg

SEQ ID NO: 161251 - DNA, 353 bp, Zea mays
  unsure (1)..(353): unsure at all n locations
  Clone ID: MRT4577_78641C.1
ccggccggggcacacgtcaaactgtcccacacgacctgtacctgccccgccgccccccggacgcaaccgcgtccgaccaccgccgccggaaccctacgcccccgcctcgccgcgccatggcggatccgccgcccgtggctgcctccgccttgccggcgcagcccgaccaggtcgccgcctccgtgtccaccccgcagaaccccaaccctaaccccctnctcttcccccaaatcctcccgtccacgaccgtcttacacctacattgagcacatctcgtccctggacaagctctgccagggcggctgcgcgcagctgccgcttccgacggcgagcggatcatggattaccccccg

SEQ ID NO: 161252 - DNA, 200 bp, Zea mays
  Clone ID: MRT4577_78642C.1
aattcaattaattattttcggtatttttttaaatacggaactaacgggctccattgtctttgcaaattaccttggtgctttccaaaataaaatgtcccggcttctagtcaaaacaaaagtcggctggctatttttttaaacgaattatctttgggtcccttttcttgtatccttagcctttttaatacctgtgttctttt

SEQ ID NO: 161253 - DNA, 417 bp, Zea mays
  Clone ID: MRT4577_78643C.1
tccggtcgtctgacttcccctcccgtcgtttcctttctgacgttagtagaaaccgcgagatgaccaccaccgcggtgtcctccccacgagaagctcgataagcttctccgcgaggtcgccaaaatcagcccaatgacctattaagataaggatgcgctcatcacgctcgtgtcaagctgcctgagtggggaggccgagcagatctagtggtcgcagatccataccccgaccgaagacgtgttggcgccgaacgatatcctctcgccacctgcctgaagatctcatggagtacaagaacctgatgtacaagctcgatgtgctcaagctcaacgaagtggtcggtacaaccatggactgcaccggccccaaggctgtcattgtagcccgcaaagggtacactttccttgaccttattgt

SEQ ID NO: 161254 - DNA, 240 bp, Zea mays
  Clone ID: MRT4577_78644C.1
ctcgagccgaatcggctcgaggtttgcgagggagaaatgctctagtcagccccaagtcaacaggtgtttggttgtttaaggtggtcatgcacaccaatttagtatttagatccttttgttctagttgattgtagatatgatgtttgtgatcattacggaggcaaggttttcctttttgtccactattgccacctatacaacttggtggtggattatgagttgtatcctcattcactattg

SEQ ID NO: 161255 - DNA, 235 bp, Zea mays
  Clone ID: MRT4577_78645C.1
attcggctcgagctcatgttctccgtctttttgcacactggaggcacgtccaccagggggggctgtattaacccgacggggggatccataaggtagaggtcaaacctctgggcacaggggtcctgaacagctggatcatgttgtaagagctatactgactcatgatgctgcgccaagatgcctggtcactgcatccggtcaaacatactcacagaggtgctcatatctcacacgg

SEQ ID NO: 161256 - DNA, 407 bp, Zea mays
  Clone ID: MRT4577_78646C.1
gtatgttctcattcttggtattccatatgttttaaagcattggggaattaaatgttcaaccatcacaacaattaaggtagaccagaacaacaaagggctcacaaggagggtaaacaaaaaatgtcatccagtgtatgaaaaaaaatgaacccaacacaacagggcatcatatggacatggagcataacttatccctggggtggctcggtgccataacataaccaaaggaaaaaagtgccttgctgcacacgcggcagatgacctcgtttgaacaataggtcatcttcatacgctgcttagatgctgaacggcgacgtataagaggggccagccctgaaagcggcggggatcagccgctccgcgatggggaaaccaccagacccgacaggtaagcggacgcacagggg

SEQ ID NO: 161257 - DNA, 369 bp, Zea mays
  Clone ID: MRT4577_78647C.1
ggccgggccggaatggccgggccgacccaggcggccgggaaattgtttgttctagagctagggctgcgatgccagacgcacccctgatactgtatcggacgggccctccctctcagcaccgcctgggagcggtcattcttctccgggatccggaggatgctctaggaaactgacgccgggagcgccccgaagaatattctgcacccagtgcgccgacacctttgcgcgcgcgagaggtaccataggcctgtggcaggtcggcagttggttgacagagtgacaaccatgagctccgagacattacgaaggagggggcggagactggtgcagaggccgaaatcaaggaagtggcgggcaaggtgtacatgt

SEQ ID NO: 161258 - DNA, 208 bp, Zea mays
  unsure (1)..(208): unsure at all n locations
  Clone ID: MRT4577_78648C.1
ccgaattcggttcgagatgtacctcggatgtgctctatgtggctttttaattttgaacggaggaagctatagtgagacaaacggatggcgtaacaagatactttgctttacctncaacacagccgcagaagcggcaggcctgctactgatagttcttctgtcgctcgccgcggcggcggacatgtcgatcgtgtnctacggggggcgc

SEQ ID NO: 161259 - DNA, 361 bp, Zea mays
  Clone ID: MRT4577_78649C.1
gtgattggaacattttttttttttttttattttattgttttgaaaagtgtaatacatgtgcttagaacatctaaattgttttttaacaaggaataacaagaaagatcctaacactaaaagtcttttgggaggcaaggaaaaaaaatttacacattcaccaaaacaaggaatcaagaaaaagccttacaaaagccacagttataaagaaattgaaaacaaaaaaaagaggactaggccaagaagcactaacatggtgggatgggagcccgaacctagcttttattaaagcaaaaaaaaattggtttaaaacaaaaatggggggaaaccccgaaatttcagaacgggtcataaaacaaaacca

SEQ ID NO: 161260 - DNA, 211 bp, Zea mays
  Clone ID: MRT4577_7864C.1
ctcactcgtccgcccacgcgtccgcccacgcgtccgggcccttttttttttttttgggaaaaacatgggacaatgatgatacctagtcattacaaacgtgaggatacacgttcaatcggcaatgagccataatggaaggcaccctcacgggcctgcaagcagtcaatcacaaacgctggtccaaacaaactaccccaaaaagaaaagagag

SEQ ID NO: 161261 - DNA, 123 bp, Zea mays
  Clone ID: MRT4577_78650C.1
gggatgagaaaggggttcatgcatgtttagggcacctgacctggctgcccaggtaacttgtgattggtgtaccgtactaaagtttttaccaatccaccactattgcgtctaatgttcagcttc

SEQ ID NO: 161262 - DNA, 386 bp, Zea mays
  Clone ID: MRT4577_78651C.1
cagggtcgagccaggcgtacgcgtacgcatccgatatgcgcccgggactgatcctatttctgtacaactactacaagcaccaggtgcgaggaatgttggaggccgttagcttcaggcagacggacatgcacccgaccgactgagaagacaaagaggaccgccgcaacgtctggctttccggcacatgcgctgttcagcaacccggaagatctacgacccgctcgaggaagacgccttacgcaccgtcctagaccaattcgacgaccatagttacggcgttgagctgtacttaccgatgaccatggcatgctcaacaaccagtgcgactaggactaagactgttgccaatctgaactgtcgcagggtcaatctaagctagtatgcac

SEQ ID NO: 161263 - DNA, 284 bp, Zea mays
  Clone ID: MRT4577_78652C.1
tatggatcttgattctagccgccaccgctgatcatctgacatacgtcgagaagacgcctgctcctcgactatcgatacgaaggcgtctactacgaccttcacacacgtcgacagcctcaaataacctagaggctgaccctgacggcaaaacctattgcgccaggtgactacattactaaagatgacatctaggtctcggtctgggtaccatcaaaacctgactctgaggttacatatatgccataccgatggtacgagaccgtctctgacgatgtagcctcaag

SEQ ID NO: 161264 - DNA, 353 bp, Zea mays
  Clone ID: MRT4577_78653C.1
agaccattagcttaaactgctccttagcgcagcacaacccgcacgacaccatgagggtgttgctagttgccctcgctctcctggctctcgctgcgagcgccacctccacgcatacaagccgcgaggtgccgatgccagccaccgtcgtccggtcatttaccgccgccggggcatctgccagctacggctcacctgccaactcccacacatgctacaccgccggttcaactgccagcttccgttcacctgccatcgtcagtccatgtgccgccggcggcttatatgccgtcgccaccatgccactaccatactcaaccgtcacggcctaagactgattctcagccacacccatg

SEQ ID NO: 161265 - DNA, 1012 bp, Zea mays
  unsure (1)..(1012): unsure at all n locations
  Clone ID: MRT4577_78654C.1
cctcgaggccggccgggcgaggccggccgggccggcccttccgctcgacgcaaatcgtgaaacagtttagaatttccaacgaaagtcctacgagcctgcgagtgctaaactgctaactgctaagactgcaatggcggccggaggcgagctgcagctgctgagctcatggtacagcccctacgtgatccgcgccaaggtggcgctggggctgaaggggctcatctacgagttcatcgaggaggacctcttcagcaagagcgacctgctgctgaagctcaacccggtgcacaagaaggtgcccgtcctggtccacggcggccgccccgtgtgcgagtcgctcgtcatcgtgcagtacgtcgacgagacctgggcagcaggcaccgggacccctctccttcctgccgacgcccacgaccgcgccacggctcgcttctgggcagcctacgtcgacgacaagttctgcaaggagtggatcaaactgtacaggtcgacgacggcggagaaggcggcggaggcgctcggcggcgtggtccccgtggtggagacgctggagcaggcgttcagggagtgctccagggggaaacccttcttcggcggcgacgccgtcgggctcgtggacatcgcgctcgggagcttcgtggtgtggatcagggtggtggacgaggcggccggcgtaaagcttctggacgaggccaggttcccggccttgacggcgtgggcggagcgcttcttggcggtggacgccgtgaaggaggtgatgccggacgccggaaggctgttggagcactacagggggtttctggctaaacgggctccacctgcgggttactgatcgctgtaactgtaagcttgtaacagcaagctcagtgttcgtgacttttcccgtgcgttaacaggtgtgtactggagttcaagaaaggctttgattctggccagacgaataaacgaactttatttgaaaaaaaaaaaaaaaaaaaaaaaaaaagggcggccgcccgcgtnctagaactag

SEQ ID NO: 161266 - DNA, 491 bp, Zea mays
  Clone ID: MRT4577_78655C.1
cccacgcgtccgcccacgcgtccgcccacgcgtccgcccacgcgtccgcttcttcggcggcgacgccgtcgggctcgtggacatcgcgctcgggagcttcgtggtgtggatcagggtggtggacgaggcggccggcgtaaagcttctggacgaggccaagttcccggccttgacggcgtgggcggagcgcttcttggcggtggacgccgtgaaggaggtgatgccggacgccggaaggctgttggagcactacaaggggtttctggctaaacgggcttcaccttcacctgctggttactgaacgctgtaacctagcaagctcagtgttcctgtacttttctgttcgttaacggtgtgtactagagtggtgtcaagaaaggctttgattgtgtccagacgaataaacgggtgtctttgggggctaaaatggtactgatgatggctctggcatcaaaaaaaaaaaaaaagggcggcaacagactagtgagctc

SEQ ID NO: 161267 - DNA, 1289 bp, Zea mays
  Clone ID: MRT4577_78656C.1
cacgagcccacgacagagctgaagcaaatcgctgcaggccgcgccgagccgccgacaagcaacgtgggttcaccagtaaacaattcaaattcgacttctcagctcgttaaatatacggtcgctccgctcgccccttccgctcgactcaaatcgtgaaactattgagaaaattccattccaacgacatcgaaggagcctgcgaagcgagcgagagtctataatggcgaacggaggcgagctgcagctgctgggctcatggtacagcccctacgtgatccgcgccaaggtggcgctggggctgaaggggctcagctacgagttcgtcgaggaggacctctcccgcaagagcgacctgctgctgaagctcaacccggtgcacaggaaggtgcccgtgctggtccacggcggccgccccgtgtgcgagtcgctcgtcatcctgcagtacgtcgacgagacctgggcaggcaccgggacccctctcctccccgccgacgcctacgaccgcgccatggctcgcttctgggcagcctacgtcgacgacaagttctacaaggagtggaaccggctgttctggtcgacgacggcggagaaggcggcggaggcgctcggcgtcgtcgtccccgtggtggagacgctggagcaggcgttcagggagtgctccaaagggaaacccttcttcggcggcgacgccgtcgggctcgtggacatcgcgctcgggagcttcgtggtgtggatcagggtggtggacgaggcggccggcgtaaagcttctggacgaggccaagttcccggccttgacggcgtgggcggagcgcttcttggcggtggacgccgtgaaggaggtgatgccggacgccggaaggctgttggagcactacaaggggtttctggctaaacggtctccacctgctggttactgaacgctgtaactgtaagcctgtaacagcaagctcagtgttcgtgtacttttccgtgcgttaacgtgtactagagttcaggaaaggctttgattctgtccagagtccagacgaataaacgaatgttttttataaaaaaaaaaaaaaaaaataggtcagtgtgacatggtttaacgtgtactggagttacaagaaaggctttgattcctgttgcagtacttaataaaaaataagatttgcctttcaaagttagtagtcatgggccgcccgctcgccgccaacaggagtagtcatagttctggcattgtccgctggtgtgcaacagtgtaagtatagtggctacagataaccctatcagtaaaaccaggctcag

SEQ ID NO: 161268 - DNA, 867 bp, Zea mays
  unsure (1)..(867): unsure at all n locations
  Clone ID: MRT4577_78657C.1
gggtacctcgaggccggccggaagcatgaaagagaccaggccatgcagtgtagagcaggagctgtctagcaacgcatgaaggactaccaaggccacagcgctaccacaccgtgtggcagtggcactggcaccacgggagaggggcgaggcgactgactgataaggaagaagcaggtccgagctcgccagcagctagccgagcgcacgtggccgagatgggtggcgccggcggcggcgggaggaacggggcggcgacgaggcggtacaacaggtccaaggtgccccggctcaggtggaccagcgagctccatcgcaacttcgtccgagccgtcgactgccttggcggacaggacagtacgttctgttcctgtcttctcacctctcacgctaagcatgcatgcatacatacatacatgtctnttggtttggtgtcctctctatatctctctttcctcgtcggccaaaatggccctgggctcattcatgtgctctcttcgtggtcgatgtcgactgcatgcagaagctactcctaagctaattctccgnctcatggnatgtcggagggcttaccattgcccatgtcaagagccaccttcagatgtacagaagctcaggacaagacattagggaggagagaggtgcaaccgcggcggctaggacatctggtggagcactactcattcgccattgatggaggagggaggccccaaagaattcgtctgctgcccacacatgaanaggggcggaggcagggccagaagctgcggccacggncacggncacgcacgaanagcgtggcagggggacaggtgacatgggggctcctggcacccgggggctgcggcgatgattacacgcgagcgatcc

SEQ ID NO: 161269 - DNA, 204 bp, Zea mays
  Clone ID: MRT4577_78658C.1
tacgtaagctcggaattcggctcgaggcctcacaaggcacacgctcgaaacaaactactagctggggccccaaggttgtcttttttggccggagcccccccaaacccaaagaggccgggggcgaagcatctcgcacttgtcgcgcggcgagtccagaagacaccaaacctcatggcccgcgcgtgccccgcctggaggccacct

SEQ ID NO: 161270 - DNA, 225 bp, Zea mays
  Clone ID: MRT4577_78659C.1
ttctatgattatgtgtcgtcgcaacgagcacgcacactttatagttttatggtgccaattatatgcctctttatttcattctgagcgagaggtgtaagaaagcacccgctggccggtgctgtggactggagaatgttttatttgcatgcacgcacgccgcaaactatacccaagtctttgtttatttgcatgcacgcgaaaaattataccgaatattttatttgt

SEQ ID NO: 161271 - DNA, 466 bp, Zea mays
  Clone ID: MRT4577_7865C.1
caaggtgaacgacagaggaatgtaaagtttattgaaactcaattttcgtcatgaaatgtggtcacaagtagtgacgagccagactctcagcatgctccccagcgtgggtatgatcccacaacttaagggcaattgaggccttgcttttgttggccacggggaggcgctccaggaaattatcctccatgagcaccaagccgtccttgtacgacgattattgacctcccatcccataacttccttccgccttataacatatccggatcttctctgaccgcaggacatcacagagtgtccaggtacattgccactgatacatgtggcatgatcaactacttaacattctgaacaagttccatgatggagaatgcacctgagcgtccacaagataatcggtccatgacttgtctccattcatgcaacttaatatgcaccatgaaccatatgggaatcatatcagaaacta

SEQ ID NO: 161272 - DNA, 371 bp, Zea mays
  Clone ID: MRT4577_78660C.1
tttaatgcctccgcctacgccgacaagctaaggggggatattttaacacaagtgggggcctctaaaaccccgactacactggcgatgatcttatccactctcatatgtgcctcggtgggatccaacgtccacaaccagctaactgactactggatccatactcggagctatcgctaaatctgcctatccaagagcttgacctatgtaaccggtggcagcttcacacactaaatgaggctaccgtgcaagacattgaccaccatatcttgcggaaaccacacgtacacgatagaactgacagacacccactatgtggacatactcaaaaccgcatggtcgaagactacacacactgactgcgaccagagact

SEQ ID NO: 161273 - DNA, 366 bp, Zea mays
  Clone ID: MRT4577_78661C.1
tcgcgatctagaactagtgggccccttggtcggccgcgtgaatcgggcgccgtggccggcccaagaactacattccgctatatagaggcgtaccagattttgctatagtgattgtcataaaagattgctgtgtgaataggttttcctgtcacctgtgcgacaacgttatacgctaaaaacagcacgctacatgccagcggtgggtataaagtgatataactgaggtgcttagcgagggggttactgtacaataaccgctgggcactccctttctgctttccaggtcaaagacctggccagcaagctaggtgagggacatccgcctatgagccgcgagagggggtttgcttactctcagccagaggg

SEQ ID NO: 161274 - DNA, 666 bp, Zea mays
  Clone ID: MRT4577_78662C.1
cgggaccgcccttttcttctacacgcgccgccgcccaggattttttcttcttcctcacggcgtttcctctacttctcactccgcgcgctctccactgctgtcccagcgcagctccctctgctccatcttcaagccgccatgccccctgccccatcttcctggctgcgccctcccccagatagccgcaagcagccaagatccctctcccatggcgatcccctcaagctcgcccagtctgcgtgccgcggcttctcttccccagctcctccctgtcgcgtccctgctccagcccagccgcgcgtcttccctgctcgcccagctcggattgcacccaacttccagggccacggtcgccctctctgctccccatgacgcgcctgctcccatggagctcctccctgcgtgcgctacgctcagtcttgccgagctcccttgccgcggctcttccacagctcggttctgcccagttcggcgcccatctccctgcttcccagccgggcttctctctcccatggcgccctgctcggatttcgccatggtcacgcccagccgagcttctctgcgcgcgccgtccctgctccagccttccgcccatggcgtgccttgcttctcccgcgcgtgccatcctcaagctcggggggctctcctgggcgctggtcgctcctc

SEQ ID NO: 161275 - DNA, 355 bp, Zea mays
  unsure (1)..(355): unsure at all n locations
  Clone ID: MRT4577_78663C.1
aaataaaaaacctgctcggatggattttattgttggataaaaaaaanagaaaaataaaccatgacaacatacacactacattttaaggtgagttaataacattttcgttcaagagaaaagcagacaacaaaaacacaaggccggccggggacagccaccacacttttttggttcgttacgcctaagaaaatcccaattttgaaagcttaaggggggccttggcgtagccagaaaaaaaagcgtcctcgtccgctgcgttttttgaaacaagggggcggaaggatggatcaaaaaggagggctttgccacttggtagctgaaaaaggccttccttttttccgctcaaaagcttctt

SEQ ID NO: 161276 - DNA, 946 bp, Zea mays
  unsure (1)..(946): unsure at all n locations
  Clone ID: MRT4577_78664C.1
cattgggtacctcgaggccggccggngaaaaaaaattacaaaaaaaaaaaaaaaaaaaaaaaaaaaaaaaaaaaaaaaaaaaaacctagagaagcttttgagggaggagccatgtctgaggagaagcaccaccaccacctgttccaccaccgcaaggcagaggaggaggagggcgcctccggcgaggtcgactacgagaagaaggagaagcaccacaagcacatggagaagctcggcgagctcggcgctatcgctgccggcgcgtacgccctgcacgagaagcacaaggccaagaaggacccggagaacgagcacgggcaccgggtcaaggaggaggtggccgccgtcgccgccgtgggctccgccgggttcgccttccacgagcaccacgagaagaaggacgccaagaagcacgcccacaactgatccgtcgcaggctgcctcagccgaagcagcagcacatcgtcgcggttgctgtttcatctgttctcccagcctcgtcttcgtctactgtgtgccgggcaggccttgatttgaggctttgagctaccgatatttgcacggacgtaggaactgtgttggcccctcggcgttcttgtatcaagatcaaatcaggccttcaataagtgtgtgtgcatatatcttttttttaaaatttatctctttttttttgtatcgagagatgttctgaataatgtgaatttacgtgtgtttatataaacgaatttaagaagtccgccaaaaaaaaaaaaaaaaaaaaaaaaaaaaaaaaaaaaaaaaaaaaaaaaaaaaaaaaaaaaaaaaaaaaaaaaaaaaaaaaaaaattaatataagaaaaaaaaaaaaaaaataataataggggggggccccccccttttggtccttcccccccggaattatttttcggcccgggccctttgggggtccccattttcctttttggggg

SEQ ID NO: 161277 - DNA, 892 bp, Zea mays
  Clone ID: MRT4577_78665C.1
actcctatgggcgaattgagatccagcccctcgccggccgggagggccgcgtccacggctccacccctataaatgctggccatgaggcaccacggtttcttctgcctcgaggccggccgggaattcatccagacaagtcatatctagctagtagctcccttgaaaagttcactagagaagcatttgagggaggagccatgtctgaggagaagcaccaccaccacctgttccaccaccgcaaggcagaggaggaggagggcgcctccggcgaggtcgactacgagaagaaggagaagcaccacaagcacatggagaagctcggcgagctcggcgctatcgctgccggcgcgtacgccctgcacgagaagcacaaggccaagaaggacccggagaacgagcacgggcaccgggtcaaggaggaggtggccgccgtcgccgccgtgggctccgccgggttcgccttccacgagcaccacgagaagaaggacgccaagaagcacgcccacaactgatccgtcgcaggctgcctcagccgaagcagcagcacatcgtcgcggttgctgtttcatctgttctcccagcctcgtcttcgtctactgtgtgccgggcaggccttgatttgaggctttgagctaccgatatttgcacggacgtaggaactgtgttggtcctcggcgttcttgtatcaagatcaaatcaggccttcaataagtgtgtgtgtgtgcatatatcttttttttaaaatttatctctttttttttgtatcgagagatgttctgaataatgtgaatttacgtgtgtttatataaacgaatttaaaaaaaaaaaaaaaaaaaaaaaaaaaaagccctctacgtttaggctttgcaaaatttggcctcgagctcagctt

SEQ ID NO: 161278 - DNA, 475 bp, Zea mays
  unsure (1)..(475): unsure at all n locations
  Clone ID: MRT4577_78666C.1
agctaacacaaaatatctaccctagattttaagctcgcttgttgcttctgtgttagagcgttngataccagcaaccatatatgccacacagtatacaagctcctatagttggtcttgttgccccaaacctctcaccactgccaccttgaacgtgagaaaacccaagggcatcaaccctacagaacccaacaggtacacctaacaggtcatcttaccattattaaccttgccgctacaacaaccgcaacacctatcacaagagttatcctatgctccattcggtggcacaaaacaaaaggccacaacaactacaacaacttgtgctaccaaaccttggtggatactcttagcaacatcagggactaccatctaaccaactgcctgcattgaactctggtgattattgggaacaacaactaccattcacccagctaactgttgactacccccagcaattgcttccattgaaccaact

SEQ ID NO: 161279 - DNA, 949 bp, Zea mays
  Clone ID: MRT4577_78667C.1
aagtgcgtcccggctcccccctataaatgctggcatgaggcaccacggtttcttcaattcctcgcgtccggtcatatctagctagtagctccctgaaaagttcactagagaagcatttgagggaggagccatgtctgaggagaagcaccaccaccacctgttccaccaccgcaaggcagaggaggaggaaggcgcctccggcgaggtcgactacgagaagaaggagaagcaccacaagcacatggagcagctcggccagctcggcgccatcgccgccggcgcgtacgctctggtgagaccgaaaaaacccaacctccatccctttggtcgcctgatcgatgcatgccatggtccagctcttgatctgtgtgtgtctgtgcgtgtgcatcgacgtgtggctgcagcacgagaagcacaaggccaagaaggacccggagaacgagcacggccaccgggtcaaggaggaggtggccgccgtcgccgccgtgggctccgccgggttcgccttccacgagcatcacgagaagaaggacgccaagaagcacgcccacaactgatccgtcgcaggctgcctcagccgaagcagcagcacatcgtcgcggttgctgtttcatctgttctcccagcctcgtcttcgtctactgtgtgccgggcaggccttgatttgaggctttgagctaccgatatttgcacggacgtaggaactgtgttggtcctcggcgttcttgtatcaagatcaaatcaggccttcaataagtgtgtgtgtgtgcatatatcttttttttaaaatttatctcttttttttgtatcgagagatgttctgaataatgtgaatttacgtgtgtttatataaacgaatttaagaagtccgccctgatttgcttcgtctttaactaaaacacgcaatgagaaatagtactccttgactattaatataggacttttggac

SEQ ID NO: 161280 - DNA, 784 bp, Zea mays
  Clone ID: MRT4577_78668C.1
ccctcgggcccggcccgggaattcatccagacaagtcatatctagctatagtagctcccttgagaagcatttgagggaggagccatgtctgaggagaagcaccaccaccacctgtttcaccaccgcaagccagaggaggagggcgcctccggcgaggtcgactacgagaagaaggagaagcaccacaagcacatggagaagctcggcgagctcggcgccatcgccgccggcgcgtacgccctggtgagaacaaaaaaaccaacctcgatctctttgatcgcctgagccatgcatgccatggtccagttcttgatctttgtgtgtctgtgcgtgtgcatcgacgtgtggctgcagcacgagaagcacaaggccaagaaggacccagagaacgagcacgggcaccgggtcaaggaggaggtggccgccgtcgccgccgtgggctccgccggcttcgctttccacgagcaccacgagaagaaggacgccaagaagcacgcccacaactgatccgtcgcggttgctgttccatctgttcttccagcctcgtcttcgtctactgtgtgccggccaggccttgatttgggctaccgatatttgcatggacgtaggaactgtgttggtcggtcctcggcgttcttgtatcaagatcaaatcaggccttgaataagtgtgtgtgcatatatctttttttttaatttttatctcttttttttttggatcgagagatgtcctgaataatgtgaatttacgtgtgtttatatgacaaaaaaaaaaaaaagcggcc

SEQ ID NO: 161281 - DNA, 765 bp, Zea mays
  Clone ID: MRT4577_78669C.1
ggccgcttttttttttttttttttcagctagaacccttgggtatccccctaaggattcgtcttaatctacttattgatatatattgtgcctatctgcgaaacaccttacataggtagactgattagacagcccctcagcttaaaggtgggagtcgcgctaagaagagttacgccgaagcgctgagattagcgttagacaatacttttgagaggcacctccgtagtaaatgttcactatgtctcagcactcatttccacccgatcaaatcccctgattaaacccctcactcgccacactaatgcccttatcaacccactgcttcagaccggcgtatctccatttattataccaggccttgggcgtattctccggacaatccagaacatggtcgccagccccattacacgtcgcataaaccccaatcagcgtaccgacaaaactgcccgtacgtccgctcagctgacttgtggccgccttgcccaactggagcgtctctgagtcgccctcggccaaggtagcggaaaacaagtactcgtctggggtgcacatgtcaatcatgaggcggatgggctcttcttcccaagcctcgggaagaggcgtgtacttgttccgggactcggtcgagttgaagcgaaacacggttgagccgttaaggcgagtaacagcaagctgcacattagcatattgcgttaggaacgcggtgatgccggctccctggccgtcctgagatcggtttgaaggtcatatccacgctaattttgaac

SEQ ID NO: 161282 - DNA, 1571 bp, Zea mays
  Clone ID: MRT4577_7866C.1
cctcgctcgcggccgggggggatccccctgcgggctgggcaggatagtgcagcaagcaactgcaaagcagcaagctctactcttcttctgtactgaacgtgtgactagataacaataagcgtgaaccatggcggacgagtacggccgcagcggctacggcaggtccggcgccggcgacgactacgacagcggctacaacagcaagtccggcactgatgactacggccgtggcgaaggtggctacaacaagtcgggcggcgatgacgactacggccgcagcggcggcgatgggtacggcaggtccggcggcgacgactacggccgtggcaccggcggcggtggctacaacaagtccggcggcggcgatgactacggccgtagcggcggcgacgactacggccgtggcaccggcggtggcgggtacaacaagtccggaaacgacggctacgacagcgggtacaacagatcgggcaccaccaacgacgacgaatacgggccgtggcaccggcggcgggtacggcagcaagccctctggcgacgacgcgtacgccggcggcggcggtggcgggtacggcaagcagtccggtggaggcgcggacgagggcggagagtacggctcctcccgggacgactcggagaagtacaggaaggaggagaaggagcacaagcacaaggagcacctcggcgagatgggcgccctcgccgccggcgccttcgccctgtacgagaggcacgaggcgaagaaggacccggagcacgcgcagcggcacaagatcgaggagggcgtggcggcggtggcggccctgggcagcggcggcttcgcgttccacgagcaccacgacaagaaggaggccaaagacgcggcggaggacgccggggaggaggaggagtccggccgccgcggcgaggggaagaagaagcaccacttcttcggctgatcgggctgctgctcgatcgatctacttgcgtacgtaggctgctccccaggaccagaaggagcatgcatggagggcgaacgaagtcacgggggtttgattgcccgtctatgtatatcatgtgtagttactgatgatgtgtgtgcatggtacttcgtacgcgtgtttggtgatcgatgtgtggtgtgtgtgtctctgcatggacattttcctactctgcgttttttctctctctactgatatagtatatatgtggtgtgtctatatatgtgtgcacgtggttttcgctcggctttttatcaacgctttgagaataaatctcttcacaatttgttagcccggcgaagatcaatacgatgaattttctctggtttcggacccatatgcacgactgcctgacttatctgaacgccttgaatctgaacttggcagtgcagctgagaaaagattttctaattctgacatatcaaacacaggagcttttagagtttcgtcaggcttctgtgactccgccgtgtgcacgtggttttcgctcggctttttatcaacgctttgagaataacagctttctcatcatctgtatattttatttttaatgaaagaaataaaccactatatatttcgacacacccccgc

SEQ ID NO: 161283 - DNA, 218 bp, Zea mays
  Clone ID: MRT4577_78670C.1
tttttttaccatcaaaactgtaccttgattttattgggtattctattattagcattagttccttagggaaattgtgcagatcccaattaaccaaaaaaaaacttgtgccctggcaaagggagaatggtggggcgacaaatgatggagtcaactggaaaccagacttacatattcttgaattaaatggattccctcaaggttcccgtagcatgcgagtc

SEQ ID NO: 161284 - DNA, 374 bp, Zea mays
  Clone ID: MRT4577_78671C.1
acgaaaactctggcggagaggagcgctgtgaggaccacacacgcgcgcagaaacctgcgcagtacgcacctgactccacgacttgttgtgctagtgcgctagtttgctcgagcgcggcgcggagcacggggacatgaaatggcacgtgcggcggagatcggtggtttcatggctgcgagagtggcggtggcaacgctcatggcgactgtgcagccagctgcggaggcagccgtggcaccggaggctacgacggcggctacgacgcaggcggtggagacgaccgtgaacgaggcgctgaccgaggatctgagccggacgatcaacggcgctgtgcatgctccgatgaatagtaaggctactagtgaagatacttg

SEQ ID NO: 161285 - DNA, 2811 bp, Zea mays
  Clone ID: MRT4577_78672C.1
ccgtaccccgggcccctgaacctggtggcgtggctcgcccgctcccacaccgagcacggcgactacccccggacccggggcccccccctcctcgcgctgacggtgcgcgcgcaggggagccgacgaatccacctacccgcattcgggctccagcgccaccccgtgccatcgggctgcgtccgctaacgaccgcccgttcgcgcagggcccagggtgtgggagggagcaatggtcgctgggatggaggcggaggaaggggtgatggcgacggacttcttctggtcgtacacggacgagccgcacgcgtcgcgccgccgggagatcctggccaagtacccgcagatcaaggagctcttcggcacggaaaggagggccttcaacaagaccggcatggttccagcgcagtcatatctagctagtagctcccttgacaagttcactagagaagcatttgagggaggagccatgtctgaggagaagcaccaccaccacctgttccaccaccgcaaggcagaggaggaggagggcgcctccggcgaggtcgactacgagaagaaggagaagcaccacaagcacatggagaagctcggcgagctcggcgctatcgctgccggcgcgtacgccctgcacgagaagcacaaggccaagaaggacccggagaacgagcacgggcaccgggtcaaggaggaggtggccgccgtcgccgccgtgggctccgccgggttcgccttccacgagcaccacgagaagaaggacgccaagaagcacgcccacaactgatccgtcgcaggctgcctcagccgaagcagcagcacatcgtcgcggttgctgtttcatctgttctcccagcctcgtcttcgtctactgtgtgccgggcaggccttgatttgaggctttgagctaccgatatttgcacggacgtaggaacttgatctctgggccctacgtcttcagccccgagcatgagacctactcgtactacgggcccctgaaactggtggcgtggcacgtggggtaccacaacgagcaccacgacttccccaggatcccgggcacccggctgcacagggtgaaggagatggcgccggagtactacgacggcctcgagtcgtacaggtcctggagccaggtcatttacatgtacatcatggaccggacggtcggcccgttcagccggatgaagaggaaggcgcagaagaaagactcgtagtcgccgtgtgctcaatttgttttttttttggtcgcgtgtgatgtgaactcatgtttggtgtaagcatttcgattcgtcggaacagcttgtttgtgatatcaatggctcgttttttcgtgctggatccaccgtgcccagcacgagctgtcaccggccgggaaatcaaactgacaagtcatatctagctagtagctccctgaaaagttcactagagaagcatttgagggaggagccatgtctgaggagaagcaccaccaccacctgttccaccaccgcaaggcagaggaggaggaaggcgcctccggcgaggtcgactacgagaagaaggagaagcaccacaagcacatggagcagctcggccagctcggcgccatcgccgccggcgcgtacgctctgcacgagaagcacaaggccaagaaggacccggagaacgagcacggccaccgggtcaaggaggaggtggccgccgtcgccgccgtgggctccgccgggttcgccttccacgagcatcacgagaagaaggacgccaagaagcacgcccacaactgatccgtcgcaggctgcctcagccgaagcagcagcacatcgtcgcggttgctgtttcatctgttctcccagcctcgtcttcgtctactgtgtgccgggcaggcccttgatttgaggctttgagctaccgatatttgcacggacgtaggaactgtgttggtcctcggcgttcttgtatcaagatcaaatcaggccttcaataagtgtgtgtgtgtgcatatatcttttttttaccgcatatctctttttttgacgctcgagagatgttctgaataatgtgaatttacgtgtgtttatataaacgaatggcgtcgggcaaaacgatattgcggcagatcgtggacgacgcaaggagaggggctgtttcttggacgccaaggacgaccaggacctcgcatgcgccataatcaaggcctccatcgagctggacggagtggagaatctactcaagtttgacatgctgcggatcggcggctcgagaaggtccggggtatgatggtaaactcgactcgcaagctccggggtaccaactaccaagttagaaacaccaactttggccaaagtctgtgtgtcttaagttttgaactatcttgcttatgaggtggtgatgatgattgtctgattgatctagatcccttaaataaatttaacatcgtatgaagagaagtatgctgtaaaaaaaaaaaaaaaaaaaaaaaaaaaaaaaaaaaaaaaaaaaaaaaaaaaaaaaaaaaaaaaaaaaaaaaaaaaaaaaaaaaaaaaaaaaaaaaaaaaaggggggggcgctttttaagagaaccaaagtttacttccgggggcttgcaaataaaaattttttttttggggcccccaaaattaaattaatgggccgcgttttaaaaacctgtggaattggaaaaaaccttgggtttcccaaattaaatcgctttgaaaaaaatccccttttcccaagttgggaaaaaacaaaaaaggccccaaccaattccctttccaaaaatttccccaccctaatgggcaaaggggcccccccttttaggggcctttaaagcgggggg

SEQ ID NO: 161286 - DNA, 1354 bp, Zea mays
  Clone ID: MRT4577_78673C.1
cattgggtacctcgaggccggccggggacctttttcatcccacgccccacccccaaactccatctccatcacctcgcacttatcggtgaaaccgcgcgatgactacggcggcgcccgcgctgcccatgttcctccggctgtgcccggcctcgcccttcctcctcccccccagcctacacgtccccagctcaaggcgccccactccgtcgcgcctgagctcttttcgccctgcaaggccactcttccccatctcagctgtggagaaaaccaacgaggctgctgcggctggggagggtgagctcgaggggatgccgcccgagttctacgacgaggagtggcaggcccgtcagcgggagaggactaaggagtggcatgcatatcggcagaaagaggaggccgaggaggaaagaataacaaatgagtaccgagagataggcatgcgcctgaaagcttatccgcaagaagaagttcgcaaagctaggattttagtttcaagtttcataagagctggtggagatgttgaggaggaaattgagaaggctgctgaaagaggagagcttactgaacttgtccttatggtcatctggaatcgacttgatattgctcggcgtgatgatgagcgggatgccatcagaagccttgatctcttgtatagaagggtagagacagagattctgaagagtgaagcaactcctgccatgagattgctcaatgatcttcttaatcttcatgatggaggcgacaatgagaagtggttaaagaaatgtagaaagcgcatgcttgaagtctttccaagagaggacccattcactgtggtctttcctgctgggttcaacatggagaatcgtgaagggcgaattgagctaccgcctcaggatgatgatcttcttctgagagtggactttgtcagggaagttgatgagctgctgaaagaggttcgtgctgtggaagacaagaacaagcaacaaattgggtttgacccagaatcagttgcatatatgctgaagcagcaggagaagatgcagacgatgcgtcaggtggaatctctcctggacttggcgtcctcgttgaaatggtgaggattgagtactatcgaacaactgaacaactatgctgtttgcttagaagctagacgtcattgacttgacatttatactcaacagttagagggggtatctgttttcagctagttagaccaataaccgttctgggtagagccatgcagtttacttggacatccatgtacatttgtatgtgtagagatatcttatatatcaatgtatgtctacactgctaatgaaaaaactaaaaaaaccattttctcttcaccaaaaaaaaaaaaaaaaaagcggcc

SEQ ID NO: 161287 - DNA, 1655 bp, Zea mays
  Clone ID: MRT4577_78674C.1
ccggccgggacaccactctgctccactccgccatggccacctccctcctacgcctctctcgccaccgccgcgcgctgctcgccatctcctccgtccgccttgcgctctccacccagcccccgtcccatctccgtccccatcccctaccccctcctccgcccgccgcctcccgcatttcctctccttcctcgccgccgccgccgccgccgctgggggagcaaccgtcgcgctctgcgactccggcctagatcaccgggtcgggggcaaggacagcgccgatctggtggttcgtggggagcggaagttcgtgccgcaggagttcatcgacgagctcgcgtccttcctcggggacaacatcactctggactacgaggagaggagcttccatggcacgccacagaacagcttccacaaggcggtcaacctgcctgatgtcgtcgtgttcccgagctcgcaagatgaggtacaaaggattgtgatggcctgtaacaagcacaaggttccaattgtaccatatggtggggctacctcaatagagggtcacacactggcacctcatggtggtgtttgcatcgacatgaccttgatgaagaattcatccagacaagtcatatctagctagtagctcccttgacaagttcactagagaagcatttgagggaggagccatgtctgaggagaagcaccaccaccacctgttccaccaccgcaaggcagaggaggaggagggcgcctccggcgaggtcgactacgagaagaaggagaagcaccacaagcacatggagaagctcggcgagctcggcgctatcgctgccggcgcgtacgccctgcacgagaagcacaaggccaagaaggacccggagaacgagcacgggcaccgggtcaaggaggaggtggccgccgtcgccgccgtgggctccgccgggttcgccttccacgagcaccacgagaagaaggacgccaagaagcacgcccacaactgatccgtcgcaggctgcctcagccgaagcagcagcacatcgtcgcggttgctgtttcatctgttctcccagcctcgtcttcgtctactgtgtgccgggcaggccttgatttgaggctttgagctaccgatatttgcacggacgtaggaactgtgttggtcggtcctcggcgttcttgtatcaagatcaaatcaggccttgaataagtgtgtgtgcatatatctttttttttaatttttatctctttttttttgtatcgagagatgtcctgaataatgtgaatttacgtgtgtttatataaacgaatttaagaaaaaaaaaaaaaaaaaaaaaaaattttctcatcgatgatgagtacctgcttcccgcattggtcaaaagcaagagtcgattgacacgaggaaggcgatccgcctgggagtggtgtcgccctacaagggccaggtccggccatcgaggagaagcttggcaagcaggtgtactcgatgcacgatgggtcgttctcggtgaaggtgcggaccgtggacgggttccagggcgcggaggaggacgtgatcatcttctccaccgtgcggagtaacaccgccggcaagattggcttcctcgccgacaccaaccgcaccaatgtcgcgctgacgcgggccaaacattgcctgtggatccctgggcacgtga

SEQ ID NO: 161288 - DNA, 1067 bp, Zea mays
  unsure (1)..(1067): unsure at all n locations
  Clone ID: MRT4577_78675C.1
ccccgcgtccgccccgcgtccgccccgcgtccgcccacgcgtccgcccacgcgtccgctccatcacctcgcacttatcggtgaaaccgcgcgatgactacggcggcgcccgcgctgcccatgttcctccggctgtgcccggcctcgcccttcctcctcccccccagcctacacgtccccagctcaaggcgccccactccgtcgcgcctgagctcttttcgccctgcaaggccactcttccccatctcagctgtggagaaaaccaacgaggctgctgcggctggggagggtgagctcgaggggatgccgcccgagttctacgacgaggagtggcaggcccgtccgcgggactaaggagtggcatgcatatcggcagaaagaggaggccgaggaggaaagaataacaaatgagtaccgagagataggcatgcgcctgaaagcttatccgcaagaagaagttcgcaaagctaggattttagtttcaagtttcataagagctggtggagatgttgaggaggaaattgagaaggctgctgaaagaggagagcttactgaacttgtccttatggtcatctggaatcgacttgatattgctcggcgtgatgatgagcgggatgccatcagaagccttgatctcttgtatagaagggtagaggtcattggtgtgtgatgggataatcagaaatcataatcttaatgcagacagagattctgaagagtgaagcaactcctgccatgagattgctcaatgatcttcttaatcttcatgatggaggcgacaatgagaagtggttaaagaaatgtagaaagcgcatgcttgaagtctttccaagagaggacccattcactgtggtctttcctgctgngttcaacatggagaatcgtgaagggagaattgagctaccgcctcaggatgatgatcttcttctgagagtggactntgcaggggaagttgatgagctgctgaaagaggttcgtgctgtggaaagacagaacaagcaacaaattgggtttgacccagaatcagttgcatatatgctgaagcagcaggagaagatgcagacgatg

SEQ ID NO: 161289 - DNA, 863 bp, Zea mays
  unsure (1)..(863): unsure at all n locations
  Clone ID: MRT4577_78676C.1
tcgaggccgggccgggaattcatccagacaagtcatatctagctatagtagctcccttgagaagcatttgagggaggagccatgtctgaggagaagcaccaccaccacctgtttcaccaccgcaagccagaggaggagggcgcctccggcgaggtcgactacgagaagaaggagaagcaccacaagcacatggagaagctcggcgagctcggcgccatcgccgccggcgcgtacgccctgcacgagaagcacaaggccaagaaggacccagagaacgagcacgggcaccgggtcaaggaggaggtggccgccgtcgccgccgtgggctccgccggcttcgctttccacgagcaccacgagaagaaggacgccaagaagcacgcccacaactgatccgtcgcggttgctgttccatctgttcttccagcctcgtcttcgtctactgtgtgccggccaggccttgatttgggctaccgatatttgcatggacgtaggaactgtgttggtcggtcctcggcgttcttgtatcaagatcaaatcaggccttgaataagtgtgtgtgcatatatctttttttttaatttttatctcttttttttttgtatcgagagatgtcctgaataatgtgaatttacgtgtgtttatataaacgaatttaagaaaaaaaaaaaaaaaaaaaaaaagcaaaagggaacatcgccacccagtctagtatttttgtcgcacgatcaatgtacacattgcccgtccgcgccaccacatccggcatcgtcgcccagcctcgccacccccgggccgtcctcctcctccggntccggttccggccgccccaggccaggctcatccggaaccccccgtcttcg

SEQ ID NO: 161290 - DNA, 421 bp, Zea mays
  Clone ID: MRT4577_78677C.1
tcccggacttcattgctgagcctgacgcttcagatggcacatagccaccgttggggcgatcatcgcactgagcaggcttccggggctgccacagccacatgaagactgatcgttaagtctctacgtactaaacgacgccctggtacttccaaccgataacgccaagcttgttcgacgtgaatgcctcctggtgaccgatcggctaattgttatacatactaccgatgtctagtgtgtacatgctgtcacagacgacatgctgaagcacattaactagatcaagatcatggacctgtcaagcgccgattacgccaagctcatggtggagatcatgatggaagccaacgatgctaggatgatctacatcgctctgatagtcatcaccgatgcacgaagctatggtcagcagatcataaccgtc

SEQ ID NO: 161291 - DNA, 195 bp, Zea mays
  Clone ID: MRT4577_78678C.1
tcccattgttcccccagaaaagcgatttagtcctccaccaaagacaagtagctctactgctgccactgatttctctattgcatctgtgcgggaatctacaaatagctccagagaggagaatgctatactagagactccattaggaaaggttaccctaccagagcttcctgatggcaagttattggaggttttgaa

SEQ ID NO: 161292 - DNA, 797 bp, Zea mays
  Clone ID: MRT4577_78679C.1
ccggccgggaaaaaacaaactcggaaccctaaactgccttccgtttagtgcccaccgaaatctttctaccacccacgttccggcatccatggctcgtctgttcgcggcgcgagcccttacgctggcccgcccctcggcggcgccatccgccctccgcttctgcccctcccgcgcgctgtcggacaaggtggacttcatcgagatcgacctctccgaggagtccccttcctcttcatccggaggaggaggcgcgggcgaccccgccacggttcaggcgcagatggggtcgcggcgcctggaggacgccatccatggggtgctcgtgcggcgggcggcgcctgaatggctccccttcgtgccgggggcatcctactgggtcccgccgttgccgcgggcgctcggggtggcggagcttctcagctcggctatgcacatcacgaggggcgccgaggcgatgacggaggaggaggcattgagcttcactaccgtgcgggggtggccatccgcggcgtactttgtggcagtgtcaagcattggagatcttttatctaacgttctgaagtggcttcctgttataaaagggacattctgaaacggctcctactgaagaggcagctggggacagtgaaggtcttctgatgggttgtagttataacttatagtaatagacagctagggagcccctgcaacaatggatcccctcaagctgtcaagcatcttcggatggtgtgctcacagctggtaaaatgacactggttcaatcttatgtatttgcagaacccggtgcgctagcacct

SEQ ID NO: 161293 - DNA, 390 bp, Zea mays
  Clone ID: MRT4577_7867C.1
cggactcgtggtaaaaataaaacataaaacaaaaacaaaaaaaaattaaacataaagggaaggctaactaaatataccagaaaatacatacacaaacattcaatgatatcacgcaaaaaacctttacctcaacttttacatctctcaccttcacaatcccctttcacctttggttgtaccgctacaaaccatattttaatgcattacttttcaatggcactctttccagcacttgaaaattccctataacatgctccatcctgccttcctacatcttcaacccatatgaagacatctgtagaacaaccacacatagagcaatcttcccatgatcattttctctttccaaaacttactaattctcaattccatattttattagatttcatt

SEQ ID NO: 161294 - DNA, 1773 bp, Zea mays
  Clone ID: MRT4577_78680C.1
cgagtttttttgtacaggtggtcagagtttttggtctccttaggctccaaagtgtccagggccagaaatgtttgggtaaggcaggtcacaatttcagtagtatgtgtagttagttgaaattttttcatggtggctagttcttgttgcatgtggaattaggttggggttatagtttgccgatgcccgatggttttgtttgtcagcagttgacaattgtttgactgtatctaacaagtatcgagccttgtatctggttgtctgtgaaccatatatacatgttttggttggaaaaaaagaagaattatgttcttttgtttgtggagtgtagacttcttagcttatgctgattacttaaggtggataaaacaaaaaccttcattctttcagtttggctatcaggattcaggagtcagacctctggttctgcactgagagccatgttttttcttattctagaatttgattggttgacatttcgcttctcttgctctgctgttgtcattgtctggtacgtgttagtttaaatagttagtgttgttcaaaggaaaaattctgcgtccagtggataaatcaaggaaagatcctactgaaactgacgatgataaaagttaatcctatgctgcttcactcctggcgtaagttgattcactttcatcaagggagcattttacgctcgctttattttgtatcctagggctgcatttcaagccaagccattgctaccaagcttaaatctgtcccaaaaccattggccctcagttcaatatatgcctacagtgtcaagcattggagatcttttatctaacattctgaagtggcttcctgttataaaagggacattctgaaacggtagttgagatgcaccaataaccatatatgaatattatctcttatctgaagcctcactgtgttcgttgtgttcttccctcgccgtcgatcgacgccttctacccgcccgctccgtcatccatggctcttctcctccctgcgcggccccttgcgtaggctcgcccctcggcgacgccacccggcctagcttctgcccctcccgtccgctgcgggacggggcagggtgcactgaatcgagatagaccaggacgcggaggcctcttcatccgcatccggaggaggaggcgccggcgaccccgccacggttcaggcgcagatggggtcgcggcgcctggaggacgccatccatggggtgctcgtgcggcgggcggcgcctgaatggctccccttcgtgccgggggcatcctactgggtcccgccgttgccgcgggcgctcggggtggcggagcttctcagctcggctatgcacatcacgaggggcgccgaggcgatgacggaggaggaggcattgagcttcactaccgtgcgggggtggccatccgcggcgtactttgtggcaggctcctactgaagaggcagctggggacagtgaaggtcttctgatgggttgtagttataacttatagtaatagacagctagggagcccctgcaacaatggatcccctcaagctgtcaagcatcttcggatggtgtgctcacagctggtaaaatgacactggttcaatcttatgtatttgcagaacccggtgcgctagcacctggacatggtgggtgtatggtccacggaacccagccgtggcgcataatgtaatagagtttgtagtttgtactttgtaccatattttctcctcttgaataaaggcatgtgttacgctgaacacctgtggcaaaaaaaaaaaaaaaaaaaaaaaacaaacaacacc

SEQ ID NO: 161295 - DNA, 1006 bp, Zea mays
  Clone ID: MRT4577_78681C.1
ccggccgggaagatatttatgatagcaaaattgaagtgcagggaacttcctccgttccgagtatctcccctcttgcgcctcctctcgactcttccgtttagtgcccaccgaaatctttctaccacccacgttccggcatccatggctcgtctgttcgcggcgcgagcccttacgctggcccgcccctcggcggcgccatccgccctccgcttctgcccctcccgcgcgctgtcggacaaggtggacttcatcgagatcgacctctccgaggagtccccttcctcttcatccggaggaggaggcgcgggcgaccccgccacggttcaggcgcagatggggtcgcggcgcctggaggacgccatccatggggtgctcgtgcggcgggcggcgcctgaatggctccccttcgtgccgggggcatcctactgggtcccgccgttgccgcgggcgctcggggtggcggagcttctcagctcggctatgcacatcacgaggggcgccgaggcgatgacggaggaggaggcattgagcttcactaccgtgcgggggtggccatccgcggcgtactttgtggcaggctcctactgaagaggcagctggggacagtgaaggtcttctgatgggttgtagttataacttatagtaatagacagctagggagcccctgcaacaatggatcccctcaagctgtcaagcatcttcggatggtgtgctcacagctggtaaaatgacactggttcaatcttatgtatttgcagaacccggtgcgctagcacctggacatggtgggtgtatggtccacggaacccagccgtggcgcataatgtaatagagtttgtagtttgtactttgtaccatattttttcctcttgaataaaggcatgtgttacgctgaacacctgtggcacatgacaactcttcttggtgtgtaaccaccgtttggcttggggccttccgagttccaacaaaaaaaaaaaaaaaaaagggcggccgccaccgcggtgga

SEQ ID NO: 161296 - DNA, 187 bp, Zea mays
  Clone ID: MRT4577_78682C.1
ggggatggggttacccagccattttaaaatggcttttcattaaaattttcaaaattggaggtttttattaattgggggggccatttaattaggggcttttggggggcatttccttttttacaaaaaagccaatttgaaaaaggaccctaccaggttaacttccgccaccttttaaactttgtttgga

SEQ ID NO: 161297 - DNA, 256 bp, Zea mays
  Clone ID: MRT4577_78683C.1
acgctggtacagggaggactacagcgtgcactgcttttgcgaggacgacttgaagaacgactgccgcgtgggttctctgaagaaccacttcatcgagcactgcctgtccacggtggacacggaagcaccagccgcggcatcatgttctacacgcaccgcgtgctcggctactccatcaacgcttgggacaacatggaatgatagttggacgagcccgaggacgatgagaacctgaaccacctgaggtataagtacc

SEQ ID NO: 161298 - DNA, 221 bp, Zea mays
  Clone ID: MRT4577_78684C.1
gtccctcgcacagacagggcctgtttttatggatcgtgactcaacaaccatcacagacccttttaaagtgcaggagctacctatacgaccttcatcggacatatgaccagcgactactacgtgtatccaactgctctcatctggccaaatgctaacattcatgaactaacatactattagacctttcaggagatgccttgcatctcgatggacaaggccct

SEQ ID NO: 161299 - DNA, 588 bp, Zea mays
  Clone ID: MRT4577_78685C.1
cagcagaagcaatagccgtgaccatggtgcggcaccagagcgcaggcctcgggcaagatctggttttgatgtgctgcctcctgcacctggagctgctggacctgcccctgcccctgcccccgtacctggaccagcagctccacctgttcctgctctcgcagctcaacaatcactggccgatacatcttcaatgtcaccaatgtctcctggtggcgtagtccagccagctgctgcaccgttgatatgcggtgggaatgacaacagctttggcggcataccaactggccaacctttgcaggggactgatgctgcattccccagttttcctgcaggcgaaaattttccaggcgcagcagttcaacaggccgctcctgatgtataatgagttgaacaatatgtagtgcactgcccccttttcttcctatttaatcaggtgtacaatacgagaaatgagattccgggtattagtttatatgactataaattggcttttccacaatttctgatgatcttgtggtgaattgacgcatggatcttgtgtgttcttgtgctgaatttcatgaaaaggagatgttgtccattgcatct

SEQ ID NO: 161300 - DNA, 574 bp, Zea mays
  Clone ID: MRT4577_78686C.1
ggcgtctggcagggagcgcggtgccgagccaagaaaatagagaggggagagagaaggaggtgccgccatcgctgggctctggggaggggcatcgtgggagattatcggacttcatgtggtatgggcgcatcgtttgtaggcgattgggagcaccagggggattggaattcgtcgtcggggcctcttcatccctgcagaaccaccatgcgccagcgaggctgggcgacgggagctggaagatgaatggtggccctcgatcctgatttggacggatacagctgcgacacgcttaccttgtgccacaaccataagtcttgatccctcggtcccgtcatcatatcggttcgcggtctaatctggactcttgattcttcatcggacgtccgggtagtgtgcgggattcttcattgcacccgaagtgcaatcgtggccgcatataggtgatcgggcggccacggtgtgttggtaccccttctgtcacaccgatttacaaaagagcccctcggctttcacagaatcaactcgtcgtccgtgccctgtgtaaattatttacattcgtgccctggaaattcat

SEQ ID NO: 161301 - DNA, 531 bp, Zea mays
  unsure (1)..(531): unsure at all n locations
  Clone ID: MRT4577_78687C.1
ggcgtgggggtggggtggtttttttttttttttttttttttttttttttttttttttggacctgctgcaccaacagctgcttcctcactcagggttttcattcagtccacaacagtacagcacagggcatcgatcttgaaatcaaaatccagcgggcagccggagcggatataatcgacaccaccgctcgctcaccacccccggggggggctggggcagttgtcgaccccccaggccaaaacgtcgtggtagtcgcgggagatggggaagtgggcgtgcaccctgccatcccgggtttttttggactccaacagcagcctcgtgtgggtgaaccccgtcagcttcaccaacccaaagtcgggggcccgcacgtgggtccatcgcgcccccgcggccctgtagtcggggagggtggcgccccccccccccaccacgacgtgcgtggtcnccgtgaaagcgcccgcgtagaggtcggaccccttggcccgcacgcgttctcatatactgggcaggtccgttcgtagccgggga

SEQ ID NO: 161302 - DNA, 370 bp, Zea mays
  unsure (1)..(370): unsure at all n locations
  Clone ID: MRT4577_78688C.1
gggcagggggagcgagggcgacgacggagacganggagaggggcangggcgncgncgncgacggcgncaggagcaacggancaggcggcggcggcgggcggggggngacggagcngagccacancaaggagcnggngaggcagcnggaggngcaccncggcggcggggggggccngngcaagcaccnggccncgcagancnncncccncaccgagcgcgccancggccncaacaccnccnccnccagcnccagcggccacgacggcgcccgacggaagcgcaccgngggcgacgccggccccgccncgccgggcacgggcacgcccaccaagggagaaaccgacgggccggacaagaacaccaaggagag

SEQ ID NO: 161303 - DNA, 331 bp, Zea mays
  Clone ID: MRT4577_78689C.1
tgacaaccgtgagcccgggaccccctacgccgtgccgacgtcaccaatagcgacagccgagagggcgagccgcctgccgcggggccgcgacacgatccggcaaccggccgaggggcgaagcaacagacgagcgtggacgccgatcgtgccatcgtggagcgacagccgagcgtggacgccgatcgtgccaagcgcccagtcccgattccgccctgcgccgacgaccgccctgacctgtttcacagtacgagactctaagtgcgccctggtgagtgtgcttcactgattgtccggttcttcccctcgcactggtcccgatggaatccgatgc

SEQ ID NO: 161304 - DNA, 762 bp, Zea mays
  Clone ID: MRT4577_7868C.1
cccagcgtccgggcgttgtttctccctgcccttctataagtaccctttccattgctgtgttcttggaaacatagtgcagcaagcaactgcaaagcagcaagctctactcttcttctgtactgaacgtgtgactagataacaataagcgtgaaccatggcggacgagtacggccgcagcggctacggcaggtccggcgccggcgacgactacgacagcggctacaacagcaagtccggcactgatgactacggccgtggcgaaggtggctacaacaagtcgggcggcgatgacgactacggccgcagcggcggcgatgggtacggcaggtccggcggcgacgactacggccgtggcaccggcggcggtggctacaacaagtccggcggcggcgatgactacggccgtagcggcggcgacgactacggccgtggcaccggcggtggcgggtacaacaagtccggaaacgacggctacgacagcgggtacaacagatcgggcaccaccaacgacgacgaatacggccgtggcaccggcggcgggtacggcagcaagccctctggcgactcggagaagtacaggaaggaggagaaggagcacaagcacaaggagcacctcggcgagatgggcgccctcgccgccggcgccttcgccctgtacgagaggcacgaggcgaagaaggacccggagcacgcgcagcggcacaagatcgaggagggcgtggcggcggtggctgccctgggcagcggcggcttcgcgttcca

SEQ ID NO: 161305 - DNA, 471 bp, Zea mays
  Clone ID: MRT4577_78690C.1
aaaaaaaaaaggggctgggttttttttttgaaaaaactggggggggggaggggtggggcccccccccacaaaaaaaaagggaagggagcttctactaaaaaaaaaaaaggccttggggggggggggcttgaaccccccaaagggggaaagggggatggggaaattgcccacaatggggagggcaacggggagccccacctggagctcggagtcaatgtcccaatcccgggcgacctcccttacaagggaaaccaggaaatcgtagggcaccttgggggggatttccaacgggggggaacccttggggggaaaccaaccgggggcccggatggggccggaacccacctttttgccggggcccccgagcgggtaggtcacctcgaaaatggggaggggggggttgtaggggttggacaaattaaccctggtgggcaaaggggagaaatcccgggttagggcctttaaagttaa

SEQ ID NO: 161306 - DNA, 897 bp, Zea mays
  unsure (1)..(897): unsure at all n locations
  Clone ID: MRT4577_78691C.1
attgccctagccggccgacgtgggaaccctaacatacctaatcaacaataggagacggacagactttggctttgggtgtgcggcgggcggcggcaccgtggcagttggcactgcggtctacagactgcatcagccggcaggactctgcgtctcctcccgtcctccggttctccctgcgacggacaaatctgctgctcgatttctctggttgtccctgtggcggacggcacatcggcaagccaggcagccagctcgtcagctctaaatcagattcagtaattattcattctattttgactgatctaaatccttcggaaacctgcatggattttgaggaacaagatgctgatagtgatcccgatgtcatgaatgattatggtgagctttaactgcgagtctaccactagttatggtgcttaatccttggcaatatgtttgtaaactttagatacattgtatagagcagcagcagctctgtaccatgaaccttgatatatcttgtgtgctgtgtgtgatgaaccatgagcttttgtatcaaactattgtatggagcagcaacagttctgcaccatgaaccttgatatatcttgtgtgctgggtgtgatgaaccatgaacttttgtatcaaactattgtatggagcagcagcagctctgcacttgtgtgccttagtgcctatgtgtatttaaatccgtgtgcaactgttgactgttgtcatttataaagtaatcagtgctgctgaaaatctgtaaaaactgcctgctgtgtgagataaacatgtttgggaacatatatatggagcagcagcagctgtgtgctgtccactgtgtatttaaatatgagcaaaaaaaaaaaaaaaaaacccacgcgtccgtccacgcgtccncgaacgcgtggg

SEQ ID NO: 161307 - DNA, 509 bp, Zea mays
  Clone ID: MRT4577_78692C.1
cggataaccatctaacaatgaaaaccttcctctaactactacctcccctgcccctcatccctaccactctggaccaacagagcgtctctggtagcttcgaacggtacaaagatcgatcgatcgatctctcatcatggcgcggcaggaccaagggctgctgtcaacggagatcgtcaaccgcgatctgtaccccgctttaccgtcactccaggtctacgaccttctctgtgagcgttgcgactccgactgacggacgtactcgtgtgcggcgaacttcaatcagtagacctcctccgacccagtagatgttgcctccaaggcgtgctcgacgcaccatccggttgtagatgctcgctgctcggtggtctcgttggagcagatcgcttctcttgacatggaggagacagtgtctaaatcagactacatcgcatggttccgccactgtgagcgtcagctccatagacacgatggacaggtgagtcgaaccacagtaatggtggagtgtctgc

SEQ ID NO: 161308 - DNA, 356 bp, Zea mays
  Clone ID: MRT4577_78693C.1
gccgaacacacacacacaaccaacaccagccagcagcagcttttggggggtctggtcatcgtctacctaggcctttttttttctcggtattcttttttggggacgaaatatgtcgcttcttgccaccgctcgacttgcctctcgggcactcctcgctgccccggctcccatgaccgcccaaaccagaaacatggcgagtcttaaagacttggctgttcgaatgaagtcggttgcttccgtcaagaagattaccgcttccatgaagactgtcgctgcttcgaagttgaagtcggccgagcttaggaaggatctcgccattcctttctatcaggcttcggctgctgccatcgacaact

SEQ ID NO: 161309 - DNA, 318 bp, Zea mays
  Clone ID: MRT4577_78694C.1
gtggagtccgggttcggcctgaggacggaggagaaggagacgaggagcgtctgcgcgtggccgcaccatatcacccccctcatggaggttccctccttcaagatactcgtcgccgcctcgtccctccaatactgttccaaggacatcactcgtcaccgtatccggcctcctcttctgattttgttgaggcgccctcaccacggcgtctatggaggatggaaagatggtcctcgtctacaacagcggctcttgtttatacgaccacgtcttcaacggcgactaggacagcttgttctactcctaaagactcaccaatga

SEQ ID NO: 161310 - DNA, 368 bp, Zea mays
  Clone ID: MRT4577_78695C.1
aaaaaaggggtccggggttaacttttattcaacatcccccccactactttctcacaaaaaaaattccacaaacccgttaaatgtatgatcgatcactgcaaccccccctacacctttcaccacaccccaaaaacattgagttggcctaccggcccacacacccaccttatgggccccaacctagaaaaactaaaccttcttccctcccacaaccccatcttgcgtctacaaacccacaaacccgtaaccccttaactataaaccaaacaaccatcgcgaggcttaaccccccccaacaaactccatccttctcgagcaagctttaaccattctccaaaacaccggaaataaaccaccaacccagaaca

SEQ ID NO: 161311 - DNA, 266 bp, Zea mays
  Clone ID: MRT4577_78696C.1
tcaggtgtctggtttctatatccatattttgaccaagaagagagccgaggctagggtcggggctcggatgcgtaccctagcccatcccatggacgagacgtctgagtcgtagtggttgaaatagcgattagtatggtgaaaagtgcatggtaatccgccatgtatatcatgcaatatggtgtaaagcaaacttgacatactccctaatgttcctcgtaatccatcccgttgacagcattcattgctaaaggattgctggtgctatt

SEQ ID NO: 161312 - DNA, 315 bp, Zea mays
  Clone ID: MRT4577_78697C.1
gatattgtgacacggagcaccaaaacagtatagtggtctactgctgctcgcatccacgagccgaagcattgctatggcacttttctgcagtgtcgggccaattgctacgttcataaacgcaagtgatcatgtggccatatctgataatgtggttctaaaaacatcatcattgttagcttaaacaatgtactttacaatggttggtaatataataatatggggaagtcgttctatggttaaaaaaaaaaaaaaaaaaaaaaaaaaacaaaaaaaaaaaaaaaaatttaaaaaaaataaaaaaaaaaacaaaatatt

SEQ ID NO: 161313 - DNA, 775 bp, Zea mays
  Clone ID: MRT4577_78698C.1
gggtacctcgaggccggccgggccgggatcaacttcctacttgttccctcgcgcaatgagcttgatccacacctactcttgtcactcctcccccgctctgctgctgctcgcttgccctcttctactcatagttcctgaaactgcctcccacttctcaaatgaggcctgatgatccacggcgaggccgccggaccggagcgagttgaccagtacgaccggctccttgacttcgaagagcggccgtggacaaaggggccgactgtcttgctggaaccgctatctgcacgacggcccttctttgcggaaggccgtagacgtatggacaactccactacccggacatcggggaacctcgccttccccgccgccatgacatacctctccgtgaccggtcagctccggtgtactattgacaccatcatatctctctgactcctcagatactgctgactgtactgactctgggtgcatttttcttctttgccagacaaaatatactgctcgtgcgattgtatcgaactgctacaaaaagcttgcaggtactgaactcagctatgcactgtgtgccaccactctgtgcctattgcagtcaacctttctccgatcaaggcaacaaatttgctagactatccgctagatcttcatctgggatggctgctactgctacaaatgatacgaaggtcgatgacatcttcaacctcttcatgagaagaacggcgaagacttctgagacgatgcgggatgagtacgatgaaatcacgacgtgtgatgatgt

SEQ ID NO: 161314 - DNA, 305 bp, Zea mays
  Clone ID: MRT4577_78699C.1
attaagcagcacaataccgcggccataccatttgtatatgtggatttgcaaggacacgaattggcaaaattagacctcaagtcatgagatcaaacgactagaactagcggaatccaaactggtacaaggccatgcacccattaccatggtagctggtacacatggaacctaaggatcgacagatagcccccacctgctccaagcgaagatcatactggggatggccaatcccttctcgcgatgaagctggacgtgccatatgcgagacatcgccttgcctacacaggacatccagggcggccccc

SEQ ID NO: 161315 - DNA, 483 bp, Zea mays
  Clone ID: MRT4577_7869C.1
gtgaaaaacgtgatcttgatggaataatatatcataaataagcaattaatgaaaaaaaaaaaaaaaaaaaaaaaaaaaaaaaaaaaaaaaaaaaaaaaaaaaaaaaaaaaaaaaaaaaaaaaaaaaattaaaaaaaaaaaaaaaaaaaaaaaaaaaaaaaaggttttaacctgcccggggggccgttaaaaaggggaaattttgaaaaaatcaaaaaaactgggggccgtttaaaaataaattaaaagggccaaattcccccaaaaggaaggggaaaaaaaataaaagggccggggtttaaaaacggcggaaggggaaaaaccctggggtaaccaaaataaaaagctttgaagaaaatcccctttttgcaagttggggaaaaaaaaaaaaagcccccaccaatcgccctttcaaaaatttgccaaccctaaatagaaaaagaaccccccccttaaggggcaataaaacgcggggggggggggg

SEQ ID NO: 161316 - DNA, 782 bp, Zea mays
  Clone ID: MRT4577_786C.1
ccggccgggaaaacgtaattcactagatacacggatctctgatgtgcctccatacgcgtttctctggagcttctgctcctagtcccaatccgtgggcagcagtgtgtaaaactggggggcgacgagccacccgggctctgtggcgcgagtgctctctctcgccctctctctctctgtcatcccgggcttttagctgagggtgccctctgagggtctcggacatttccagggggggcgcataaggctgctatgtttaaccgcgccgggagaagcggatcaaatcggtgcttttgatgaaaaaatctaccaagagagggcctaccaagcggaatgaatctaaggctggcaacaacatgatactacgcaccttcgcaggcagcgccacaattggctgaccagctactcactgtgtatcttctgtagcacggagactagtgtaacatccacaagaacgtaggtatcaatgagaagggtgaagatgtgaatgatatggcacggttaccagatgcgtacaggcaaaacgttgttgagtccagattatcgggtccagctggtcagctgggagaagatcaaggtgcagagaaggcacaggcagctctttcatggctacctggaacgaatggcattccgggtattagaaggcatcgaaatactccaggcgctgattctacggtatcttgtaacgaggcaggatgaatcaacccttcgcgcaacatggctgaatgtgaagtttcaggctctagttcgagcaagaatgatagagtctctgagagacgcatgca

SEQ ID NO: 161317 - DNA, 339 bp, Zea mays
  Clone ID: MRT4577_78700C.1
gaatatctaacactatacgggtttgtcgtctttcatttcaatagacaagtgtatggatcacacatcaaaggatttccactacataatccaagaacggaccttcactcatgctcggttcaggtactcaatggcaaccgcagcatgaaacgcagctccaataggaagaacatcctcatcgaggacgaaatgcggggagtgcaccggacgaaccatatccatggtggtctcattacctacaccgatgaagaagaatgcgcccgccgctctctgcgcgtagaacgcgaagtcctcgccgcccatgctccggggagccaccttcacattagcttccccgagcat

SEQ ID NO: 161318 - DNA, 475 bp, Zea mays
  Clone ID: MRT4577_78701C.1
agtgatcacctcattttcacacacctccgatacacatgataagagacttgttcatgggccacagtgcatatgaggtgaggcagcacattctatcatacatcccttcataacgaccgcgtcaagaaatttcatcacactaagtcgatgcacaataggatcgcctaaccccggcaaccaccgaaagacaacattgatgaactgctgaccaatatatctcccacggacagttttacgctacgagacacttgatcaactattcacacttcggggcttacttacacacattcagacacgcgcacattaaaccattttcaggaagaaaccatcactcgtgaaacttcccacacccaaatatgcacgtgcacctgtcactgacactggcaagtctaaactatgatagatcatattcttgaactcaagcgcctgtcagggttttgaacttgttacctgaaccttccgagtgcataattatata

SEQ ID NO: 161319 - DNA, 376 bp, Zea mays
  Clone ID: MRT4577_78702C.1
cgagcggccgcccgggcaggcacaagctgttttttttcttatgtcttatttatgacatttgtgaaatctcctttatccatctctctctatctatatatgtaataatgcggccagacgacacacctttttgaccctgggatgaccaaaaacaaaatccactgccccaacaaaaaaatttttttattgaccataaaagacactagggggccatgataggcaaaaaaaaacaacttcctgttaggcccgtgcatatttcaaaagctctccccccgctcaaaatagaggtcggccaacacgccttttacctgtaaatatggaaaaaaattaatgcagaaattcccccaatttaaaaaaaaaaactcgaacgggccccccc

SEQ ID NO: 161320 - DNA, 1201 bp, Zea mays
  Clone ID: MRT4577_78703C.1
cccggagacacctcgcggggccgacacgcccgccgccggccggcgagaccgagagcctccagaaacccacgcgacgcgaccgaccaccatggccgcctccgcgctcctcctctcgccgcggctcgtgtctttcccgcctcacccgagcctcgccccactcttcaccaagagaccaccgccctaccccctcggcggcgccggcgcgaggctccgggccgtcggggacgggcccggcgcggggctgccacccgagcaggccacggtctacgacggcgcctacggtccctggaccctggaggactccgacgtgcgcgaggtcctgctgtaccggtcggggctggtgacggctgcggcgtccttcgtggcggcgtcctccgcggcgttcctgccggaagggaaccccgccgcctccgccgtcaccggcgccgccgacctcctgtacgccgccggcgccgcggggctggggctgtcgctggtcctcatccacatctacgtcaccccgataaagcgcttcctccaggcgctgtgggcggccggggcgctcggctccgtcgggacctacctcgtcgccgcccgcccgctggatgagggcctcgtgcagtacgtgctggaccaccccgccgcgctgtggttcgtcggccccacgttcgccgcgctcactggcctcgtcttcaaagaaggtctctgctatgggaaactggaagctggcatcttgacgtttcttatccctgggcttcttcttgggcatttgtctggtttaatggataacagcacaaaggcaggtcttttaggactgtggatgcttcttttcacaatctttgccgctagaaaattccagcagcccatcaaggatgacgtcggagacaaatctgttttcatgttcaacgctctccctgaagaggaaaagaaggcgtggatccagaaactcgagaggcaaaaggggcaagagttgtttgagtagaaaagagtagcttgtcttggtgcagccaatagttcgtccgtgaatgtttgtagcccatgtatatgattatggctccagaaatttgacaaatacacccaagacatgaagatgagaatacgttccaatagagatgtaattacaaatctgttagatcacaggtaagatgtaactaaataaagcagttttgttgttatagtcgttgacaaaaaaaaaaaaaaaacggccgaaaaaaaaacaaca

SEQ ID NO: 161321 - DNA, 605 bp, Zea mays
  Clone ID: MRT4577_78704C.1
ctggagccataatcatatacatgagctacaaacattcacggacgaactattggctgcaccaagacaagctactcttttctactcaaacaactcttgccccttttgcctctcgagtttctggatccaagccttcttttcctcttcagggagagcgttgaacatgaaaacagatttgtctccgacgtcatcctgattggtgacattgtcaggtcaggttcgaatcaggaagctgtcactggcagagattgtttaccttgatgggctgctggaattttctagcggcgaagattgtgaaaagaagcatccacagtcctaaaagacctgcctttgtgctgttatccattaaaccagactgcacaaagattgtaagacaacagaagcagataccaacagtttgaggagataaatgctagtggttggtttctgagttaccaaatgcccaagaagaagcccagggataagaaacgtcaagatgccagcttccagtttcccatagcagagaccttccttgaagacgaggccagtgagcgcggcgaacgtggggccgacgaaccacagcgcggcggggtggtccagcacgtactgcacgaggccctcattcagcg

SEQ ID NO: 161322 - DNA, 307 bp, Zea mays
  Clone ID: MRT4577_78705C.1
ccagaaacccacgcgacgcgaccgaccaccattgacggctacgcgctccttctctcgccggggctagtgtcttttccgcctcacccgagcctggccccactcttcaccaagagaccaccgccctaccccctctgcggcgccagcgcgaggctccgggccgtcggggacgggccctgcgcggtgctgccacccgagcaggccactgtctacgacagcgcctacggtccctggaccctggatgactcctacgggcgcaaggtcctgctgtaccggacggggctggtgtcgagtgcggcgtccttcgtgg

SEQ ID NO: 161323 - DNA, 542 bp, Zea mays
  Clone ID: MRT4577_78706C.1
gccggccggtccgggatgcctcgccccgccgcacaaactcctccgctccacacctctcaccaagaccgccccttccctgcccgcacacggcggcgccccaatctctccaccacgtgtgacggcgggcgggagtgggcgctggctgcggcggcaggaggtgggacagcgagcctgtgagctctcaagataatttccaggcttcagaactttgacaggagcagtgttgcatctgttgtcacagctgcagataaggtgtggacaatacatctacctgtcaacgcttactagagttactatttcgttcttgcagacttctttgagactatatgatgtgaaaagagaggtctctattacactgtttttatctgttgttttcttctagaggtacgaataatctaagattgtgtcgctgatgattttgtcaagaaagaagtctagaatcagacggcaggtcattgtgcaggactcaagtttccttattcttcatccaagatgttaattgaagtcattatcaataaaaaaaaaaaaaaaaaaggccccta

SEQ ID NO: 161324 - DNA, 209 bp, Zea mays
  Clone ID: MRT4577_78707C.1
taactcttatactcctctagagcgcgccccctttttctttttttttatctttaaaatgaacacaaatgattttttaaaaattcgtgggggtaaaaaacaccaccagcaaccaaaaacaacatgactagcggaccaccccgaacttatatgaaccaaagcatagatggttaccatacctgatgccaactacacacaaatacaggggggta

SEQ ID NO: 161325 - DNA, 577 bp, Zea mays
  Clone ID: MRT4577_78708C.1
cggtaccggcattcccgggcacctctcaccaataccgccccttccctgcccgcacacggcggcgccccaatctctccaccacgtgtgacggcgacggcgccccatccctctccagcgcgcgtagaggcggcgtccctccctctcccgtgcgtggcggtggccggatgcggtggaggcggagggtatcgccatcggcggtagcggcggcggcggaggaggcggcgccatgaggggggcgcgggcgggagtgggcgctggctgcggcggcaggaggtgggacagcgagcctgtgagctctcaagataatttccaggcttcagaactttgacaggagcagtgttgcatctgttgtcacagctgcagataaggtgtggacaatacatctacctgtcaacgcttactagagttactatttcgttcttgcagacttctttgagactatatgatgtgaaaagagaggtctctattacactgtttttatctgttgttttcttctagaggtacgaataatctaagattgtgtcgctgatgattttgtcaagaaagaagtctagaatcagacggcaggtcattgtgc

SEQ ID NO: 161326 - DNA, 445 bp, Zea mays
  Clone ID: MRT4577_78709C.1
aaaaacccaaaaagggcccttcttttttcgggggggcccccaccctcagcccaaaaacctttttttgggccctttccccctaagaaatctaaaagggggccccccccatggtggggtggggggaaaacccccccgggtttgtcaaaacaaggggggtgaatggcccccattgttgccgttgtaaaagggggccccccttaggcccccccggccggtaaaaccgcacccaccgggggtgtttcaaaaagggggcggggccccccccccccacctggctgaaagggagaaattgttgccgctgtaaataagccggaaagttcaatccccccccttggttgaatggaaaaaattgctgggggggggcaacagggacccggccgaaagggaattgttgttggtgccaataaaaaaccaagttcaatgccccctgttgggtgaatggaaa

SEQ ID NO: 161327 - DNA, 253 bp, Zea mays
  Clone ID: MRT4577_7870C.1
cccacgcgtacgcccacgcgtacgcagtgatttatcatagcgaaagaaataaaaaagcggcggtgtttcttgataaaaaaaaaaaaaaaaaaaaaaaaacaaaaaaaaaaaaaacaaaaaaaaaaaaaaaagggtcaaaactttacaaatactaacatcaacgtacacattcaatcgactacaaacatgtaacatagagccacctaaacagaatcaactatcacatcttttaacaacataaagactaggaaaa

SEQ ID NO: 161328 - DNA, 294 bp, Zea mays
  Clone ID: MRT4577_78710C.1
atattacatgcatcgtacaattacctatatgggccagaaatatgatatctggccaaccagccgagttcaaaccaaatgtctggaaggccagatcgtggtgtcgtcccttgtatcgctgcttatcccttgaatacgtatgcgtcctcgtgagctggggtgagcttgtcgtgtagcagatccgcgagcctctggtactctgggtccgactcgacgtagctgaaccgctggaggttccagttggtgccctccgccgcctggtcctttggtttttgtcgctgctcgttctcgatcctg

SEQ ID NO: 161329 - DNA, 251 bp, Zea mays
  Clone ID: MRT4577_78711C.1
atgtcagtaacaagcacgagcacgggaaagcagagagcctcttggtgttacgagaactaaagcgacggagaccgcgagggcaggcgaactatggctgggcagcgatgatggcgacctcggccagcggcgtctccctcctcctcctcctcggccatccggtgccgccaccgcaccccgacaacggcgacaggagcctgaggtggaagccattctacaagatgttcccttggaacacggaacccagagaacaa

SEQ ID NO: 161330 - DNA, 469 bp, Zea mays
  Clone ID: MRT4577_78712C.1
ggaacaaacccaacacatttccacaactttcccaggccccaggacaaaccttatacggggccctcatcccatgggcgggcaaacaaaacccaaaaactaccccctagcaagggaaaaagggcccccggaaaacatcgggggcgaggaaaccattcagggggggaccaacagcacggaaagggttcttgggtcaggccttttcccccgggggggcggcccggaaaaaggcgggcccgggagcaggaaaaaacatcggccccaccccttcacttttgaggaaagggaggaagaccccccatgccccaaaaataagccaagccccaacccacattcgtttaggggaaggaagagggagcatcaagcggccgcccccgtaaatagcaccagcaaaaaagggcccaacaaaccccaggggccgggggtaaaggccaaaaagaaaagcgataggcccgttcaaaaaaacccctcc

SEQ ID NO: 161331 - DNA, 1184 bp, Zea mays
  Clone ID: MRT4577_78713C.1
tcgcgatctagaacccgtccatgacgttgtacttgttggtggctccactaggatccccagggtgcagcaactgctccaggacttcttcaacggcaaggagctgtgcaagaacatcaaccccggcacgggtgatggtggagtagaagtcgatgccctcatacagcgagtcaatctcaatcgtggtctgggcagtggaagacagagtcctcttcgccctctcacaagcggtcctcagcctccggagagccctggggttgccagtgatatccttcttgttcttcctcttgaactcctggacgaagtggttgaccatcctgttgtcaaagtcctcaccaccaagatgggtgtcaccagctgtggctttgacctcaaagataccctcctcaatggtgagaagagagacatcaaaggtaccacctccaagatcaaagatgaggacattcttctcaccaacactggaagccttcttgtcaagaccataagcaatggcagctgctgttggctcgttgatgatacggaggacattgatgccagcaatgacaccagcatccttggtagcctgcctctgcgagtcattgaagtatgcaggtacagtgacaacagcattcttcacagtgctgccaaggaaagcttctgcaatctcacgcatcttgatgaggaccatagaagatatctcctcagctgcaaactgcttctcctcacccttgtactggacattgatcataggcttgtctgcagggccaggaataaccttgtacggccacagcttaatgtcactctggacagtagaatcagcaaacctacggccaatgagacgcttcgcatcgaagacggtgttgatggggttcatggccacctggttcttggcggcgtcgccgatgaggcgctcggagtcggtgaaggcgacgtacgacggcgtggtgcggttgccctggtcattggcgatgatctcgacccggtcgtgctgccacacgccgacgcacgagtaggtggtgccgaggtcgatgccgatggccggcccctcgcccttcgccgccatctctcgcgctgcgggaaacttcgaagctctctagctagggttttcttccggaggagaagaagcggcggcgggtcaaggaggaggaggggagcggaggactggggttgaagaggaagattattggaggcggaaccggggattttat

SEQ ID NO: 161332 - DNA, 475 bp, Zea mays
  unsure (1)..(475): unsure at all n locations
  Clone ID: MRT4577_78714C.1
acgaaccacattgcatactgaaattcacgcttagggctccatcaaccaggattgatacataaagaggcttaacgaacgagtaagctgggcatagacaggcccccacatcccaggagagagatattactataggggtgaggagctatctgcaatggctccaggtgcaggaatgctagtcacggtcgaggacgaagacagcactttgtatcacacctgtactagcttatgctgcttaccattactttctggcttattgcgtcatgaggaaaatgaccggatgtgggcgctctagaacagtcaacactgcaacagtcgaagtatggtcaagagantaccgaggggcaatatcttctgaccctactggggacatggagcccacacaccgtacaggatgaccgtgatagtatcacaatcaccctccattaacgccatgatggaactgagccagctcatcagaaaaggaatcttgaatagc

SEQ ID NO: 161333 - DNA, 519 bp, Zea mays
  Clone ID: MRT4577_78715C.1
gcactattactgactgataaaacacagcgccgccgacgatctgatagcagagtttccaagctaggcaggcgcgcacatcgaggacctagctaatgcaagcgacgatctgtactcaggtcacgaaagtaggaacgagctgtaccgcacggcccgcaagggctaaaccgccgtgcgcgggagtaccggcagacagagcgttgaggaccaggatcacctccccgaagggcgcaagcagctaggccagactctgaggaaccagatgctgcagcacgggtacagcgagatgaagatgaagggcggcctgagcaccactgtcgagtactgcgtcgagctcgccagcagcgacgtcgtcaacatggactagatcaagatcaccaagcattgctatccagtgcttccctacgcaccgttagcagctccctacctagtgcaccttgaggcacactagcgctactttctacttcagactacttgaataatgataatgcagcctgcaggatccatgtaggcgatcataca

SEQ ID NO: 161334 - DNA, 888 bp, Zea mays
  Clone ID: MRT4577_78716C.1
ggtgacaagcctatgattaatgtccagtacaagggtgaggagaagcagtttgcagctgaggagatatcctctatggtcctcatcaagatgcgtgagattgcagaagctttccttggcagcactgtgaagaatgctgttgtcactgtacctgcatacttcaatgactcgcagaggcaggctaccaaggatgctggtgtcattgctggcatcaatgtccttcgtatcatcaacgagccaacagctgctgccattgcttatggtcttgacaagaaggcttccagtgttggtgagaagaatgtcctcatctttgatcttggaggtggtacctttgatgtctctcttctcaccattgaggagggcatctttgaggttaaagccacagctggtgacactcatcttggtggtgaggactttgataacaggatggtcaaccacttcgtccaggagttcaagaggaagaacaagaaggacatcagtggcaacccgagagctcttcggaggctgaggacatcctgtgagagggcaaagaggactctctcctccactgcacagaccaccattgagattgactcgctgtttgagggcattgacttctactccaccatcacccgggccaggtttgaggagatgaacatggatctgttcaggaagtgtatggggcctgtggagaagtgtctcagggatgcaaagatggacaagagcaccgtgcacgatgttgtccttgttggtggttccactaggattcccaaagtgcagcagcttctccaggacttcttcaacggcaaggagctgtgcaagagcatcaacccctgatgaggctgttgcgtacggggctgctgtccaggctgccatcttgagcggagagggcaacgagaaggtccaggacct

SEQ ID NO: 161335 - DNA, 2099 bp, Zea mays
  Clone ID: MRT4577_78717C.1
cggccgctcgagggcggccgggccgggctcttcaaccctagtcctccccctcctcctcaacccgccgccgcttctcctcctccggaagaaaaacagagagcttcaagtttctccggagcgagagagatggcggcgaagggcgatgggccggcgatcggcatcgacctcggcacgacgtactcgtgcgtcggcgtgtggcagcacgacagggtcgaaatcattgccaatgaccagggcaaccgcaccacgccgtcgtacgtggccttcaccgactccgagcgcctcatcggcggcgctgccaagaaccaggtggcgatgaaccccatcaacaccgtcttcgatgccaagcgtctcattggccggagatttaccgattcaactgtccagagtgacattaagctgtggcccttcagggttgttgctggacctggtgacaagcctatgattaatgtccagtacaagggtgaggagaagcagtttgcagctgaggagatatcctctatggtcctcatcaagatgcgtgagattgcagaagctttccttggcagcactgtgaagaatgctgttgtcactgtacctgcatacttcaatgactcgcagaggcaggctaccaaggatgctggtgtcattgctggcatcaatgtccttcgtatcatcaacgagccaacagctgctgccattgcttatggtcttgacaagaaggcttccagtgttggtgagaagaatgtcctcatctttgaccttggtggcggcacctttgatgtctctcttctcaccattgaagagggcatctttgaggtcaagtccactgctggtgacactcaccttggtggtgaggactttgataacaggatggtcaaccactttgtccaggaattcaagaggaagaacaagaaggacatcagcggcaaccccagggctctccgtaggctgaggacagcttgtgagcgggcgaagaggaccctctcctccactgcacaaaccaccattgagattgactcgctgtatgagggcatcgacttctacacgaccatcacccgtgccaggtttgaggagttgaacatggacctcttcaggaagtgcatggagcctgttgagaagtgcctgagggatgctaagatggacaagagcactgtccatgatgttgtccttgttggtggctccaccaggatcccaagggtgcagcagctgcttcaggacttcttcaatggcaaggagctgtgcaagaacatcaaccctgatgaggctgttgcctatggtgctgcagtccaggctgccatcttgagtggagagggtaacgagaaggtccaggacctcctgctgcttgatgtcacacctctttctcttggtctggagactgctggaggtgtcatgaccgttttgattccaaggaacaccaccatccccaccaagaaggagcaggtcttctccacctactctgacaaccagcctggtgtccttatccaggtttatgagggcgagaggaccaggacccgcgacaacaacctgctgggcaagtttgagctctccggcatccctcctgcccccaggggtgtgccccagatcacggtctgcttcgacattgacgcaaatggcattctgaacgtctctgcggaggacaagacgactgggcagaagaacaagatcacaatcacgaatgacaagggcaggctgagcaaggatgagatcgagaagatggtgcaggaggcagagaagtacaagtcagaggacgaggagcacaagaagaaggtggagtcaaagaatgccctggagaactatgcctacaacatgcgcaacactatcaaggacgacaagatcgcctccaagctagctgcggacgacaagaagaaaatcgaggacgccattgaccaggccatccagtggctggacggcaaccagcttgctgaggcagatgagtttgacgacaagatgaaggagctggagggcctctgcaaccccataatcgccaagatgtaccagggtgccggagctgacatggcgggtggcatggacgaggacgatgcgcctccggctgccggcggcgctggccccaagatcgaggaggtcgactaagcgagcacttgtaccagtcttttacc

SEQ ID NO: 161336 - DNA, 635 bp, Zea mays
  Clone ID: MRT4577_78718C.1
gccggctcgagccggccgggccgggcctttacacctagaccccctccgccccctcctccttgacccgccgccgcttctgccaccccgcgaagaaaaacacacacacacagtagagagcttcagcatcccctgagcgcgagagatggcggcgaagggcgacgggccggcgatcggcatcgacctcggcacgacctactcgtgcgtcggcgtgtggcagcacgaccgggtcgagatcatcgccaatgaccagggcaaccgcaccacgccgtcgtacgtcgccttcaccgactcggagcgcctcatcggcgacgccgccaagaaccaggtggccatgaaccccatcaacaccgtcttcgatgccaagcgtctcattggccgtaggttcactgattctactgtccagagtgatattaagctgtggcccttcaaggttgttgctggacctggtgacaagcccatgatcaatgtccagtacaagggtgaggagaagcagtttgccagctgaggagatatcttctatggtcctcatcaagatgcgtgagattgcagaagctttccttgccaccactgcgaagaatgctgctgatcctgtacctgcatacttccatgattcgcacacgcagcataccaaggat

SEQ ID NO: 161337 - DNA, 283 bp, Zea mays
  Clone ID: MRT4577_78719C.1
cccagttcgtgcgcttcgacaacgacgccgcgagtccgaggatggtgccgcgggcgccgtggatggagcaggaggcgccagagtattgggaccgggagacacggagcgccagggacaccgcacagattttccgagtgaacctgcggacgctgcgcggctactacaatcagagcgaggccgggtctcacaccctgcagtggatgcatggctgcgagctgtggcccgacaggcgctttctccgcgggtatgaacaggtcgcctacgacggccaggattatctcac

SEQ ID NO: 161338 - DNA, 388 bp, Zea mays
  Clone ID: MRT4577_7871C.1
cggacgcgtggggtaatggttctgaccagacttcgggtgatgccaaaaggttggctgaaaaggattttgaatttgtaaggcacgttgaaccactttcaagggaggtggttgtcactaatccaatagggccaagaccaagatcgtgttctcgcaagttaacagcacttgtactaactagttcatgggttgtactatttgctacagagatgcacataccgcataaccgtcgacaaacaatgccccaacccaacctgaagtgcaggctgtaaataatgcgcctccttcaaaagcatctcctcctactaaaacaatagaccctaacaaggctgctggtataaacagtcattttactgatggccagaacaccggctactttattacggaccga

SEQ ID NO: 161339 - DNA, 138 bp, Zea mays
  Clone ID: MRT4577_78720C.1
aattcggttcgaggccctcctagttcagggggcttgtgcaccatcaccgtgttgctcaatttgtgctatgttgataccattgtagtgaccatctaccctttgtgaagattctacttttgctacatcttctacgctttt

SEQ ID NO: 161340 - DNA, 263 bp, Zea mays
  Clone ID: MRT4577_78721C.1
gagacgcacacggtccatagaaagtgttatgcaagggtgctatcagtgcaacaacgtcgaacgggatatgtgctatgagtacgctaattgctatgtctgcatgtgttgctaaggcgacaatgatatctgaatggtcactatcaccgatagctaacgttctactgtcataactgcgatgaacgagagcatcattatgaggcaaccgagatgttaagacgtatcagatctaacaagctgccgtagcgggtagcatagcttcataa

SEQ ID NO: 161341 - DNA, 266 bp, Zea mays
  Clone ID: MRT4577_78722C.1
aattccggtcgaccaggcttctagtcgggggccgccctttttttttttttttttatggcaacccatttcctcatggattattaacagaactggctgtgcaacaccttatcacaactaatgaatggagtgtaacatcatgacatgaccagcataaacagttatggcatcatcgatagctaagaggtagtgataacatggattccgagacatctactggcacacaaatggattaccgtattaaggaattgccaaaggctacgactgca

SEQ ID NO: 161342 - DNA, 148 bp, Zea mays
  Clone ID: MRT4577_78723C.1
atatcactggattttatttcaccgtcatgttggctggctggctgctaccgtgaaggtagcctggttgttgcagtcccttgtatattttctgctgcagagttgacctgataataatgttttattgtggcttgtgatggtggggtagcat

SEQ ID NO: 161343 - DNA, 769 bp, Zea mays
  Clone ID: MRT4577_78724C.1
tgggacctcgagccggcgggaccccgtcctccctccttggccttggctccccttgctaccttgccttcacagatctcccactccccaacagaactgtcacgtctcggcgcccgggggccgtggtattacggctcatcgcggctcggcagtggtggcgcgcagctgaccggatcgagcagcggatggacggcggcggcgggctgggcggcctgcggtggaccgcggaagaggcgtcgacgatcggaggcatcgccacggtgtcgctgctgcactccttcatccccacgcactggctccccttctccatcgtcgcgcgcgcgcagcgctggccgctctcccgcacccttctcgtcacaccatcacagtgatgacatccttggtggccctttcattctacggtgctagccagatcaagttccactgggtggagcgttacgacaagatcctcgtcggcacggtgctgtgccttgttggagtcttaacatatgtgttccatcatcacgatggtgatgagcatgtgcaccagaaactcgtatctccctagatgcatacatactgaagttccatctctgttgctccctatttgtatacaatcctgattatcgacttactctgccgctctggttttgctggagatacgtatcatctgatcaagtgaatatatttgagcaaactgcgtgaagtttgtatcgttgtggtggtagtggcctctttttcggcactctgaaatggtaccttcctacttttggacgcaataaattgttttctg

SEQ ID NO: 161344 - DNA, 1117 bp, Zea mays
  Clone ID: MRT4577_78725C.1
cactcctatgggcgattgggaccctcgaggccggccgggccgggactcacacacacacagtcacacacacaccgtcctccctccttggtccttggctccccttgctaccttgccttcacagatctcccgctccccaacagaactgtcacgtctcggcgcccgggggccgtggtattacggctcatcgcggctcggcggtggtggcgcgcagctgaccggatcgagcagcggatggacggcggcggcgggctgggcggcctgcggtggaccgcggaagaggcgtcgacgatcggaggcatcgccacggtgtcgctgctgcactccttcatccccacgcactggctccccttctccatcgtcgcgcgcgcgcagcgctggccgctctcccgcacccttctcgtcactgcatttggaggtgttcttcatgttgtttctacggctcttcttgggataactgcagttactatggcaaatactatagctggcgaagaaacagtgcataaacttgcctcgctgttgctgatttttcttggagcaagttatatcctcttgtttgccttaggaaaaggtggtcatagccatgcccataatcatccaatggaaaaaatggcagtcgccggtcttgtacttgtacctgcattatcaccttgtgcaacaactcttccagtttttcttgctgttggcaactcttcctcaatgatgattcttgcaatcattgtgctcctcttcagcaccatcacagtgatgacatccttggtggccctttcattctacggtgctagccagatcaagttccactgggtggagcgttacgacaagatcctcgtcggcacggtgctgtgccttgttggagtcttaacatatgtgttccatcatcacgatggtgatgagcatgtgcaccagaaactcgtatctccctagatgcatatatactgaagttccatctctgttgctccctatttgtatacaatcctgattatcgacttactctgccgctctggttttgctggagatacgtatcatctgatcaagtgaatatatttgagcaaactgcgtgaaaaaaaaaaaaaaaaaagcggccgtttgtatcgttgaggtggcataaaaaaaaaaaaaa

SEQ ID NO: 161345 - DNA, 498 bp, Zea mays
  Clone ID: MRT4577_78726C.1
ttttcttatttttttctttttattcaatttttttatttttttatttttttttatcgttcgccggcagttgaatttttcggtgaattcaccgacctgggccgggggacaacaaggaaaagggcggggggaccccaaaaacaaagggggggacaaaccgggtatggcccgaaacgcccaaggccaaaaagggcataaaccccctaaaaaggccacaaacgggggggggctaaacagacctagtccccaaaaaaaggtaacggccggggggggggacccgaaaaatttcggaccggggcctggaggcggaccagtgggcccaaccgggaaacccagaacaggtccgggaaagcaaccaaatttccctatacggggggaaattaaaaaccgggcaaaaaatgacacaaaataggatcccgggaaaaaaagggaaaagcccgcgatgcccaaaaaataacataaccgaaaataaatgggaaaacctgaggggcccatttagag

SEQ ID NO: 161346 - DNA, 724 bp, Zea mays
  Clone ID: MRT4577_78727C.1
acgcctgcaggtactggtccggaattcccgggtcgacccacgcgtccggaatcagcgcgtccttctgactgagcggctgcggctggagcggagcagttcggctagctgttggatggcgcggggcggagctgggcgggcagtggccctgggcctggtgctgcggctcctctttggtctcagaacaggcctagaggccgctccggctccggcccatacccgggtccaagtctccggctctagagctgactcctgcccgacagacaccttccagtgtcttaccagtggctattgtgtgcccctttcctggcgctgtgatggggaccaggactgctctgatggcagtgacgaggaagactgtaggattgagtcatgtgctcagaatgggcagtgccaaccacagtctgcccttccttgctcctgtgacaacatcagtggttgctctgatgtctctgacaagaacctcaactgcagccgcccaccctgtcaggagagtgagctgcattgcatactggatgatgtctgtattccacacacgtggcgctgtgatggccacccagactgtcttgactccagtgatgagctcagctgtgacactgacacagaaattgataagatattccaggaggagaatgccacaactacaaggatttctacgaccatggagaatgagacctctttcaggaatgtaacatttacctctgctggggactcatcccgaaaccca

SEQ ID NO: 161347 - DNA, 338 bp, Zea mays
  Clone ID: MRT4577_78728C.1
accaaaccctaacgccgaggtcgcttgacaggtgagccgccggcatggtctccggttgcggcgtatgcgccaagcgcatcgtggtggacacgcgccaccacatgctgggccgtctgtcatctattatcgtcaaggaactgcttaatgggcagaaggtggtggctgttcgctgtgaggagatctgtatgtggggtggactcgtacgccaaaagatgaagtacctgcgctttctccgcacgcggatgaacaccaaaccgtcccatgggcccatacacttgcgcgccccgttcaagatcctcgtgcgcaccatccgcgggatgatgccgcacaagaccaag

SEQ ID NO: 161348 - DNA, 179 bp, Zea mays
  Clone ID: MRT4577_78729C.1
cacaagcttacaaacacaaattcggctttattttactaccccaaacaaaaaacggggcgggcccaacgttatgcatttcgtaacacgaaacaacaaacccccgccacagcctcataattcacacaacaccattggccaaagatcctaacttggtgacaatgtccaaaacaaccgtaaga

SEQ ID NO: 161349 - DNA, 462 bp, Zea mays
  Clone ID: MRT4577_7872C.1
ccaaattaccccctaaaaacaaaaacctttttggcccaaaaacctcttttcccggggaaaccaattcgggaaatttccttgggaaaatcctgggcgggaaattcggaaaggttttggaaaaagtttcccccttccggcggggccccctgggcctgggccccccaagggggggttttccccccgaacccaggtttcctttccccccccataccctcctttaggcccctttccccctctttcctcacaagggaccccttccggtggcccccccaattcccccaggccctttcaaaatattgggccggggggggggggcccccccccgggggcttcccccccttgggaccccccctgggggggggttcattcggggggtcccccccgcggggcgtaaggaaccaccctggggccttggggcccaccccctggggctggggccaaagggggacatgggggcccttt

SEQ ID NO: 161350 - DNA, 506 bp, Zea mays
  Clone ID: MRT4577_78730C.1
ctcgagccgctagcacatcactgtttggcatacttgatcctgtatttttatgtgtttgttattcctctaagctatagatcaatgttttatgatgctagtgtatctctgagctatagaccaatgttcggcctgtcacgacacatttaagccaatttagacctctaatctccttttttttctaatttattagtttagcaatggatcctgctattgcacatcgtcgactaatttcaaaacgtaatggttcttatagcagttttgccacccttgttgaagcaccgaccgcatgctacaaggcctatcacttatgccctgacgccgaggagcgcacccgaaaggaaaatgtgcccttgggccatttctaagtattttggtgatcatgtgccaatacaaatggtttaagtatgaaactatgtcaaatggtggaagaagtgcaaatcgacacaaaggtatgattctagacttagtacattggtttttgtgtactaacatatttgtctaaatgc

SEQ ID NO: 161351 - DNA, 440 bp, Zea mays
  unsure (1)..(440): unsure at all n locations
  Clone ID: MRT4577_78731C.1
accaacagcacanagaaaggggaaacaggagcaacaagagagcaacaagggcggcccaagaaggggccaacccaagcccccggcnncnnncngcangngnnngcnaacgcgaccannannnccncaanacncacaagcnccnanagcngcccnacnacccccaaaccnaccaacaangaccgccgcagggggggaaaacccagcccnncaacccnacaggcnccaacaagcaancgcaacaagcaagcgaccnnaaccaccccnggacnnncaacaaacgccagcccaaaannaggagcagacaacggaacaaaccaccagggcacaacagcngcagcaacncgagcaaccagggaccagccaagcagcgccggcaaaccaccaaaccgacccgcagcaacaacaacggaagacagacaaacaacaggccacacagaacc

SEQ ID NO: 161352 - DNA, 594 bp, Zea mays
  unsure (1)..(594): unsure at all n locations
  Clone ID: MRT4577_78732C.1
acccgcttcccccgaccgcacgacatccctaacgccgncggttcaaggttagccgtggccatggggtgcgcgtccggggtatgcgcgaagcgcatcgtggtggactcgcgccacctcatgctgggccgtctgtcagtccattattgccaacgaactggttaatgggcagatggtggtcgccttccgctgcgaggagatctgtgtgtcggatgggctcgtacaccaaaagatgaaatacctcctctttctcctgaagcggatgaacaccaagtcatgccatgggcccatgcacttccgcgcccagtccaagatcctgcggtgcaccatccgaggaatgattcccgacaagaccaataggggggaggcggctctggcgaggctcaagacgtacgagggacggccgccggcgtacaacaagaccaagcgcctgggcatccctgacgctgttaaggttctgaggctgtgaccaagacacaagtactgtctacttgcagagctttctaaggaggtcggctggaactaccatgacaccatctgggagcttgaggtgaacaggaaggacaaggctaaggctggcctatgataggaggaagc

SEQ ID NO: 161353 - DNA, 496 bp, Zea mays
  Clone ID: MRT4577_78733C.1
cttggaacctttgggctgatttatgtgcttcgttatgtgcgtggataagcactctgcaattccctgggtcttctccttcacttctgtgcctttggattaaatttcaacttgagtatttagtgccttaggtttcatttgtccttctctgtgttggttcccggggtctctatttcgagtggcaggaacttgtacggtcttagccgggcgttagaagtacttaagctgccggtgggagattgggaaacggtggaaaaagagggggtgagagccggggtggaagacacggaagagtgggagtaggaaagggaggtggacgatgcggatgcgaagacctgctgacctgatggtcttgatactcgttttgagtgtcgtgatgctggtattattattgctgttgactctaaggactgtgcagctgatgatcggtttaaagacggattcaccactttaaaggtcgtcagcgacgctaaatcaacaagtgcgggtatcaactcag

SEQ ID NO: 161354 - DNA, 249 bp, Zea mays
  Clone ID: MRT4577_78734C.1
actaacatcaccgctgcatgacagaatgaatggcgacctgtaattttccatgaaaatgctgccaggtgaaagctgcaatacttcaacatgtccacgttacaaaaccttcaagttcactgagatcggggtgacaagagtagctaaccacacttgaggcgacaaacatacatatcccagtttaagtgcttgtgcacatagacagataaacaagtatgacacgcacttcagaagtaccttccactccctatg

SEQ ID NO: 161355 - DNA, 409 bp, Zea mays
  Clone ID: MRT4577_78735C.1
ggacagggaacgcatgcttctatatatcttgaggtggggttttcaatggggctactgccttgggtaccacccaaccagggagtgatatctaactgcctcctagataataatcattcgggactgataaaaaaagaatgtcaggatgcccccctcctcctccctttatacactgaaaaagcgaggcccatcgaagtacctcctaatcagatgactgactgattatgtgtgcatgattgaggagttactaactatgggagcatataggctataaggctcctgcttgctcctactgcaggatgggatccatggatgggtggttcatttgctggtgtcgagtgacccagcgtacccttacggttttttgctcgcccagttccacatatctatgcacatttcctagatcccgaac

SEQ ID NO: 161356 - DNA, 735 bp, Zea mays
  Clone ID: MRT4577_78736C.1
gacgcctgcaggttccggtccggaattcccgggtcgacccacgcgtccgaagaaaaaaaattctgttttaccatccaaatgaagtagaaaagaatgaaaaaattagaaatgttggatatgtgaagcaattgtacagtttacaaggacttttagcccatcgaaacctgcaaaatctttacacacacagaagaacagacagttcttcaatgaaccagaagaaaatttctggatggttatggttgttcggaatcctatcatcgagaagcaaagtaaagatggcaaggcggtagtggagtaccaagaggaggagctgttggacaaggtgtacagctcagtgctgcagcagtgctacagcatgtacaagcttttcaatgggacgtttctgaaagccatggaagatggaggcgtcaagctcctaaaggaaagattagagaaattcttccatcggtatttgcagacactacatttgcagtcatgtgacctacttgatatttttggtggaatcagcttcttcccattggataaaatgacttacttgaaaatccagtcctttattaaccgaatggaagaaagcctaagtgtagtcaaatatacagcattcctctacaatgaccaacttatctggagtggactagagcaagatgacatgagaattttgtacaaatacctcaccacctcactgttccccaggcacatcgaacctgagttggcgggaagggactccccagtcagggc

SEQ ID NO: 161357 - DNA, 159 bp, Zea mays
  Clone ID: MRT4577_78737C.1
atggcgacctccggcccgatggtgagggaaagcgagccgggccgcgacctcttcccctccctcagcctcaaggattttcatcaccagggctggggaggggagtgcgccgagttgaggtcggcccccgcgtgggtggcggcccgctccttcactaagtga

SEQ ID NO: 161358 - DNA, 324 bp, Zea mays
  Clone ID: MRT4577_78738C.1
gcggggaaaaaaacccccttttttcaattctttaacccctaacaaaaaaaaatccttgagggttttttttttttccctggggccctttcaacgaacaaaaacccccccttttttttgggggggccccttgggcccaaaacaaagggtttaaaattttcccgggcccgtacccttgggatctgggcccaaattggggggccctttgttggtttttaacccaggggcttaaggacaaaacttttgttttttaaaagggcctcaatggggatatcagggggtttaagtttaaagacatcccccggcccttgtttaaaagaaattttt

SEQ ID NO: 161359 - DNA, 685 bp, Zea mays
  Clone ID: MRT4577_78739C.1
aaaaaaaaaaacaaaaaaaaaaaaaaaaaaaaaaaaaaaaaaaaaataaaaaaaaactattgccacctttgcaaagcaccgcttccactgctaggaaatggacagaaacgcatctgttcaataaagaacttgatgcagacactaaactcaatgtgcaaaaaaaaagggtagcatttgggtatataaaaaccagttccgtctgttgtcaatacactttgttgacttttccaacatattcaggtgcactattcgaaactgctttgtcgagtgtctgaatcagtcgacaaagtctgaaaaacactcgacgaaagctttatcaagtgtgacacttagcaaataaaagcccggtgaactgtacattggcaacgacttttttacatagtacattttaacggataatcggtaaagactttatcgagtatcacttgatagttggtcacaacgtcaggtaatagtgacggagtctttgacgagtgcccacaaagtggtactcttgcaaaacgctaagtacttgaaaaaaacgagattccggtagtgttgaaactacgagccaaaatcaaaattcatctagtgtatccgtcgatcatctttcctattaggaaaaaaaacaaggtctgttagcctccgtcgagcatttggcacaaagcgggacgagcttgttggccgacaggagcgttcgtgccta

SEQ ID NO: 161360 - DNA, 303 bp, Zea mays
  Clone ID: MRT4577_7873C.1
ggcgacgccagaacacgacgagaagacagactgggtgaagatcacgccagagctgatgcatcgacttccagctgcgacgagtcgagtgggggagcaagtcaccaaccacacaaaggaggcgaacatttgctactcagggccgtccaggagcatgagcggacagctgacgcgtgcctgacacttggcctgtgtggccctgacgtcgcctacgacgttcacttctgccgcatggccagagcatggctatccgtccaccacacgggctacggtcacgccgtacgtgggtacgccacatacacggct

SEQ ID NO: 161361 - DNA, 792 bp, Zea mays
  Clone ID: MRT4577_78740C.1
gcggaggaacagccagcgcgctcctggcggccaaagggagggcggtgacccaggtcgctaagaagaacctgatccagatcgccgtcccgatcttcatcgagctgaagcggctgctggagagcaagaacagcccgctgatcgggtgcctgatggagtgcctgcgcgcgctgctcaaggactacaagaacgagatggaggagatcctggtggcggacaagcagctccagcgtgagctcctctacgacatgcacaagtacgaggcaggcaaggggaagggcaaggctgcggcgcaggccgaggccgaggccggggccggtcttagcggcattggcaggtccccggctgtcaggtcggtgctgaaggaggtgaaccggaagacgacgccgacgcaaccgctgcactcgatgagtgtgcccaaggtgaagtccattctggggagcgccgggccgggctctggtcgccccgatgtcctccagtcggtcaggcggcttcagccgtttgaatcggacgatgagagttagcctgcgccccacttcgatggcagtttatttcggctgttgcacttgggctcgtctgctctagaggtctggtctggtctggtctggtccgctaagctcattctctcaatgaggttttcgccgatttgcagtgtatataattacatattcctgtaaacgaacaacgagaagaactactctgctatgccctcagatataatgggtccagagtttcagatttgtaccaaggtacaatatattctagatccttactcttctctcttgtgtttttaac

SEQ ID NO: 161362 - DNA, 296 bp, Zea mays
  Clone ID: MRT4577_78741C.1
caacagaagagcggcggctcgtattgaggatgagcaggccgaggacgagttgtgccaaaggtcaatgggtatctcgggtgactcgatgcacaatcagccgatccaccggtggaaagcataaagcctggaggaagaaacgaaagtattagcttggtcgtcagccaaccaacaccaagttgtcaagcaataagacagttaggaaggtccgtgttcgtggaggtaatgtgaaatggatggctcttcgccttgatactggtaactactcatggagaagtgaagctgttaccctcaagacc

SEQ ID NO: 161363 - DNA, 567 bp, Zea mays
  Clone ID: MRT4577_78742C.1
atggcgctattcgccgcctgcgtgccccagggaagcaccgctccaccagcgaccgaaggggcccttgaatgcgcactgacacacgacctcgccaccgcgtctaacccaagtcgaaccagcagtggtgccgcgccctgctacgtcgagcagtacgtcgacccttcttctacctcgcgcacagaccagcgcctaacggcggcgagcccgccaacggtacgccaagccagagaattaccaaggtacgtcgaagctgcaacctaccacgtgcaagctctaatcgccagggagataagggcgaggaagaacatggaggtatgttttaccgtggctctgcataggaacgagcagtgtcgcacctcggccgcgcagttcggccttctacacgcggcttggaagcctagtcctcccgccgcgcggtggtttctcggcagcgaccacagcccgagctccgagggtgactccttatcaccaccgcttgctaccttcaatggcgaggccgcgaacctagcggtatggtggtggcgcccggtgttgctggtgcggatgacccaggcggccacaacctga

SEQ ID NO: 161364 - DNA, 1142 bp, Zea mays
  unsure (1)..(1142): unsure at all n locations
  Clone ID: MRT4577_78743C.1
cccacgcgtccggccgttcccgtccagccttccgccacgcacgccgcaagcaaggcgtagctgcctggctacccgacccgcgcatcgccgattcaccggtgcccgtcgctcgcagacctctccctcgcccctcgcccagcttgtcggaggccgaaattgatttgctctgtccagctctgggctctgctgctttggcctccaagcgcgccatgtgtttctatcgacaataaaattcacaatgtgcttgcccctagcagcttgccggagcttgcaactgttctgctctaaaccagtgaaacgtgaagactgaacctgcttctgcttggctgcttgctccaattcaagaatcctctcttctcggcttacttcatttactcttgcttgttctattccttgttaactgactgctgtaatacagatcaattacattgaattttaccatggcagctgaggaagatgtcaagcagaggcagatcattgaaaatcgtgccagaaatataagccacaatgttaggtgcactgagtgtggtagccaatcgattgaagattcacaggctgatgttgctattctcctaaggaagctcattcgtgatgaaataaaagcaggaaagagtgataaagagatctacaagaaactagaggatgattatggggagacagtactatatgcccctaaatttgatcttcagactgctgggatttggctttcgcctgtcattgttggtggtatagcagctggaatctgggcttaccaaaggcataggcaaaggacaaatgttcacattatggctctgaacctggtccgaggggtaccactgactccaagggagaaggagaccatgctagacatccttacacctccaccggctccaaggaaatggtggtggccaggcaaatgatgtagaattcatgtgctggacctggtagatgctcacaaatggttaggatgcaaattacagtttggatgcatgatactttgatcgtgactttcagtttaaccaaaagcctgttcatttggctataattcatacaggcttctactgccaaaaaaaaaaaaaaaaaaaaaaaaaaaaannnnnnnnnnnnnnnnnnnnnnnnnnnnnnnnnnnnnnnnnnnnnnnnnnnnnnntnnnnnnnnnccc

SEQ ID NO: 161365 - DNA, 390 bp, Zea mays
  Clone ID: MRT4577_78744C.1
atggcgctatttgccgcctacgcgccccagggaagcactgctccaccagcgaccgaaggggcccttgaatgcgcattgacacacaccctcaccaccgcgtctaacccaagtcgaaccagcagtggtgtcgcgccctgctacgtcgagcagtacgccaacccttcttctacctcgcgcacagaccagcgcctaactgtggcgagcccgccaacggtacgccatagaattaccaaggtacgtcgaagctgcaacctaccacgcgcaagctctaatcgccagggagataagggcgaggaagaacatagaggtggtgctggtgcggatgacccaggcggccataacctgagcaagatggtggcagcgcgtggaggggatgtggaggagagataa

SEQ ID NO: 161366 - DNA, 235 bp, Zea mays
  Clone ID: MRT4577_78745C.1
gtatccataagaaaccaaaacgaatttgggttcatgacaaaaggagttcatgacatcggtttaatggcaggggcaacaattacatgcctttcctttttatagcgaagccaatgattaaattgtcgcgccagggcactcacaagggacaccggacgggggctcaggtcacacgttattgtaacccacaagacgtaccgactatacatcaaactgcacagccacacaccacactgtc

SEQ ID NO: 161367 - DNA, 2087 bp, Zea mays
  Clone ID: MRT4577_78746C.1
agagtacatatatttattttaaacgtcattatgtaaactgtatagtctaaaaaacaaaaggagtttttatgtggccatatacacatatcctacgaattgggggccgcagcgacaagcgtgaggacaaaatcgtacatctctcgatcgcggccgggccgggccactctctcgctcttgcgccggcgaccccgcggtttcgagccaatcaccgccaagtcctcgactccagcgcccttgccttgccaccccggccccagctaccacggggagctgcaaataacctgcggccccgaggaccggacagcaaaagcgcccaaccgctggagctccgccccggcgatcacccgccgggaacgtagcgcccggctccacagccgcgccattcgagctgctgctcgcgcgcggctggttcttctcggggggattttctttttgcgggcaccctccgctccccctcaccgccctgccgtcagccgtctcgttttcggattcgtttgctccggcggtggccgacctgccgtgcggggcgcggtgatgccggaggtggggcagtacgggtacaagaagaccgacggcatctgcgacagcgtgtgcggcgagcctgtgtcaaagacagctctgacgatgtcaaggctaaagtgcgctctccggggatttgatttaagggcacttatggtcctcttgattggtgtgccaattctaatcctaatgatatatgcgcatggtcagaaggtcacatacttcctgcggcccatctgggaatctcctcccaagcccttcaagacaatccctcactactaccatgagaacgtcaccatggagaacctgtgcaagttacatggttggaaagtccgtgacttcccgcgtcgtgtctttgatgctgtactcttcagcaatgagcttgatatcctggagatccgctggaatgagcttagtccctatgtgtccgagtttgtgcttcttgaatccaactcaacctttactggcataaaaaagcccctccacttcaaggaaaacaagcaccgttttgggttcgctaaatcacggctgacatatggtaatattgggggaaggttcgtgaagggggagaacccatttgttgaggagtcatatcagagggttgccctggaccggcttcttaagcttgcaagaatagaagacgatgacctgctgatcatgtcggacgttgatgaaatcccgagcggccacacaatcgatctcttaaggtggtgcgacggcattccagacatacttcaccttcagctcaggaattatctctactcgttcgagtttttcctggacgacaagagctggagggcatcgatacacaagtaccaagctggaaagacgaggtacgcgcacttccggcaggcagacgagctcctcgccgattcagggtggcattgcagcttctgcttccgctacataagcgatttcgcattcaagatgcaagcgtatagccacgtcgaccggatcaggttcaagtacttcctgaaccctgagaggatccaagatgtcatctgcagaggggcggaccttttcgatatgcttccagaagagtacacgttccaagagatcatcgccaagctggggccgatcccgagcacgtattctggcgttcatcttcctagctatctgctaaggaatgtcgaccggtttagataccttctaccgggcaactgcaggagagaaagtggctaggttttatggcccactaccctgcaacctgttgtgcgtgggtgggtgggtgccagtgccacactgccccgctgcaaagctgctgtccatgggatatctgtggcagttcacctggtacggttgcctaacgtagttgaacaaatgctttggggaagaattggttcatggatgggggtgagcacatgattctctaatgtgtaatagaacatgggaggaggatctaacggcatagcgcacgcttggtcctggctgggtgtgcatgagctgagcggtttgtcattgtcattcattacttccctgattgatatatataaactcaaaaaggctgttgtagattgcaatccaagtggtatttcagaattacaaatagtaaaaaaaaaaaagcggcc

SEQ ID NO: 161368 - DNA, 286 bp, Zea mays
  Clone ID: MRT4577_78747C.1
agggcccctaaaaaaaaaatttggggggagtaaacctacatttaaaaaaatttgaggaaaaaaaataaatcccaaggtttttcaaatttttttttaccaactggtccttttataagtacccttttaaaaaaaaaatcaccctttttgaatcccggaccttataaacccctttttgaacaaatttaaatcaaagtgaattaaaaccgttttggattttaatgggacatttggatacatttcaaaaaagcacaccggaaacacttgagccctttaaaaatttttacaa

SEQ ID NO: 161369 - DNA, 309 bp, Zea mays
  Clone ID: MRT4577_78748C.1
gggggggggggtttttttctagtggggtggttttttttttttttttttttttttttttcccggggagggaacaatttcaattttttgggtgccgggggttggttaaaaagcccgaccaaaccccggttaatgtcccccttttaagggtgggttttaaggcccgataaaccagtccatctaaaaggtgggggtaacctaggaagaaaaaatttctctcgcggatgataggcaaatccgaataaagggggtcggtcacttccactttattaggtgccataaattcttgtggggggtctgactttatccccc

SEQ ID NO: 161370 - DNA, 623 bp, Zea mays
  unsure (1)..(623): unsure at all n locations
  Clone ID: MRT4577_7874C.1
tgggtgnaanaacttacgaggattcccctagtaacggcgagcgaaccgggagcagcccagccgggagcatacatgccgcagcagggcgctgcggtcccccatcctgcggtggtcgtgccagccattactccccacagcgagaggtgccggctcatgtttgattctgcagctctaactgaagctgtagatcatttgctccctcactgagtgtggtatgccgaatgtttgaatttgaactggttttgtttacattgtctaattgatttacatgctttagctcgtctcactgcttaattaggctcagtttcattatgcacttagatgcttcagctctgggttgtcccgaaacttgctaaggtatcatgattttctgccgtttaatttnatatgccggccatatgcttttgttatggtttgatatacatttttttgataagaagtgtaaagtagtgacatatttgcctgagctcttattacctgagtagtgcattacaatggtgtgagctataccaagtttctgaaataaccaatacaagtatgttatttctgttcatgaggtttaagagtgaggtcagttttgtttaggatgcttttggtttggacaaattatggttgtagagatg

SEQ ID NO: 161371 - DNA, 190 bp, Zea mays
  Clone ID: MRT4577_78750C.1
cttagggcggcggggtctaattaattttgtgttttggggagcaacatgccttgtcaattaaattttttcatgcaaaactgacagaactgtcccggaaggaacaaaaaaatgacccgtggggcaccagcattacggatcctgggggggcaatcaacaccttgtaaaaaggggggaggctgacccgcgccgg

SEQ ID NO: 161372 - DNA, 162 bp, Zea mays
  Clone ID: MRT4577_78751C.1
atcactgatctcgatctagatatacatatattgtatcttacggtatcatggtacatggaggcttactgctagtactgagtcgatttctgcgattatagaattgttcgatacacatactatttgtctacttgatagttatacaatcattttaaaaactagacc

SEQ ID NO: 161373 - DNA, 556 bp, Zea mays
  unsure (1)..(556): unsure at all n locations
  Clone ID: MRT4577_78752C.1
ctcatattatctctttattctctccttaccaaggtcagaaccccagaagcagcaaagtcgacaagtcacgcacccagaacatgaaacgaaggcatacaattacaacacataatactagctactgtcttccacaacgcaacaggtaccctcctatagctccccagcatgtaacttgtgccaagagcacccaccaggcctccacaccaagcatcaacaaataaacaggcgtaatctttcgagtctttacgggtaagagactgctcgtagggtaagagaaggcactcgtgcgaggtccagaagtcagtagtcgtcattatcgggtggtcaactgtaagccctgctgcagtcatgaacccaagagcctcatccaccctatgggccaattcacggtacctatcaccttgctcgctgngatccatgaaatcgaggttccactgtgtgacgcgctgcatggcagcgtaccctccggtcgccaacgcgcggagcaggttgagcgtcgccaccgactgcgagtaggcgcggatcatcctctgcgggtctggcacgcggctcttct

SEQ ID NO: 161374 - DNA, 595 bp, Zea mays
  Clone ID: MRT4577_78753C.1
gccggccggttcggggtcctctactctactcctgatttcagcttctcggcggctcacctcacttcctcgcatcacagcacagccgaggaagcctccaagaaaaagaaagaaaatgtctggccccgccacctgctgccaccgctttcacctgctgctcgtcctcctcctcttcctcctcgccggcgagggccgctcccagcccgccgccgccagcaccagcgaccgcgacacgctgctcgccgtcaaaaaggactggggcagccccccgcagctcaagacctgggaccccgccgctcccaaccactgcaattggactggcgtcacgtgccccactggcggcggcggggtcgtaaccggacttaccttgtccagcatgaaactcaccggctccgtccctgcatcggtgtgcgcgctcaagagtctcacccacctcgacctctcctacaacaacctcaccggcgacttccccggcgccgcgctgtacgcctgcgcggggctcaccttcctggacctctccaacaaccagttctcggggcccctcccgctcgaatcgaccgcctctcggcggcgatggagcacctcaacctctccacca

SEQ ID NO: 161375 - DNA, 198 bp, Zea mays
  Clone ID: MRT4577_78754C.1
gccctgcacagcacgactcctccccatctaccgctacctttctacctacccatctagcactcctcgctcgcaaatcgcaatggcgctggccaccaactctgccgagcagccgctggcgctgacctcccgctgaagaggcgcaccatctccgctatccacgccgccgacccgtccaagaacaacgggcccgcggtcccc

SEQ ID NO: 161376 - DNA, 366 bp, Zea mays
  unsure (1)..(366): unsure at all n locations
  Clone ID: MRT4577_78755C.1
aaagaaataagtatatataccgttgttataaataaataattaaacatttcaataatgcattttacatcactgcatttgggagaggagaggcgcgcctcaacaggtacctcctatagctatccccagcatgtaacttgtgccattaacacccaccaccaccaccaccaggtcaccacactaagcatcaacaaaacaaggcgcccactgtctctttctcttccgagtcaccacagctattcctaccctcctttgtgtttggctcctgccactgccgccactggctttctgagtngcccgagtcaccacagcttttcctaccctcctttgtgtttggctccggctcctctgaaagccngtggcggctgt

SEQ ID NO: 161377 - DNA, 331 bp, Zea mays
  Clone ID: MRT4577_78756C.1
gggaaccgggcaaaaagggcaaccgtctgtagggggggttttaaaaccaaatttttcctcagtaccgggggccccaatttgatagaccccccggccccatttaagttccacccccagccagatctaaaggggatccaattggggtacccaacatctaaatgcttgatgggggggcggataaagcaaatgggggcaggcaattcccccttttggttgtagacatagggggggccccccttgccccattaggggcggccaaaggggttggccatgaaaacccccgcccccaactttgggtgggggccctccttgggggggcgggtcaccttgc

SEQ ID NO: 161378 - DNA, 590 bp, Zea mays
  Clone ID: MRT4577_78757C.1
atgatcaagaaggaaagtccccccaggagggcatcccccttgaaatgactgggcagaacgtgaccgagtgcattggtggatcacggactgtgaccttcgatgaccttagtgaccgctaccccaccccctgtgacccaaggctgaacgcctcccagtccctggagctcgccttcatcattgcaaaaaggctcaggaaaaggaggatgcggtcggggctcaacaacagcctgcctttgccacccctggctttttaagtagccgaagctgaacagagaaggtagaggggatagttgcggcgactcgaaagattacgcctgtttatttgttgatgcttggtgtggaggcctggtgggtgctcttggcacaagttacatgctggggagctatacgagggtacctgttgcgttgtggaagacagtagctagtattatgtgttgtaattgtatcccttcgtttcatgttctgggtgcgtgacttgtcgactttgctgcttctggggttctgaccttggtaaggagagaataaagagataatatgagtgcgaaaaaaaaaaaaaaaaaaaaaaaaaaaaaaaggaaaaaatccgaggg

SEQ ID NO: 161379 - DNA, 625 bp, Zea mays
  Clone ID: MRT4577_78758C.1
accaactcccgcggatcggaaccctatcatcagatccagcatgtggaattgtgagaaatgggatggtgacaaaccgctacctccgccttatttgaatgccccgaaagctattcatgtatcaacctctccagcgacgactacgacgactacaagtatctccactgaagcctagaccggcccatcatcctagacaacgacacaaggcacacactcagccgagaaaggcgatccacacttggccgtccaagatcatcgaatgcgagtacgcaagagcacacgccggtggcgaccgtatgaatctaacccgattcctagcttgtactagctgctactggtgacatgacgctaaatacagtagctctgtgctgtgcgcactcagtaatactgctcagctgcaactaacctagctctaggacattatcatattatacagtgctctgcgacgatgaaatggagtccgacaccaacccccactgatatgactatgtgaataacaggtctctcgaatcaaccaaccctcggtaaaaagcgtgaggatgcatgcttcgactatcctgacggaacactgccatcactttgaagttgaactgtcgtgcgccgcggagagagtgcaggtttgcatata

SEQ ID NO: 161380 - DNA, 820 bp, Zea mays
  unsure (1)..(820): unsure at all n locations
  Clone ID: MRT4577_78759C.1
cctgcaggtttcggtccggaattcccgggtcgacccacgcgtccggagcggctgagcaacgtggtctgttcgtccgcggggaggcgacggcgtttgcgctcccccgcgtccaaggcctagcgggtcttcagcgactgaaaggtagtcatttgcagtggcgtaagggctcgcggctagccgcgtagcgccgccctgacctggtctcatcatgttggtcctgtttgaaacgtccgttggctacgccatctttaaggttctgaatgagaagaaacttcaagaggttgatagtttgtggaaagaatttgaaactccagagaaagcaaataaaatagtaaagctaaaacattttgagaaatttcaggatacagcagaagcattagcagcattcacagctctgatggaaggcaaaatcaataaacagctgaagaaagttttgaagaaaatagtaaaagaagcccatgaacctctggctgtcgctgatgctaaactaggaggggtaataaaggaaaaattgaatctcagctgtatccatagtcctgttgttaatgaacttatgagaggaatccgatcacaaatggatggcttgattcctgnggtagaaccacgtgagatggcagccatgtgtcttggattggcccacagcctgtctcgatacagattgaaattcagtgctgataaagtggacacaatgattgttcaggcaatttccttattagatgacttggataaagaactaaacaactcattatgcggtgtagggaatggtatggctggcatttccctgagttagggaaaattatttcagataatctgacatact

SEQ ID NO: 161381 - DNA, 341 bp, Zea mays
  Clone ID: MRT4577_7875C.1
tggtggttttttttaagagcattttgggtcttccccccaaaccaaggggcaagaatcgacaggttaaaatacacggagtaacgctcgaaagtgaaccaagccggactaacagagcatttcggacaaaaatttctgggaagaaaagataaccagcagcgtaccatagacgaccgagaatctcttgccaggcagagggcataagaatgacagtctgttataagcaactgccttggaggccaccattcagccaacgtgtattgctcgctgttcgttgaactcagggacatgatccacgaggtcgttggttgtaagctcatgaaacttgttgcctgcaaagaaaa

SEQ ID NO: 161382 - DNA, 2234 bp, Zea mays
  Clone ID: MRT4577_78760C.1
attacccctccgtcgccgctcacggctaccaaccccaccacctcctccgcccgccaataaatacccccccgctcgccacctccatttcctcagaggaaacgccctgcacagcacgactcctccccatctaccgctacctttctacctacccatctagcacccctcgctcgcaaatcgcaatggcgctggccaccaactccgccgcagcagccgcggccgtgtccggtggcgtggcatcgcagccgcgccgcgcggccgtgttcctcccgctgaagaggcgtaccatctccgccatccacgccgccgacccgtccaagaacaacgggcccgcggtccccgcggccgcaggcgccaactcctccgcctcggcggtggccacgccggagaagaagccggcagcgcacgggaagtgggcggtctacagctggaggtcgaagaaggcgttgcagctccccgagtacccgaacgcggaggagctggacgcggtgctgaagaccatcgagacgttcccgccggtggtgttcgccggagaggcgcgccgcctcgaggagcgcatggccgaggccgccatgggccgcgccttcgtcctccagggtggcgactgcgccgagagtttcaaggagttccacgccaacaacatccgtgacaccttccgcgtccttctccagatgggcgtcgtgctcatgttcggtggccagatgccggtcgtcaaggtggggaggatggctggccagttcgccaagccaaggtctgagccgttcgaggagaaggacggagttaagctgccgagctacaggggcgacaacgtcaacggcgacgacttcaccgagaagagccgcgtgccggaccccgcagaggatgatccgcgcctacgcacagtcggtggcgacactcaacctgctccgcgcgttcgccacccggagggtacgctgccatgcagcgcgtcactcagtggaacctcgatttcatggatcacaacgagcaaggtgataggtaccgtgaattggcccatagggtggatgatgctcttgggttcatgactgcatcggggcttacagtcgaccacccgataatgacgactactgacttctggacctcgcacgagtgccttctcttaccctacgagcaggctcttacccgtgaggattccaccagtggccttttctatgattgttcggcccacatgttgtgggttggtgagcgcactcgacaactcgatggagctcatgttgaattcctccgtggtgttgccaaccctctgggcataaaggtgagcgacaaaatgaaccccagtgagttggtgaagctgattgatattctgaacccttcaaacaaacctggaaggatcaccataattacaaggatgggggcagagaacatgagggtgaagttgcctcatctcatccgtgctgttcgcaatgctggactgattgtcacatggattactgatcctatgcatggaaacaccatcaaggccccttgtggcctgaagactcgtccatttgactccattctgggctgaagtgcgtgccttcttcgatgtgcatgaccaagaaggaagccaccctgggggcgtccaccttgaaatgactgggcagaacgtgaccgagtgcatcggtggatcacggaccgtgaccttcgacgatctgagcgaccgctaccacacccactgcgacccaaggctgaatgcctcccagtccctggagctcgcctttatcatcgcagagaggctgaggaagaggaggatgcgatcggggctcaacagcagcctgccactgccgccactggctttctgagtagccggagccaaacacaaaggagggtaggaatagctgtggtgactcggaagagaaagagacagtcgacgccttgttttgttgatgcttagtgtggtgacctggtggtggtggtggtgggtgttcttggcacaagttacatgctggggatagctataggaggtacctgttgaggtgtgtaagacagtagctagcaaccgtatgccttggtttcctgtttgggtgcgtgacttgccgactttctagctgcttctggggttttgacctcggtaaggaaagaataaaaagataatcggagtgcaatgcttgctgaactggtgctcaataaattgatcccttgatgcctctattttcttcttttgtgtttcaggcgcgcctctcctctcccaaatgcagtgatgtaaaatgcattattgaaatgtttaattatttatttat

SEQ ID NO: 161383 - DNA, 368 bp, Zea mays
  Clone ID: MRT4577_78761C.1
aggattaacatgatttattggattatcagtcttacaagttgctgaggttgggcaaagccaggagagtaacttcaggcgtttctatcaagtgacagcctgattagcagggccgttactgagcggagggcagtggagggcaccccaggaaccccagctcctacagcagtgttaaaacccctccttcagaggcactggatagggcgtggcccgtgacagccaggggccactccactggcttttggtgcccactgacccctttcagcagagacacaaaggcctccagaggcaccaaggaggcaggatgggctgggcaggtggaaagactggtactttctcaccgaggctctgtctctggcctcgatctcccc

SEQ ID NO: 161384 - DNA, 2757 bp, Zea mays
  Clone ID: MRT4577_78762C.1
tgactaatccccaactacccttccccctccgttccacttccaccatctcctatcgtctcgtctcctatcgccacccctccgtggctccgtcatcgcgcacggctaccaacccctcctccgcccgccaataagtaccgccccgctcgccacctccatctcagaggagagagtcgctcagcactgcacgactcctcccccatctaccactacctgtctacctacccagcccatcgatcacccctcgcaacgcaatggcgctggccaccaactccgccgctgccgcagcagctgccgtatccggcggcgcggcatcccagccgcaccgcgcggccacgttcctcccgctgaagaggcgcaccatctccgccatccacgccgccgacccgtctaagaacaacgggcccgccgtccccgcggccgccgccgctaagtcatctgcctctgcggtggccacgccggagaagaatccggcggcgccggtaaagtgggcggtcgacagctggaagtcgaagaaggcactgcagctcccagagtacccgaaccaggaggagctggacacggtgctcaagaccatcgagacgttcccgccggtggtgttcgccggagaggcgcgccacctcgaggagcgcatggccgaggccgccatgggccgcgccttcatcctccagggcggcgactgcgccgagagcttcaaggagttccacgccaacaacatccgtgacaccttccgtatcctgctccagatgggcgccgtgctcatgttcggtggtcaggtgccggtcgtcaaggtggggaggatggctggccagtttgccaagccaaggtccgaaccgttggaggagagggacggcgtcaagctgccaagctacaggggcgacaacgtcaacggcgacgacttcaccgagaagagccgcgtgccagacccgcagaggatgatccgcgcctactcgcagtcggtggcgacgctcaacctgctccgcgcgttggcgaccggagggtacgctgccatgcagcgcgtcacacagtggaacctcgatttcatggatcacagcgagcaaggtgataggtaccgtgaattggcccatagggtggatgaggctcttgggttcatgactgcagcagggcttacagttgaccacccgataatgacgactactgacttctggacctcgcacgagtgccttctcttaccctacgagcagtctcttacccgtaaagactccaccagtggccttttctacgattgttcggcccacatgttgtgggttggtgagcgcactcgtcaactcgatggagcgcatgttgaattccttcgtggtgttgccaatcctcttggcataaaggtgagcgacaaaatgaaccccagtgacttggtgaagctgattgagattctgaacccttcaaacaaacctggaaggatcaccataattacaaggatgggggcagagaacatgagagtgaagttgcctcatctcatccgtgctgttcgcaatgctggattaattgtcacatggattactgatcctatgcatggaaacaccatcaaggccccttgtggcctgaagactcgtccattcgactcaattctggctgaagtgcgcgcattcttcgacgtgcatgatcaagaaggaagtcacccaggaggcatccaccttgaaatgactgggcagaacgtgaccgagtgcattggtggatcacggactgtgaccttcgatgaccttagcgaccgctaccacacccactgtgacccaaggctgaacgcctcccagtccctggagctcgccttcatcattgcagagaggctcaggaagaggaggatgcggtcggggctcaacaacagcctgcctctgccaccactggctttctaagtagccgaagctgaacagagaaggtagagggatagttgcagcgactcgaaagattacgcctgtttatttgttgatgcttggtgtggaggcctggtgggtgctcttggcacaagttacatgctggggagctataggagggtacctgttgcgttgtggaagacagtagctagtattatgtgttgtaattgtatgccttcgtttcatgttctgggtgcgtgacttgtcgactttgctgcttctggggttctgaccttggtaaggagagaataaagagataatataattgcgagatgcttgctgaactggtgctcagtaaattgaatccccctttattctctccttaccaaggtcagaaccccagaagcagcaaagtcgacaagtcacgcacccagaacatgaaacgaagggatacaattacaacacataatactagctactgtcttccacaacgcaacaggtaccctcgtatagctccccagcatgtaacttgtgccaagagcacccaccaggcctccacaccaagcatcaacaaataaacatgcgtaatctttcgagtcgccgcaactatccctctaccttctctgttcagcttcggctacttagaaagccagtggtggcagaggcaagctgttgttgagccccgaccgcatcctcctcttcctgagcctctctgcaatgatgaaggcgagctccagggactgggaggcgttcagccttgggtcacagtgggtgtggtagcggtcgctcaggtcatcgaaggtcacagtccgtgatccaccaatgcactcggtcacgttctgcccagtcatttcaaggtggatgcctcatgggtgcttccttcttgatcatgcagaaagaagaatcccggccggcctcgaggtacccaatg

SEQ ID NO: 161385 - DNA, 217 bp, Zea mays
  Clone ID: MRT4577_78763C.1
ggcttggcggaatcagcagggtaaagttgtttggcctgattaaattgcataggttggtgatgatgcctgtatgccggcattggacagctagcgtggtagtatgtttcttctttgtttttctttctgctttttcttttttgtcttgccaggtcattgttttgttggatcaatgacctggcaagacataaaaaagatcaggcttgacctccttaacaaa

SEQ ID NO: 161386 - DNA, 326 bp, Zea mays
  unsure (1)..(326): unsure at all n locations
  Clone ID: MRT4577_78764C.1
gagcagggaaaacgaaaaactttcgcctttaatttcacaacggcggtaacagaaaacctctacacgtatctgttcaattattattactgatctatttgctgattacctgcactacacgatgcggaaggcatcaaccatcacgaggaggattgcatgttgtaggcgagaggcgcctcgctctcgttcgagtgcaccgacgacgagccgccgtcgtcgtccgactccggcgcggcgaggtcctccccgagcaccgtggtgtctccgaatcgcacccggcgggcggcgctgctggcggngggggncccggnggcgggcggnccnccgcc

SEQ ID NO: 161387 - DNA, 376 bp, Zea mays
  unsure (1)..(376): unsure at all n locations
  Clone ID: MRT4577_78765C.1
cccagcgtccgtgctgttgtgtgtcgtttctcttctttttttcgtatttcttttgtaatgctcgtaaataggctctcgctcgtcgccgtgttgtctgactgttgttacgttgtcaatacttgtcgccatctgaatcgaatgtctgaaatgttcctgcccaaaaaaaaaaaaaaaaaaaaaaaaaaaaaaaaccaaaaaaaaaaaaaaaaaaaaaaaaaaaaaaaaggaaagccgcggccaagaggaaccaagcgaacccacccgtgcatgcgccgccatagcccggctacgggccccccccaatcaaanccattgcgccgccgggccaccacgnncgaaaccgggcaaaaccccggcgtcccccaacccaaccccc

SEQ ID NO: 161388 - DNA, 308 bp, Zea mays
  Clone ID: MRT4577_78766C.1
tctatgatacatgggccacatgcaccgggtgaatgccctcacgctggaccgggcctgagggactaacacgaccctgcccgcgacaacatcacacgacactgtcgtatagagatgttagcctagaactgaggccccacagaggcatcaggaaaaaatataaggccgaagactgttgtacaaatgaaataatccactgaaggacagatccagtttcgtgggctgccggaaacaataccttaggcgggttgcaacaaaacggtaggaggtgagctccacaataatgagcccttttagctagccaatgcatt

SEQ ID NO: 161389 - DNA, 235 bp, Zea mays
  Clone ID: MRT4577_78767C.1
tgagaaggtcaaggccttcttggctgatccatctgcctttgtggctgctgcccctgtggctgctgccaccacagctgctcctgctgctgctgcagccccagctaaggttgaagcctaggaagagtcggaggagtcggacgaggatatgggatttggtctctttgactaatcaccaaaaagcaaccaacttagccagttttatttgcaaaacaaggaaataaaggcttacttcttt

SEQ ID NO: 161390 - DNA, 402 bp, Zea mays
  Clone ID: MRT4577_78768C.1
gtcggggccgctattttcctttaagctgttgccaggccccaggaggcgtaaactcggtatacagtttcctgaactgcaagactcctgtccctgatacttcgtatcgttcccgtacgcggagcgggagcctcgctgtgatccgatatagattggtgactgctacacgctgtgcttgctcgcgacggtggcgtctcggcaccatcttctgtacccgacagggagaaggccctaccactgtcaccagaagcgcctctggcctcatgtctggactccacgggttccatgggcataggatttggcgccaccaccagtggctgcttgcctcctggaccacactaccctcctgcgtgcaagtagcatggcactgccacagcatgagaaccgaccatgccgtccgatctt

SEQ ID NO: 161391 - DNA, 331 bp, Zea mays
  unsure (1)..(331): unsure at all n locations
  Clone ID: MRT4577_78769C.1
gcgggcgccctttnttttttttttttttttttttttttttttttttttttttttttttttttttttttttttttnggggaaagaaccgggggctttttttccagttttaaaattaaccaaaaatttcaacggccgcatttttggacaacgggttttacttaaaagcccttaaaaacaagggttcaaaggaaagcaaagcttttcttttaaaaatgcccccggattttggactttttaaccccaaaaaaattctgtactttacccccaaaaaaaaggtttttaagggggccacccctttctctccacctttggcaatcgggggggggggttt

SEQ ID NO: 161392 - DNA, 708 bp, Zea mays
  unsure (1)..(708): unsure at all n locations
  Clone ID: MRT4577_7876C.1
tcgaggccggccggatgatagtgtgtggactgtagctcgggccctggatgccttctttgatgatggtgggaggatttcctttacaaatgactcaaggctgcgtgacgaaaccgggggaactcttcaccttgaagccatgagtgtttttgacatgggaaacaaattactgaataagattagaaatgtgaacttcactggggtgtctggccaagtgcaatttaatgctcagtttgaactcattcatcctgcctatgatatcataagcataattggcaacggcatgcggaccattggtttttggtcaaactatacaagattgctatcgaccatccttcctgaagacctatattcgaagcctcctaatacttcgcttgccaatcaacaactctatgatgtcatttggcctggtgagactgcacagaggcctcgaggttgggcttttccttccaatgccaaggagttgaaaattggtgtccctaacagatttagctttaaagactttgttagcaaagataatgctactgngtcaatgaagggctattgcatcgatgtcttcactcaagcattggcattgcttccttatccagttacatacaggtttataccttttgncaatggtactngaaaccctcattatagccaacttgtgcagatgggtgctgacaatgattttgatgcagcaataggggatatcgtaattacnatgag

SEQ ID NO: 161393 - DNA, 190 bp, Zea mays
  unsure (1)..(190): unsure at all n locations
  Clone ID: MRT4577_78770C.1
ctcttctttcattcagcacaataaanctacgggggcgcttaccatattctgagagtaacgtttacttcattacacatctaccattttaaacttccattgaaattcaaaactttctttccccaccctttcttccaacccaaaaactcatttaacaaccacctgttaatttcttataaccgtcacttgaaaa

SEQ ID NO: 161394 - DNA, 872 bp, Zea mays
  Clone ID: MRT4577_78771C.1
attacaagagtctgatgctatgaatgacaagttcttggcgtacctgtataagaaaaatgctgagaatgaccttctcaaggagaagcatgcccagctcatcgaggtgcaggcggctattgtcacccgtgtgaaggcagagcgcgtggccgaggttgctaagctcgaggaggagcacgcctctgcagttgtacagctcacaaagcacctgaacgaggagcacgcagccagcatcgctcggctcaacaaggagcatgcgaccgacctcgctcgtgcgaaggagaagcacgctgctgaggttgccaagctcaaccaggcgcatgatgctgccgtcacctggctcaaggaggagcattcggtagatgttgcccgtgtgcagcaagctgcagaggatgtggtgcaggatgtaaagaaggacatagcgctcgccctattccctgacctggatgcttcattgctgtgatcagatcatgaaccactctgctggaggagctccttattttgatgatcgccagccttcgtctagagactgagttcccgaagtttagtaggagaaatgcagtcagttctgaagcaatatatatagaagggccttgctacctggtcaagatgattttggcatggccatggcagggctctagaatgtatgcttgtcatcagtttggtatttgctcttgtctgggatatgtatgtatctgatgagattgacgagtgaatactgttggtgtagacccagtggtcttttgctttctaaatgtataactgttttaacctggaatgctccctaaaccttccccctgatctagctcagtgaaacaaaaacactgtactgtgccattactgatgataatggaaatgatgcggaagattgggat

SEQ ID NO: 161395 - DNA, 492 bp, Zea mays
  Clone ID: MRT4577_78772C.1
gttgtgcggtttatttcgttagggacacaatagacaaaacacccatgatagacaaacaaaacaacagaaagacaaagcaacagggggcaagcggaggaaagagccagagcaggaaagagagcccggggggagggaaacacgggggggggggaactcggggggggggcggggggcgcagggggcccaaggccaaggcgggcccgggcagggggggggcggggaggggagagaggggcgaggggagcgccggcgccggggggaccaggaccccggtcaaccccaagaggggccgcaagaaaaacggggccggcacgaagcgcaacgggccaaagggtaacagggacagggtagctcacgggaaggttggcaccgtgggggggggccggaagagcccgggggctccagaaaccattcggtgcaggacaccggcaaggcacaacacgacgggggcccacagcgagggcctccccacggcggggtatagctacgggc

SEQ ID NO: 161396 - DNA, 598 bp, Zea mays
  unsure (1)..(598): unsure at all n locations
  Clone ID: MRT4577_78773C.1
gggtacctcgaggccggccnnnnnnnnnnnnnnnaaanaaaanaaaaaaaaaaaaaagagaaaaaaaaaaaaaaaaaaaaaaaaaaaatacttagatacaggctcaaaaccaagcaacaccgtgccgacgcaagactaccagagatgaagaccggcgtcgtggcactacagctactcaccatcaccatgtttctcgtgctgtcgtcggctgcagatagcacggcggccaggattgggccagactacttccaggacacctgctcggcgaggatttctccgggggcacggtgccagcctcgcaagtgcgccgcggactgcaccaggcaattcaggggcggcgtgggcggctgtgaccgctcggggtgtacgtgcgtctacacctgccctgcggtcccgccactggcaaagaatgaatcgatcgcgtgaccctgactgtctcgatgcacaagtagtgacgtgacggacgggctagtagccgacctgtgacggatttgcccgtctgatgaattcgtgaaatgagtctgatgtagcaatgtaaaaaataaaagcaatgtatcacaaaggatttgctgcaaaaaaaaaaaaaaaaaaagcggcc

SEQ ID NO: 161397 - DNA, 510 bp, Zea mays
  Clone ID: MRT4577_78774C.1
ccgggttattctattccacttctagatagagaaacgaactaaaggagaatacttaataatacggcgaaacatttatacaaaacacctatcccgagcacacgcaagggaaccgtagacaggcaagtgaaatccaatccacgaaataaattgatccatggacggcaccgttgtggtaaaggtcgtaatgccagaggaatcattaccgcaaggcatagagggggaggtcataagcgcctataccgtaaaatcgattttcgacggaatcaaaaagacatatctggtagaatcataaccatagaatacgaccctaatcgaaatgcatacatttgtctcatacactatggggatggtgagaagagatatattttacatcccagaggggctataattggagatactattgtttctggtacaaaagttcctatatcaatgggaaatgccctacctttgaccgatatgcccttaggcacggccatacataacatagaaatcacacgtggaaggggtggg

SEQ ID NO: 161398 - DNA, 2239 bp, Zea mays
  unsure (1)..(2239): unsure at all n locations
  Clone ID: MRT4577_78775C.1
gatgatccctgttaagcatccatggctgaatggttaaagcgcccaactcataattggtaaatttgcgggttcaattcctgctggatgcacgcgaacgggaacggtctattggaattggctctctatccatggaatctcatccatcatccatacataacgaattggtatggtatattcataccataacataagaacaataagaactcgaattcttatcgatactggaactcagagcataggggggaaagtcgatttatggatggaatcaaatacgcagtatttacagaaaagagtcttcgtttattgggaaagaatcaatatacttttaatgtcgaatcgggattcactaagacagaaataaagcattgggtcgaactcttctttggtgttaaggtagtagctgtgaatagccatcgactacccggaaagggtagaagaatgggacctattctgggacatacaatgcattacagacgtatgatcattacccttcaaccgggttattctattccacttctagatagagaaacgaactaaaggagaatacttaataatatggcgaaacatttatacaaaacacctatcccgagcacacgcaagggaaccgtagacaggcaagtgaaatccaatccacgaaataaattgatccatggacggcaccgttgtggtaaaggtcgtaatgccagaggaatcattaccgcaaggcatagagggggaggtcataagcgcctataccgtaaaatcgattttcgacggaatcaaaaagacatatctggtagaatcataaccatagaatacgaccctaatcgaaatgcatacatttgtctcatacactatggggatggtgagaagagatatattttacatcccagaggggctataattggagatactattgtttctggtacaaaagttcctatatcaatgggaaatgccctacctttgagtgcggtttgaactattgatttacgtaattggaagtaaccaattaggtttacgacgaaacctagaaatcgatcactgatccaatttgactacctctacgggatagacctcaacagaaaactgttgagtaacggcagcaagtgattgagttcagtagttcctcatagaaaattattgactctagagatatggtaatatggagaagacaaaattgtttgaagcacgcacagaaccggaagcgccccttgtttcaaagagaggaggacgggttattcacatttaatttgatggtcagaggcgaattgaaagttaagcagtggtaattaagacccccgggtgaaaatagggatgtctcctacgttacccataatatgtggaagtatcgacgtaatttcatagagtcattcgatctgaatgctacatgaagaacataagccagatgacggaacgcggagacctaggatgtagaagatcataacatgagcgattcggcggatttggattccttttctatatatccactcatgtggtacttcatcatacgattcatataagatccatctgtctagagatcgtcatatacatctagaaagccgtatgctttggaagaagcttgtacagtttgggaaggggttttttgagaaaaaagaagaatctacttcaaccgatatgcccttaggcacggccatacataacatagaaatcacacgtggaaggggtgggcaattagctagagcagcaggtgctgtagcgaaactgattgcaaaagagggtaaattggccactttaagattaccatctggggaggtccgtttggtatcccaaaactgcttagcaacagtcggacaagtgggtaatgttggggtgaaccaaaaaagtttgggtagagccggatctaagtgttggctaggtaaacgccccgtagtaagaggggtagttatgaaccctgtggaccacccccatgggggtggtgaagggaaagcccccattggtagaaaaaaaaaaaaaaaaaaaaaagtactctgcgttgttatcctgcgcttggaagaagaactaggaaaaggaaaaaatatagtgatagttttattcttcgtcgccgtaagtaaatacgtaactaggaatatggaaaattgcatttttggaatttgcaataatgcgatgggcgaacgacgggaattgaacccgcgcatggtggactcacaatccactgcctttgatccacttggctacatccgccccttatccagctaaaggattttctcttttttccattcattattattctatntattct

SEQ ID NO: 161399 - DNA, 990 bp, Zea mays
  Clone ID: MRT4577_78776C.1
ggctttggacttgatcatgagccgaagaggccttcagacaagcccctgcgtctccccctacaggatgtgtacaagattggtggtattggaactgttcctgttgggcgtgatgataccagtctcaacacgcctggtatggttgttacctttggtcctagtggccttactactgaggtgaagtctgttgaaatgcaccatgaggctctccaggaggcccttcctggtgacaatgttggcttcaatgttaagaatgttgctgtgaaggatctgaagcgtgggtatgtggcctccaactccaaggatgaccctgccaaggaggctgctagcttcacgtcccaggtcatcatcatgaaccaccctgggcagattggcaacggctatgccccagtgctggactgccacacctcgcacattgctgtcaagtttgcggagctcattaccaagattgataggcggtctggcaaggagcttgagaaggagcccaaattcctcaagaatggtgatgctggtatggtgaagatggttcccactaagcccatggtagtggagaccttttctgaatatcctcctcttggtcgctttgctgtccgtgacatgaggcaaacggtggctgtcggagtcatcaagagtgtggagaagaaggatccaactggagccaaggtgaccaaggctgccgcaaagaagaaatgatgtgtctggctggttctgtgtttgcttgagggaaacctagtggaaacataaaatatctcgtcttgttcacgtcattgtctgaactatgctcgcaacgtttgcctggtcgatttagaatggttattttcgttaaaaccagagtgttatttaagacttatccgaacatctggtgagccatatatatggttactagttttgttactacccttgttggtgttgtgtgcttctttagcaaatgtgctgtttctaaattgctcattatttgctcaaaaaaaaaaaaaaaaaaaaaaaaaaagaacg

SEQ ID NO: 161400 - DNA, 280 bp, Zea mays
  unsure (1)..(280): unsure at all n locations
  Clone ID: MRT4577_78777C.1
ctcgaggccggncgggaaggtcaacttctgtttggatcgattggattcattctggagagggactgacgttctcgcagtggattgatttgggattctgttccaagatttgccgacggcggcaatggcgaccgcgagggaaagagatcaagtgcaaagctgcggtggcatgggatgccggccagccactgacaatcgaggaggtgcaggtagcgcctccacacgccatgaaggtgcgcgtcgagatcctcttcacctcgctctgccacaccgacgtctactt

SEQ ID NO: 161401 - DNA, 326 bp, Zea mays
  Clone ID: MRT4577_78778C.1
tgacccaataactaagtcagaatgcatctcttgtttctactcgctggtaacccaacactaacggggggtactatttctggtagcgcagcaccgaatcacattcaaggattccagtcctatcctgccaatggagttattcttgatcttggttggcctccacttcacagtggtggtgtccgacacctccaccttgcacagtatactctttcacaagactgacgacgacaaaattttggtcctcgactcgcacacgctcttgggctcattatgggagcctggtgacctattgctgtttactgtgtctatacagaagaacctacacctgt

SEQ ID NO: 161402 - DNA, 649 bp, Zea mays
  unsure (1)..(649): unsure at all n locations
  Clone ID: MRT4577_78779C.1
aattcggcacgaggagcctccttcccttctccactcttatccctctctgagtggtaacacacctggcgacgtgcacgagtgcgcgtgtgcgggagcagtagctgtactgtaagcatgcagcagcagcagcacgggggaggcggcggagcaagcggtggaggcccagcgcagcagttctgcgcacagcaggtggagatgccgctgccattctcgccggtcggcggcgctgggcagcggatctcgctggcggaggcaccgtcgcccatcagcagcgccgggcgcggcgcccggcgccggctcagcagtatgacgagctcggcccgtccggcgccggcgcagtgggctttgacgccgagggcctggccgccgccgcagctggtgaggatggcgccagcggcggctcggcgggcaaccggtggccgcggcaggagacgctggagctgctcaagatccggtcggacatggacaccgccttccgggacgccaccctcaaggcccccctctgggagcaggtctccaggaagctggctgagaaagggtacaanccggagcgccaagaagtgcaaggagaagttcgagaacgtgcacaagtactacaagcgcacaaaggagagccgcgccggccggaacgacggcaagacgtaccgat

SEQ ID NO: 161403 - DNA, 342 bp, Zea mays
  Clone ID: MRT4577_7877C.1
acctttgcgttcgagccaatgttgatcgatgaggtggaggagcgccttctcatgccttggaggagagtgtgaataacctttataccatggtgagccaaaaggggatgggttataccatataattaccgcaaacggaagtttcccttctgtttgtgaaaagccaaactggacgctacacacaaaggcgggccattggcaggatttatttacctccttatcaaaagggccggcttgcattgccttttttattaaacccaagcccccgcccgattacaaactaaaaaagcaaatgttattttccatggggaagaagcaacggattcccttccccttggacattaa

SEQ ID NO: 161404 - DNA, 1078 bp, Zea mays
  unsure (1)..(1078): unsure at all n locations
  Clone ID: MRT4577_78780C.1
ccggccgagtgcagacagcctaaaccctaaaccctaaaccctaaaccgctaaccggcgtccggcggtaagctactgccgcgagctcgcatctgcctcgttctcacttcctacccgctggccggtaccacacacgccgccgcgccagccatggacaccgctctaccttccgtcctcataggcggcggactctccgtgtccgtctccatttccaccgccactaaagccggcagccaatccatttcctcccacctctcgacctcctccctccgtttaaccgctcgccatcggaaccggcgccgtttgcccctccttgcatcatcttccgagtctcctcccgcgcaactagccgccgcttcgactgagagccagtcgcgttcctccaggtgggtggttgtgatggatacgcccccggccgccgcgggaggcagcggggtgtcccgcgcagaggccgtggattactacgcagccacactggcccaggttgttggaagtgagaaggaggcgcagatgcgcatatgtgaggcttcgtgggatgggacctacgagttccgctgcgagatcgacgaggatgcatcgaaggagcttgcaaagatgcctggagtgttatctgttcaactagatatgggtaacaaatcagagaaggataatcacagcttgagtctctcgacagctaaccttgtaagcattagtgatggtgcttctacatcttcaagtgggaaaaatgagttttggcttgtccggatggagaagcccggagttgaagttgtgacaaaggcccaaatggtggatcactacacccaaatccttatgaaagtgttggggaacgaacaggatgctcaggttagtatatatcacgtttcatgggatagggattatgggtttctgttgtcatattgatgaagaatgcgcgtaagagttagctgatgttctggacaggttagtatatatcacgtttcatgggtttgggattatggnttctgttgncatattgatgaagaatgcgcaaaagagttagctgatgttcctggagtggtatctgttcaacccgatacgaactttggatcagacaacaaaaat

SEQ ID NO: 161405 - DNA, 279 bp, Zea mays
  Clone ID: MRT4577_78781C.1
ccggccgggctaattgagacatcgcacagatgggcgtgtagatactgacctacctgcgtggatcaaacctttccgccttcgtctatatgcttgctactaccgccgcgtaacccgtgctacaactcaataagagagtgtgtgtcgatctagatggcgcctccctcatatgtagctctgaaaggcgtgctgccagctgcactgacttgagcatggcattcaggctgacggtcagatgccccgtgacccgaccattggcggaggtgatgatgcttattacac

SEQ ID NO: 161406 - DNA, 576 bp, Zea mays
  unsure (1)..(576): unsure at all n locations
  Clone ID: MRT4577_78782C.1
gagagactaaacataatttacatttaagttgtaactgttctttgtttcatcaagtatttacattagagttgtaactgttctttgtttcatcaggtatttttatttttcaccaaccgtgtatgtctgaaagcaggttttacgtccctccgcaagaagatactatagatgatgttggtctaggcgctaggtcctcagaaaggagtcatattgtggaggggaacatgtccgntggatctgtgcttgcttcagatggatgtgatgtacctttgcagggaagcattactgagccctttttccagcaggataaacatgaccatactggtatagttggaccaaaatcttgtaagcgaaaatctccaattctatcttactgtgctgatggagatggggcagatggtggtggctccagcaatcagtcatctaaggtttccattcgtgaaggacctagcactcatgccacagtaactccaggttttgacagaatcagtgatgtcttaccaatagatgcatctgaatctgagcattttcctgagtgcatagctgcacaggatacaaccatttcacagactgacagcg

SEQ ID NO: 161407 - DNA, 345 bp, Zea mays
  unsure (1)..(345): unsure at all n locations
  Clone ID: MRT4577_78783C.1
ccggccgggccggngatactgacgttcccactcccctcgacccatgccgcctgagtccacctccgcccccaagcctccacgagtagcccgtctcgtagtcatagagtcctatatgatgtcgtcctccggtctggaacggtcacctacaggaatgtcgacaccgcgacgccgagccaggtccagggaaggcgtctgatccaagaaaaagatcgatgccgacaagggcgacaatcattgggagcgggctgatcatcaacaacgacgccaaggagcaaatggaaaagggcaaggtactgtagaaacatttcgactacaagagcaacaacgtcttgacaaaaaatcatt

SEQ ID NO: 161408 - DNA, 308 bp, Zea mays
  Clone ID: MRT4577_78784C.1
tcggttccctagagcagatccatatagactctagagtacattcgagggggaagcgagcagatcgatggcgatggcttagaaggtgaaggagaagattcttatgcttcgcaacagcgacaaccaggagttcgaggggaaggagtcggtggcgatgcaatcgatgacccttaagaaaatggtcgaggaccggttcgccgacaaaggcattccggttcccaacgttaccttccacattcttgtcaagggcattgagtattggaacaagcacgcccagcccaccgggccgggcgacgcggtcggcaccaaca

SEQ ID NO: 161409 - DNA, 467 bp, Zea mays
  Clone ID: MRT4577_78785C.1
aaaaaaaaggaacaaaaccgggcccccttaaattatgggcccgggggaacgacccgggaaaagcattcatgggggggggggggttattattcaaacaaaggagctagctacaaggccattcctaaggcactagggtcttcggaggtactggggggggattgttccgccgccgggaaaccaggggcattgggggaccccggggggggggggcagggggaactcggcctccgggacgggggggggggggaatcccctttggacctcccggggggagcccgggagggcctttaggggggcctccagttgggggtccgggcccggggggatcgggccgtccatggggggggtaagggccgggcaccgggagtaccccgggatggtcgacagttcccgggagaattttcttttaagatccggccagggggggggggggccgaagccgaaggtccggctggaaaccaaccaac

SEQ ID NO: 161410 - DNA, 746 bp, Zea mays
  Clone ID: MRT4577_78786C.1
accggaaaaaccaccgtcccttatcatgtccgcgtcaaactgggcagacgcgtgggtagatcgggggcggccggcctatttttcgttgtgttcatactcaaaccagcatttcaattgaaacagcggataccatgtactggacacaaaatgtgctcaaattaaaacttcaatgtaaggagatgtaaagatagcggacacaatcattgtagctactttttcttgacagctttgcttttacataattccgttgtatgccactcaaaaacgtatttttgggcacatatgttttgctaatccatcattattccattgcttgggttcgagcagctgtcatttatagtgtttcggtactgctaggaatgttttaagggtcagcacgagcccaatacattggaccaaattcagaatgaagaacaacatgtgatcccctggaaagaaggcagcatcttggcgtttttgggtccatgagaataaagcgcctgctcctgcaggtccaatagccttaaagaaggacattgcagtcgccgctacgccgtttgcggcgcctctttgatgctgtggcacagcatagttctgcagaagtgaagtgcctgtcaggatagttatcccaagagcagctttcaaaatagtagcaaaataaagagctagtccaagttttgatcctgacaggtgtgtcatgaagggaaaagcagcgataagtggtatggatagcgcctagttagcacggcaggaatttacacttccga

SEQ ID NO: 161411 - DNA, 362 bp, Zea mays
  Clone ID: MRT4577_78787C.1
aaacccaacaccccggggaatttaactttggttaatcccccaattaatcccttttaagtttttaacaaaaaaaggcaacccccctacacagtccttgggttaaaaaaggggggggagcaaaaaaaaagggggggacccaataagcaggcaggttggcttgaaacggagccaaaaaacccaaccaagcgaagcccttgaccatgcgggggaaggggaaaagttggccaaaaaagcggccccaaaaaaaaaaccccccgaatttgcccccctttgggggggacggggcaacgttaaaaaaaacgttttgggggggcacccacccgggcgtaattagcaaccccggggggccaagcggaaaacct

SEQ ID NO: 161412 - DNA, 178 bp, Zea mays
  Clone ID: MRT4577_78788C.1
tagcataaaaatggcactttttaaagttggtgcacatactcatctgaaattctgaatacagcagggcctacattgtacttcttacaacgtgatatttatatactagtctattaagaatctaataaaaaaaaaaaaaaaaaaaaaaaaaaaaaaaaaaaaaaaaaaaaaaaaaaaaaaa

SEQ ID NO: 161413 - DNA, 264 bp, Zea mays
  Clone ID: MRT4577_78789C.1
acccctatatcttccccaaaacctacatgtagagcgcacagcgacagcaacacagcctcgcaagagaaagcaaagcaaagccaggagggaaagaaagaaatcctttttcctacacctaaagagaccaccaaaccctgcgagcccaaataaaaaggcatggagtacaagagatcatcgcatgcgcaagaggaagaagaggactaggaggaggaggaagaagaagacgacgagaacgaggaagaagaggaggatgaggaggaggcc

SEQ ID NO: 161414 - DNA, 390 bp, Zea mays
  Clone ID: MRT4577_7878C.1
ctagctgcagacccatactaagcctgtttgatctctcagcggcagttctcttgtgttgctaatatatataattcctccactaataatcagttcaaaccaatggacggcaagaaggtgcaggagagggcagcatggtgcgctaccgacggtgccgccaacctagtgcaggatgccgcccactacaggggctgcaggccgcacaagtaccaaacggccggctgggcgtcagacgcgctcgcccttggcatccacctgtgccaccgcctctccaccatgggcatcgccggcaacctggccacgtacctcactgccaccatgcacctgcctagacccccagctgccaacggggccaccgacttgatgggcacctccttcctcctctgactactt

SEQ ID NO: 161415 - DNA, 252 bp, Zea mays
  Clone ID: MRT4577_78790C.1
ggcaggcaggataacgagtgtcgtctttctgtcaatgaacctactgcttttttaacacagaagaggcacaggttgaccaacatactggaagcttgcgggttggtcaatactacatcctaacccagtccatcgcgtgggaattgccggacatccccgaccgccgcctgaagccatcccaccctctacctataccgcgacttcttagagcttgttttcctcacggccttagatgcgggctgggggacaaacgac

SEQ ID NO: 161416 - DNA, 324 bp, Zea mays
  Clone ID: MRT4577_78791C.1
gaagggggggcccggggtcctataattttgattgggcccaaccaggggggcgggtttttccccaagggggcccgaggaattccaaggggggggtcgggtaaaagccgcccccccctttgaaaggggggggggccccccccccccctaggggggggtcttttgaaacccccccgaacccttccttttaagaccgggggcttttcgaagcagcaggctcggttcctttaaaacctccccttgaacgggacccccccgaggaacccctggggggggagggcccccccccccccccccttgaaggggcgcccccaaaaaaccccgggg

SEQ ID NO: 161417 - DNA, 599 bp, Zea mays
  Clone ID: MRT4577_78792C.1
tttcttatttctgggaagccacaaacaccatacattaaaaaaaaaaaaaaaaaaaaaaaaaaaaaaaaaaaaaaaaaaaaaaaaaaaaaaaaaaaaaaaaaaaaaaaaaaaaaaataaaaaaaaaaaaccaaaaaaaaaaaaaaaaaaaaaaaaaaaggttggaaccggccgggggggccgttaaaagggggaaatttggaaaatatcaataaaacgggggggggttgaagaaggaattaagggggccaaattggcccaaaaggggggggaataaaaattaaggggcgggggtttaaaaagggggggaggggaaaaacccgggggtaaccaaattaaatggcttggaagaaaatccccttttggcaagggggggaaaaagaaaaaaggcccgaacggatggcctttccaaaaagtggccaaccctaaagggaaaagggaccccccctgaaggggggaataaaggggggggggggggggggtaaccccaagggggaccgttaaattggcaagggcctaagggccggttcttttggtttttttcctttcttttctggccaggttggcgggttttcccggtaaagtttaaaatggggggctc

SEQ ID NO: 161418 - DNA, 121 bp, Zea mays
  Clone ID: MRT4577_78793C.1
acgcgttcgattgttactagccctctcaacaagacgattggggagactcgcaactactgcccacagtgcaggcgggagcatgcatgactgggaagcgtctggcagacgccttctgcacgtg

SEQ ID NO: 161419 - DNA, 2337 bp, Zea mays
  unsure (1)..(2337): unsure at all n locations
  Clone ID: MRT4577_78794C.1
tcggggaatttttgggctgcttgttgccgcactctttttataaagtcgacccaccctcacctaattcgaccggcaaaagaacccgcagcaggggagactgggagatacagagaggagagggagggtttcctcaaagagacccaaacccaagcagagaacactagcgttccctcaccagggcgtccatcccagcagccatggcgatggcgtacaagatggcgacggaggggatgaacgtgaaggaggagtgccagcgctggttcatggagatgaagtggaagaaggtgcaccgcttcgtggtgtacaagatcgacgagcggtcgcgcgccgtgctggtggacaaggtgggcggccccggggaagggtacgaggagctcgtggccgcgctgcccggcgacgactgccgctacgccgtcttcgacttcgacttcgtcaccgtcgacaactgccagaagagcaagatcttcttcatcgcctggtcaccggcggcgtcgaggatcagggccaagatcctgtacgcgacatcgaagcaaggcctgcggcggctgctggacggggtccactacgaggtgcaggccaccgacccctccgagatgggcttcgacgtcatcagaggccgcgcgcaatgaggcccccgcggcgctcgccgggaagggaaaagaacccgcagcagggaagactgagagtctgggagatagagagaggagagggagggtttcctcaaagagaacccgaacccaaacccaaaccgaagcagagcacactagcgttccctcaccagggcgtccatcccagcagccatggcgatggcgtacaagatggcgacggaggggatgaacgtgaaggaggagtgccagcgctggttcatggagatgaagtggaagaaggtgcaccgcttcgtggtgtacaagatcgacgagcggtcgcgcgccgtgctggtggacaaggtgggcggccccggggaagggtacgaggagctcgtggccgcgctgcccggcgacgactgccgctacgccgtcttcgacttcgacttcgtcaccgtcgacaactgccagaagagcaagatcttcttcatcgcctggtcaccggcggcgtcgaggatcagggccaagatcctgtacgcgacatcgaagcaaggcctgcggcggctgctggacggggtccactacgaggtgcaggccaccgacccctccgagatgggcttcgacgtcatcagaggccgcgcgcaatgaggcccccgctgcgctctgctcctatttacgtacttacctgtgcgtgggcgtgttctcctactactcactgctcagtagtcagtagtcatctgcgttcgtgtgtgtgtgtgtgtgatcggccggatgctaattggcgttggtgtgctcccgtagcgatcgatgctgccaatctgacgaggcttcgcgtgtgtttgctttgctattttcggttctcgggagagatggtgcaggcgtggtgtgttgatgttgatgggtggagtagaagctcaggggagtggcagcggactaatgaaacgtccacctctgcgacgtagaattccactgaaaaaaaaatgctccagtgtaccataagctgcttcagatttgatcgtgttttctctcccatggtggcgtttctacctacatttttcttcaagatcctgtacgcgacgttgaagcagggccttcggcggctgctggacggggtgcactacgaggtgcaggcccccgacccctccgagatggggtttgacgtcatcaaaggccgcgcgcaataaaagcgtgattggcgttggtgtgatgagctgagcctcccgatgatgccggtctgacgaggcttcgggtgtgtttgctttccccccggttcttccgaaaaatggtgcagtgcaggggcgtggtgtgctgatgctgatgggtggagttactggagtaaaagctgagggagtggcagcggattaatgaaacgtccatctccgcgacgtagaattccactggtagtcatctgcgttcgtgtgtgtgtgtgtgtgtgtgatccnccggatgctaattggcgtcggtgtgctcccgtagcgatcgatgcggccaatctgacgaggcttcgcgtgtgtttgctttgctattttcggttctcgggagagatggtgcaggcgtggtgtgttgatgttgatgggtggagtagaagctcaggggagtggcagcggactaatgaaacgtccacctctgcgacgtagaattccactgaaaaaatgctccagtgtaccataagctgcttcagatttgatcgtgttttctctccgaaaaaaaaaaaaaaaaaaaaaaaaacaaaaaaaaaaaaaaaaaagcggcc

SEQ ID NO: 161420 - DNA, 198 bp, Zea mays
  Clone ID: MRT4577_78795C.1
cattatttctctttctcgccgtcgtccatctccacctgctcctacgcgccaccttatgaacaaaccactagaaggatgggatatgacttgctcatatcgtccagtgggatgaagactttatcaaagagatgatctgcgggatatcctaagtagcccaggggcaccgcccacagcgtgctcgtattcagacgacccgcc

SEQ ID NO: 161421 - DNA, 517 bp, Zea mays
  Clone ID: MRT4577_78796C.1
gccggccgggccggcgtccgtctgcctccctttcaccattaccgtacccgtcctctctctctgtgtcacgtaagaggctgtttcctctcctattcttactcgatgccctcgcccgtgcactctcttttttctccgtcaatttcgttacatgaacgcatgcgctccgtgtccgcgactctaatcttgccatgaaggaactcttgatccaagggccctctgaaggccgatgataatttgtcgccgaacactaatgctgtgcacaagtacatccaggcgacgaaagggaacgccggccaggaccccaagaatactcacaaggctcccatgagcttccttcgggttcctgtaagaattaccgagggacgtataggacaataaccctaataactagtctgtcttctgctacggggaaaactgctgtctacaggtgcaaatccctgttcgacctggaagaagcttccccatgtactcaatgttaccatgtcccagtttcagtaaaacaaggtcatcgaatgcc

SEQ ID NO: 161422 - DNA, 281 bp, Zea mays
  unsure (1)..(281): unsure at all n locations
  Clone ID: MRT4577_78797C.1
ctcctgcgccgacatcctcgccctcgccgcagagatctcggtcgaactggtacgtacggacggacggagtaatatatatacacgtatgtaaggtcctacgtactgcactattatattcatgaagaggccgggtgacgtagttttcaacataagatcgtcgatcgttgacgttgatacatatataataaacacttaaatgtgaacaaggtaagatcgtcgatcgaatatatagcacctnccagatataaacgatttcatatatataattgctcaaacgaata

SEQ ID NO: 161423 - DNA, 352 bp, Zea mays
  Clone ID: MRT4577_78798C.1
gtttagtagccacacacagctatattggtttctggaatggtattttgctttttcacagagtaactgaggagagacctggctggtgtagcgaccctcacctgccaccatgtgcagcgtttgttgaaattatggcaactgtattctcaagggatgcatggcgctgtgtatggcatatgattcagaacgacttggtccatggatggggccttgattttgctcttaggaaatgtgtggaggtatattcatcatccatattactctgatgaattgcattgtacgtggatactatcttgcataagtgcagcataccttgggttgcttatacgataagatcagtttttttaaaaacttt

SEQ ID NO: 161424 - DNA, 174 bp, Zea mays
  unsure (1)..(174): unsure at all n locations
  Clone ID: MRT4577_78799C.1
gggcagcgatgggcatggacattttattgatagaagggatttaactccctacttttgcatttgattcgagcagcaaaactgtaagngcttcaaaancgctacacatattcctgtgggtacacattccttatgaatgccaatcgaccaagattattgtganggactactaactgt

SEQ ID NO: 161425 - DNA, 819 bp, Zea mays
  Clone ID: MRT4577_7879C.1
atgtccatggatgatgattccatggacgacgagttcgttaaagccatagaggccgaggaacggcgacttgaagctcagaacgagcaagatgatgcccggtgtttcctccttggtagcagctcagctgctgccatcgaggttgatggcaccggtgctgggacgggaacggagacaggaccgagcatggcggatacgctcaccggatccaccagcccaatggcgatagccgatgctagcagatctgtcgctgcctctggtaagcgctccaggaggaggggaccgacctctaaggtttggttgcattttgaggaagttactcagaaacagggaggcaatgaggtaacgatttccgccatttgtcttcactgcaagcacaccttgtctgctaaatcttcttctagaacgggacacttgatccatcacctagaactttgccccgctaagaaagaaaaagaaaaaactagtagatctcaatccctgcttaagtttaatgttgatggatctgttgtgcaatgggagtactctccatctgttgcaaggactgagctttgtcgtatgattgctagactagacctacctctgtgttttggtgaatctagtgcatttcaagaatatattactcatgctcataatcctcggtttgttaagtcctccaggcaaactaacgctagagacttaattaggctttttaatgatcgtgctgaacaacttattaatgtactcaaatttgtttcatctgttgcacttacatctgacatttggtctggaaaggcaaaagaggattacatcagtgttgattgctcattttgtgaactctga

SEQ ID NO: 161426 - DNA, 834 bp, Zea mays
  unsure (1)..(834): unsure at all n locations
  Clone ID: MRT4577_787C.1
cggaccgtggcgccgcccaagactcgtcaccacccgcagcgagccttgctcgtcaccaactcaccatcacgcgcgagcgcgacgcttcagctctctctcgttgaagagctgcatctccagccagtgcctagcccgtcgagggaccggtcgccttggcggactcccgctggaattttacaggaatcgcgctggaatttcacaggaatcagttcaatttcacggaacaaacgcaggagcaaggaaattttgtcacgttcccctcatttgtttccttcggcgacgactaggcgagtgctgcccgctcttcacgaggttttcacctgcgacgaacatcctccagttgatcttctggctggaaaatcacgttgacggtggcaagtaggggttctatcatccgcagcctcatctcaagaagcaaaattctttcatgatccctttgaaccggagggcaagcctgcccagggctgggatggagtactttgatgcaaggcggaagcctcgtaatgttggaaaaatcattgcagccctggtcctcacaacactctgtatatttgctctgaagcaatctcctggttttggtggcaatagtgtgttttctcgccatgaacctggggttacccacgtcttagtaacaggaggagctggttatattggttcacatgccgctttaaggctcttacaggatagctatcgagttaccattgtggataatctatctagaggaaatatgggagcagtaaaggttctgcagggcttatttccgcagcctgggagactacaattcatctttgctgatctgggggacagaaatctgtncacagatatttgctgaaa

SEQ ID NO: 161427 - DNA, 432 bp, Zea mays
  Clone ID: MRT4577_78800C.1
ctcaaacgctttctacttggttccacaacatgggaaatcgtttaagcattactacatggttaaccacaaagccactgggatcccatgtggtactcttgggagctgccatacaagctgggatttcattaagacagtgagggaccgacttacaggagcaagagattgcatttatagtacacggaccattcagagctgagctcctacagacgatctcaggaatcccgatggtgaagacggacacgtgccaaggggaggagctatcacaggcctatgccagaccgtgatgtgacgtgaggcctctcgagactaaacaacatgtgtttgaggggctaaaggccatgtcatcaggaattactgtacttccgcctcacgcctgatgaatacctgatatcatacctgactattacgtggggaggaccagcttattgtaca

SEQ ID NO: 161428 - DNA, 451 bp, Zea mays
  Clone ID: MRT4577_78801C.1
aactagttatggattttctatcttccactattaatatttcacattcttacatactcataacatactacttcgttggtcttgtttagtggggcctggcgtttttttcactttccgtttcttttcttcttcttcccttcttattccctttcttttcccaactttatgttttttctcttcatcccattttcctcttctcttcttgcatcttccatggccttaccctttttacttcccttcttttcccccctctttttcttcattggtcttccccttttccctcccctttttatcccccttccctcctgtttactcttcccttttccctattctcttctccctttttatccccccttttccccccctttctttcctttctttctcctcagtttccttttcttttccccttcccctcttaaccctttccttcctttttttcttcctttttttcctt

SEQ ID NO: 161429 - DNA, 193 bp, Zea mays
  Clone ID: MRT4577_78802C.1
gaaaaaagttttgtaatcccttttgggaaagacatcgaccgctttttggggaaccaaagctttcacgggcattcttggatcacaccccccccttctttggggaaaccaacatttttgggaaattacgggcatgtcacacacttaattttggtgaaacgaaccatgattgtgatacccggggttatgccccccc

SEQ ID NO: 161430 - DNA, 289 bp, Zea mays
  unsure (1)..(289): unsure at all n locations
  Clone ID: MRT4577_78803C.1
cgttaactccgccgccgacgcagcagcagaggagacgccaaggagagcccgcaaggaggcgactatgagggccaagtggaagaagaagcgcatgaggaggctgaagaggaagcgccgaaagatgaggcagagatccaagtaggctgatggggattgaggatggtggtgtcngcatatctgtgctacgtttattctatgcgcgagctcatggagagatgtcacatcctatttcgtccacaccgtttgccatgggttcaatggctcgttttggaaacctgcacttcagtag

SEQ ID NO: 161431 - DNA, 211 bp, Zea mays
  Clone ID: MRT4577_78804C.1
gggggtaggggctggggagtccaacttacctaacattccccctacaagaaaggaaattatagctctcaaagctgggaataccacaagccacaaaaagtggtgccacaacaatccggacccatcttgtgccaaactaacccttttttgctgatcgtagaattgggggtgaaccaacttaattgacggaacacgcctagtgtagttcgacttc

SEQ ID NO: 161432 - DNA, 342 bp, Zea mays
  unsure (1)..(342): unsure at all n locations
  Clone ID: MRT4577_78805C.1
cctgagtccggtccggattattccgtcgcgagctcttncgcggcgagtgggaagaggcactgacacaggcggcagcggtgcgcaagaggtgtgaggcaccgacgttggaggaggagggaggcagctgcngcagctgcagngaggaggcgactgcaggggatagggcagcggcggcttgaaaaaaattgtgacgtagctctatanccatgtgggaaaccctaacctttgagtggggttgagtgttgtattaacagactcggtagttgggctaggcccattacagtaggggcgagaggataaatacacatgagaccacccaaaaccctacaggtactataacac

SEQ ID NO: 161433 - DNA, 141 bp, Zea mays
  Clone ID: MRT4577_78806C.1
cgcgcggcttgttgaggcccttttttttagttgtgtttcgaggttaaacaatctaatggcgtgtacgtatgtatggctgcttgcaaagaggacactttgtgattctgtacgattcttaatgtagtatagatagtctttttg

SEQ ID NO: 161434 - DNA, 257 bp, Zea mays
  Clone ID: MRT4577_78807C.1
ctttatttttttttttttttttttttttatttggggttgatttattccatgagcggggcaaattaaatccgatagcacggattctgcacacgctcatctgacttccatcacaacatattattatcgcccccatcccttaatttagtttaattattatttacgcgtcagcgtgaacagcggttccagcaagggatgcgctgttgaagggtctctggttgtagcattccaagttgccgccgtagctgatgccaaggatg

SEQ ID NO: 161435 - DNA, 416 bp, Zea mays
  Clone ID: MRT4577_78808C.1
gggccccccgggggggcggaccgggccaccccggaaagcccggtccgggaccggggggggaccaaggagagagtagagagaggggtgaaaaaggtggccggtaaaaaggccaaaggggtaaaagggggaaaacagaaaacggccaaaaagcacaaaaaaaaaagggagggaaggcaaaaaagggaaagcccggggagcaaaagaagtgaactaaataaaattaatggggcgggccaaattgccaattgaaaaacgggaaaaaagaggggaaaaacgaattaaaaaaaacgggaaaataggggggaaagggggttaccgcaaagaccacaaggacggtcaccatttgaaccggaaaaacgggaaacacctgaaacaccttgacctggcggacctggagaaagtgccccaagagggca

SEQ ID NO: 161436 - DNA, 356 bp, Zea mays
  Clone ID: MRT4577_78809C.1
caaggaacgattccatttccttcctccggtcaaaagccctcgtgcccggcaccggcaccggcagtgtccaacttgctcctcgccacgcttctctcgtgcggcgcacgagccatacggacgcactgcggctatgtctccgcggtcggtgaccccggcatgctgcgcgacagcctccgtgtggcatgggaggcgtggaactgctgcaacgaagacggtcaggaagcccccggcatgggcagcccacgcagtgccaattgctacgatcttctcggaccgaccattccatctctaactatcctctatcaccgtagagagtgaatgggttgccaccaagattaggtctctgaggaagcgtg

SEQ ID NO: 161437 - DNA, 367 bp, Zea mays
  Clone ID: MRT4577_7880C.1
gctcatgctctcgcgtgggaccgacgccggtggccctgcggcgtcacgaatccatgggcgaactggggcccggactccgaggatgctgagcccgccccggctgcctacgtcgacccctcctcccgcctccactccggcggcacgtgcctcaaggccggcgcctccctcagctcggcccccacgcccaccaagccgacctagcccatcgacccggtcctggcacagcccatggaggacgtgcgcaccatatacaccgtgcccaacgagctcggacgcggccagttctgcatcaccagcctgcgcacgcacaaggacaccatggactcatgcgcgtgcatgaccatcgtcaagcataagctgtccacca

SEQ ID NO: 161438 - DNA, 448 bp, Zea mays
  Clone ID: MRT4577_78810C.1
ggggtagagtcccacaatacaacaattaactggtttggacttaacaggtaacaaccatttggccaaggcacaagaactgggataggttaaggaagcaccaagggagaggcgctgggcaagaatggaaccgtgaaaattacatgggcgagaaccccactattttgggggggcaaggggtcaagagccacacaaaggtggattcttcgccgccgccgctgtctcaactttccctttagacttgatcttgataggtcgagcctcaggcttgggatagggctccgaaagactctgtttgatgtcccttgctatggaaaaaaaaaactgctcgacattcaggtttgtttttgcactcgtttcaaaaaactatatcccgtattcgtcagcgaggagcttgccccttccaagtggggacagcccgcttgctttcttccatatcacctttatttcc

SEQ ID NO: 161439 - DNA, 1012 bp, Zea mays
  unsure (1)..(1012): unsure at all n locations
  Clone ID: MRT4577_78811C.1
gtaccctcgggctcggcgggnacccacaaggcattgtcagcggcggcggcggcgtcgggccggcggagactcccaggccaggagcagtctgccgattggaaggggagatgaaggccacgctcaagggccgctacgagggcgacaaggccacggccgccaccaccctcgccgcccccgccggcgacctccgcctcaaggcctccgccaccgaggccgccttcaccaacggtccttccctgcgaggcctcaccctcaccctcgagaagcccggcgccttcctcgttgacctcaagccccacaaccaggatgtgcgctttcagttcatgaactccgcgccgccctcccgcaccgcgctcgactgcaccgtcactttcgaccccgccaacaaggtcagcctctcccactcgctaggctccggcggctgccgcctcaagtacacctacgcgcacggggtcgaccgcctcaccaccatcgagcccctcttcgacaccaacaagaacgcatgggagttcgccatcaccaggaagttcgccggaggggacgccgtcaagggcacctaccaggcctccaccaagctgctcggcctcgagtggagcagggactctctcgccggcggctccttcaaggttgcgacgacattcgatttgtcggaccaaagcaaagcaccaaagctaatagcagagagcacgtggaactacgaaatatgaaaaatgaaagtgtccttctcatatcatacatactgcttgattgctgtatcctcctgaactatggagctattgttttttcggaacccttggtggtggtttacatctgattcttttgatcattttttcggctgccgtgtcatgggagttttcactgagctgcggtcgtgccattggagttttctgttgagaatgaatgaacgacgagtatggtctatgttcctggggtttgtttgcgtggaagcccgtctgggttctggcttttgctcatgtggtggcgtcaactcatgaaaaatggaagtgtccct

SEQ ID NO: 161440 - DNA, 971 bp, Zea mays
  Clone ID: MRT4577_78812C.1
gggtacctcgaggccggccgggaagataacgaggggtccagaccaacccagtgcaccacacaaggcattgtcagcggcggcggcggcggcgggccggcggagactcccaggccaggagcagtctgccgattggaaggggagatgaaggccacgctcaagggccgctacgagggcgacaaggccacggccgccaccaccctcgccgcccccgccggcgacctccgcctcaaggcctccgccaccgaggccgccttcaccaacggtccttccctgcgaggcctcaccctcaccctcgagaagcccggcgccttcctcgttgacctcaagccccacaaccaggatgtgcgctttcagttcatgaactccgcgctcgtgctcgacaagcgcgtcagcctcacctacactcactccactagcctcgccgcggcccccgcggcccccgccgccgcgccgccctcccgcaccgcgctcgactgcaccgtcactttcgaccccgccaacaaggtcagcctctcccactcgctaggctccggcggctgccgcctcaagtacacctacgcgcacggggtcgaccgcctcaccaccatcgagcccctcttcgacaccaacaagaacgcatgggagttcgccatcaccaggaagttcgccggaggggacgccgtcaagggcacctaccaggcctccaccaagctgctcggcctcgagtggagcagggactctctcgccggcggctccttcaaggttgcgacgacattcgatttgtcggaccaaagcaaagcaccaaagctaatagcagagagcacgtggaactacgaaatatgaaaaatggaagtgtccttctcatatcatacatactgcttgattgctgtatcctcctgaactatggagctattgttttttcggaacccttggtggtggtttacatctgattcttttgatcaaaaaaaaaaaaaaaaaaaaaagcggccgcc

SEQ ID NO: 161441 - DNA, 297 bp, Zea mays
  Clone ID: MRT4577_78813C.1
atggtgcttgttatcaagcactccaagaacacactaaaggaacgcaaggactactccaacaagggaaaatcaaaggagaagcgtgcttgcttcaagtgtggcaagtttggttattttgtagctaacttctatgataatgagaatgaccaggacaaggagaagaaagggaagaaagttgagaagaagaagttttacaagaagaagggtgaaagctctcttgtgagttttggtggtttggatgacaacccgattaaaggactaacagtcacaaggctcaagatgaagctcaagaagtga

SEQ ID NO: 161442 - DNA, 430 bp, Zea mays
  Clone ID: MRT4577_78814C.1
aaaaaaaagggtttaagcttcttcccctttttggggggcctaaaaaaatttgccagccccgggacttggttttttttttccgggggcctccggggagtaagatttgtagggttaacaaaaaaccccccctccggggtttccggggggcccaaaattttgattgtgcaaccagcagcagctttcctaaaacaaaaattccagcagggcatttggggggggtttaccccacagtccaaaaaaaacctggcttttgggcaggattttttcttttttgcccacgggcggggggaaaaccgtttccttttgctgggggctgggggttgcccttttaccgggtccttgaaaagcagccccccctggggggaaaaaagggggccaaacccgagggcctccacgcccttaaccttaataaggtttttgaggacccccc

SEQ ID NO: 161443 - DNA, 513 bp, Zea mays
  Clone ID: MRT4577_78815C.1
gcccttaaataattggaataataaacaacatttgtttacatatgagcctaggccccattttcaattcttctctgcccctttgcaaaaaaagcacgctattccactaccccaaaagcaaatgcaatcaacggggctggaataaaaaattaattcactctccggcaggtgaccctgatcccgccggcctcaagccttgaaagggagaggtctgacgcattcttctttgtttccaaaacctgcaaggggcgggtctttccctcgatctgggaagccagaattgccaccatctcccctgatttcccaaattcaggcggggaaaccccatctattggtttcaggacggggggctttctcaaaaatctccctaccacactcggggcattataaacctcagctcgggcaacccacccataaaccttgacctgacctttgccaccatctccctccacagaacctataccattatctgtcatctcaaaatccttcttccctagcttattgatgccgaaatgg

SEQ ID NO: 161444 - DNA, 371 bp, Zea mays
  Clone ID: MRT4577_78816C.1
ctctcagccgccgccgactctatctctcgcttccctctcaccacctcctcgtcatcctcagcgtgcacgctgcgcgtggccgtagtgggggggtggccccgcggcgcgtcggctgccgaggcgctggcctcgccgagggcccggatgcagtaaagaagtctacataattgccaagaatcatcttcatccatggggatccggtaaagcagcagccccttggctgggtaacctactgtgaagcatcaggtcagcagtgaaggagatctgagttcgaagcagatttgccgcgaattctctccggaaatcattcgagtggctggattttgaagcgcaccatgggactcggaggtatttgtctgtaaaatgatgtg

SEQ ID NO: 161445 - DNA, 868 bp, Zea mays
  unsure (1)..(868): unsure at all n locations
  Clone ID: MRT4577_78817C.1
cattgggtacctcgaggccggccgggagccgccctcactctatctctcccttccctctcaccacctcctcgtcatcctcagcgtgcacgctgcgcgtggccgtagtggggtggccccgcggcgcgtcggctgccgaggcgctggccttgccgagggcccggatgcaggtgctctcccctaccaacctcgccgctgacttctcccgcgcgctgccgcccggggcacccatccccatgctccgccgtgaggtgctccactccttcctccgccgtcgaggccgagctcgtccagggcctcatcacctccgccgtgaggtgctccactccttcgtcttcaagctctcgccccaggggtgcgctagtgccaggtgcggcgagccagcagatcaaggaaaccgcccgtggccgccccaggcgttacatctgcactggctgctgctggtgacaagcaagaacaaccaaagtaaagaagtctacataattgccaagaatcatcttcatccatggggatccggtaaagcagcagcccctcggctgggtaacctactgtgaagcatcaggtcagcagtgaaggagatctgagttcgaagcaaatttgccgcgaattctctccggaaatcattcgagtggctggattttgaagcgcagccatgggatcggaggattttgtctgtaaaatgatgtgattcggcgggcccagcggcgggtgagagactggttcttccgggtccattgaagcgcagccatgggatcggaggattatgtagacttcttccnggctctcaatgtctgtccaggatgcaaacatggtcagtgacactggatatgagtaaggtgttgaagacagaacgtttgtgtcatctatcctt

SEQ ID NO: 161446 - DNA, 796 bp, Zea mays
  Clone ID: MRT4577_78818C.1
ccggccgagccgactctatctctcccttccctctcaccacctcctcgtcatcctcagcgtgcacgctgcgcgtggccgtagtgggggtggccccgcggcacgtcggctgccgaggcgctggtctcgccgagggcccagatgcaggtgctctcctctaccaacctcgccgctgacttctcccgcgcgctgccgcccggggcacccatccccatgctccgccgtgaggtgctccactccttcctccgccgtcgaggccgtgctcgtccagggcctcatcacctccgccgtgaggtgctccactccttcgtcttcaagctctcgccccaggggtgcgctagtgccaggtgcggcgagccagcagatcaaggaaaccgcccgtggccgccccaagcgttacatctgcactggctgctgctggtgacaagcaagaacaaccaaaggatgcaaacatgtccagtgacactgatatgagtaaggtgtttgaagacagaacgtttgtgtcatctatccttaattcgtttcctggtgttgatcccaatgatccatctgttaaagatttgctggcatcattgcacagccagaaagaggaagagaagaaggaagacaagtcagacaaaacagaagacgagaagaactgcttcaagctggagtgatgtcgctgtggtgcttttgtgactgatcatctctggagcttttgtgaatgatgtagctagctatctgtaattgatctagttgtgaagtgatattagtaattgtgatacttttgtgaatatataattgtggtgcttttgtgttt

SEQ ID NO: 161447 - DNA, 1953 bp, Zea mays
  Clone ID: MRT4577_78819C.1
atgtaccaggaggcgttgtggcataagagaggtcgtcctcgggagttatatccggacgtatctagtaaggatgctcctgttcctcctgaactccctgtgcctaactgtgactgtggcagactggcttggtggatcgacggtcctgataaatttgaccctcgatatcttcttttcgctaattggttgtgtggaaggactagtcatgagcattttaagcgttgggtacctcctcccctgaatcctccaccaatgacggatgcagagaaggaggtagccacagaaagaaggatggactcaccgcctcgatgcgattgtggagaccgtgctgtcatcgacgaagacacggcgaagcagttcgtgtgtccgaacattgattatgagacaaggaaatgcagttgggagggttacgacgacaaaggagaggtgatgtgcacaatagggtccaagagactaatgggacagaagattctttgtggatctgagctcgtcgattcatacattaatcatcgcatacacgacatgcgtaggtacgcgaaatctgccttttatgacagcccaaagcatgcagagtatacgaggttgaaggcggcagatgagaagagagcacaggatgcaagagaatgggaagcggctcgagccgagaaacagatgttggataatcttggtgatcgtctcaagggaaagattggatgtggcgtaaactatatggccgatgaggcgcatgcaagatatgttctagaaaaaatggcgatggtggagctgatggaggaggacgacaacacatctagattgagtgagcttatcgctctcgcagaggcaggattacatgaagaagaggaggacgacacatcaaggttgagtgagctcgtcgcactagctgaggcaggattatgtgctcaagaggaagaggaagagtttatgtctcaggccgccgaagaggtagaggcggcttattacaagcagaagtctgatgaggctgaggctgaggacgagctattctcccaagctgcagatgaagcagaagccaactattacaagagaactgttgacaagtgtgatgcaggacaatgcaggctggaaaagaaaaaatttggtatgaagactgttggtccactgcaatctttgcccatcccaacttggaaatgggaggacattagcatggactttattgtgggattacccaggacggctaaaggttttgactctatctgggttatagttgatcgacttacaaaaatagcccattttctatcggtcaaggcatcctatccagtcctcacttatgcccagaccatagtgtcggaccgcggaccgcaatttgtatccgagttttgggaagaattacataagtccctgagtactaagttgctccatagttcggcataccatcctcaaacaagtggacagactgagagagtaaatcaaatacttgaagacatgttgcgggcatgtgttctggaattcccacaaaaatgggatgaatgtttaccattggcagaattttcatataacaatagttatcaagaaagtattaagatggcaccatttgaagcattgtatggacgacggtgtcgtacccccttgaattggtctgaaccaggagaaaggtggtttttcagacctgatatggtgaaagagatggaagaaaaggttcaacgaatcatacataacttgaaagaggcacaagctcgacaaaagagttatacagacaaacaacgccaacccttgtactttcgagttaaagattgtgtgtacctgaaagtatcaccaatgaagggtgtgactcgtttcagtgtaaaaggaaagcttgcaccccgatacattggtctgtttcctattcttgaacaatgtgggccagtggcataccgactccaactgcccgaaacattgtctgcggtgcacaatgtgttccatgtatcccaattaaagaagtgtattcgagttccatattga

SEQ ID NO: 161448 - DNA, 857 bp, Zea mays
  Clone ID: MRT4577_7881C.1
cctagaccataaaaaaaaaccaagctgaaacctgttgctatgctaagcagcaccgtaccaatatctctggatcggtccttgttgtgaaggtggtagcatggccagatagatatctaaatccttttcacgagagcttggtacgtgaaaccttgatagtactgtactagtacgtacagtgttacactattcctggaccacttgaaacggccttcgattgggcagcgcgtacacgtccggatctgagtgagaagtgggtgggggaggatgccgttgcttctgttcttatgtgggacacacacacacacttggcctgctgccattgttgaccttgctgcagtgaatccctaaaggcaaatcgtaaatgctgctactgaactggtcgtttttacttgtcgtgatgctgcatggtggtcgttttcagtttcagtcacggatggcctgttgttagttgttaccgactgtactgtctgtggttggcgttctggatggtagtagtgttgttgtatccccctttggattggctgggcactcatctcatcagttgattttttttgttttcttcattcgttgggacttgagagggtgtatgcatctgtctgcgggcagtggatctgatctgataatgctgctatggcgtggagagcgacgtgcccttaggaaacgccagatgtgtatgctcttgctgaagaaacaggcagttaagtattcttgtgcctgtgttgctctgctaggggtggtaggagcgtggcatcctttgtctgtgttgagtgtgagatgtatgtgcttgcgtcttccagctgtagacggtgaatacctaaacagaggccgtggaaagctgctgcagtatcgctgacccc

SEQ ID NO: 161449 - DNA, 877 bp, Zea mays
  Clone ID: MRT4577_78820C.1
ctgggaccttgggttatgtggcccctgagtacctattagatggtattgtgtcagcttaattggcaacttcgactcacatacataaacaacttcattatcgacagtgaagttctacttccatcttgtatctttcagctactgtgtcgatttcagggaagctgactgaaaagagtgacgtatatgcatttggagtggtgcttcttgagctactaatgggaaggaagcctgtcgagaagatgagtcaaactcagtgccaatcaattgtgacgtgggccatgccgcagctgactgacagaacaaaacttccccacatagttggcccagtgatcaggggccccatggatccaaagcatttgtaccaagtggcagcagtggcagttctatgtgtgcaaccagaaccaagttacagaccgctgattactgatgttcttcactctcttgtccctctagtccctgtggagctcggagggacactgagggttgtagagccaccttccccaaacctaaaacattctccttgttgaggcgtcccgatcggtcgaagatcacagctacatgctgatgaacttggacgatgtttatcagtaactttatcaccctagctgtgtgccagaggatgacggttccaacctgccggttgctggttggatcgagagagaattctggtttgaaaagagttgtctcctgtgggtttgcttgtacaaagaagtgaaagaaaacaacactcttttccttagaattttaggtcccttctgtacagatcaaagtttgtccaacactatttaaaagaatttgagaatgacgtgctttgggttccacatgggtacccgagcactttggcttgctgcgaaaaaaaaaaaaaaaaaaaaaaaaaaaa

SEQ ID NO: 161450 - DNA, 437 bp, Zea mays
  Clone ID: MRT4577_78821C.1
gggggacaaacaaaaggaaaccttcgggttagctaggaggcaactttggggggggggggccatacataccctaaaaacgattggggaaggacccaaatgctaaaaaaagggtttttttcgtcccggtgggcccggcgccccccacataataaacatgccccacaacatgggacatgcttgcccagacgacgaccaaaaaaacattttaattaggccaaacacacaccctttaaatagggccggggcccagatgagaaaaaaaaaaaaacactttcgtacgggcccctgcctggaccctggtggagatgcccacacaaacacctacagttaggaatgccgggggccttcctgcttggcttgggttgggtaacacacttttaacaatcggggggggtggggaggcgccacttggccggaagctccatggggcccttggg

SEQ ID NO: 161451 - DNA, 1185 bp, Zea mays
  Clone ID: MRT4577_78822C.1
tcagtctgaatcacaatctataagtaactcatcttcggagtcatccgtcgcgcaatcctcaacgacaacctcattccacttgctacattgtcctgcatcacacttgtcaccagttctcttgtaataattggcttctgcttcatctgcagcttgggagaatagctcatcctcagcctcaacctcatcagacttcttcttgtaataagccgcctctacctcttcggcggcctgagacataaactcatcctctttctcttgagcacgtaatcctgcctcagctagtgcgatgagctcactcaaccttgatgtgtcgtcctcctcttcttcatgtaatcctgcctcttcgagagcgataagctcactcaatctagatgtgtcgtcctcctcctcctccatcagctcaaccgtcgccattttatcctgaacatatcttgcatgcgcctcatcggccaaatagttctcgccgcgtccctcctgtcccgcgagccgatcagcaagattatccaacatctgtttctcggcttgagccgcttcccattcccttgcatcctgtgctctcttctcatctgccgccttcaacctcctatactctgcacgcttcgggctatcataaaaggcagattttgcttccctacgcatgtcgcgtatgcgatcgttaatgtacgaatcgacgagctgagatccacaacgcatcttctgtcccattagtctcttggactctattgtgcgcatcacctctcctttgtcgtcgtaactctcccaactgcatttcctcgtctcataatcaatgttcggacaacagaactgcttctcatagtcttcgtcgatgacagcacggtctccacaatcgcatcgaggcggtgagtccatccgtctttctgttgctacctccttctccgcatccgtcattggtggaggattcgggggaggaggtacccaacgcttaaaacgctcatgactagtccttccactcaaccaattaacgaaaagaagatatcgagggtcaaatttatcaggaccgtcgatccacaggaaaaagaaacacctctggtgcccccaagccagtctgccacagtcacagttaggcacggggagttcaggaggaacaagaacatccttactagacacgtccggatataactctcgaggacgacctctcttctgccacaacgcctctcggtacat

SEQ ID NO: 161452 - DNA, 1826 bp, Zea mays
  Clone ID: MRT4577_78823C.1
cccacgcgtccgcggacgcgtgggcttgttccgtgcccagcccaattccagttccaggggtataggagcaggatctcctatcgcgaaccaacccagtaaacaactccgcagcatgaggccaccgccacctccattgccgtccctgcgctcttccgccttggtcctcgtcctcctgctgctgctggccgcgtgctcgtccccggccagcgggagggccgtgccgttggcgtcgcctcctgggaccgcctccgttgctcccgcgccgcctcccgtcgtgatcatagtggagcggcgcaatcgtttccacagggagctagtcgtcgcctgcgccctcgcctccatcgccatcgccgcgattatcctctccgcgctgtacgcgtgggtcctgtggcggcggtctcgccggctgccccgcggcaataagggcgccaggagcgcagacaccgcgagcgcgagggggatcatgatggcgccgatcctgagcaagttcaactcactcaagacgagcaggaagggggttgtggcgatggcgatgatcgagtacccgtcgctggaggcggcgacggggaagttcagcgcgagcaacgtgctcggcgtcggcggcttcggttgcgtctacaaggcggttttcgatggcggtgtcgccgcggcggtcaagaggctggaagcaggcggccctgaatgcgagaaggaattcgagaatgagctggatttgctcggcaggattcggcaccccaacattgtgaccctgctgggcttttgtgttcacgaggggaatcactacattgtttatgagctcatgcacaagggatccctggacacacagctgcatggggcttcacgtggatcagccctgagctggcatgtccggatgaagatcgcactcgacatggccagggggttagagtatctccatgagcactgcagtccaccagtgatccatagggatctgaagtcatctaacatacttttagattctgacttcaatgctaagatttcagattttggtcttgcagtgaccagtgggaatattgacaagggaagcatgaagctttctgggactttaggttacgtggctccagagtacctattagatgggaagctgactgaaaagagcgatgtatacgcatttggagtggtgcttcttgagctactaatgggaaggaagcctgtcgagaagatgagtcaaactcagtgccaatcaattgtgacatgggccatgccgcagctgactgacagaacgaaactccccaacatagttgacccagtgatcagggacacgatggacccaaagcatctgtaccaagtggcagcagtggcggttctctgtgtgcaaccagaaccaagttacaggccgctgattactgatgttctccactcccttgtccctttagtgcccgtggagctcggagggacgttgagggttgcagagccaccttccccaaacctaaaacattctgcttgttgagatgtcatggtcggtcgaagatgacagttacgtgctgatgagcttggacgatgcttatcagtaacttatcactctagctgtgtgccagaggatgacggttccaacctgccggtcgctgagaattctggtttgcaaagagttgtctcctatgtctttgcttgtacaaagaagtgaaagaagcaacaccctttcccttagaatttagggtccttctgtacagatcaaagtttctccaacactataacataaagaatttgagaacgacgtgcataaagaatttgagaatgacgtgctttgggttccacaggggtacccgagcacctttgctttgctgaaaaaaaaaaaaaaaaaagcggcc

SEQ ID NO: 161453 - DNA, 728 bp, Zea mays
  Clone ID: MRT4577_78824C.1
accctcgaggctgggcgggtaagacatcctatccagtcctcacctatgcccaggtatatattgcttgtattctcagtctgcacggtgtcccaaaaacaattgtgtcagaccatggaccacaatttgtatccaattctaggaagaactcccaaatctctgggtactaagttgctccatagttcggcctaccatcctcaaacaagtggacatactgagagggtaaatcaaatacttgaagatatgttgcaggcatgtgttctggaattcccacaaaaatgggatgattgtttaccactggcagaattttcgtataacaatagttatcaagaaagtataaagatggcaccttttgaagctttgtatggacgacgatgctgtactccattgaattggtctgaaccaggggaaaggtggtttttcaagcctgatatggtgaaagagatggaagaaaaggttcaacgaatcatacataacttgaaagaggcacaagctcaacaaaagagttgtgcagacagacgacgccaacccttgtactttcaagttacagattatgtatacctaaaagtatcaccaatgaagggtgtgactcgtttcggtgtaaaaggaaagcttgcaccccgatacattggtccgtttccaggacccttttgagcctcacactttctttcaaataattgcattggtgaatttgtgtgttgtcgcgtcatttattgctggttgcattgttt

SEQ ID NO: 161454 - DNA, 1606 bp, Zea mays
  Clone ID: MRT4577_78825C.1
aaaaaaaaaaaaaaacgaatgggtacctcgaagacggccgggaatagaggtccacctacctaaccctagcagtcgcgctccctgcttctctcccggccgccgccgactctatctctcccttccctctcaccacctcctcgtcatcctcagcgtgcacgctgcgcgtggccatagtggggggtggccccgcggcgcgtcggctgccgaggcgctggcctcgccgagggcccggatgcaggtgctctccccttccaacctcgccgctgacttctcccgcgcgctgccgcccggggcacccatccccatgctccgccgtgaggtgctccactccttcctccgccgtcgaggccgagctcgtccagggcctcatcacctccgccgtgaggtgctccactccttcgtcgtcaagctctcgccccagtggtgcgctagtgccaggtgcggcgagccagcagatcaaggaaaccgcccgtggccgccccaggggtttaggtctcctcacggcgacgggagagcgcgagccaatgtggagcgattagttggtcgctgctgccaattgttctgcgtgcggcttgataatttatttcctctagactgtagaagtttcacttcctcttgaattttaggcccaggataaacaaaagctttccttttcactgcaaacaagtactcctaatcattggaattgacaacatgtaagctgtagacaaagcccaacctaacccacgactctgctttttgcttcgtgctgcgttacatctgcactggctgctgctggtgacaagcaagaacaaccaaagctcttcaaatgtctgtccaggatgcaaacatgtccagtgacactgatatgagtaaggtgtttgaagacagaacgtttgtgtcatctatccttaattcggtatgtattattcttaaactaatggcatacaggtacattttagctgcagcttcaagaatttattggcccttttatgtgtaaaataacagtttcctggtgttgatcccaatgatccatctgttaaagatttgctggcatcattgcacagccagaaagaggtatgttcttttttgggttccagtgaaggtctctgtattgtgatgcaatgaaattcatgttgcctctagactatagcattgttcagtttcaccttgactaaataagaataaatattttatctatcaccaaatcttcatgcaaatacacagttagtatatgcaagtaatggctatgcacacctacaaaaaaaaccattgcaagatttaataattgtgatgcatgtatgcaaatacacaaatcttgactagtctagtaatgcatgtatgtggaaatatgaaggtttctttatttctcttcttaaacaggaagagaagaaggaagacaagtcagacaaaacagaagacgagaagaactgcttcaagctggagtgatgtcgctgtggtgcttttgtgactgatcatctctggagcttttgtgaatgatgtagctagctatctgtaattgatctagttgtgaatgatattataattgtgatacttttgtgaatatataattgtggtgcttttgtgtttaaaaaaaaaaaaaaaaaaaaactcgagggggggcccg

SEQ ID NO: 161455 - DNA, 352 bp, Zea mays
  Clone ID: MRT4577_78826C.1
ggacaaatataataactcctttcaagcttcattgatttcaactgatcatagagatttcagagtacagaattcgtttttacaaccgccaaaaaattcaaaaggaaaaacaagttaaaaccatttttactaatattcagaagctggatttttactcctttacatcctcaaaaatccatgaagcattggttcaatttggtgaaaagaccctgcattatccgagccattttattgggagggcctcatatttacatatgctatttaataataatagggggccatgcatattatgatatgattgatgattccctttgggaaattaaaatctgggttgccgtttgtacaaaaattaaac

SEQ ID NO: 161456 - DNA, 1524 bp, Zea mays
  Clone ID: MRT4577_78827C.1
atgtaccgagaggcgttgtggcagaagagaggtcgtcctcgggagttatatccggacgtatctagtaaggatgctcctgttcctcctgaactccccgtgcctaactgtgactgtggcagactggcttgggtacatcaatcacaacatccagacacggctgctcgctgctactacctttgtggcactttggacggacatcagaagtgtttctttttccagtggatcgatggtcctgataaatttgaccctcgatatcttcttttcgttaattggttgagtggaaagaccagtcatgagcgttttaagcgttgggtacctcctcccccgaatcctccaccaatgacggatgcggagaaggaggtagcaacagaaagacggatggactcaccgcctcgatgcgattgtggagaccgtgctgtcatcgacgaagactatgacaagcagttctgttgtccgaacattgattatccatacgggtggcgtaagtgtcgtttcagagagtggttgtatggtcctttgtcccattggccagagccagaggtaaaggaaaagagatacatggggtgggcggcagaagaggtcaaatttgatccagtactctgcaaatgtggtattgaagctaagtatggattagttccttcggagcttggtgttggatatttttgtggacatatggtcgattacgatgaggagacgaggaaatgcagttgggagagttacgacgacaaaggagaggtgatgcgcacaatagagtccaagagaataatgggacagaagatgcgttgtggatctcggctcgttgattcgtacattaacgatcgcatacgcgacatgcgtagggaagcaaaatctgccttttatgatagcccgaagcgtgcagagtataggaggttgaaggcggcagatgagaagagagcacaggatgcaagggaatgggaagcggctcaagccgagaaacagatgttggataatcttgctgatcgcctcaagggaaagattggaagcggcgtaaactatttggccgatgaggcgcatgcgagatatgttcaggataaaatggcaacggttgagctgatggaggaggaggacgacgacacatctagattgagtgagcttatcgccctcgcagaggcaggattacatgaagaagaggaggacgacatgtcaaggttgagtgagctcatagcactagctgaggcaggattacgtgctcaagaggaagaggatgagtttatgtcacaggccgccgcagaggtagaggcagcttattacaagaagaagtctgatgaggctgaggctgaggatgagctattctcccaagctgcagatgaagcagaagccaattattacaaaagaactggtgacaagtgtgatgcaggacaatgcagcaagtggaatgaggttgttgttgaggattgcgcgacggatgactccgaagatgagttactcatagattgtgattcagactgaagaattgtagcctgttatgtagtattttcgtatcccaaataatttagaactcta

SEQ ID NO: 161457 - DNA, 1977 bp, Zea mays
  Clone ID: MRT4577_78828C.1
ccggactagaggtcctctacctaaacactagcagccgcgctccctgcttctctcccagccgccgccgactctatctctcccttccctctcaccacctcctcgtcatcctcagcgtgcacgctgcgcgtggccgtagtggggggtggccccgcggcgcgtcggctgccgaggcgctggcctcgccgagggcccggatgcaggtgctctcccctaccaacctcgtcgctgacttctcccgcgcgctaccgcccggggcacccatccccatgctccgccgtgaggtgctccactccttcctccgccgtcgaggctgagctcgtccagggcctcatcacctccgccgtgaggtgctccactccttcgtcgtcaagctctcgccccaggggtgcgctagtgccagatgcggcgagccagcagatcaaggaaaccgcccgtggccgccccaggggtttaggtctcctcacggcgacgggagagcgcgagccaatgtggagcgattaattggtcgctgctgccaattgttctgcgtgcggcttgataatttatttcctctagactgtagaagtttcacttcctcttgaattttaggcccaggataaacaaaagctttccttttcactgcaaacaagtactcctaaccattggaattgacaacatgtaagctgtagacaaagcccaacctaacccacgactctgctttttgcttcgtgctgcgttacatcttgcactggctgctgctggtgacaagcaagaacaaccaaaggtatttttagtttatcactgtccatcagttgaaactaaaaatgccctgacctgcctcaaatgcttaactttataactgataaagtttccaatcacaagatttacttaatttatactattatcttctgttgcagtattgattataaatgttgcaaacttgcaagtaccaacgactcttttcaattaaaatgctgattctattttccatttctactatttgtattgtatattatttattggatagagattagccgcgaattccatgcggaggccagagcacctgtaatgattctggggcagtttttttgcgcgcagtaaagaagtctacataattgccaagaatcatcttcatccatggggatccggtaaagcagcagccccttggctgggtaacctactgtgaagcatcaggtcagcagtgaaggagatctgagttcgaagcaaatttgccgcgaattctctccggaaatcattcgagtggctggattttgaagcgcagccatgggatcggaggattttgtctgtaaaatgatgtgattcggcgggtgagagactggttcttccgggtccattgtagcagcagtccttttttttatctccttagttttgttggagttcttccgggtgagagactggttcttccgggcccagcggcgggtgagagactggttcttccgggtccattgaagcgcagccatgggatcggaggattatgtgaaccactgctttctagtgacactgatgtttatatgtagctcttcaaatgtctgtccaggatgcaaacatgtccagtgacactgatatgagtaaggtgtttgaagacagaacgtttgtgtcatctatccttaattcgcttcctggtgttgatcccaatgatccatctattaaagatttgctggcatcattgcacagccagggagaggaagagaagaaggaagacaagttagacaaaacagaagacgagaagaactgcttcaagctggagtgatgtcgctgtggtgcttttgtgactgatcatctctggagcttttgtgaatgatctagctagctatctgtaattgatctagttgtgaatgatattataattgtgatacttttgtgaatatataattgtggtgcttttgtgtttatgtgatggatctatgactgtggtatactgattaattgtgtatgtctttatgattcgtgtataaaaatctgtgatttgtggtgctt

SEQ ID NO: 161458 - DNA, 728 bp, Zea mays
  Clone ID: MRT4577_78829C.1
agagccgagcctcccattcaacggaagcgtcactcgtggcgtcgaaacggatggcgccatatgcgcggaccagtggacagtcccttggaagaaatctcttgattgcgcgccaatcagctagagaaaagggctccgtccctcagaagaagaccgccgaacccacgcccgcgacactcaccggctgctgccgatggacactgccgttgccgttgccgttgccggcgagggcgggcgcgtcgggcaacggcgcccgggccgagaagaagcagcggggcagcgtggtctgcgcgtgcagccactccacggcgtccacccgctgcgtgatgggcacctcgatgcggatgatgccggagggcgcggccggtggcgctgcgttggaccagagcgcgtccacggcggccctgagccgccccactgcgtcgtgcggcgccggcgcggccggcagcgcccgcgtctcgcgcacgcacaccgcgccgcggtccccggcgcccggcgcgcacccgttcatggacagcgagcacgacaagcgcgcccatctccccaccgtggtggcggacgccgggcgcgcggcgagcagccggcccggggagtagcgcgaggaagacggtggcggcatcggtgcgcggcgcgggcgggccggacagcacggcgcgcaggaacactagcagtgcagcacagcggcacgcgcacgtcgcgcctccttcgtgagtcgcgagaagagataagag

SEQ ID NO: 161459 - DNA, 210 bp, Zea mays
  Clone ID: MRT4577_7882C.1
aaataatatctttctttgctttagagcggaaatgccaactccgcaacacagtggttacaagattttaagcatgcgctggaccaacttaaattgacctcaagggtcgggtttctcacaccaccaaagggctaaaaccctgggctggcccagtttaaacagggaaaaaagaatctgggttttgcaaactgacgggccggaaataaggcaaga

SEQ ID NO: 161460 - DNA, 370 bp, Zea mays
  Clone ID: MRT4577_78830C.1
catcgatgatcatagagtcgatgaccagcagaaaacgcaggtatgttaacatattctttgacgtcattcttgttcagatatgatttgatcattgttgctatgtgcaaaaatatttaatatttattgttcataagaagcaggcaccgcacacagcatcactggctatatgtgagaatgctcaaaacgatggcaatagaatccttgaatcaatggtgtatcaggtaacatgattatacataatatttaaaaaattactttgtgttgtgtaatatgattttgttaacaacccatttaacattaggaggttattaaccttacccaacttttattggttcttgaagtggaatggcttttgaattccgagaaaatg

SEQ ID NO: 161461 - DNA, 1577 bp, Zea mays
  Clone ID: MRT4577_78831C.1
cgggaaacactccgcacagcatgaggccaccgccaccttcattgccgtccctgcgctcttccgtcttggtcctcgtcctgctgccgctgctggccgcgtgctcgtccccggccagtgggagggccgtgccgttgtctcctgggaccgcctccgttgctcccgcgccgcctcccgtcgtgatcatagtggagcggcgcaatcgtttccaccgggagctagtcgtcgcctccgccctcgcctccatcgccatcgccgcgattatcctttccgcgctgtacgcgtgggtcctgtggcggcggtctcgccggctgccccgcggcaataagggcgccaggagcgcacacaccgcgagggggatcatgctggcgccgatcctcagcaagttcaactcgctcaagacgagcaggaagggggttgtggcgatggcgatgatcgagtacccgtcgctggaggcggcgacagggaagttcagcgcgagcaacgtgctcggtgtcggcggcttcggttgcgtctacaaggcagttttcgatggcggtgtcgccgcggcggtcaagaggctggaagcaggcggccctgaatgcgagaaggaattcgagaatgagctggatttgcttggcaggattcggcaccccaacatcgtgtccctgctgggcttttgtgttcacgaggggaatcactacattgtttatgagctcatggagaagggatccctggacacacagctgcatggggcctcacatggatcagcgctgacctggcatatccggatgaagatcgcactcgacatggccaggggattagaatacctccatgagcactgcagtccaccagtgatccatagggatctgaagtcatctaacatacttttagattctgacttcaatgctaagatttcagattttggtcttgcagtgaccagtgggaatattgacaagggaagcatgaagctttctgggaccttgggttatgtggcccctgagtacctattagatgggaagctgactgaaaagagtgacgtatatgcatttggagtggcgcttcttgagctactaatgggaaggaagcctgtcgagaagatgagtcaaactcagtgccaattaattgtgacgtgggccatgccgcagctgactgacagaacgaaactccccaacatagttgacccagtgatcagggacacgatggacccaaagcatctgtaccaagtactgtctcgatagcctgttaatggtcttttacttcatatgaatttatccttccaaccatcttgattgctattctgtacctctgcaggtggcagcagtggcggttctctgtgtgcaaccagaaccaagttacaggccgctgattactgatgttcttgcttaacttcataactgatgaagtttccaatcacaagatttacttaatttatactattatcttctgttgcagtattgattataaatgttgcaaacttgcaagtaccaaagactcttttcaattaaaatgttgattctattttccatttctactatttgtattgtatattatttatttgtattaatagttaatgtagttcaagtggactttagaacact

SEQ ID NO: 161462 - DNA, 333 bp, Zea mays
  unsure (1)..(333): unsure at all n locations
  Clone ID: MRT4577_78832C.1
gctgtcatcaagccttncaatcggggtgtttttcatctggttcagggtcagcacaagttctagtgttagcttcttgggggaaagaaaaaaaagaaggaaaaaaaatccaagaaagttcttgaaaaatgaaagaaaaattgaaaatcaatttgaaaaagcaaaaaaaaaagtattcacaattggaaaaaaaatagtgatgatgtcataggctaggaattattccccaaggtaaccagcatataatggttcaggctacatttatggtactgattatgagttgttttcatttgcctattactggctatagcatgtaaattttgatcttcatatttt

SEQ ID NO: 161463 - DNA, 814 bp, Zea mays
  unsure (1)..(814): unsure at all n locations
  Clone ID: MRT4577_78833C.1
accagattaggcctctaactcttgttgatcacaagtcatacctttgatcatttgaaaaccacagcggctctttctgattatgtcaactagccgagtggatggaagatccnnnnnntgctttggaagtctcacaattatggataataaggcatccattatcataaaggaaacaaaggaaattgaaatcagaaggaaacctgccaatccagccaaggagattgaattgaacacttctcgtgacattacgtgccacatgcttataccttgatgacaaatacggaagggctcacaattgtggacatccggaggaaacaaaggaaattcaaattacaaggaaacctgcaagtccaagnnnnnatatgcgaaattcagcagtggtagatagacatacactttgcactcctgatgtcttcgccattaacctgaatctgcacccaaagagactgaactgaacacttctcctgacatgagcgctgcccgaaggccccgaactgctgtgaccgtcagggatctagttagaacatgagaaagaacattattattatctcctggatgtccaaggcatcggcggcacaaagagaccgtcagggacgatgaagtgtgtgaggtctcagctggaagtataatcattgattcgatctcgctcgtggttgagaatttgaatctgtagccaaacggaccgagtatataagaacaatgaaaatacagtgtgttgaaggtacagtagttgttctagnnnnnnatggaagggttccattaaaactaggagtgctttattaagtcagggataattgnnnnnnccgtcttccataaa

SEQ ID NO: 161464 - DNA, 340 bp, Zea mays
  unsure (1)..(340): unsure at all n locations
  Clone ID: MRT4577_78834C.1
cctcgaggccggccggtatagacctgcagatgccctagaacatctccaagatagcaagggaactgatctaccagaatcatttacagtgaagaagttaagggagggtgacaacgatgatgtaggaaacattgtctcttcaagcaatatttttgcggataggtgcaactccgaaacagcagctggcatccttaggcggcgcttcaggacgagtgatattcaaccgtgggccgacagtggcacaattccggagcacactcaggggggcggtcnctgaggagggtgcggtgcaaaggaggaactgacggtggaggtcgaaccagcaggaatggcagcacacgag

SEQ ID NO: 161465 - DNA, 378 bp, Zea mays
  Clone ID: MRT4577_78835C.1
ggcagcagctttattgcttttgcatataaaaaaaaaggactgttgggggaaactgcttcccgtaagggaacatttcaaacccgaaaattaaacatgacctcagggggagtggagtttgcttttttacgattatataaaaaaaaacctgggtatcctcagctaaaatttcgtttttttgaggaagaaattttttttcatcagccaaaaatttccatggctttttttccaaaaaagcacaattgcccaaaacagtccggcagggcagcccaacgctggggcatgaatttatttggcaagcagcaccctccgggggtcctcgacaacatccttgatgccccgaaaaaaaaaaacagcctttttgccatcgataaacctggg

SEQ ID NO: 161466 - DNA, 407 bp, Zea mays
  Clone ID: MRT4577_78836C.1
ggaacacaaatatccctgggggagggaacaaaagttaacataaggggacaaaccgaaaaccagggggcgcccaaaggcatccggcccccaaagagggcaccgggggggcctccctaactggccggggacaaagggggggggggaggcccaagcgtggggggggacgggggcggaaagggggacaggggggttttcgggggggcccttcccggggacgagggccgggacaaaaaatcccaacagggaaaacagggggggggggccgttcttgggccccttgaccttgagcccggaaaaggccttgggggcgtgggggaggccgagggggacaaagctgcccccggggaaaagggggtaaacaccctccccgggggggccgccgggaatgcggaaacccctaaggggcc

SEQ ID NO: 161467 - DNA, 168 bp, Zea mays
  Clone ID: MRT4577_78837C.1
gcctttaccagaattcttctagagcaccgagaagcaccatgtttccggtaggattaacaacacaacacaaggctgacaggagcagcaggatgaagcgattcgacaagtacatgctgccgaagcatgggtctgctggcgccgaggttgaacacagcactaacaacttga

SEQ ID NO: 161468 - DNA, 421 bp, Zea mays
  unsure (1)..(421): unsure at all n locations
  Clone ID: MRT4577_78838C.1
cccacgcgtccgcccacgcgtccgcccacgcgtccgcccctcgatccccctcaatccatatggcggnggggggggggcgatgcttgcggttgcgctcgtcgccattttgatctccagcattgtggtcgccgcctcattacttggatctccgacgcgcgcggtggtcgggtgggcgatgcttgcttgccattgtgctcgtcgtcgcttggatctccggcatggtggtcgccgcctcatcgtcgggtgagcaggtgtcctaccgtggcgactggatccgcgtccagcccgtgcccggtgccttcgtcgtcaacttcggccacatcttgtgactcacatttctcatgtttttgaatatgtatacaaatataaatgttgcagttaccctttcactgacatggttgatagacagatttacctcata

SEQ ID NO: 161469 - DNA, 821 bp, Zea mays
  Clone ID: MRT4577_78839C.1
tcggccgggatcagtattcgatactcgttcagttaggcggttgcaagcaccgttcacacatattcatatatataccaccagcattgtacattctgctgctagccagcttcgtctttactgttcctacacagactactttatacaccgctgccggacagtctctttttttttaacacgactatctttttgataaatctaccacgatacgctatattccacaaacgccatcatgaagttcgacactagcattcttcttgcctctttggctgcttccgccgctgctgctccggcggctaggcccaacaatgttgctcttgagaagcgctttcctgacggaaccgcagcccagcaactccccgcacacttcatttccactgtccgccggctcacaggcgagaagattaagaccaagcgtcagctcgatggtctcctcggcagcctaggtggtggcggccttggtgatcttctcggaggactgactggcggcggcggtggcaacaaggaaaacgctcaggcggattctggcaatgctcaggagggttctggtaacgctcaggaggattcaggcaacgctcaggaggagtctggcaacaaccagaatgccggtgccggtgctggtgccgagaacggtgcagctaacaatggcactgaggctgctggagctgaaaatgctgctgcgggtaatggacaggctcagattgagggtgaggatgagcaggcccagggaaatgccggtaatgaaaacgccgctgaggaggatgatatttgagatcaatgggttcgcaggaaatgatgcccaagctgctggacagcaaaatgct

SEQ ID NO: 161470 - DNA, 917 bp, Zea mays
  Clone ID: MRT4577_7883C.1
gccggccgggtcgggaactaccacggcacggcagcacgagtagatccgagaatctggcaatgcatgcgtcctgcactcctgctccacctcgattcgtccacagcacactcccaaaaccagagccacgccggtcggcacaccgtcgcctcctttgactagcctcgccgccgcagcgacagccatggccaccgctgcccgctccctccacctccctggtccgacgcctcctaaatcctctaccccctcctcccaccgcctccctgtcccttgccacctccgcccccaacgccgccgcctggccgcctcgtcctccgacctcacctccttccccgaaccgccccccgccccgaacggcgtctacgtgccgtgggcggcggcctcctccgtggccgcggccgcggcctccatcgtcgtggacgccgccaccgaggcggagctgcgggagaacgggttccggagcacgcgccgcaccaagcttgtctgcaccgtgggccccgccacctgcgccgccgccgagctcgaggcgctcgccgtcggcggcatgaacgtcgcgcgggtcaacatgtgccacggcgaccgcgagtggcaccgcgaagtcatccgcgctgtccggaggctcaacgacgagaaagggttcgcggtcgccgtgatgatggacaccgagggcagcgagatccacatgggcgaccttggcggcgcgccctccgcgaaggccgaggatggagaagtttggacatttagtgttagatcttctgacacgtcgctcccagatcgaatcattcatgtgaactatgatggctttgctgaagatgtcaaagctggtgatgaactatttgcggaccgtggaatggccaggtttgaggtgatagaaagttagggccagatgtgaagtgccgctggactgatcctggtctgtt

SEQ ID NO: 161471 - DNA, 268 bp, Zea mays
  Clone ID: MRT4577_78840C.1
acttaaacagaacagcggtttattaccttagaaaacgcttacccccaccttttcattcacgtctgccggttcctgttttttttctacaaaataagtaagagcaatgtcaacactcctgcacacaaaccgatcactcacttcacccaaaaatcaacaactaagaacgatcgaccgcccccgatctaaacatacacatgtgcaggctctattgtttgtttggaggaattccctaattatcctccgccccaccatgattttcttactggac

SEQ ID NO: 161472 - DNA, 340 bp, Zea mays
  unsure (1)..(340): unsure at all n locations
  Clone ID: MRT4577_78841C.1
gggtctaacttggtgcgaagcaatgtaacaagatggtggtagcgaatatctgtcggagtgtaaacccaaaccgtttacccggacctgngcccaacactctgctctatcctcatagnaaaccaccgnctgaattgggcggttatggggagaggatttgtggcaggtagggcgcttatccgttggccagatgattgcggttgtcaaccgagtgccgtgaggctggggcgaggatgagatgttcntgctgtcgcggctcaccatggtggtnggntcccgggtacaaccgnaccaagtcgttgttcgggggcttgctcggggtcgtgttgaaggccgttggtct

SEQ ID NO: 161473 - DNA, 237 bp, Zea mays
  Clone ID: MRT4577_78842C.1
cacgcggcgcggggatacagaggcccttcgcggcgcctcccgccaccaagcggttgctgcgagcgaggccggcggcggctggagctgagagtatcccagatctgagcccgccttccggtggcgttgcctgcctccccttcccccacacgcggtccagcggccgcctcctccgacgggtgctagccagtgcgaccgcttcgtgcgcgctgtgtccccgctctcctcctccgcctgccc

SEQ ID NO: 161474 - DNA, 544 bp, Zea mays
  Clone ID: MRT4577_78843C.1
ccggccggggtccgtactacccatgtaagcgatcggcggagcagagagagactttctcgcctccattccatcccgccgccggcgtctctacggtcgttaataagccgccgcatccagggatggagatgaagaagagcgcctgcgccgtcctcgtcgccggctctgccaccgtggcgctggccgcggaggcgccggctccgtctcccaccagagtctcctccgcggacgcacccttcatcgtcggtgccggcgtggcctccttcttcgcgtactacattcgctgagacgccggacgatgatccggagacggaggtgagagagcaacgtgacgggagagacttggatgcgctgtgctgctctgctgctcgctgctattctcgatgctggtgcgaggtctgattgggctcctccgttggtatagatacaccttcgccttacttttgtaagggttctttcctgcctcttctcgacttgaatgtcattaaaggaattggaatcgctgatgcaccagatttctttgcagaactgctgattggatctttcc

SEQ ID NO: 161475 - DNA, 574 bp, Zea mays
  Clone ID: MRT4577_78844C.1
ggtgaaaatattttcattattatctttaacaaaacctgtgccagattgaaagcagcacacgacgacatgcagacaagccagcatatgtaacccaaggacattgaggtgctgcttttgtagcgtacatactgcatattgtggcgtaaggtacacaactacaactacaacatggaactgtgggacactagactaactgatcactccctggtgcatgagctacttctttattattagccagtctgatacatgacacacacctaggtaggacatctttgattcgaccacaactgcatgctgttgatggccacgtactctgacatccaactagcgagctacctctactatggttcaatctatcagtttatcttgcagcatattaaagtatagctaataggcacaccaactgacacgctccacttttcgtagatgttggacgacttgggcatactgacacctgcgtcaagcctgtcacttatgctatagacgcagttgcacgtaggcttgcatttcgacagcaactacgcgcagctgtttgattagcgcaccactgtgcaccacgcctcggggggcgaca

SEQ ID NO: 161476 - DNA, 303 bp, Zea mays
  Clone ID: MRT4577_78845C.1
cacgggaaaacaaataacaccatgaaatcagctggggccggttaatcccaaaatcaacaatcctgcaaaagttttaaaaccattgccaggttataaaatttttttaaaaaaaaaaactttcatccaagggaagttccacaaatggttagtttcactgctattgaaccaccttccaacccttaaggtcctaagttgttattccaaatccccctaatcgagctatatcctacgataatggccctgcctgcagaaaaaaagcagtttttcccaccaaactttaatgtgtaagtttgaaaccaattt

SEQ ID NO: 161477 - DNA, 275 bp, Zea mays
  Clone ID: MRT4577_78846C.1
gacgacgaagctcctgcaggacctgcacgaagcacaggcggagcgcggcggctctcggccgtcgtccaacctcagctccctgtccaacgcctccgagagggaccagcaccacctgggaagcccttctcgcctgagtgtcggggagcaccagacgtcacccacgacccctatgagtttcttcagtctccagagcctgcggcctctgccaagacctaactctagaccaccttcagctcttttattttatttttttagttttattttgcacgtgtaga

SEQ ID NO: 161478 - DNA, 209 bp, Zea mays
  Clone ID: MRT4577_78847C.1
gcggcgcgggctgttctattctttttttttttcttttaggacaaaaacgcttgtgattcctcaagtatatgacagacagttacaggctgtttctcgaagaacagcctacttgtataactcatgtcacatactgttttttttttgtcaaaaaaatatttaacaagtgatgatagacccctatcattaaaaaaaatgctggctccacctcc

SEQ ID NO: 161479 - DNA, 373 bp, Zea mays
  Clone ID: MRT4577_78848C.1
ctcacacgtacgcggacgcgtggccggacgcgtgccactgccgtggggggaacctaacatgatccacgtcactcctcgactgccaggctgccatggcacgagacgtgccgcttcgactgattactcctagagctcgacgacaccgtgtaccgacaacgacaccggcatcgtcactggacctgaggcgcaacatagacaagttccttcaggccaaactcgaaggatctgccgacgaggcctgaaacacgcgcgccaagctattacgcgcgcacggcagttacctaggcggactcatagagctaggatacgacgtgcacccggacgaataccacagctacatgcacggtaggctaccgtacgacatgatcgcgcg

SEQ ID NO: 161480 - DNA, 315 bp, Zea mays
  unsure (1)..(315): unsure at all n locations
  Clone ID: MRT4577_78849C.1
cnnnnnnttttttttttttttttttttttttttttgagcggggaaaacctgacccggggcatgtatcacacgccatgagcacaggtcatgaatccttagggggttacatggtcacaacaaagtgcaaaacacacgaagcacaggggacgcagatctcccacatagctagtggggggggaatttattcctgcaactgaaagcaacaatctggccatctcaaggtgcagggggcaagaggaagcccgttcatgcatgtgagccccgaaaggaaaactaagtttgaactcgtcggcggtggtgccgcccctgaccacc

SEQ ID NO: 161481 - DNA, 348 bp, Zea mays
  Clone ID: MRT4577_7884C.1
tctctgtcttaaatgactagagttttttttttttgggatggagattcagtaaagatgacacagaaaccccccaaatgtaaaaaatgatcactgtgaaaaggaaatgcatgcgatccgcaggctaacaacaccgaaaagagggaacctttgcgccgccatgggagcaacaacggacacatcacatccaacagacacctgctaggaagcaagggtgccacgggaggggaaaagaacagaaaaacaggaaaagggggaagaatataccaagcaagcaaagggtacacagcgacacgaaccttaagcggaagacggagacaaccgacgggactagctacaaacttacgcacg

SEQ ID NO: 161482 - DNA, 181 bp, Zea mays
  Clone ID: MRT4577_78850C.1
cccacgcgtacagaaatacagttccaagaatgacagctatatattcgagcctgggatttatgagaggactgacaatttatctaattctattgtacaccagagcttttgctatacccaacagggagccatgttcgcttaccgtgattatcaagcagatgcggttactttacaactgtgacca

SEQ ID NO: 161483 - DNA, 441 bp, Zea mays
  Clone ID: MRT4577_78851C.1
ggaaaccagcttattaaaatttggtcccgccaggaatggggcggaaaccattaccattaccattggggttacatttttggaaccaaaccgccccaaagatttaagatcactttggggggaactccaaagggcctaagctccatttggaaaaaggggggtgggggccaggatctttgggggatccgggcttaaaagagggggaccattgcactaaaaactggatagggcaactggaagccaggttagccgtcctggccaaatgcatggcccaaagcaaaggcggcaaccagggggatgtatactatccgctccaccggaaccataaattctttttgatatggaggtctggcaaaagagcatagctttttttcaaacggcaccgcctacaaatatgggtgttttgggccagggcacttttcccaatttttttaaaacctaagc

SEQ ID NO: 161484 - DNA, 276 bp, Zea mays
  Clone ID: MRT4577_78852C.1
cagctcgagcggctcgagcggctcgagggacagtgttcgtactcatggcgccgccgcagccgaagacgggcctcaccgtgggcatcaacaagggccatgcctcaccaagcgcgagctgactctgcacccgtcccaccgcaaggggaaagcaacgaagagggtgaccatggtcaggggcctgatcagctaggttgctggctttgatccttatgagaagcgtctcaccgagcttctgcaaggttggcaatgacaagcgcggtctgaagcttgccaaga

SEQ ID NO: 161485 - DNA, 432 bp, Zea mays
  Clone ID: MRT4577_78853C.1
ttcccggtcgcccacgctcgcccgacctcccaaaaatctggcggtatcaatattgccaaaggaatagcgagggagaatggacattcaaactggatgggcactctatttctctgctgactcattcgacaggtattgttcacagaatataaaacctcaaaatgtgatatttttatagttatcactaacctttaattatttaccttttatattatcttactcatttttttttattaatctaattcttatttaattttttattttttatttctttcttttttatttttttattttaattccttctttattaatttttctatttttttttttttttctaatcttttatattattctttatctttcttacatatttctattttcaatcacttttttttttttatttttttttttattattctttttttttttttttta

SEQ ID NO: 161486 - DNA, 488 bp, Zea mays
  Clone ID: MRT4577_78854C.1
ccggccgggacacgcattcccctccctcgcgctctctccccgctccgctgtcaccaaccccgcctgcctatttaccggccgcgacgcccaccgccgcacgccttcccacccacccccgcgcctgcctgctccccgacaccgggggcgccccccacgacgccccggccccgccacggcggcgaaagcaagccgggacatggcgcgcggcggcctcgcccgcctgctcgccacgctcatcctcttcctcctgctcgccgccggaccttccctcgccgagtcagaggcggacctcgcgcggggcgcgtccgaggcggcgccggacgcgcagcagcacctcctgccgcgcccgctcgtcatcgagctcccgtcggcgcgggccggggccgagctcgacgccgacgccgacgccggggtaacggtcgacgtgcgctgcgccagctggcggctcgcggccgaggccaataacctcgcgccgtgggcggcggggc

SEQ ID NO: 161487 - DNA, 143 bp, Zea mays
  Clone ID: MRT4577_78855C.1
tttgcagaaactaaaaccaaagggcgggcagccaagtgtgataggaacgcgtacagcagaggtggacatatatcatcactactcatgtaagcgccggaaaagacaaaggccctaaataaacgggtttgaggacatttctaaca

SEQ ID NO: 161488 - DNA, 239 bp, Zea mays
  Clone ID: MRT4577_78856C.1
cacgcttaacaggaagccggaaaaagcgtggacagtaccggaatccagggggggggcgaaatcaacgatgctcaacgctctcgtactccgcgcgccatccccgacgctcttgtcctggtctaaggtccgcagagccggaaccttttgttttaagaacccaccgcgctatctatccatgcgttctgagcgccgtgtccccctttcaaggacggaggagggcggtgacccctaagaagagt

SEQ ID NO: 161489 - DNA, 400 bp, Zea mays
  Clone ID: MRT4577_78857C.1
tcggaattcggctggagccgcgggccaaactctttctgctggtcgctggggcggtcccgggggggaatttttaaggggggatccgggttgaccaccccgaggtgctcacggagctgcccggcacgatcggcaacccggacggacacaccgtgataacctccatcaagtgggttacaagcgttaagacctacggccctctcagagcatggggggacgggagtgacactccgctcgcgatccccgagcagaaagggagtgccatcgatggcttcttgcacgagctggggcctacctggacgcccttggcgtttacgggcgatccctgggatcagatcctcaccagaggggccgcttgctgctctgctatgctccaccgggtttaatcgagtcacccttcggt

SEQ ID NO: 161490 - DNA, 257 bp, Zea mays
  unsure (1)..(257): unsure at all n locations
  Clone ID: MRT4577_78858C.1
gggggggagaagttaataaccgaccattgaccaacataagttttacgcgagatttcgcaagcaaagngggggaaaaaaacttacaaacatttgggcagcgtaaagtagacatatttctatagaccgacgatctttagcttcgatagaggcggcagcttcttatttgaagggccactggatatttctgaggaggttggtttacttctaaggggtgaaataaattttggtgggggagggtatgagaaacttttatgggg

SEQ ID NO: 161491 - DNA, 589 bp, Zea mays
  Clone ID: MRT4577_78859C.1
ccgcaactgcttagtataatgacacgcctttgcctgggtgagaaacttcgttttgcagtttaataataaacatttttagacaatttgggtcactctggttggacagggtacacaatccacgtctcagtatttttgttcttatggtctcggtattgaatgcctaggtgagttttttttagctgtgcacaaaaaaacagttaaactcgatggtatctcaactgctggagaaatgctagtgccctatttttggcaaaaaaaaaaaaaaaaaaaaaaaaaaaaaaaaaaaaaaaaaaaaaaaaaaaaaaaaaaaaaaaaaaaaaaaaaaaaaaaaaaaaaaaaaaaaaaaaaaaaaaaaaaaaaaaaaaaaaaaaaggggggggggcctttttaaaagaaccatttttacgaccccgggcttgcaacttaaaactttttttttggggcccccaaaattaaattacgggcccgggttttaaaaacgtggggatgggaaaacccttgggtttcccaaattaaatcgcttggagaaaaacccccttttccccgggggggttaaaacgaaaagggcccccccccgtccccctttccc

SEQ ID NO: 161492 - DNA, 304 bp, Zea mays
  unsure (1)..(304): unsure at all n locations
  Clone ID: MRT4577_7885C.1
gggccggactcccgggctcgattgggggaagagagcgagagacgaatcgcatcgaggcggagaggaagtcagagacagggaggagggcggcggagtcggcgccggcgggaggcaggcatggaggacctgagcgtggaggagctcgcctccaacctctccacctacaaagagcagctacgcgaggtcaagaagcttatcaaggagaaggggggggatnctnnaatttctnaatatatnnatatnnanaannacctncaanaanncataacnnnaaccnaaaanaannnnncaactncaaaacaaa

SEQ ID NO: 161493 - DNA, 1347 bp, Zea mays
  Clone ID: MRT4577_78860C.1
cactctttcagacccaaatgcgcagctgcaagctgctgcacaggcgccagttataaacaagcagaagttgcggttgtactcttcctcctccgccgtcggctcagatctctgcgtgcgggctagcgatggcgtcgttctcggaggctccccctgggaacccgaaggcgggcgagaagatcttcaagaccaagtgcgcgcagtgccacacagtcgacaagggcgccggccacaagcaaggtccaaacttgaatggtctttttgggaggcagtcgggtaccaccgcaggctactcctattctgcgggaaacaaaaacaaggctgtggtctgggaggagaacactctgtatgactacctgcttaaccctaagaagtacattcctggaaccaagatggtcttccctgggctgaagaagccgcaggaacgtgctgatctcattgcgtacctgaaggaagcaactgcgtagtataatgacatgcctttgccatgaagagaaaattcgttttgcagtttaataataaacatttttagacaatttgggtcactctggttggacagggtacacaatccacgtctcagtatttttgttcttatggtctcggtattgaatgcctaggtgagttttttttagctgtgcacaaaaaaacagttaaactcgatggtatttcaactgctggagaaatgctagtgccctatttttggctgtggaattggaaatctggaatgcatccattttgaaagacttagaagtaaaaaaaagaaaaagctcgctgtgatgggcaaggtcctaatttgaatggtctgtttgggaggcagtctggtacaacacctggctactcttactcttcggctaacaagaacatggctgtgatttgggaggagaacactttgtatgactacttgcttaatcccaagaagtacattcctggaaccaagatggtattccctggactgaaaaagccacaggaacgtgctgatctcattgcatacctgaagaatgccactgtctgacgaggatgctgctgtggctctaaagatgaagagcagcgattctcttttttgcagttaaaataatgacacgaatttactttaatttgacagactggataatcaagaaagctaagaactccaggtagttctgtaacggttttgtctattgctgggggtaaacaccacccttgaagagcttttgattagtggttgaaatgtgacatcaccataatacgtttgacctgacgagcatttaaacacacgtttgggaagcttttgattagtgttttaatgttcgtttttaaaaaaaaaaaaaaaaaaaaaaaaaaaaaaccaaaaaaaaaaaaaaaaaagcggcc

SEQ ID NO: 161494 - DNA, 748 bp, Zea mays
  Clone ID: MRT4577_78861C.1
attgggaccctcgaggccggccaggctcctctccctccctctccccctccttccccgccgccgtctaccagtacagctcgagcgaacgacgtctcgacagtcccgggccgctgagatcttgccgcgggagggagagcagcagcggcagcatcagacatgtcgtcggggcggtacatggcctactcgccctcgccgtcgaccaccccccactccccccgcatcgccggcctccgcgccccgtctgccgccgtggccgaacaggagaagtaccttgccgaactgctcgcggagaggcagaagcttggcccgttcgtcccagtgatcccgcatagtgtacgcttgctgaatcaaggaggattatattcaaatggagcagctactgacatgaatgtgtggacatcagcatttcaaccagaaagttcaccagcttatagctggcttggaggatcccagggcagctcctctggacttattgtcaagaaaacaatgaaggtcgatatcccagtagacaaatatccaacattcaatttcgttggccgcatccttggtccaagaggaaattccttgaagcgggtggaggcaaatacggactgccgtgtgctaataagaggtcgtggcagcatcaaagatccagcacgggaggaaatgatgcgagggaagccaggatatgaacacctgaatggacccctccatatattggttggagcagagctacctgttgaaatcattgatgcgcgcctgatgcaag

SEQ ID NO: 161495 - DNA, 363 bp, Zea mays
  Clone ID: MRT4577_78862C.1
ccttaatcccctttttttttttttttttttttggggtttttttttggggggttttccggtttttttctttccccccccgaaggaaccgaaattgaaaacaaaaaatccgggggccaaattgcaaaccctttggacagaggcccatacccccaccctaacctgaaacacacccccattctgctacatgaatggggccccaagaaggcaacctaaacagaaccctttaaggtacaacggggtaagccctacagggacttacaagaaaattcagcttttgcccagttaagggtccccagctcctaatcaaaaacccaagaaacccagctcaggcgccctttccttttaaaagggttcgaagaattg

SEQ ID NO: 161496 - DNA, 345 bp, Zea mays
  Clone ID: MRT4577_78863C.1
ccggccgggctcctcgccctaaactaaaaaaggtgaccgtccccgaagcccaaagccaaaaattcccccaccccaaggccgaatcctactgcagcctgctcgaaaccctgctttctactactgaatgcgtcaaccggagtaccaaatcgtagcggaaatcggattgcttgatctggagactgagctgaactccagtccgagagctattcgctgatttttccagcgggaaggcgccgatttttgggccgtaggctggggggaacgaagcggggaattttgatacggactgggttgctgggatagatcggaccatggaagcgaggcaatacttgggatgcttgatgt

SEQ ID NO: 161497 - DNA, 1572 bp, Zea mays
  Clone ID: MRT4577_78864C.1
ggaccctcgaggccggccggggccgggctctactcgctccccgcgggcggccacgcgcacccatccatataagccctcgctcaccccctccaactcccgtctcctctccctccctccctccttccccgccgccgtctaccagtacagctcgagcgaacgacgtctcgacagtcccgggccgctgagatcttgccgcgggagggagagcagcagcggcagcatcagacatgtcgtcggggcggtacatggcctactcgccctcgccgtcgaccaccccccactccccccgcatcgccggcctccgcgccccgtctgccgccgtggccgaacaggagaagtaccttgccgaactgctcgcggagaggcagaagcttggcccgttcgtcccagtgatcccgcatagtgtacgcttgctgaatcaagaaattttacgtgtttccacactattggagaacgcatcccttttaaatcaaagtggccttgaacatggtagtccactaacaacaggaggattatattcaaatggagcagctactgacatgaatgtgtggacatcagcatttcaaccagaaagttcaccagcttatagctggcttggaggatcccagggcagctcctctggacttattgtcaagaaaacaatgaaggtcgatatcccagtagacaaatatccaacattcaatttcgttggccgcatccttggtccaagaggaaattccttgaagcgggtggaggcaaatacggactgccgtgtgctaataagaggtcgtggcagcatcaaagatccagcacgggaggaaatgatgcgagggaagccaggatatgaacacctgaatgaacccctccatatattggttgaggcagagctacctgttgaaatcattgatgcgcgcctgatgcaagcccgcgagatccttgaagatctgctaaagcctgtggatgaatcccaggactacttcaagaagcagcagctacgggagctcgcaatgcttaatggcacccttcgtgaggaagggatgcagagatccggttcagcgtcccctttccacaacagccttgggatgaagagagccaagacaagggggtaatgaacaaagctgcaagcatcatgaaggcagaaccaaatgaatctattctgagaccgatcctgtgtgcacatgggattgccttgcttggctattgtactggcccagtacggcctcgagccaccagcatcggggcggccgtaccctgataaaacatatatatctggagttgtgtttgctgctaccgggggagttcggttatgcgccataggttgttcgctatatattgggttgtgcgggattttgtagcaatgtggtttgtgtgatgctcatttggagcgtttgagagctctcggctcgtatttcttatcaagatagtatttaagggcgctgtttgggattttgaagcaatgctctaactgtctctgtacacgacaaacatggaggcttgctatatttcatgaatctctcgtttgctgctatcaatcactgatgcatactagtaaagtgatggcgtcttcagttgaaaaaaaaaatccatattaaa

SEQ ID NO: 161498 - DNA, 999 bp, Zea mays
  unsure (1)..(999): unsure at all n locations
  Clone ID: MRT4577_78865C.1
gccggccgggtcgggcagttcacttgttaccgcgggcggcgcgcttaccactactctctactcgctccccgcgggcggccacgcgcacccatatggccatataagccctcgctccaccccctccaattctcctctcctctccctccctccctccttccccgccgccgtctaccagtacagctcgagcgaacgacgtctcgacagtcccgggccgctgagaacttgccgcgggagggagagcagcagcggcagcatcagacatgtcgtcggggcggtacatggcctactcgccctcgccgtcgaccaccccccactccccccgcatcgccggcctccgcgccccgtctgccgccatggccgaacaggagaagtaccttgccgaactgctcgcggagaggcagaagcttggcccgttcgtcccagtgatcccgcatagtgtacgcttgctgaatcaagagttcaccagcttatagctggcttggaggatcccagggcagctcctctggacttattgtcaagaaaacaatgaaggtcgatatcccagtagacaaatatccaacattcaatttcgttggccgcatccttggtccaagaggaaattccttgaagcgggtggaggcaaatacggactgccgtgtgctaataagaggtcgtggcagcatcaaagatccagcacgggaggaaatgatgcgagggaagccaggatatgaacacctgaatgaacccctccatatattggttgaggcagagctacctgttgaaatcattgatgcgcgcctgatgcaagcccgcgagatccttgaagatctgctaaagcctgtggatgaatcccaggactacttcaagaagcagcagctacgggagctcgcgatgcttaatggcacccttcgtgaggaagggatgcagagattcggttcagcgtcccctttccacacagccttgggatgaagagagccagacaaggggggtatgaacanagctgcaagcatcatgaaggca

SEQ ID NO: 161499 - DNA, 1588 bp, Zea mays
  Clone ID: MRT4577_78866C.1
cattgggtacctcgaggccggccgggacgccccggctactattcacttcacttgttaccgcgcgcggcgcgcctaccactactctctactcatcactcccccgcgggcggccacgcgcacgcacccataaaagtcctcgctccaccccctccaactcccgtcccctctccctccctccttccccgccgccgccgccgccatccaccaggtcagctccagcggacgacgtctcaacagtctcgcgccactgagatctcgccgagggagggagagcagcaggcagcagcagacatgtcgtcggggcggtacatggcgtactcgccctcgccgtcgaccaccccgcactccccccgcatccacggcctccgcaccccctctgccgccgtcgccgagcaggagaagtacctttccgaactgctcgcggagaggcacaagcttaccccgttcatcccagtgatcccacatagtgtacggttgctgaatcaagaaatttttcgtgtttccacactattggagaacgcgtctcttttaaatcaaagtggccttgaacatggtagtccactaacaacgggaggattatattcaaacggagcagctactgacatgaatgggtggccatcagcatttcaatcagaaagttctccagcttatagctggcttggaggatctcaaggcagctcctctggactcattgtcaagaaaacaatgaaggtcgatatcccagtagacaaatatccaacatacaattttgttggccgcatccttggtccaagaggaaattccttgaagcgggtggaggcaaatacggattgccgcgtgctaataagaggtcgtggcagcatcaaagatccagcacgggaggaaatgatgcgagggaagccaggatatgagcatctgaatgaacctctccatatattggttgaggcagagctacctgttgacatcattgatgctcggctgatgcaagcccgcgagatccttcaagatctgctaaagcctgtggatgaatcccaggacttcttcaagaagcagcagctccgggagctcgcgatgcttaatggcaccctgcgtgaggaagggatgcagaggttcggttcagcgtcccctttccacaacggccttggaatgaagagagccaagacaagggggtgatgaagaaagtcgcaagcatcatgaagggagaacttaaatcatcatctattctgaggccaatcctgtgtacgaatggggggttgccttgctggctactggcccaatacggtctcgcgccaccagcatcgcggcgcgggcggccgtgcacgataaaacatatatctggagttgtgtctactgggggagttgagtttggttatgcgccatgggttgttacgctatatattgggctgtgcaggcttttgtagcaatgtggtttgtgtaaatgctcatttggagcgtttggaagctctcggcttgtatttctttcttatcgagatagtattcaaggacgctgtttgggatttgaagcaatgctctaaactgagacaagcatggaggcttgatctgtttcattcgaatctcttgtttgacactatcaataaccagtgcatat

SEQ ID NO: 161500 - DNA, 888 bp, Zea mays
  Clone ID: MRT4577_78867C.1
attgggaccctcgaggccggccggggggcggccacgcgcacgcacccataaaagtcctcgctccaccccctccaactcccgtcccctctccctccctccttccccgccgccgccgccgccatccaccaggtcagctccagcggacgacgtctcaacagtctcgcgccactgagatctcgccgagggagggagagcagcaggcagcagcagacatgtcgtcggggcggtacatggcgtactcgccctcgccgtcgaccaccccgcactccccccgcatccacggcctccgcaccccctctgccgccgtcgccgagcaggagaagtacctttccgaactgctcgcggagaggcacaagcttaccccgttcatcccagtgatcccacatagtgtacggttgctgaatcaagagttctccagcttatagctggcttggaggatctcaaggcagctcctctggactcattgtcaagaaaacaatgaaggtcgatatcccagtagacaaatatccaacatacaattttgttggccgcatccttggtccaagaggaaattccttgaagcgggtggaggcaaatacggattgccgcgtgctaataagaggtcgtggcagcatcaaagatccagcacgggaggaaatgatgcgagggaagccaggatatgagcatctgaatgaacctctccatatattggttgaggcagagctacctgttgacatcattgatgctcggctgatgcaagcccgcgagatccttcaagatctgctaaagcctgtggatgaatcccaggacttcttcaagaagcagcagctccgggagctcgcgatgcttaatggcaccctgcgtgaggaagggatgcagaggttcggttcagcgtcccctttccacaca

SEQ ID NO: 161501 - DNA, 257 bp, Zea mays
  Clone ID: MRT4577_78868C.1
aattcggcacgagggttgtgcggagcgggcagcagcatacagccccatcccaatcctagtcgatcttattcccctcctcaaggaagaaaagaagctcaaccatggggaagagaaagtcagctgctaagccacctcctaagaagcggatggacaagcttgacactgtcttttcctgcccaggctgcaaccccggcagtcgtgccgagtgcccaattgacatgacggaatctgactgccgaagcatctcgcacaacctg

SEQ ID NO: 161502 - DNA, 199 bp, Zea mays
  Clone ID: MRT4577_78869C.1
gatcaaacagtagcgtcagcttttacattatatagcgagagtgatccggcgctgagaagagatggctaaacaccgccgaggttctcatcgctctctacacgcgtacgctcaaggagatcgaggccgtccccaaagaccatggctacctaatagtccgttatttccttcaccaatctccgactgcatatctaccatgagg

SEQ ID NO: 161503 - DNA, 571 bp, Zea mays
  Clone ID: MRT4577_7886C.1
tcgcatagcttgttggaggaagggccattttaccttatcataagctttttcaaaatccaactttagaatcacaccattcatttttttcctatgaagttcatgaatagtctcgtggagcacaattacgccttcaagaatattacgaccaggcataaaagcagtttgcgagggattaataatcttgtctgcaaccactccaattctgttcgtcaggactttagtaattatcttaaaactaacattaagtaagcaaatgggtcgataatcttgtatttttaaggcattacatttcttaggtaaaagagtaacgatcccaaaattaagactatagacaggtagagtgccattgtgaaattccatgaacaaggctagtaaatcatcttttattaattcccaaaacacctggtaaaactcagccggaaaaccatctggtccaggagctttattatgttccatgtgaaaaatagcctcacggacctcatcagcaatgaagggcgccgtcaaaattacattttcgatatctgaaacctgggggatatcgggagtaatcgattcctccagcgatattgag

SEQ ID NO: 161504 - DNA, 185 bp, Zea mays
  Clone ID: MRT4577_78870C.1
gcgcccggaaagcaaaaaagaccctagccccgcccggccctccgcctcgcgatgtcttgcacggaggccatccagagctcgccagtcttctcgccctcacaccggccactctactgcaaggccgcctccgtctcaccggatcccaccgtccccgtctctaccgatggggggggggccgatgcgga

SEQ ID NO: 161505 - DNA, 140 bp, Zea mays
  Clone ID: MRT4577_78871C.1
gccatccttccgcgtacctccccggctacagatggagggactttatcgaccctgccggctgggcccggcttggagccgtcgctgcacagctgacgccgaaggcacagaaagcccccttccggcgttgccggagcagacat

SEQ ID NO: 161506 - DNA, 200 bp, Zea mays
  Clone ID: MRT4577_78872C.1
ccgctgttgcctataatccaaaaagccccgacctttctcctttcccaaaactctcccccccttaatggcgaaggggaccccgcccttaacgcgccaataaaccctgggggggtgggtgatttcctccaatctaaactcctacccttttccagcgcccctaccccccccgctctcttctctttttttccctctcctttttt

SEQ ID NO: 161507 - DNA, 429 bp, Zea mays
  unsure (1)..(429): unsure at all n locations
  Clone ID: MRT4577_78873C.1
accccggcccccaccaaagggacanaacannnaggccaganaccccgggcggggggggccccaannacaaccacagcnacannnccacgcccggaaancagnccaggcacanggggcggccgggcgccacaaaggacaaggcacnnccccacggnnnccagggcggcagcggaaanncaggccacgaaancaggcancagaggggacaccccaaacagcggccgngggggagcnannnggcgcgccgaancacacccngaagaaggggaggggacgnngagaggagcngnggagnngnagangncnnggncncngacgccggggaagcccggcngggngnncncggcgngcngcaaccccagaggcagggagacgngggggnncccanaccncccaaacncngncagggggnacgccaggaaccgcgcg

SEQ ID NO: 161508 - DNA, 500 bp, Zea mays
  Clone ID: MRT4577_78874C.1
ccaaaccaccgtagcttgttggttcctgctcctgcttgcttgttggacgctgaatctccccaagactttggctgcgaatctcgcttccggcacctggcagcagcgccgaccgctcctcttcttcaatgtgtcgcgcccttcctctgctcgctgtaaacagtcgacctccctcggctccctccttgcttctctctccctcagatttgtctgcgccgttggtgcttcgtcttgcccaaccgccctggcctctgctcgaattttgcagcgccgagctcccatgattcccatggtgctcgccctcaagctcgctctctggcgcccctgtgctcgacgcccagcggaggccccttccctgcgccgctctttctctcctggtgttttcttcctgctcgcgcctatctccctcgtgtgagcgcccaaccgtgctccccatgcgcagccgcgctcttctgtccggactaccagcatccaactccagtcttctcaccactgaagaacag

SEQ ID NO: 161509 - DNA, 247 bp, Zea mays
  unsure (1)..(247): unsure at all n locations
  Clone ID: MRT4577_78875C.1
tntttntttttttttttttttttttttgggtnntttttttttttttaatcaaatcgaaaagatttacccccgttaggcccgtttaagaaacccacccacccattggaattaccttccttacccggttgtgttggcttaaccggcggccactttttaaacctttttttgggcccggccccggaaaatgggattttgattttccattccttttaaaaggcaaccgacaagttgattggcattgacttgt

SEQ ID NO: 161510 - DNA, 588 bp, Zea mays
  unsure (1)..(588): unsure at all n locations
  Clone ID: MRT4577_78876C.1
aatctgggtaaacaaacaagactactcagattatataatccagattatataatcctccaaaaataatccagattatataatccataggggtaaacaaacagaccctaaggcacctgcaaccttcatgcctatgccttacaccgacgaccaatccatattacaaaattctaatcttagacatcaattagctcacgttttgcaatcaaaccggaaccaacatgatctgagaaaccctgcaggtgatccacgcattgtcgttaatgtggaacccagagtacctggatggatgcgaagattatttacaccgcttccctacagtataagtgtggacatcgacacagccaaaaaatgcaatcaaaagaagctattgctgggaccgccaccaagcatttcctcccggtcaatgaagcgctccagaatttccttgtccttggtgacaatgcactcatcatctttgccaaaccagctatagcggttcttcgcaatgtagtcatagaccgtatcccgcagtggggtggggacgatcagcaaggaactcaggaccgagtaaggaggaggcaggtacgatgcgactntcagcgcagccgt

SEQ ID NO: 161511 - DNA, 157 bp, Zea mays
  Clone ID: MRT4577_78877C.1
tccttcttctgctctctctgtggggggagggcctgaggatccagcaccaggacatcagtgggggaaggtgcaggtgagcgtggcctgatccatctgcacacgcacgaggggacgcgcatatgcgcgactgaactcgtgtgcccacacgtaatgacac

SEQ ID NO: 161512 - DNA, 580 bp, Zea mays
  Clone ID: MRT4577_78878C.1
gggatccattacctttgagccatggaagagttgtggaagtcttgggcccctccaaaacgcaaatatttcctgtggttggcaatacggattaagtgttggacttctgatagactggagaggagaggcttggaccacccagagtcttgtccactttgtgaccaggggcaggaaaccgtgcaacatctcctttgcacatgcatctttgcaagacagttttggcatatcattctttctcccttggggtttggcaatctctctccgtctggcgatgatatctcttttccagaatggtggagaaaggtatgtaagaaggtgcacaaaagcaagagaaagagattgaacaacgtcatcattctaggggcctggtgcctttggactcaccgtaacaaggcagtctttaatggagagaacctttctttaagcacagttcgaagggttttcttagatgagttggtgtgttggagtaaggctggagctaaacatcttgagattttagacctagaggtcgcccttaatagggtcggggcgtagtgtttgttgagtttgggggtctggctgcagttttttcgctgtaaccatc

SEQ ID NO: 161513 - DNA, 509 bp, Zea mays
  Clone ID: MRT4577_78879C.1
aaaaaattttttttttttttttttttttttttttttttttttttttttttttttggaccaccagaaaggggggtgcttgcttttggcccaaaagaattgaacccaactagtccccaccacggggcaagagggggggagggtgttttttttttccaaaaaaaaaaacccctgggtccacgcaagggaaaccctcaattaacaggaaccctcctgggggggtcaaagacgttcttggtcaaagaatccttggggggcaaaagctgggggaacccagcctttagtttcgacggggccatcttggtgttggttttaggggcgtactttcacctgggcctggttttcgggggggaagggggcccccttggaatcaggagggggggattttttggacaattcaaaaaactcggggggggttacagcgccagggggggggaagttccatatgcccctgcaggcccggttcgcccttttaagggggatagggataagctcatccaaaattggcatgc

SEQ ID NO: 161514 - DNA, 451 bp, Zea mays
  unsure (1)..(451): unsure at all n locations
  Clone ID: MRT4577_7887C.1
ggaanacgaaacatctttattgatcatctgtgcaanacaaggtaaatagcatacatgaaaggggttgttggcgtgttgtttctacatccttcaaggaaacgaaccccttcagaagagatcagggcttcaaacttatcacaatccctaaataccccagaacatcaaaacagtccaagccctaaataccccagctttttatcctgggggaccatgtagtcctttacaaaaggcccagtttaacccaaatagtacaaataaggaatttttaggttccgcaaaacttccagaccccttttgcacccttctactctggattcttcccatattatgatcaccaagtacttgggcaagccccagacagcagagttggtggccaacttgggaacccctaaaaaactgtggaccggtgaatcggttagaccaattccttaggtttcagaaagccccaatt

SEQ ID NO: 161515 - DNA, 1125 bp, Zea mays
  Clone ID: MRT4577_78880C.1
taccctgcaaagaaaacccccgaaccgaaaaaccaaccaagaaccgccgcctcgccgttcgagagaagggaagaggggggaaaaagatgctcgccagaaccatcggaggcgccgtccgaacccgcctcgcgccgtccctcgcgagccttctctgccgcggctacgcgtcccccgcctcctccgccgacgaccttgtcatcgacgaggacccgccgcgcgccgcctcgacgtccgttgccgccaccaccgtggcggccaccgtgccgaccctcctgcagccgcgggtgctcatctacgacggcgtctgtcacctctgccaccgcggggtgaagtgggtgattaggacggataagcacgccaagatcaagttctgctgcgtgcagtccaaggccgccgagccatacctgaggctggtgggcatggacagggaggatgtgctgcggcgtgtcctctttgtcgagggccccgaggcctattacgagggctctacggctgcgctgaaagtcgcatcgtacctgcctcctccttactcggtcctgagttccttgctgatcgtccccaccccactgcgggatgcggtctatgattacattgcgaagaaccgctatgactggtttggcaaagatgatgagtgcattgtcaccaaggacaaggaaattctggagcgcttcattgaccgggaggaaatgcttggtggcggtcccagcaatagcttcttttgattgcattttttggctgtgttgatgtccacacttatactgtagggaagcggtgtaaataatcttcgcatccatccaggtactctgcagatagttttcttaactcctagaacttctgcattccacattaacgacaatgccgtcgatcacccgcagggtttctcagatcatgttggttccgatttgattgcaaaacgtgagctaattgatgtctaagattagaattttgtaatatgggttggtcgtcggtgtaaggcataggcatgaaggttacaggtgccttgatatgacatcatttcttttcgtacacctgctgtgtcgtgtatggggtactcctatttcgttcaaataactgcagtactaaatactataaaaaaaaaaaacgggcggccgccaccgcggtgga

SEQ ID NO: 161516 - DNA, 479 bp, Zea mays
  Clone ID: MRT4577_78881C.1
gggaccaggggggcaacacgaaaaatccggaccgagacccggaaggcgaaacaatttcccaaaaaagaggagccaaaaaaacaaggggaaaaaacgggaaaacctaatgcgggggaaaaaaaaaaaaaagggaaaaaagcaaaaaaaaaaaaggccagaaaaaaaaaagggaaaagccgggggcccaaaaagaggggccaaaccaaaaaaagagggggggggcaaaaggcccgccagaaaggggaaaaacctgaccagcgagacgaaaaaaaaaagaccccaccccccggggaggggggttagagttatagcacgccaggcacgttttttttccccacaagggaaaaagcaagggggatggggcctaaacgcggggcacaaaaaaagggggaaaaaggggccccaccttctattacccaaaaagaaaaaaaaacgcgtagaggggactaaaaaagggaaaaaaaaaagcccagcgccag

SEQ ID NO: 161517 - DNA, 268 bp, Zea mays
  Clone ID: MRT4577_78882C.1
ctctcaggggggggcaacaactaatccgttacttaaacgaagggattggatgaaaaaaaacttgccctactgccaaacaaagggtagaccctttgtccctaaatgtttttgggggccccttttttcatcccattggatggtccccagggtttggtgatttaattcttccataccccacaactggggggaagaatcccacctttaccagaataaataacctctaggtttttaacgggataaactttacctgaacctgcttggaaaggac

SEQ ID NO: 161518 - DNA, 424 bp, Zea mays
  Clone ID: MRT4577_78883C.1
actatatattgtattcctattaatctggttatcgcatgcgtggccagccggtgacgacgtacgtatagactcgctcagcgcctgagctgaacgccacgtcaccccggcgcatgcatacatgcatgcatgcatggttcattcatttcaaggggcttcgcttcaagaagtgtggagtgactacattatgccagagctcatatactctgaaaatactcgagcaggcaggcatgaaaggctgcaatgcttgcagtgtaccgatggagaacagactaaaattgagcaagaaagatgagtcaccgcctgttgacaagacaaaatacagaagcattattggaagcctgaggtatctagtgaacacaaggccggatatagcctttgctgttgggattgttagcagattcatggaagatccaagagcaaaaca

SEQ ID NO: 161519 - DNA, 347 bp, Zea mays
  unsure (1)..(347): unsure at all n locations
  Clone ID: MRT4577_78884C.1
ctttggctgatttatgtgcttgcctccacctcccagcacaaaaagacacacatccgctcgaaaggntcgagtctcgtagtagggttagacatcattgctgcagatggggcggacgtgcgtatacgagtctcgtcagatgtcattcttcgagaggtcacgttcctactggagagggtaccttcgccgttatcggcgtatctcacgtcgtcaagcattggtacgaggcgtctaaggagctcggtttcgacgggtcagacgctatacgggttcgtatcgatcaaggcattctaaacaacggttagggtccccagcgctctagtacggtatactccctgaagtccgtcacc

SEQ ID NO: 161520 - DNA, 475 bp, Zea mays
  Clone ID: MRT4577_78885C.1
gacttgtagtttacaaacttccctttacatactagttgctgagagccctaagtgattgagaaacacaaaacatcttagtgcgcggttggtactgatagattgaaaaaaacttactttgtagctcgaatcatctatcgggtagtacacgagcggatctagcatctgttacgaatgcttcattcatattccaaagatacactcacgcacacacacctgactcaatgcggcggagccagccaaaatctgcacagggaaacccatacacgcgcagggacagggcatacatacaatcgagcaggcacgtcatgctgtgctacgccatcctgtcaacgtgttacggaccacatcagtgtaccgaatgtacaactgcacacgagtgatgatgatgatgtatcatgcgactctggagcttggcatgacctatgccgtggcgcaggtgagcacgccgacagatcccatgttgaccatggcggct

SEQ ID NO: 161521 - DNA, 1029 bp, Zea mays
  unsure (1)..(1029): unsure at all n locations
  Clone ID: MRT4577_78886C.1
aattcggcacgaggccagcacgttctccaatccccaccggcccatcctctacggaaacaagaacagggacaaaagactgaaacaatcatcaacaaatcagcatcctccaggagtccaggtccaggtccaggtccaatccaatacagttgcttcttctctgacgcaacgcaacgcaacgcaaccccaactccccaagctcgcggcaaccgcgagtacctcactctgtgcaaccgccgccacgcgcaggtgttgactgttgacttgatggatcagattatggattttcctgttgacccaatcatggcagctaaggcctataagtacaaagcagaaatactttttaatgaatacttgctagcagattcatatgttctatacacttctgtgctcgcggggctcctgatgtgcaagttggtactgttatttactcactccgagttcatctgttaaattttatgcctaatcttacagtgcatttacatgggaccatatttgtatctgtagatggaaacaaaatatatatacgtaacttgatagactagctcagtagtttgtttgggtttcattttgaaccttagtattaataacttgatagatcaggtcagtagtttggttgagttttattttcaaccttagcattcataacttgatagatcagctcagttgtttgtttgagtttcatttcggaccttagtattcattattcaatacatgaatcagcaaaacacaaagattgtaaagcttttttttgtggcaacctgtgcaaatcttatttttctgcctaatccttatttatagtgacaaagagaaattaggtaaggcttataatttctttctttttttccagtgtgaaaggtagcaattcatagtattaagacgaagagtttagctcaatttgttctaagctgtgcatacatgagaagcattntgaaaagaagaatgatatttttgagctaacaactaatgtaaaataattctttgaaaaaaacgttgaacataacagtgtttgtttctaggatatgtatggta

SEQ ID NO: 161522 - DNA, 140 bp, Zea mays
  Clone ID: MRT4577_78887C.1
ggctaacggccgctcatcaccctcatcggggattgcgctgccatgggcgccaataccgaaatcaccagcctccatcatgtgcctccgcgatgcaatcgctagccatgactatgcagcgacgaaggccgcagcggatgcgc

SEQ ID NO: 161523 - DNA, 230 bp, Zea mays
  Clone ID: MRT4577_78888C.1
aggccggtttgttctacccgcacaagtcatgtaccctgcggggggatcgtctgtaggagctccggcaaggacagcgacaacaacagcgatctcgacgaagcgcgagaaccagagcaggcgatcctaagcaagatgaggagtcggcagattgaagaggtggaacacgtgcagagtggacatgcctataccgatgtccctgccgatgtcaagctacgctatcgactgggtga

SEQ ID NO: 161524 - DNA, 264 bp, Zea mays
  Clone ID: MRT4577_78889C.1
caagacgcaggcgcaacccacggctgctgcggggatccttgtggcccttccggtcgatggaacctaagaactatggctcatacagcactcaggcctcagctgcagcagccacagctgagctgctgaagaaacaggaggagctcaaccggaaggcagaggagttggaccgaagggagcgagagctgcagcatgctgccctgggaggcacagctactcgacagaacaattggccccctctaccttctttttgtccagttcagccct

SEQ ID NO: 161525 - DNA, 614 bp, Zea mays
  Clone ID: MRT4577_7888C.1
aacatcccgcacacgtcaacggaacagcttaacgaaatccccaccaaggcctagaatattccccaaaaccccacgtcccctccctgccgccgctcccactccaccagtgtgccacccggatcgatcgatcgatcgacagcgatggacacccacatcggctccgtcgacgggccgtcgccggcggcggtgaacggcgcggtgggctgcccggcgtccgcgccggggtgcccgatcatgtcctcccacccggtggtctccgcaggcgaggcgtcgctggggcgccacctggcgcgccgcctcgtgcaggtcggcgtcagcgacgtcttcgccgtgcccggggacttcaacctcacgctgctcgaccacctcgtcgacgagcccgggctgcgcctcgtcggctgctgcaacgagctcaacgcgggctacgcggccgacggctacgcgcgggcccgcggcgtcggcgcctgcgcgtaaaccttcaccgtcggcggcctcagcgtgctcaactcgccgctacagcgagaaccgtcatctgcattggaaggcgggctttctgagcccactccagcgactgatgccgttctccggggacctgccgcactcacactagtttt

SEQ ID NO: 161526 - DNA, 660 bp, Zea mays
  unsure (1)..(660): unsure at all n locations
  Clone ID: MRT4577_78890C.1
ggtaccggcgccctctctcgagttttttttttttttttttttttttttttttttttttttttttttttttttttttttttttttttttttttttttttttttttttttttttttttgggcccccttcaacggggtggcaacccagttttaaaaaaaacgttaaggggggcttgtcaaattttaaacaacccccttgaaaaagggggggaaacaccggggggggggttcccaaccccccttggcccagtttatttaaaaaaccgttttcccgggggggcccttgggcccttggtgaaaccaaccacccttgggccccttggggccccgggggggggngggggggcaaaaacccggccccctttttttcttgtcccccccaacccgggaaaaaaaaatgggggaacaacccccctggggggaaaaaaagttggggggtttttttttggggggggggaaaaaacccggggaaaagttcctccaaaaaccgggggggggggattttttttttggaaaaagtttcccacccccaggaaaaaaaattttttgggggggaggtttttcccccgggcctttctaaggggccccggagggggtaaattgaaccttccccccccctggaccccacgggaaaggggcctttggaaactttttaatgggttt

SEQ ID NO: 161527 - DNA, 385 bp, Zea mays
  Clone ID: MRT4577_78891C.1
gttctaaggatctgaagcgtgggaggagctacttgaggtctgcatctcctcaccatgggaagggccgagggagaagtactcaaggtctctatctccttaccttggaaggggccgagggagaagctactcgaggtctccatctcattatcatcgcaggggcagaagctggagttacagtcggtcgcactcgccaaggaacaactctaaggcttatggtgaagaattgccatcaactagatctggttatagccgcggccccaggaggagctccccaccgatggagcgagctgaatgcaatggtggtagccccatgagaggtgaagctcgggggaagtgacagcgacctataaaatcactctgggattgtaaagtgtcaaacatttgg

SEQ ID NO: 161528 - DNA, 670 bp, Zea mays
  Clone ID: MRT4577_78892C.1
gcaacgcgattagttgccgcatgtgactactcgcaaatcagatccctaggagaggggcgagcggatcacgagttgctggagccggggaggaagaagcgggcatgagcttggaggggacgaggaaccaaggccagcaccaaggcgcggggcggcgctagggttggacggtgctgggtggcggcggtggtggcgcggggcggggcagcgacgaagttggttcggcggcgatgtaattggcgcgacggcggcgacggtggagatgcggcggcagtggagagggagtgtagaagaatggggctacgagccgtcggtcagggctaagtaaatgttctttgccgagtgcccgcaatctggcactcgacaatttttttattctataacttactttgtcgactgtcctggatctaacacttggcaaagaatactttgccgaatgcgtcctggtgggtactcggcaaagaatgtttaaattatttaaatttttctttgccgggtgttccctcatgttactcggcaaaacttcgtctttgccactctttccgtgacactcgacaaattatgtttgtttttttctttttttctccaaactttttatggtgtgttcttatagtatggaggcctatatgttcaattttggcataattataaaagtgtttgctataaaaaacac

SEQ ID NO: 161529 - DNA, 254 bp, Zea mays
  Clone ID: MRT4577_78893C.1
ttttctttctcacacctgctcgctttcactccggtcgtgtgactatatagtcccgggctgtcgttacaaatcctttctagccccgacgatggccaccgtcgctgtgtccttcgacgagaagctctacatgcttcgcgccaaaattttcaagctctaccagatcagctagaactttaagtccggttcatcaacctcgtgtcacgctacctcatttgtgaagcggatcacttcgagtggagcaagatccataccct

SEQ ID NO: 161530 - DNA, 652 bp, Zea mays
  Clone ID: MRT4577_78894C.1
gggtacctcgaggccggccgggagattatttctgtgtgcacgactccattagcactgagcattgacgcgcgccgcaactcctctaagttcttcttctccatcgcgagcctgccccgcgacatgcccatcatctatctcctccgcagtgctccttccggggtctcattggttcactgtatctctgggctcgtcctcctgttctcccagcttgtcatcttcccgttgcgctcatgcgcggcccgccaagagaaacccgacgacatgagatgcgcgatcgtagaacgacgaggcacaatgttcaaggtgacgtcctgccataacatcctggttctattactgtggcatgatgctggtacctatgacaacaacatgacacgatcgtgcgccgtgagtcggagctaatgacagcttgagattctaagacaacatgaaggatgggcccaatgatgcgcatgagaatgatctgaagctgatccaacctatcaaggactaggtttctcgagctactctatgtcatctggtacatcttgccaagtcatggatatagaggaagactgggtctccgaattcctatgatctatggaagagatgatgatattggacctcaatcatgacctcgagatgctatgcttcctgctgatggaccaccttc

SEQ ID NO: 161531 - DNA, 295 bp, Zea mays
  Clone ID: MRT4577_78895C.1
ccggccgggttcttatcttttgtccttaatggatcatatcccttgatgtgcggtgcctcgtgtatgtacatatagggttgttgttgttgttgttgttcttgttgttcacttgtgtctgtatcatcttcaacacttgcttgtgttgtgccgttaattgttactcctaaatccgacaacgacaagggtgcctacctaccgcgaaatgtcgacatgtatccccatttttttttgtctgttaatttgatcggcgtaagaaccggtgttttgcaaaaaaaaaaaaaaaaaaggggcggcc

SEQ ID NO: 161532 - DNA, 592 bp, Zea mays
  Clone ID: MRT4577_78896C.1
cgtcgacaagccaacagcccagcacgcaaagggcactgtgccgttacggcgcggcggagccggaaactcccgagtcgcgtgacagtaaacgaaggcacgaacgcgactcttccatccaactgtcgaagcaaccgaatcggggacaaccgagggcgagggcggccggcatggggatcgtggaggcgtggatgcgggagaagcccatccgcacattcctagcccgcctcgcccagcgccgggcggcggctgccgccgccttcctcgcttccccctctgccaccacggtcatcgatggcgagggcggcagcgacgggagcatcccgcagctttcctccgttgccaactccgtcgtgtcccgctgctcaaggtagcgtcttcgtctgacgcgaatatactccgctaggggttggctatagaagttcgatgtgagctatccactgcttattcagagaatacacacgaatgtttttttttttgtgatcgtgattggtgtgtttaccacggctccaaaggatcgcactagaactataccccaatgcagcagattgctgctgtccccaaacttagattggtactagaagtatagaattac

SEQ ID NO: 161533 - DNA, 534 bp, Zea mays
  Clone ID: MRT4577_78897C.1
ggccaggcgctgctgcagtgcacgccgcacatgtgccccatccgggtgcactggcacgtcaagctcaactacaaggactactggcgcgccaagatcgccatcaccaactacaactacaggatgaactacacgcagtggacgctggtggcgcagcaccttaacctggacaacgtcaccgaggtcttcagcttccagtacaagccgctgcaaccatacgggagcatcaatgacactggcatgttctacgggctcaagttctacaacgactttctcatggaggccggcccgttcggcaacgtgcagtcgcagctggtcctgtccgccgccgcctcggcgttcctactgttgctgctcctggtggcatgaccgtgaccgaaccaagggcaaggcctccgttttgttttcccgtctcgtcccgtgggcagggagcagacttcagtaggcagggcattttatttggtttttttgccaaagattcaacacttgggttttcgtcagaagaaaactgtcgtgtatgtagtgtgagatgcaagt

SEQ ID NO: 161534 - DNA, 633 bp, Zea mays
  Clone ID: MRT4577_78898C.1
attattagtagccagttcgaaaaaaaaaaaaaaaaaaaaaaaaaaaaaaaaaaaaaaaaaaaaaaaaaaaaaaaaaaaaaaaagccgaaaaaaaataaaagaaaaaagaataaaaaaaaaaaaaaataaaaacaaaaaaaatcttattttgtagacacataattaaaataatttagtgcacagatttaaaacatcataaattgggggggcccttttttttaggacccaaatttttctttgtgggggattttccttttttcgtttttttttgtggtccccaagattgcttttttgggcgttttttttaaaagttgagcttggggaaagattggggctccccctttttttgcgctttataaaacccccctttttgtggttgttgccattataaaaaaggccccccccggagcccttttaccaaatgtttgctattttttttttgattttgtgcccccccttttggggtttttttaacccggtgtttttggggggttccctccagggggcccctttttttttgaagggcttttgggccccaatttttttttttttgccgttttttttcgacgaggttgccggtttttcctggaaggttttttaacggggggtgtttttgggggcctcctttttagt

SEQ ID NO: 161535 - DNA, 246 bp, Zea mays
  unsure (1)..(246): unsure at all n locations
  Clone ID: MRT4577_78899C.1
caaggggagcgnttttggggagnnnngagagcaagggagcgcggngacgncagcgnannccagggcnncnngagcggcngcgagggcgaccagggnagcgncgagagnccggcagcgcaggcnccgggggnccggnggcaggggccncagcgaggaggagaaggccgnggagaaagggnacagcaagagaggggggcaggagaagnnggagaagcnngcacgcaggggccccagcggaggagagca

SEQ ID NO: 161536 - DNA, 471 bp, Zea mays
  Clone ID: MRT4577_7889C.1
acctgatacgtgtgtatctagccgatctcgtacatcgtatacagattgtctacaggttcgtggcggagatgacattagctctcatatgcagataattcacgtaaatcttgtaaagtgacttaccatgacatacctgctaggggatcacggtgacacttggtctgatagccgaagttggaaacccagggaacgaatagaagacagaaagagtaggggggaagaaaccaaatatgtgtgagcggaatcactacttatctcctatggaacgcaatgtaactactgttacaccgtgcaaggtagcatcgacatcaccgacactccgatgagtaagtgtggtagcaaaatacaagacaacatgtgtctcggatcggtacgtcatcatctggagggcgttgaggaattcccaccttggaaaactgaagtttctcacgtctgtgatctatgctagcaaagatgcactacatctattac

SEQ ID NO: 161537 - DNA, 2310 bp, Zea mays
  Clone ID: MRT4577_788C.1
ttttccccatattttactgtgtgttcgatcaggtggtgttcgccatgtatacaattcttcttatgcttttgctgatgcataacgtttgcaacagctgtcaacttagcctggataatactaatacacatttgatgctttgatcattgctcgaggggggcctttcccgtccctcggcacgagcgccgcttcatccttcgaaccccacgctaccgctcgtttatacggcagcgacgcctcccccgctcgcctcctctctcctcctcctcaaggctcaagcgaaggcgagcgcgagagaaagctcaagccacttcccaacccgctcccccctcgccgcgatttcctcacatggcagcgctgcgtctccgcgagtcactcgagaggaacagcccctcctcctgcttctccgacccctgtccctgcgccgccaacacgcgccgcccctgttccgatctcgccgcccccgccgctgggcccttctcgtccctccgcgtccatcgcccctgctcctgatccggctctcttcttcctcccttctcgcgccgtagattgcagccgcggctctgattctgctcccgccgtttgtctcgcggtcgcgggttcctgggagcttctgggttctggctccgtccctaaccggtgttgccatggggaagagcaagaagagcaaggcccgcggcggcggggacgacctgatcgacagcagcgacgccgacagcgtcggctcgtcgtccaccgcgctgtcggatctctccatctcgtacgccaccgagcacgtcaactcgcaggagttcgtcctcgacaagtacatcgacgcgctctacgagaagaggggatctacaagagaggcagcattggttaaactcgttgatgccttcgaaagttttatgctccatggccttgtggagaacaggtatgccactttgctgagtcaattcaataattctgtcaaaaagggatctactaaggagttttttctggcatctcatgccattgggttactggctattacacttggtgctgggaacagttcacatgaaataatggaggagtcgcatccccaactgtgtagggtgcttcaagcttggtccgatgcatcaaagatgatacctgcacttgattgtttggctgtcatcacctttgttggcgcaactgatctggctgaaacagagtcatctttgaaagccatgtgggatgtgattcatccaaaatctggttcaaatgtgggaactgttcggaaacctaggcctcctgtgttagcagctgctgtatctgcatggacgtttcttttgactactattggttcatggaggataaatactgatagttggaaagagcccattgcatttctctctactcttttggaagcagatgatcgtgctgttcgaatggctgctggtgaagcattggttttgtgctttgagttaaatctgcttgatgtttcttctcgtgaggatggtgatgttaacacagggggaactggtggttctaagaacaagcttttcttggatatgcaagcattaaaagccaaaatatcaggtctggcctcgaatctctctgctgaggctggggggaaaggtgcagataagaaaaaccttactgaccaaagagacttgtttcaacgaatcttagattttgtcaagtatggtgactgccctgaagaatcaatcaagattgctggaaaacgtgatgttttaagggtgtcatcgtggtctgaattaatccagttgaatttcttaaagcggttcctggggaaaggctttctgaagcatgtgcaggagaatggacttcttcaggatatatttgacattaaggttgacaaaactgaaaccttgtcgtccactaacaagaaaatttttaggtctgaagaggaaaaagaaagagctctgagattaaacaaggaacgtcgtctagcccaggtaaggaagaatgccgtcatgttggatgagtaacaaggtcacgaggaagggaaaacaacatcgatttctgtatctcatttcatccgggcctttgtctctgcctgtgtaaactattacaggcacatcccattgtctttgcctttgttgtctttaaggatactggagttttatagtgcatctaaccgatatgcaagttcgtgcatattgaacgttagtatgatttgtgggaatagttaagttgatttggagtttagtatagtaagaactaaggttgattaaatgtaacgtatgtatgaaatgtaatgtaagtgtaatgatttatactggaggacgggtggtaacaaatttgaatagaatgatatcaattcctaataaaaaaaaaaaaaaagcggcc

SEQ ID NO: 161538 - DNA, 2170 bp, Zea mays
  Clone ID: MRT4577_78900C.1
cggacgcgtgggcggccagctgatcgagccgcccggccggccgcgcctggtgtgacgtgccatctcgatctcgatggggcatcttgctcctcctcgctctcttcttcttaatttgccgctgcgtgcggccttttattcgccctgcctctagctgctgcttcttccaggatcggggatcggagcttgtgctgctactgctactataccagcgctagctagcagcagccgccggccggctcgcgcaagctaaggaaggatcgacatgacgatggggctccgcgtccgcgactcctccgcgctgctggctctggccgtcgcgctcgcctgctgctccgttgcagtggtggcctacgaccccctggacccgaacggcaacatcaccatcaagtgggacgtgatctcgtggacgcccgacgggtacgtggcgatggtgacgatgagcaactaccagatgtaccggcacatcatggcgcccgggtggacgttggggtggtcgtgggccaagaaggaggtgatctggtccatcgtgggcgcgcaggccacggagcagggggactgctccaagttcaagggcggcatcccgcactgctgcaagcgcaccccggccgtggtggacctcctcccgggggtgccctacaaccagcagatcgccaactgctgcaaggccggcgtggtgtcggcgtacgggcaggacccggcggggtccgtctccgcgttccaggtctccgtcggcctggccggtaccaccaacaagacggtgaagctgcccaggaacttcacgctcatggggcccgggctgggctacacctgcgggcccgccgccgtggtgccgtccaccgtgtactggacgcccgaccaccggcgccggacgcaggcgctcatgacgtggacggtgacctgcacctactcgcagcagctggcgtcccggtacccgtcctgctgcgtctccttctcctccttctacaacagcaccatcgtgccgtgcgcccggtgcgcgtgcggctgcggcggccacggcggccacgcgggtccgggcggctgcatcgagggggactccaagcgcgcgctgtcggccggggtgaacacgccgcgcaaggacggccaggcgctgctgcagtgcacgccgcacatgtgccccatccgggtgcactggcacgtcaagctcaactacaaggactactggcgcgccaagatcgccatcaccaactacaactacaggatgaactacacgcagtggacgctggtggcgcagcaccccaacctggacaacgtcaccgaggtcttcagcttccagtacaagccgctgcaaccatacgggagcatcaatgacactggcatgttctacgggctcaagttctacaacgactttctcatggaggccggcccgttcggcaacgtgcagtcggaggtgctcatgcgcaaggacgcaaggaccttcaccttcagcatgggctgggcgttcccgcgcaagatctacttcaacggcgacgagtgcaagatgccgccgccggactcctacccctacctgcccaacgccgcgcccgtcgtcgcctcgcagctggtcctgtccgccgccgcctcggcgttcctactgttgctgctcctggtggcatgaccgtgaccgaaccaagggcaaggcctccgttttgttttcccgtctcgtcccgtgggcagggagcagacttcagtaggcagggcattttatttggtttttttgccaaggattcaacacttgggttttcgtcagaggaaaactgtcgtgtatgtagtgtgagttgcaggtcgtcggatccccacgtacaagacaatctttggatctagaatatgcaaaacgtgaatcagcacgccaggatcatcgtctcctacaagattgacagaaaaaaaatctcatgatgagtgatgtgtcaacagacctatatatatgtgataatcactggtttcaacggttgcctgaacatttgctaaatgagaaaacacgggacatcgatggacctagtgctaggaccggcacaggggaatggaaaaaagacgttgctttcttctgtagatagagagaccagagacctcggtttgggtttcaggaatggtttggaactttggatgtttttctttcagtgtagatggacaagccatgattttgcacggccaattaacatgtgcatctctcgtc

SEQ ID NO: 161539 - DNA, 308 bp, Zea mays
  Clone ID: MRT4577_78901C.1
cttctgatggcaattatgatcattagatgccactgatactatacggcttacgtgaatctttatatgctgacttgcgtccaccttagacgatcgatgatagaataacgcatacctctatgctgccggctctgcttctgccgtcctggacagttaatttactcatgtgtaatctctatatgtcaatcatcagcatgactattgagctgatatgtcatggtattacaactatatagtcattaaaaccataatcaatgaccccaactatgcagagtaaattcactttgacattcatagcactgtgcataaat

SEQ ID NO: 161540 - DNA, 1481 bp, Zea mays
  Clone ID: MRT4577_78902C.1
acggcgcgcgcacgcaacctaagaattcgaatcgaggggcgagccatttgcggcggagaataccctttccccgggggcccactttgtggtgtgttgcatagcccaacctctccccaggtcaccgaccatgcaaggaggtgtcgttgcgattgcgaggacgcacgaaaaatggaagaagcttttgcatacccacaggccgtgaaaaggtgccagtgaggacgaatccaagcacacgcccccactcgcttgaaactgccgcagagccccgcaaaggcaacgactgaaactgctccggcgaccacgagcgcacctaaaccccgcctgcgtctcgtcgccgagaagaatcttcgccttcgcgaagcctctccatctcccctctccgccgccgccgcttcctcgccgggactcgggagtcgggagcaatgcagctgtaccaccacccctattcgctggacagccagaaggtgcggatggcgctggaagagaagggcattgactacacatcttatcacgtcaatccactcaccggcaaaaacatgaatgtggacttcttccgcatgaacccttccgcgaagctccctgtcttccagaatggagcgcatgtcatctatcgcgctatcgatattattcagtacatagacagacttgcagtgcatttaagtggtgaaatcccccctgtgaacactgaggtccaccaatggatgcagaaagttgatgcttggaaccctgagatgttcaccctcacgcacaccccggccaagtaccgtgcgtttgtctccaagttcataaggcgggtgctgattgctcgcatggctcaagcccctgatttagccagcatgtatcatgtcaagctccgtgaggcttacgagacggatgataaagtgaaggaccctgacatcatgaagcaaagcgaggaagaactaagcaaactccttgatgatgtcgaagctcagctcggcaagaccaaatatctcgctggcgatgaattctcacctgctgattcgatgtttgtccctgttcttgcgcgcataactattctggaccttgatgatgagtacatcaactgcagacccaagatacttgagtactacaatttggtgaagctgcggccaagctacaagattaccattggcagatactttagtgggtggaagaagtaccggactctcttcaagacatctttcttcctttgtgttcgaaccctgttcaggaagtactagatagttcggcggatgaaatatctgaatcagtaccttgtgaactgacatgtatagtgagtttcggttaaaaaataatctgtatatcttccatgtgccttttgtggtcttgagttcagtttttacctgtaaaatcaatatgtttgtttgattatatatttctgcttcatgctggatgcaaaaatgaaggttatagaactgtatacagaataggactaagtatatattttggttttatcacttgttctagtccaattcatgtct

SEQ ID NO: 161541 - DNA, 363 bp, Zea mays
  Clone ID: MRT4577_78903C.1
tcgatgggctttgaacacccagctgtgcatgcctattggctacaacaagcagtagcggggagcgtcttacaacaaccaatttcccagttgcaacaacaatcctgggaacatataacattacaataccatgcgcatctgcaactagcaacaaacatttcgttaccagcactgagccacctagcgatggagaaccctagcagctacttacaacagatggtgattgcatcaaaccctgttgctgtgcataaagtgcggggaaaccagccacaacaccagttgtaacagttttctgtagcgttcagccaaatagccatggggaaccctgccgcctacttataacaaaacacatttgttttaatttac

SEQ ID NO: 161542 - DNA, 216 bp, Zea mays
  Clone ID: MRT4577_78904C.1
gaatttaccaagtgttggattgatcacccaccaatagcgaaccatagctgagtttagagccgggagagatcacttagggttgaccgtgattatcaccatgcctatataatcattcaacctacttctagaggtaccgtttattcacacaattggacattacgcttgcttgaaaagccattggcgccaaactaccgtgtgccgaattatgactgaacg

SEQ ID NO: 161543 - DNA, 318 bp, Zea mays
  unsure (1)..(318): unsure at all n locations
  Clone ID: MRT4577_78905C.1
cctcccccccagcccctggncgatcgctcggnaatcggcatggacgccggctcggtcaccggtggcctcgccgcgccctcgcacatgcgcgacgagctgcacgtcatgcgcgcccgcgcggagccgaccgccaaggnccgcagcgccgacgtgcagaggagccgcgtgtgcgccgaggaggccgantaggcccaggacgnncacccccaacncgccntgcccccccctgccccctcccccccctcgccccccccctgccccccccaccccaccccccccccccccccgccgcccccccccgcaccccccccctccccc

SEQ ID NO: 161544 - DNA, 834 bp, Zea mays
  Clone ID: MRT4577_78906C.1
gcgcggggaaatttttcatcgtttggattaattagaaagcacgaggcattctgcacaagggcgactaaagttaatcaaacagcatgaactgattacatggcagctttgtgcttgcaagacgaagtaaaactcggtgaacagccctctcctagatatcgcctaaagaattccaggaagtaaccaagtaggcagcagcggttgttgcgtgccatgtatgccaatagcgacggctccttggttagtggcacctgtctttgttgtggcctggaattgtcaatctccacatcgagcttcgctgaaggtcattctcagctacactttgtacgaacaagattacccactaaactttctgctgcttaagatctttgcagcctggctagcatttacatggtgcaatccttcacgctttaggcaatcgtcactcttcgtgtcatccattagcgtttccagcaagcactgtgcatctgattttttcatggttaacaacctcagggattcacttagaaaagggagaaaagcttcaggtcttgaacagaagggcctaaagatgtggagaagggcttttatatcaactcttagctgggtgattccaggatcagagaaacttacttcggcccatcgtatgctgctgtagatgtagtagtcaaggccttccgctatactcctccacagatcaaggaaatccttggagttaagatatcgtttcaacttagcggtcctgtccatcagaacatctagactgggaacaaaaccaggagacactcctgtgttttcttcatccaggatctcatcatctaagatggtctgtccactccatgatccaatgctctgaac

SEQ ID NO: 161545 - DNA, 861 bp, Zea mays
  Clone ID: MRT4577_78907C.1
ctcgaggccggctggggaccggccgcgactaaccctcaaataaaggcaggaagaaccgtcacaatggcccgccgtcccgcccgttgctaccgctactgcaagaacaagccctaccccaagagcaggttcaaccgtggtgtacccgatgccaagatccgcatcttcgacctcggtcgcaagaaggccaacgtagacgacttccctctctgcatccacttggtctccaacgagtacgagcagctgtcttccgaggctctcgaagccgcccgtatttgcgccaacaagtacatggtcaagagcggaggaaaggaatctttccatctccgtgtccgtgtccacccctaccacgtcgtccgtatcaacaagatgttgtcttgcgctggtgccgatagattgcaaaccggtatgcgtggtgctttcggcaagcccaacggtcttgtcgctcgtgtcaacattggtcagatcctcatgtccgtcaggactagggactctaaccgcgctattgctctcgaggctctgaggcgttgccagtacaagttccctggtcgccagaagatcatcgtctccaagaactggggattcacccctctcaagcgcgaggagtacgtccagcagcgccaggagggtaaggtcaagatcgacggtgcctacgttcagttcctccgcaacaagggtaaccttgccgacaacatccgccgcttccctaccgctttcgaagcatctgcttagattttgagttgagcgaaatgggttgctgtgcatgatgatcatgggtccaatggggattcggttacggcgtgatttgttttcttcatcggttatggatgaaggctggagggagagcctctgcggcatgtaact

SEQ ID NO: 161546 - DNA, 313 bp, Zea mays
  Clone ID: MRT4577_78908C.1
tcagcaactacaaccacaacacttatattaacatcaacaacaacagcaacaacggcaggattaatgtataggccaacaactacatcaccaactatcacaaggccatgttcatcaacacgaacagagccatgagcaccaccaatgtcagatccattatcaacaacattaacatcaatttacagtgctcaatgaccatgcattcaacatactacaatatcctcaacaatatgatcaatactagtaataatcacaacagcaacaatgacattgacagtagcaccatcatatctacaatgtcagctattactactat

SEQ ID NO: 161547 - DNA, 380 bp, Zea mays
  Clone ID: MRT4577_78909C.1
gacaagcttttttttttttttttttttttttttttttgtacaagctttttttttttttttatacaacctttttttttttttttttttcttttttttaccttttttctttttgctctactttttcccactgcctttttgggggggggggggggggctgttccctcaccatgctcccatctttttccttcctattccgatacagctctctggaagccatccccatcccaaatatgcctctgtgactcaagatctgttctctgccatgatataatatgtggtgatcaagaattatactgtcccaaccctgcgggggggtttgtggaatattctgctttttttcctccaccttcaacagctcctttcccgtcttcatgtgggca

SEQ ID NO: 161548 - DNA, 461 bp, Zea mays
  Clone ID: MRT4577_7890C.1
aaagctggcacgcctgcagggagccgggcctgaattatactgtgcggggccgacgagcttactagtcggcgggcgcccttaggttttgttggtggttctccctactgaggagagcacggagttagactattgccactgagaacagacgtagccatgcttgtgggcatcagccgcgctccatcatggtcgaccagtggagggctgggcattaactatccatttctcactaggaaccgcaaaatgggaatcgctcatggttatgcgacaaggaacggctaatatccaattgagacgagtggtaatatcacccatctccatcagcaattaattccgcagcgaactcaaagtcatgaagcaggctacctgagaccgctccttgacctcaatgccggagatggctactgaaacctgagccgagcagcagaatggggtgcggactctctctcagatcatggacattt

SEQ ID NO: 161549 - DNA, 676 bp, Zea mays
  Clone ID: MRT4577_78910C.1
tcaccgaaacacaatcttcagcacgatactgatccgacgaattaagtctcgcgcacgtacacacgtgccgggacaccagtaacccccaacagcgccactgttcagtgcgagcgtctaggttgcttatgtagccgccatggcctccctcgtcgccgtctccgagaagcccgtggccatcaagggtctcgccggcagctccatctccggaacgaagatcattcgtgcgccatggccgtcgactcacgctccatccgcaggtccctggcaaccgtcgtggtggacaagtacggcgacaagagtgtgctactttgacctcgacgacatctgaatcaccaccggacagtggaacctctacggctctgacgcgacctcgccctacaagccgttacatagcaagtgtcttcgagacgatcgcgaatccgttcacaaagagatgtctgctgctggagatcctgctgctgggagatggatgacttctgggctacgtcagcgcgatcgccagacaccggacctctctgctcgattgagaaaggacatcaagagccgccccagacgagcgcgcgcgacaagatataagctcaccttctgcatttgcatggtctagtagcttgcttatgcactgctagcgccagccgatccgtcacagtctcatgaatcatctctctatcaagtggat

SEQ ID NO: 161550 - DNA, 701 bp, Zea mays
  unsure (1)..(701): unsure at all n locations
  Clone ID: MRT4577_78911C.1
acatcccaattggaagggcagctaataaggtaaggggcgacgaaaatggctccaacgaccgccaccaaggacgacagtggctacggcgacgagcgccggcgcgagctgcaggcgttcgacgacacgaagctgggggtgaaaggtctggtggactccggcgtcaagtccatcccgtccatcttccaccacccgccggaagccctgagcgacataatttctccggcgcctctgccgccgtcgccgccctccggcgccgccatcccggtggtggacctctcggtgacgcggcgcgaggacctagtcgagcaggtgaggcacgcggccgggacggtgggcttcttctggctggtgaaccacggagtgccggaggagctgatgggcggcatgctccgcggttcgtgttcgagctgctgtccgagtccctcggcatgcccagcgaccacctgtacgagatggagtgcacgcagaacctgaacgtggtgtgccagtactacccgccgtgcccggagccgcaccgcaccgtgggcgtcaagaggcacacggaccctggcttcttcaccatcctcctgcaggacggcatgggcggcctgcaggtgcgcctcggcgacgggcagaacggcggctggctgggtggacatcgctccccggnctggggcgctcatggtcaacatcggtgaccttctgcagctcgtgaccaatga

SEQ ID NO: 161551 - DNA, 225 bp, Zea mays
  Clone ID: MRT4577_78912C.1
accagacgtaccagaggtgtgatcttctcaaacttcaggggggatcgctcgagatgctgaaaacgctcagtgtgagttacaaagtcagtgcgttagaatggtgcagactaccccgaagcatcatgttatctaataactgaaggcgtgttcattggagcgaacgtgattcagatcatggatatgaactgtctaagtttgaccattcagttgctagggtgtcttgct

SEQ ID NO: 161552 - DNA, 703 bp, Zea mays
  Clone ID: MRT4577_78913C.1
aggccggtatgaaggcctgcggttctatttaaagcttgttatcgcaggtgtagtagaggcacatccagggcagctaataaggtaataaggggcgacgaaaatggctccaacgaccgccaccaaggacgacagtggctacggcgacgagcgccggcgcgagctgcaggcgttcgacgacacgaagctgggggtgaaaggcctggtggactccggcgtcaagtccatcccgtccatcttccaccacccgccggaagccctgagcgacatgatttctccggcgccgcctctgccgccgtcgtcgccctccgccgccgccatcccggtggtggacctctcggtgacgcggcgcgaggacctagtcgagcaggtgaggcacgcggccgggacggtgggcttcttctggctggtgaaccacggagtgccggaggagctgatgggcggcatgctccgcggggtgcgccagttcaacgagggccccgtggaggcgaagcaggcgctctactccagggacctggctcgcaacctgcgcttcgcctccaacttcgacctcttcaaggctgctgcggccgactggcgcgacacgctcttctgcgaggtggctccgaatccgccgccgcgggagcagctgccggagccactgaggaacgtgatgctggagtacggcgcggcggtgacgaaactggcggggttcgtgttcgagctg

SEQ ID NO: 161553 - DNA, 359 bp, Zea mays
  Clone ID: MRT4577_78914C.1
attaataaggggcgacgaaaatggctccaacgaccgccaccaaggacggcgacgagcgccggcgcgagctgcaggcgttcgacgacacgaagctgggggtgaaaggcctggtggactccggcgtcaagtgcatcccgtccatcttccaccacccgccggaagccctgagcgacatgatttctccggcgcctctgccgccgtcgtcgccctccggcgccgccatcccggtggtggacctctcggtgacgcggcgcgaggacctagtcgagcaggtgaggcacgcggtcgggacggtgggcttcttctggctggtgaaccacggcgtggcggaggagctgatgggcgggatgctccgcggg

SEQ ID NO: 161554 - DNA, 262 bp, Zea mays
  Clone ID: MRT4577_78915C.1
gcggccgggccgacggactcaataatttcagcgactaccattcaatcagctagctgctgtgatacctgacgacttctcaacacaacaccacatgatgtcactatacctgatcgcttgacgtaacatcgacgctctcttacacatgacacgatggttgaaatgcaaccaatttgcaaagacaaacatggtgccatcctaccgcgcaccgttcatagggagagacctctcttagtgtggttataagctagaggatactatcaca

SEQ ID NO: 161555 - DNA, 396 bp, Zea mays
  Clone ID: MRT4577_78916C.1
cccagccaactccgtcctcataaaaaatggggggggcaactttttcagctggataattttccaggaaggggccagttgggataattccttggggggcattttacatgggccaaaattttataaagggggagcccgtaaaatttttgggtagaaacaggtaaaaggccccggggcatgggattttcgtttcctagggttcccggtggttatttattttccccatggggggaaaaaaaaaaaacgggggagagcatcatccatttttaaaggggagcccacttgatctgaaatccaaattcaaaaccaccccactttttgatgtttttggccaaatcctttgccaccccagggtaggaatggggggttagtttaaaaagcttaaatcgaacctcctcc

SEQ ID NO: 161556 - DNA, 1449 bp, Zea mays
  Clone ID: MRT4577_78917C.1
cttcgtttttgtattcaggacctgcggttctatttaaagcttgttatcgcaggtagtagaggcacatcccaattggaagggcagctaataaggtaataaggggcgacgaaaatggctccaacgaccgccaccaaggacgacagtggctacggcgacgagcgccggcgcgagctgcaggcgttcgacgacacgaagctgggggtgaaaggtctggtggactccggcgtcaagtccatcccgtccatcttccaccacccgccggaagccctgagcgacataatttctccggcgcctctgccgccgtcgccgccctccggcgccgccatcccggtggtggacctctcggtgacgcggcgcgaggacctagtcgagcaggtgaggcacgcggccgggacggtgggcttcttctggctggtgaaccacggagtgccggaggagctgatgggcggcatgctccgcggggtgcgccagttcaacgagggccccccggggagggcgaagcaggcgctctactcgagggacctcgctcgcaacctgcgcttcgcctccaacttcgacctcttcaaggctgctgcggccgactggcgcgacacgctcttctgcgaggtggctccgaacccgccgccgcgggaggagctgccggagccactcaggaacgtgatgctggagtacggcgcggcggtgacaaagctggcgcggttcgtgttcgagctgctgtccgagtccctcggcatgcccagcgaccacctgtacgagatggagtgcatgcagaacctgaacgtggtgtgccagtactacccgccgtgcccggagccgcaccgcaccgtgggcgtcaagaggcacacggaccctggcttcttcaccatcctcctgcaggacggcatgggcggcctgcaggtgcgcctcggcgacgggcagaacggcggctgctgggtggacatcgctccccggcctggggcgctcatggtcaacatcggtgaccttctgcagctcgtgaccaatgaccggttcaggagcgtggagcaccgggtgccggccaacaagagcagcgacacggcgagggtctccgtggcgtccttcttcaacacggacgtgaggaggtccgagaggctgtacggccccattccagaccccagcaagcccccgctgtacaggagcgtcagggcccgagacttcatcgcaaagttcaacaccataggactcgatggccgcgcgctcgaccacttcaggctctagctacctggctacgtttcagattcgtcctttcatttgctttggtctctaattaataattccaaataataagcccgcggatggacctctgtctgtctgtctgtaatttagtttccaagtttagtttgttgtggtaataattcctgtatcaattatgtcataaataaaagctagggaaccttgacaaaaaaaaaaaaaaaaaaggcccctagggcc

SEQ ID NO: 161557 - DNA, 535 bp, Zea mays
  Clone ID: MRT4577_78918C.1
ggtccggtccgctcgccctcgcctccacttttgagccacagacccgtagcgatcgtgccccggcccccgatcctgattcccacaaatttccgccatggcgatccgcccggactgatgcccgattctccatctgacgatcctcggtaagccttcgccccccgctggtttgatcctgcgtgattgacatggcttgtcaggttcttgcgggttcttttgcgtctttttgttgtggttgcagattcgtcttgcgtatgagtgttccgcggattccctcgttgcctggtcgagtatttgtattttccattggcccattcgtgacgattcttaggactccttcggttctatagggttctgttaccaatccgtgggttttctattgcagaattgatcttttttcttgcgaagtcttcgaccactctagtgcgctcctttgattctcttctacccctgcgaatttcgttgctgaaccgtatctgtccgcccgcatggtcttcttctggaggaagattggggggaattctggtggggttcgtgt

SEQ ID NO: 161558 - DNA, 1449 bp, Zea mays
  Clone ID: MRT4577_78919C.1
cggacgcgtgggcggacgcgtgggtgcagggcctgcggttctatttaaagcttgttatcgcaggtagtagaggcacatcccagttggaagggcagccaataaggtaaggggtgacgaaaatggctccaacgaccgccaccaaggacgacagtggctacggcgacgagcgccggcgcgagctgcaggcgttcgacgacacgaagctgggggtgaaaggtctggtggactccggcgtcaagtccatcccgtccatcttccaccacccgccggaagccctgagcgacataatttctccggcgccgcctctgccgccgtcgtcgccctccggcgccgccatcccggtggtggacctctcggtgacgcggcgcgaggacctagtcgagcaggtgaggcacgcggccgggacggtgggcttcttctggctggtgaaccacggcgtggcggaggagctgatgggcggcatgctccgcggggtgcgccagttcaacgagggccccgtggaggcgaagcaggcgctctactcgagggacctcgcccgcaacctgcgcttcgcctccaacttcgacctcttcaaggccgctgcggccgactggcgcgacacgctcttctgcgaggtggctccgaacccgccgccgcgggaggagctgccggagccactgaggaacgtgatgctggagtacggcgcggcggtgacgaagctggcgcggttcgtgttcgagctgctgtccgagtccctcggcatgcccagcgaccacctgtacgagatggagtgcatgcagaacctgaacgtggtgtgccagtactacccgccgtgcccggagccgcaccgcaccgtgggcgtcaagaggcacacggaccctggcttcttcaccatcctcctgcaggacggcatgggcggcctgcaggtgcgcctcggcaacaacgggcagagcggcggctgctgggtggacatcgctccccggcctggggcgctcatggtcaacatcggtgaccttctgcagctcgtgaccaatgaccggttcaggagcgtggagcaccgggtgccagccaacaagagcagcgacacggcgagggtctccgtggcgtccttcttcaacacggacgtgaggaggtccgagaggatgtacggccccattccagaccccagcaagcccccgctgtacaggagcgtcagggcccgagacttcatcgcaaagttcaacaccataggactcgatggccgcgcgctcgaccacttcaggctctagctgcctggctggctacgtttcagattcgtcctttcatttgctgtggtctctaattaataattccaaataataaggccggcggatggacctctgtctgtctgtagtttccaagtttagtttgttgtggtaataattcctgtatgaattatgtcataaataaaagctagggaaccttgataaataaaaaaaaaaaaaaaaaaaa

SEQ ID NO: 161559 - DNA, 322 bp, Zea mays
  Clone ID: MRT4577_7891C.1
aaaccaaaagccatttgttttattaaacgtccttaaatgggcatatgccatgcccttttgatatacctacccaacagggggggggttgcttttaaatccaaacaaaggggaaaaaaaaggggcctacatgcttggcccttttgccccccctgaagcagttagctaagggggggggctttagacgttacacttgtggggcttgttttccattttcagcctgaagaagtacaaaccctggaagggtgttgtgcccaaggtggctattcccccccccattaaaaaatttccggtgccccccaccaaacgaaatattccttttttt

SEQ ID NO: 161560 - DNA, 258 bp, Zea mays
  Clone ID: MRT4577_78920C.1
attccagttcgaggccacgcgtacgcgcaggcggacgcttctgccgtacttgcggatgtcccttcatcacccggcatgctaccgcccgtaccagagatacatgtgtactgatcatggttaagcacgtactccgatccattcccatcccatgaagccatgataatgatgatatgatccatggaccatgcatggtgctctggtcgatgccgtacgtgtgtccctgatacaatactattgtagtactgatgacccataaaa

SEQ ID NO: 161561 - DNA, 1533 bp, Zea mays
  Clone ID: MRT4577_78921C.1
cctcgaggcggccgggaagaaaaataacgttttctttccttcgtttatgtatgcagggcctgcggttctatttaaagcttgttatcgcaggtagtagaggcacatcccagttggaagggcagccaataaggtaaggggtgacgaaaatggctccaacgaccgccaccaaggacgacagtggctacggcgacgagcgccggcgcgagctgcaggcgttcgacgacacgaagctgggggtgaaaggtctggtggactccggcgtcaagtccatcccgtccatcttccaccacccgccggaagccctgagcgacataatttctccggcgcctctgccgtcgtcgccaccctccggcgccgccatcccggtggtggacctctcggtgacgcggcgcgaggacctagtcgagcaggtgaggcacgcggccgggacggtgggcttcttctggctggtgaaccacggcgtggcggaggagctgatgggcggcatgctccgcggggtgcgccagttcaacgagggccccgtggagggcgaagcaggcgctctactccagggacctggctcgcaacctgcgcttcgcctccaacttcgacctcttcaaggccgctgcggccgactggcgcgacacgctcttctgcgaggtggctccgaacccgccgccgcgggaggagctgccggagccactgaggaacgtgatgctggagtacggcgcggcggtgacgaagctggcgcggttcgtgttcgagctgctgtccgagtccctcggcatgcccagcgaccacctgtacgagatggagtgcatgcagaacctgaacgtggtgtgccagtactacccgccgtgcccggagccgcaccgcaccgtgggcgtcaagaggcacacggaccctggcttcttcaccatcctcctgcaggacggcatgggcggcctgcaggtgcgcctcggcaacaacgggcagagcggcggctgctgggtggacatcgctccccggcctggggcgctcatggtcaacatcggtgatcttctgcagctcgtgaccaatgaccggttcaggagcgtggagcaccgggtgccagccaacaagagcagcgacacggcgagggtctccgtggcgtccttcttcaacacggacgtgaggaggtccgagaggatgtacggccccattccagaccccagcaagcccccgctgtacaggagcgtcagggcccgagacttcatcgcaaagttcaacaccataggactcgatggccgcgcgctcgaccacttcaggctctagctacctggctacgtttcagattcgtcctttcatttgctttggtctctaattaataattccaaataataagcccgcggatggacctctgtctgtctgtctgtaatttagtttccaagtttagtttgttgtggtaattcctgtatcaattatgtcataaataaaagctagggaaccttgataaataacagagagtatagtatgtataccaaaaaaaaaaaaaaaaaaaaaaaaaaaaaaaaaaaaaaaaaaaaaacctcgtgc

SEQ ID NO: 161562 - DNA, 1927 bp, Zea mays
  Clone ID: MRT4577_78922C.1
aattcggcacgaggtggaagggcagctaataaggtaataaggggcgacgaaaatggctccaacgaccgccaccaaggacgacagtggctacggcgacgagcgccggcgcgagctgcaggcgttcgacgacacgaagctgggggtgaaaggcctggtggactccggcgtcaagtccatcccgtccatcttccaccacccgccggaagccctgagcgacataatttctccggcgcctctgccgccgtcgtcgtcgccctccgccgccgccatcccggtggtggacctctcggtgacgcgccgcgaggacctagtcgagcaggtgaggcacgcggccgggacggtgggcttcttctggctggtgaaccacggcgtggcggaggagctgatgggcggcatgctccgcggggtgcgccagttcaacgagggccccgtggaggcgaagcaggcgctctactcgagggacctcgctcgcaacctgcgcttcgcctccaacttcgacctcttcaaggctgctgcggccgactggcgcgacacgctcttctgcgaggtggctccgaacccgccgccgcgggaggagctgccggagccactcaggaacgtgatgctggagtacggcgcggcggtgacgaagctggcgcggttcgtgttcgagctgctgtccgagtccctcggcatgcccagcgaccacctgtacgagatggagtgcacgcagaacctgaacgtggtgtgccagtactacccgccgtgcccggagccgcaccgcaccgtgggcgtcaagaggcacacggaccctggcttcttcaccatcctcctgcaggacggcatgggcggcctgcaggtgcgcctcggcgacgggcagaacggcggctgctgggtggacatcgctccccggcctggggcgctcatggtcaacatcggtgaccttctgcagctcgtgaccaatgaccggttcaggagcgtggagcaccgggtgccggccaacaagagcagcgacacggcgagggtctccgtggcgtccttcttcaacacggacgtgaggaggtccgagaggctgtacggccccattccagaccccagcaagcccccgctgtacaggagcgtcagggcccgagacttcatcgcaaagttcaacaccataggactcgatggccgcgcgctcgaccacttcaggctctagctacctggctacgtttcagattcgtcctttcatttgctttggtctctaattaataattccaaataataagcccgcggatggacctctgtctgtctgtctgtaatttagtttccaagtttaggtagtgtttggttactagggactaatttttagtccctctattttattccactttagtttataaattgcaaaatatggaaactataactctattttagtttccatatttgacaatttagttactaaagtggaataaattggagggactaaaaattagtctctaaaaccaaacacccccttagtaggagattcgtttctagggactaatttttagtccctccattttattccactttagtctataaattgcaaaatatggaaactataactctattttagtttccatatttgacaatttagtgactaaagtggaataaattggagagactaaaaattagtctctaaaaccaaacacccccttagtagtatatgcagaagcttccaaaagcctgatgagcaaggtagatgaggtctgagaaacactgcattcgatatatatatgccttatgtactaccttcatgcagtaggtctgtagtaaatttgtgcgtaactcttcttctgcgtattccagaaaaaaagtttgtagtaaatttgtactatatggtagtaaataggggtcaactattgtaatttgtagcacaatgaatcttgtaagaaatctcagtttagcaatactccatcttttacac

SEQ ID NO: 161563 - DNA, 1159 bp, Zea mays
  unsure (1)..(1159): unsure at all n locations
  Clone ID: MRT4577_78923C.1
gggtacctcgaggccggccgggcacgtgcctcggagcgggcccggcggagcgggccccggggggcgcagagtcacgcgtcagttcgttccctcctctgtgtaccggccagtaaaatccgaacccacagcgagaaatggcggcggcagcgctccgtccggcgatcctccgccgcatccgcctctccccctccccttcgctcgccctcgccgccgctgggacaggtgcatcccacccgcacgcgctggggcggtggctcgcgcggcccatgtcctcccacgacgcgcacctcacccgcgacgaagtcatcgaccggatcctcgacgtcatcaagagccaccccaagatcgacccctccaaggtgaccccggaggcgcacttcgagaaggatctggggctcgacagcctggacaccgtcgaggtggtcatggccatcgaggaggagttcaagctcgagatcccagacatggaggctgacaagatcgactcactccctctggccatcgagtacgtcgccaaccaccccatggctggctgagcctctgctcgcccgagaggaggcgagttgaggtgaggcttcgcttggttttgtttccgagggcaaataatctgctggagtggcacagaaaaacttgttcctggtgctctgcattgcttcacggtgacggatgatgatgtcgaaatggaacattaacattttcagcgttagattgttgtttttgtgtgcgtgttatatctatatatactggttgacaaactagtttggttgattgagtctgatcgttgttgggttatttgaattgggttcgtgatagtttcccatgatattttatctgttttccatgtgcttttgggaacctaaattgataagaacggcttacaaggattgatgtaggttaaaagtctcagggttcatgacagctgttagtgtggcctcttgttgtccaactcttgttcctgttaatgaggcttgagtctgttttatttgtcaacattatggttttgttggttggaagtattccacctattgcatgagaagagatccaccgattgcatgagaagagatcaaaggaaaaaaaaaaaaaaaaaagtgtggcctcttgttctnaaaaaaaaaaataaaaaaaaaaataaaagttctttgtgttgttaccactgctt

SEQ ID NO: 161564 - DNA, 348 bp, Zea mays
  Clone ID: MRT4577_78924C.1
ataataattctccaccaccaccacccctcttggggggcttaatggaagcctcccccctattcacgatggcagagatagataccgcctcctggcaatgaagaaaacaaacctcgcctccgaaaacagcatctaaaaactataagcgctactggacccatctggattaacacaatgggcaaaacaacctatattttcaagcgacgaaccattaaaagtaagctttaggggaacagaactatccaaaactctataaaacttacagttctcggacctcgcgaaacgcgagagcatgacccacatttagagcatctcccccctcggaaagaacctgttccggtctcacttggg

SEQ ID NO: 161565 - DNA, 308 bp, Zea mays
  Clone ID: MRT4577_78925C.1
gtcaaccacctcgcttatcctcctcatctccctcttggtctgcacctacgcccagaagaagcctgtttggcctactgctgcctccgcttctctcttcatcaccggctttggtgaaagacgcgacgaaagacacttcttccgttatttctacaaccaagacttcgaacgttttgatggtcctcgtaactttttcggtgaacaatactggaccaccgccatccacgacgttaagggaaagcaagaatggttcatcgcctaccaacgtgacctcgttgactgcgaaagcttcgccaacaaccgcactctcc

SEQ ID NO: 161566 - DNA, 671 bp, Zea mays
  unsure (1)..(671): unsure at all n locations
  Clone ID: MRT4577_78926C.1
agttctacgatttttacaatctttattcctgggagaaggttttggcattagatatgcaaagagcagaaccaatgtaaaaggcacgaggtgcatgcaggagttcgtgtgctgctgctcgggcaagccaaaagagccaaattcaacatcatcacggtgtcaatgccaggccatgataagacttttgcggacagacgacgatggatggtacatcaacgaattcaggtcaagccacaatcaccagatgttaaacacatgtgctgaaaagctccatttcccttcacataggcatatcgacaaatataccagagagctagtatcacagcttagagagaacaatgtgaacctgagcaaagtttacagtactcttgcaactttttttgggagggtcgaaaatgtgccgttcaccaaaaggtgcctcaggacattatgtgggaagctgagcagggagcaggccgatgacgatgtacggaagacgatggcaattttttcagagatgaaggtccaagacagcgagttcagttacaatgtgcaggtagatgatgaaagtagaatacgtactctcatgtggacgaatggacgtagcaaaaaacaataccaccattttggcgatgntgggacgntcgaacccacatacaagactaatctatacgaaatgccattcggtatttttt

SEQ ID NO: 161567 - DNA, 282 bp, Zea mays
  unsure (1)..(282): unsure at all n locations
  Clone ID: MRT4577_78927C.1
gccgcctgggatccattaattactgcgcgcgcgcggctgaccaaccaatcccagcgtgcgtaatctatcgcccacatgccgacgccgtcgcacctcaacaagaacccgcgctacctggacttccgggcggcgcggcgggtgccggagtcgcgcgcctggccgggcctgcacgaccaccccgtcgnggacttttgcgcgccgggccccgacgccgtgccggtggtggacctgggcgccgnggacccngcgccggcggcgggnggggcngnggcccgngccgcc

SEQ ID NO: 161568 - DNA, 225 bp, Zea mays
  Clone ID: MRT4577_78928C.1
ggcgcttggatgcgaccttagagacacctaccttgccactcgtgcagttctggcgacctcgcagatgccatatggctctaataacctgtgagggggaaccatttcggcaagatctccggtaagctgaggggctactgtatgatcagagacgccgttggttttgctctgaagagatcagcaatatctagaatgtccctgcgagcatacgatcgctagagagacctt

SEQ ID NO: 161569 - DNA, 780 bp, Zea mays
  Clone ID: MRT4577_78929C.1
gtttctcccccaaccgaaaccctcgccgccgtcaccctcctccccactccaccggcggccatgggcgaaccgcaatttatcatcggcacccccatgagcgatatgctcgccggcatggagcgcgacggccgggaccctgcgacgctcgaccttggctcaaactatctgctctacttcctgtacgactacctcccgcacccgccggtctcccccgccgccacccgctcgctctccggcgtgccgtgggccccgggaggcttggaccgcatcagccgcctccccgatgcgctcctcgccgaaatcctctcccgcctccccgccaaggacgccgcgcgcacctccaccctcgcctcgcgctggcgccccctttggcgctcggcgcccctctctctcgtcgacggccatctgcttccggacggcggcgcggccgggcagctccccatcggcgttccctctccccgtgccgtcaccgccgcggtgtcccgcatcctcgcggcgcatccggggcccttccgctgcgtccacctcacccgcaccaccatggaggagcaccggggcgagatatcgcgctggctcgacatcctcgtcgccaagggggtccaagagctcgtctttgtgaaccgcccttggccgattgacctgcgcctccccgccacgctcttcggctgcgcctccctcacccgcctctatcttggcctctggaggctcccggacaccgccgccgtaccttgcggcgccagattcccaacctcaaggagctcgggctctgcatgactgtca

SEQ ID NO: 161570 - DNA, 366 bp, Zea mays
  Clone ID: MRT4577_7892C.1
gctcggaattcggctcgagggctaggctaactctcccccttttctttttggccaacaccacctaacattacggggaggctatattagtcatgggggtggaagcaccaccgaccgttgcaatggactgctactcgacctcgcggtttcctctgactcctcggtggggtgctcaaatccgtatagatgcaccatcgcagctacatcacctagactttgaagaccgatatcggtcatgggggcgtactttacacccgcaacacctaggaattcactctcgggctttgcaattgtcttggaactctacactgaggattaaactttggacgatggtacttacattgatttaatctcacatggaaaggaaaa

SEQ ID NO: 161571 - DNA, 236 bp, Zea mays
  Clone ID: MRT4577_78930C.1
gcagaaggtcatggacactggcctggtgtataacatgacggacatggtttacgtgccggacgtgttccggctcaagtacacggtcgactaggcgagcacgatcatgtacacgaagatgtccgtgtagtgcgccaagctgtgaacgcttgtacaggaggaccttaactaccagttcatcaacgtcatcctcaaccagatggacttcaacgcgactgtcaaccggaacgtcaataacg

SEQ ID NO: 161572 - DNA, 516 bp, Zea mays
  Clone ID: MRT4577_78931C.1
atggaaggcggcggcgaggtccttcttcctcttggcagctccctcccggcgcgacgtggacggggcgacgccgatgaggtaccccaccgctgggagaagtggaggcggtggggcggtgtggggtggcggtggatccggcacccccatggccggatctggcgcggcagcgcagcccgcggtggtgcgcggctgggggtggcgacggtggcccggcggcgcaatgcggctgggggcagcggcggcggcccggtggctgggagcagcacctggcaaggcggcggcggctccggaggcgccccgctcggatccggcgtccccgcggccggatccgactcccggatggccagggtcgtgatggccggcgtcgccggcgacaggaggacggcgcgtgcggaaggacggcgcatgcgcgacgagaggacgccgacgtcgaggtcgatgcgtgcggcgccgtgcagcgggctgacgtggcagtggctggcaccggcgatgcttgccgccggacctcatggatga

SEQ ID NO: 161573 - DNA, 349 bp, Zea mays
  Clone ID: MRT4577_78932C.1
cattgggtacctcgaggccggccgcgtctacgattccggggtgcaggtcttcgacgtcgcgcaggaagggtgctacccctgcgacacgcgcgagtggcagtgacgcgcgcacgggctggattctagatttctagtagattgtacagcttttcttttttttttttttggtcgggaatgggacgaaagatatgaaatgatgatgagcggagccggagagccgaatcaaatcaaatcaaacaaacgtgccgttgcaaaaaaaaaaaaaaaaaaaaaaaaaaaaaaaaaaaaaaaaaaaaaaaaaaaaaaaaaaaaaaaaaaaaaaaagaaaaaaaaaaaaaaaaaagcggcc

SEQ ID NO: 161574 - DNA, 331 bp, Zea mays
  Clone ID: MRT4577_78933C.1
cactgtccaccggtactagttgatcttatgcacgctaagaccccacatagcgctgggcagctattcgtaggcgtgttccttagcctggtccatggccacatcgtccgcgcgcattatcagttcaagaagaaggacgcggaccgcatgctgctcgagacctatcgaagaccggatcgtcatcttgtcccactatatcttgaaacgttcataaagcgcatacagaccttttttgctagcatgcctctcgttgatttatacgtcaagtggcttaacaacagggtgcactccatcccagtgatggcgccgatcaacacggctttttcatacttgt

SEQ ID NO: 161575 - DNA, 778 bp, Zea mays
  unsure (1)..(778): unsure at all n locations
  Clone ID: MRT4577_78934C.1
gacttattttcccactgaattgcccgcagtgatttctaagctggtcgcgcagctcgctcctttggactagccatgacgcgctatctaaggtcaataggccccggttcaaaggaagatgggggtgtggacatgacgatagttggttgatctgggtgaattggtgtcttttcgtgtctccagctgtgctgcaggggcgccttaaaagcgaaactcgattacgaattccactcgcacaaatacgacaagaaatacgacacaagaaaagaaagggagaataaaagaagtatatatagggtgaccggtcgacgacaagaaccggcaaatctttcaacatgacagacagactcaaccacatcgctgcacacctctctacagcacaagctccagcatcgccgacctcacctccacgattatctcgaccgccccgaccaaagaagagaaccgaaactcgcaacgaaatggcgaccccgaccgacatccacctctacacggcgcagacgcccaacggcatcaaggtgtcgctgctgctcgaggaactgggcttgcagtacaaggtcacggcgctcgacctgacgcaaaacgtgcagaaggagccctggttcctcgaaatcaaccccaacggccccattcccggcgctgacggacacgcacaccgacggcaagccgatccgtctctttgagagcggctctattctgctgtacctggccgaccgctacgacacggagcacaagatttcgtatccctttggcacgcagngagtactatgaagtcaacact

SEQ ID NO: 161576 - DNA, 198 bp, Zea mays
  Clone ID: MRT4577_78935C.1
ggggtggtatatataaacctacttgtgggaaggaaaacgtattagaataaacagttcacggaccaagttaccggtttacagttcaaattcaccctacaagttcaggaaactgtccctgaccctgtaacatgaataagggtagggacacttattcatgggtttattttattttttatggaacactgaacatttcggttt

SEQ ID NO: 161577 - DNA, 281 bp, Zea mays
  Clone ID: MRT4577_78936C.1
gtggggttttttgatctctgccacccttgtcaacggagtcttgtaaagttgccgagggtaggttcatctccaggtttcgggattcccgtccgtcctggcgatcctgccagcagtgggtgggcagcctgagctccctcgggctcgcctgccagcctggagttcttcctgtgctccttgatcacctgagctgcctcagattccatttggtcctctccttcctggaaggcttccgtttatgttttggtgtaatcccagatgtctgaatgttttgcagtgtgtag

SEQ ID NO: 161578 - DNA, 1030 bp, Zea mays
  Clone ID: MRT4577_78937C.1
ggccgggtaaaggattaaaccgtcgcagcgcgcgcggagtccctccatctccatccggcgacagaccgaccgaccgggcatggcgaggccggggtggggctcgctgttcggctgcttcagcagcagcagcagcagctcccgcggggacgggaagaagaagcagggcaagggaaagggcgccgggaagatgacgaagaagaagcagaagagcaagcagcagcagaaggtggcggcgggcagccggccgcggtcgctgcagagccggatgtcgttcacggagctgagcctcagcgggatggtgtcgcccgaggacctgtcgctctcgctcgccggctccaacctccacgtcttcaccatcgccgagctgcgcgccgtcacccgggacttctccatgaccaacttcatcggcgagggcggcttcggccccgtctacaggggctacgtcgacgacaagaccaagcgggggctcgccgcgcagcccgtcgccgtcaagctgctcgacctcgagggcggccaaggacacaccgaatggctgacggaggtcttcttcctgggacaactgaggcaccctcacctcgtgaagctgatcggctactgctacgaggacgagcacaggctgctcgtctacgagttcatgaccaggggcagcctggagaagcatctcttcaaaaagtacgcggcgtcgttgccttggtccacacggctgaagatcgccattggcgctgccaaagggttggccttcctccatgaagccgagaagccggtcatctaccgggacttcaagacctccaacatcctgctggactcggattacaaggcgaagctgtcggatttcggtctagccaaagacgggccggaagacgacgagacgcacgtgtcgacccgggtgatggggacccaaggatacgccgcgccggagtacatcatgacgggccacttgacggcgaagagcgacgtgtacggcttcggcgtggtgctgctggagctgctgtcggggcggaaggcggtggacaagagccgccccccgcgg

SEQ ID NO: 161579 - DNA, 414 bp, Zea mays
  Clone ID: MRT4577_78938C.1
ggcaaaaggtggaacactttattccttactcaaaccaaaccaccttttacatgacacgccaattgggggacacacgagctgagtttggctgggggggatcgaagggttttagcacacacgagctgagctgagcaaacccgttaacgcagtagtgactactggaatttttagctactcataaagggttttatttgaaacgcaaagacaaaactccggaacttcgccggcgaactaataaccaaaataatcctcaaggagtgacagccatgacagggttaacaggtgcaacattaacacagtagtttttgacaacatggtttttagttttaacaccatggagctagtttcacgacataggaccgtttatttacgtttcttgaagtaacaaccacacaatgtcatttggtggtttaa

SEQ ID NO: 161580 - DNA, 285 bp, Zea mays
  Clone ID: MRT4577_78939C.1
atcgaaacaatttttttttttttttgggttttttttttttattgtttttttttttgttccttcttttaattttattcatttattttttaatttgtctggcttactaaaacaaccaactacattttaaagattccactacccacatatgcttacaaacaacaaaatgggaaaccaaccgcttgccagggtgctggacaaaataaccaaacaccagaatacaacctaccggatttctaaatgctagcgtacaatctttacagcataagaaccccaggttactcatca

SEQ ID NO: 161581 - DNA, 307 bp, Zea mays
  unsure (1)..(307): unsure at all n locations
  Clone ID: MRT4577_7893C.1
ggaaagggaaacatataccctccctaaattcaaaacaagggcagggcaaggcttctggacatcggaaaggggcaggggggggccccatccaagggtgttgtacattacactactactcantccaaggggggggcccaaagtagggcccagggccccatttggaaaacaaaccctttatttttgggcaaccggcagggtttgaaatggttcgggggaacgggtcccccttaaacctttttacatgaagagatcctagacatccatacgggttttaaaggacctgaaatgggccagttttttccctttt

SEQ ID NO: 161582 - DNA, 601 bp, Zea mays
  unsure (1)..(601): unsure at all n locations
  Clone ID: MRT4577_78940C.1
tccatctttagctggttggatggcaaatgcagccgcctcttcatctgttcagtctgctgttnnnnnnnnnnnnnnnatacctgttccacccaatcaagagtctgagcaactaatgaagcgcttgaggcctggtggtggacatggcattgatgaggccacatatcctgctcccacccctcaacctgcatggtcagtggatgatcttccaaggacagttgcttgttcattgtcacatggatctaatgtaactagcatggattttcatccaactcggcatacactgcttctagtgggatctgctaatggtgaatttacactttatgagatcggtctgcgtgaaacattactttcaaagcccttcaaaattcgggatataaatgcatgttcaccacaatttcagaatgctgttgtcaaagattcctccatatccattaatcaagttacctggagccctgatggagatatgattggcgttgcattcacgaaacatttgatccatctgcatggataccaaccaccaaatgagacacgacaccttctagagattgaggctcattctggaggtgtaaatgatatagcattctcccgaccaaataagcaa

SEQ ID NO: 161583 - DNA, 336 bp, Zea mays
  Clone ID: MRT4577_78941C.1
ctttctctccttccttattaaggactttaatttccatctatcgctgcatttttatacattccagcagcccacaacttcacatctcaatatacatcacaattttaatccatttcacattttcaatcataccattgaattcttcctcaaccttcaaattctaattcctccaaatcatgattatcaaatatctatcctgaacattgtatcttttaaaacttcaaattccccatataactcatacttttttactactttttctaataaatcactatacatatcacttctacatattcacataattctcatcattccaaacaatttacttcctttttatta

SEQ ID NO: 161584 - DNA, 4000 bp, Zea mays
  Clone ID: MRT4577_78942C.1
aattcggcacgaggctggttggatggcaaatgcagccgcctccgcttctctctcgcctccgcttcgcttcgcgagagacgggccgacgacggaaccctaggattcgcgcccgcctgagcggccaagccaccaggaccgcgccctccggacccgggggcgccagacaagctccggggcgcgcggatcgaccactggccggcttaccgccgccgctgccatgtcgtcgctcagccgcgagctcgtcttcctcatcctgcagttcctcgacgaggagaagttcaaggagaccgtgcacaagcttgagcaagagtcagggttcttcttcaatatgaagtactttgaggagaaggtccatgctggggagtgggatgaggtggagagatacttgtcaggattcaccaagatagatgacaataggtattcgatgaagatcttctttgagatcaggaagcagaagtatttggaagcgcttgataggcatgatagagcaaaggctgtagatattcttgtcaaggatcttaaagtcttctcgacattcaatgaggagttgtataaggagataacacaacttctcactcttgagaattttagggaaaatgaacagttgtctaagtatggggatactaaatcagctcgaagtattatgctggttgagctaaaaaaacttattgaagcaaacccccttttccgggaaaaacttgtcttccctactcttaaggcatcacgcctccgaactctattcaatcaaagcttgaattggcagcatcagctttgtaagaaccctcgtccaaatccagatatcaaaactttattcaccgaccatacatgttctccacccaatggagctcgtgcatcgccggtatctgtaccactggcagctgttccaaaggctggtgctgcatatccaccactcacagctcatactccgttccaacctccacctggtccatctttagctggttggatggcaaatgcagccgcctcttcatctgttcagtctgctgttgtagcagcagcatcaatacctgttccacccaatcaagctgtctccatgttgaaacgcccagctctaacagactatcaaagtgcagagtctgagcaactaatgaagcgcttgaggcctggtggacatggcattgatgaggccacatatcctgctcccacccctcaacctgcatggtcagtggatgatcttccaaggacagttgcttgttcattgtcacatggatctaatgtaactagcatggattttcatccaactcggcatacactgcttctagtgggatctgctaatggtgaatttacactttatgagatcggtctgcgtgaaacattactttcaaagcccttcaaaattcgggatataaatgcatgttcaccacaatttcagaatgctgttgtcaaagattcctccatatccattaatcaagttacctggagccctgatggagatatgattggcgttgcattcacgaaacatttgatccatctgcatggataccaaccaccaaatgagacacgacaccttctagagattgaggctcattctggaggtgtaaatgatatagcattctcccgaccaaataagcaactttgtgtggtcacttgtggagatgataaactaataaaggtatgggatatgcatggacataaattattcacatttgaagggcatgaggcacctgtgtattctatatgtccgcatcacaaagagagtattcagttcatcttctcaacttcccttgatggaaaaattaaggcctggctttatgacaatatgggatctagggtggactacgatgctcctggcaagtggtgtactactatgctatatagtgctgatggaactaggttgttctcatgtggaactagcaaagagggagactcctatttggttgagtggaatgaaagtgaaggatctatcaagaggacatattctggattccgtaaaaggtcagctggtgttgctggtgtagtgcaatttgatacagctcagaatgacattctggctgctggtgcagataaccatattaaattttgggatgttgacaataataacatgctgatctgcaccgatgctgaaggaggcctcccagctcttcctcgcttgaggtttaataaagaaggcaatcttcttgctgttactacagcagacaatggttttaagatacttgcaaatgctgatggacttagaactctacgcgcattagggagccggcctccttttgaagcatttaggccgcaatacgaagcttcttctatgaaggtctcaggtgctcctgttgttgctagcatctctcctaacataggccgaatggatcacttggataggaattctcctgcaaagccatctcctatactgaatggtggggatacagcatcaaggagcatagatataaagccaagaatctcagaagaaaagcctgataaagcaaaaccttgggaactaatggaagttctaaatccccagcaatgccatgtagcaacaatgccagaaactccagaccaagccagaaaggttgtccgacttctgtacacaaattctggtgttgggttgctagcactagggtctaacgccattcaaaggctatggaaatggagtcgaaacgaacaaaatccgagtggaaaagccacagctagtgttgtgccacaccattggcagccaaatagtggtcttgtcatgacaaatgatacagcagataccaatccagaggaggcagtcccatgcattgcactctcaaagaatgattcctatgtgatgtctgcttgtggtgggaaggtttctttgtttaacatgatgacattcaaggtgatgacaacattcatgccacctccaccagcatcaacatttttagcatttcaccctcaagacaataacatcatagcaataggaatggaagattcaaccatccacatatacaatgtcagggtagatgaggtaaaaactagactcaaaggacatcaaaggaggataactgggttggcattctccaccaaccttggcatacttgtttcttcaggcgctgatgcacagctctgtgtgtggaccaatgacacctgggaaaaaaagagaacagtctcgatacaaatgccagctggaaaaactccttcaggagatacacgggtccagtttagttctgatcaaagtcacttgctagtagtacatgagactcaactagccatatatgatgcatcaaaaatggagaggatctatcagtggataccccaggacacattgtcagcttccatatcgcatgcatcatactcatgtaacagccagctagtttttgctgccttcactgatggtaacttaggtgtttttgatgcggagaacttgagattaagatgtcgaattgcaccatcggtgataaacagcaatccacctgttcaccctcttgtcgtcgccgcacatccccacgagccaaaccaatttgcggtcgggctgtcagatgggtccgtcaaagtgctggagccattggagtccgaagggaaatggggagcgcccgctccggcagacaatggcatcattcccaatggcaagacgccagcttcgtcggctactagcaaccctgctgcggatcaaatccaaagatagattgtattccctaagcttttctttttctgcaaactttctaattacactgacttatttgtatgtggatgccgttaggatattatcgtcatttgttgtaaaaaggacagaataggttttatgttcaggtgtggttaactttcaggtactaccctagttatcctgttcatggaagattatgtttgcgatacggggtaatagtgtctataaagtatgtcgcctaaggttctctcaggtttagctcgatagctcaaatgatgtaagctatatatttcttcatgaatgtaaagcaatacatagtttttgctcaagatctattttagctggtttttttaatatagcgtgtgttcatcgccgctccaagggatcgcacgcgtgcgtacgcgtgcatggctcgtcttaggtgtt

SEQ ID NO: 161585 - DNA, 1173 bp, Zea mays
  Clone ID: MRT4577_78943C.1
cccgtctacaaccacgtcaccggcctcctcgacccgcccgagctcatcaccccgccgaacatcctcgtcatcaacgggctgcacccaatgttcgatgagcgcgtgcgggacctgctagatttcagcatctacctggacatcagcaacgaggtgaagcttgcatggaaaattcagagagacatgggagagcgtggtgggcacagccttgagagcatcaaggcctccatcgaggcgaggaagcccgacttcgaagcttacattgagccgcagaagcagtacgcggacgccgtgatcgaggtcctgccgacgcagctgatcccgggcgacgacgagtgcaaggtggtgcgcgtgaagctgatcatgaaggaaggcgtggagcacttcgcccccgtgcacctcttcgacgaaggatccaccgtctactggatcccctgcggccggaagctctcctgctcctaccctggcatcaggttcgcctacggcttcgacacctacttcggacacgaggtgtcggtggtggagatggacgggcagttcgacaagttggacgagctcatctacgtggagacccacctgagcaacctgtcaaccaagttctacggggaggtgacgcagcagatgctcaggcacgccgacgtccccggcagcaacaacggcacggggctcttccagaccatcgtcgggctcaagatcagggacctctacgagcagatcgtcgcacttcgctgagagggtcgccatgacggccaaccctatagcaaggtctcgtgatgcctggtcgagccagtagtacgtgttgattggatgagagccggcgcgcatataccgatagctgcatcctggccccatgggatacacgtctaggttgcatctccatagatgcaggcaaaattatttgatttagcttggattgcatatccacacatgcaggccttgttttttttgtcccatacaaacaatcaaacgcagaccgatacttgatcaatacatgtgcagagcctgtttctgctcccacaggcaaccaaacacagaaatgtaaaatcgagattgtgtggatgttcagtctactctaccgctcatgaaaagatttcgttgggtagaacccacctgaagtctcttttgggagcagattgtattttattttatatagttactcccatgatgatgatgact

SEQ ID NO: 161586 - DNA, 440 bp, Zea mays
  unsure (1)..(440): unsure at all n locations
  Clone ID: MRT4577_78944C.1
cgggctccccaagaaaggctccttgggattccaaacctccgccgcgtcattttttttccgaaagagtcgnaagacctgccccctcaacagctcaaggcccccttgccccaccacctactggggggggggggggtcgacttaaacgtcggccactcgtctgttaaaagttttcttatcttctgaagacaattgtctggtggggtcatctttgtccaactttttttttccggggcggctaaccaaacagtgtcgcccgttcagtctcctttggtctggttccacagctcccttcgtttccctgtgcctcttgctctttttttcaagcccgctacttctgccctggcttggttttgtgcggcngctcctcgctctttttctctcctgcctcgttctttcttttttcgggtctctcttttgtgtgccggctctgctttgccttg

SEQ ID NO: 161587 - DNA, 221 bp, Zea mays
  Clone ID: MRT4577_78945C.1
ctgatttttgacttggcattgagatagaattatactaggattcaatacttgacttgacattggattgataatacgaacaccacatgaatcaagcctccaatgttgatggtacctacaatcaattatgtgatcccatcaattatccactttttgatggtacccaaaccaagttgggctttcaagtttagagcaacaaacttagacattgtcttagtatggat

SEQ ID NO: 161588 - DNA, 444 bp, Zea mays
  Clone ID: MRT4577_78946C.1
aggaaaggaatgatttatttcaaaccaaaggggggaggaggaggacccaaatggtgttcccacacatggacatgggagcttccaaaaaaaaaaaaaccaaccccccggccccctttaacaaaaaaccccactaaaactgggaagttctaaagacaaaactggctggcatttcagggggcccggggaaaccccacctaccactgaaaaaaccgccccccaacaggaaaaacccgcgacatcggcgtcttgaacccccccccgttgaacaagttgccccggggcaacccttccaaaattttggggaccgcggaaaagccccgcgggcaagcccccccggggagcgtcgtccccgtcgtaaacgctgccccctcctcgggggcaaggacaaccacaaactccgccgccttgggttccccccccctccgggcgccagggcccctttgg

SEQ ID NO: 161589 - DNA, 684 bp, Zea mays
  unsure (1)..(684): unsure at all n locations
  Clone ID: MRT4577_78948C.1
gttcgacgggccacgcggggttccggccggagctggtgggcgtcctcggcgcgtccagtaagccccccgaggcgcgggagatggcgggcgagtcgctgtgcgccctggtgaccgtgccccgcaaccggaagcggttcgtccaggaggaccgcgacgtggcgcgggtgctgcagctgctgggccccgacgaggagaaggagaagcccgcgccggcgaggcggttcctgctgtcgacggtggcgcacctcacggacagcagctccggccggaggaagatcatgtcctcggagcacgtcaggaatctcgagaagcttgcggaggccgatgtcccagacgccaaacggatcgtgaagaggcttggcgggagtaggctgaggagcattttccatggcatttggagcctgtaatgttgtattgtaacccttggaggcaagacaagcagtcaagcacgcagtagtagtctctctggctaacacatacagtactattgttccttgcatcttttgttactgtgaaggaatcaaagaatgagtcacccagtgatttgcccccctgcgtaaataatacagtacgatacgaacaacacgcacacgtagccaatcatcacgtgctcatcaattatcgctgcagttctcagttnttttttttggaaaaaaacaaatgcttgtggtctcgtggcaggaa

SEQ ID NO: 161590 - DNA, 827 bp, Zea mays
  Clone ID: MRT4577_78949C.1
gcgtccgacagacatcaaatatgcagccaaaggttggtagagggagcggtggtgccgcagggccacaggcgggtggtaattatggcggtggccgtggaggacctgttggacctggtgccggtggtggagctggtggaggcggtggaaattggggaagaggtggtggaggcatggggaatagaggccctattggtaatatgaggaacaggatgggcccagctggtggtggtcgtgggataatgggaaatggggggatggttgcgccgccgccaccaatgatgcctccaggtggaatgctggggcagggttttgatcctactggttacggcgctatgggaaggatgggtggtggatttggtggttttcctggtggaccaggggctatgccattccctgggctgatgcagccattcccgccagttgttgctccacatgttaacccagctttctttggtcgtggcggaatgggtgccggtggaatgtggcctgatcccaacatgggagcctggggtggggaggaacaatcgagttacggtgatgacgcagcttctgatcagcagtatggtgaaggagggagccatgggaaagagaggccaccagagagggagtggtctggtgcaccagagaggaggcgtgaaagggagaaggatgcgccccctgcacaggagtggccagagaggaggcaacgggatgagcgtgacatggaccgtgagaggaatcgtgactatgacagagacagggaaaaagaccgtgacagggaaagagaccgagaccgagatagggagagggacagagatagggagagagagagggagagggagaaggag

SEQ ID NO: 161591 - DNA, 398 bp, Zea mays
  Clone ID: MRT4577_7894C.1
ttatacaccccgtgctgccttgctccaaacagagcttttactccggaccgggacccactgacaggtcggcagatcgctgatcacgcaggatcacctgcagcagacggaccaacactaggcatgggagagccaatgcactagctgactgatctgactgtgcagatgaacaccttaggcgctcacgcatgacttgcgaagggtgaaactgaggatgccatgggcaatgcacactatactgcatatgcttgggtggctgatgtggactgatgccatacggaacctgtcaacattgtgagggcgctatctgcttaacacaacgtagaccttgtgagtgtgccagatgatatgacacttgacgagtgggctaggttttgcaagaatgacttcggacgctacgt

SEQ ID NO: 161592 - DNA, 214 bp, Zea mays
  Clone ID: MRT4577_78950C.1
atactccctggggccccttccaacacccactgggtatctaaggttgacctcccaccgttaaccccttcttctcgtgcttccctgtttttgggtgtcctcatcttgttcgttgcgtcttccgtttgaagccaaaaaaagattccccgggggcccttaaccgttgtgtttcgccttaaagcgttcgcctgggccctttacatcaaggtggattcct

SEQ ID NO: 161593 - DNA, 319 bp, Zea mays
  unsure (1)..(319): unsure at all n locations
  Clone ID: MRT4577_78951C.1
caannaacggccggcagggagcaggaagaagacacgaggacaacgaaacgccgacaagccacgcaacgnnnccggcaagcaagaaagaacaagacccggacacccgaccaccctcgcgccgacatcanaggacaagagcacagaacgacgcgtgttgctgggtgggccttctctcgggcgcctatggtagctctggcatcaatcaaagccggagagcgagcgagcgagagaggaccggaacatttgccagcataatggcctccgagcatgcgcagctggctggcaaggccgccgccgacagaaggttagcggagaccac

SEQ ID NO: 161594 - DNA, 314 bp, Zea mays
  Clone ID: MRT4577_78952C.1
acctcgaagccggccgggactctgtttctcttttaacttgcccgcgccccggactctaatgacgctccctccacacactgtttcgcgccgcgcgtgtactctggggagcaactacttatcttcagaactccccctcatccgcacagcggcaccaccgtgtccgaacggcgatctctctggaatcccagactgtgaatgatattaccctcgatgtgtcgatatgtttgacaatggcgcacctggatgacataagcaagaataaagcgagcatgagctgaaaccaacagtgcatcgtcatggctgtgcaacttcat

SEQ ID NO: 161595 - DNA, 485 bp, Zea mays
  Clone ID: MRT4577_78953C.1
aaaaaaaggtggaacggcgactcatcatggttcgaagaggggggggtaattacagaaactaacccggttttacgggcgcgccctcgactgggctgggttatcggctatcggtccagatggggacatccaagaatcggtgggttcctccgatccatgcatttccatccgagatcagggcccttttgcatgcccatgcagttgagcttgagctagcgctggatcaaagatcgatcgctatctgggggtttctgctttgggggggtccaggccgaggagcctggggacggccaccggggacagcctgccggggctgaccaccgcggggagggcgagggccctcctgcccttgcgctccttgatgggggcgaggggcggggaccacgcgcgggccctgggggggcccaccagctgcttgtagtgcttccgcagctcgggcgtgctgcacagggccccgccggcgcacgccttgccggttttcttggggt

SEQ ID NO: 161596 - DNA, 182 bp, Zea mays
  Clone ID: MRT4577_78954C.1
ctcagcaggcgacatcctttttcgtgctgcgcaaccgctgagtgaccagaagagatggccggcaaaggcgatggcccggctatcgggatcgatctcgagacgacgtactcttgcgtcagggtgcggcagcacgaccgcatcaagatcattgccaaccaccataggataccgcaccacgccct

SEQ ID NO: 161597 - DNA, 495 bp, Zea mays
  unsure (1)..(495): unsure at all n locations
  Clone ID: MRT4577_78955C.1
gccggggtttttttttttttttcatgttgtgtatagcgnccattcggcgttcgacgctgggtgcagcagagtttgggtccaggtggatctgctcctccaggtccaggggggaaacagagccaccctggcttcaggagtagagctgattaggggggggggggggggaccgcgggtagcaggcgaaagggagcgatgggtcggtgacaggttccagggctcaagcgagaccctcctgggcccagcccaggggctgaggggatcaggggattccacacgttgggaataagcggctatggcctggggcgtacatacgccgtcagctcgggacaatgatccatgtacatcagatgtgatgaaggcaagggtcagatcatgggggtccaccggttttcacatctgggaccaccacgggtcggtcatgaagctttcgaggataattccgggacccaggttctggaggggctggtgggtacggtgactggctatgttgagggc

SEQ ID NO: 161598 - DNA, 346 bp, Zea mays
  Clone ID: MRT4577_78956C.1
gtttgggttttttttttttttttttttttttttctttttttttttttttttttttttttttttttttttttttttttttttttttttttttttttttttttttttttgggaaagaggcttgggggtttaccccaatttaccccccgggcggggggaaagctgcatgattttgaaaacagggaaccccctttaaaaaagaaaaagaagtcccgggggaaacttcccacagtttttgccttgaaaaaaaaactttgacaacaagttccagggatcaaatatgaggcccctcccccccggaagagccaaattgtcccaacgggtactggtgttaaacccacccctcccg

SEQ ID NO: 161599 - DNA, 1364 bp, Zea mays
  Clone ID: MRT4577_78957C.1
ttgggaccctcgaggccggccgggaaaaaaaaccaaaacccttctgtggaaaaacgtaaaaccaggcgcgccccgcaggaattgcggtcaggagcacctcatccctctcgccttcaggttctactcgccctctccccatccgcagcgcctcctcccattcccccaacggacattgcctaggaggctaggacagaaccacccagagcgcacaaccttatccgaatcgccgttgcatggaggccgtgcgcgcgtcggcggcgtgggttgccagtcgctcctcccatgtcacggtcgaccttcaagaaattgagaaggtagtggaccaaatccaaggagatgttccaaaagttcagtgggattacgaaggaattcactactttgacaatgggccactcacagtccagtacctgttcgtcttggatgcactaaacttctgcttctggccagataaggacttgagctatgaccatttggcttctggactgaagtcagccttggagaaagacaaaaatgcccttgattcagatcgtctccagaattacactgggccccagctccgccaacttctgaactggccacgaccactgccaattgaggaggaaagagtacgccttctccacgaggttgggcaggaacttaaaagaagctttggaggtcaggctgctaatctagtgaagtctgctggaaactctgctgcgactcttattgaactgattactcgacattttcctggtttccgggaccattcactctacaaggggcaccaggttttcctgtacaagagagcccagatctttgttgctgatttgtggggcgccttcaagggacaaaactatggcgagttccacgatatcaattccatcaccatatttgctgactacattgttccagcggtcctgagggagcttggagtacttaaatatggctcgaatctatcttgctccatcgactcgaacagtgagatagtgcctggaagcgaggaggaagtggagatacgcgcgtgctccatctatgcagtggagaagatgagggacctgatcagcaagaagtttggaaagcagcttctgagcattgacattgatctctggctctggtcctgcggcgtgcagaacatggcgctgtcacatcaccgcaccctgtcgatttactactagacagtcaggcaggcaggaagctgaccctgctggtgcgctcgttcagctggccgggcgttgtcgtcgcttgttcgtcctaaccataacggtgcatgtaggtgtcgagagttttgtctccttgggaatgcacacaggtgcaagatattgtaggcccgtcccatgaggatgcatggtagtacaacacttttttttttgtgatttagagacttg

SEQ ID NO: 161600 - DNA, 240 bp, Zea mays
  Clone ID: MRT4577_78958C.1
ttttggttttttttacacagattgttgattttttgcatagattgagacaagaagaaagcccttatttactcacactcataggcgtgtagtgtactacccatacttcccgtgttcatggggaattaccacgcatgttggaactagcccatgaggctgggtaaaccaattggaacttaaaggcgctcggtattgggacacattacaaagtctaccgattaaaactattatgaactcatgatg

SEQ ID NO: 161601 - DNA, 668 bp, Zea mays
  Clone ID: MRT4577_78959C.1
attggccggctgggccggggccggggtcccgtatcctgcacacgccatcgcagcgcctccaaggctccttctagatctgcctcggccacggagcggtgccgctggagctgcagccatccagccgaccgccggccaccagccgagccgccgcacgaaggctatgatattcaatgtgatctcatcaacaaagcaatcgtatggagaattggaatgttttcagttctattaaatgtcacttgatttgcagaagctgttcaaaggggttactggtggcctctctggattgtcaaagcagaaattaaaaagtattgaccttctgccggctgataaggctcgtagcccgagtgttgaggtcgccctttcggcagctagggaggagatgatgtgctggcgtttggctggcgctaaaactctctctctcttccatctagaggagttgtcttaggtgtgtgagtctgtaaatggtggtgtgcgtctgtaaaactgctgcttgtgttctagggctcaacccctttttcttcttaatataaaaatacgcagacctcctgcgtattcaagaaaaaaaggctcctgggcccgatggttttacggggaccttctttaaatcttgttgggacataatgaagcacgatgtgatggaggccaaaaaaaaaaaaaaaaaagcggcc

SEQ ID NO: 161602 - DNA, 371 bp, Zea mays
  Clone ID: MRT4577_7895C.1
atattggcaaaagttaatttcagtcaactcttggtttgatgatctgtagcgctgactctccagacaaaatggtctagataatctcactgtatggacactacacaattacataaacagccaatggaaaagctgcacgcaatttcagttctgggacaccttgcaaaaccccagtgagtcaatggatcgtcatcagtaggaaatagctgacatatacttcgcaatcagttgaccaatcaacacggtgtaatgcaatggaaaccacctcaggcatcttgcttaatcatcatctactagtaaattaactacgctacagtaaaatgtctacacaacccggaggcaaacacttgcttcttttacttaatttcggttac

SEQ ID NO: 161603 - DNA, 443 bp, Zea mays
  Clone ID: MRT4577_78960C.1
ggacattggaaaccctttttttttgccttccttaattggggggaggggaaacatccttttttgggggggcccgggttttttaatgggttttttttttttttaaagttcgggggcaaggaaaggaaaaagcggttttttttttttttttaaccccatggggggggtttgggcaaaaatttccaaaaaaatgcggccccgggtggggggataatccgggggcaccaaggggccgagggggaaaaccacaatttgggggcccggtttgtccttaaggaaaacctttttgggggcctccacccttagcccgaccaccttaggccaaaaatttttggggccgccgccggcgccgccgaatttcggggagctaatggggtccaaaactgccggaccagttgacaattttatcgaggggggggtaaattttttttttttggacccgtggg

SEQ ID NO: 161604 - DNA, 525 bp, Zea mays
  Clone ID: MRT4577_78961C.1
gtactctacgaagtcctctaaatgcacccaaaatgactcagcagcttcttgccaatccatgtaaaatggtagatactgatgacaaaaactcaaatgttcttcctgtggagcataatcaagccacacccaaaactgactcaatgatgccaaaagaggagcagaagctggacatacgcttgcccaccgaagaagatacgaaggcagtttcatgacaaatgctcaaacatgtatatagatcgagacaggtttctgagtttaggatgacatataaatcagtaaaactaacaaaggcagcacaaaaaaaattacatgcattgtgttgccacatttatctccctacccgattcatattgtattgctaactgatgcagttcttactccttaccctgtgtcaacctgaccaggtgacttggcagcaactcaaaatgttttcaagaatacgacgcattcttgagaaacgttttgtttattgttgtaaaaaccacttcaatagtaatttgcatcaactttgatgcaatttatttt

SEQ ID NO: 161605 - DNA, 628 bp, Zea mays
  Clone ID: MRT4577_78962C.1
tttttttttttttttttggtcttttttttttttttttttttttttttttgcctgaaaggtaaaggctaagaatggactgatccgatggcaccacaaacttgacagcaagctcacacattgcttgcacatgcataggatactggaattacaaccaacttgatagaactcgacagacgtgctcttaattcaatccgaagaaggaaacgacgaaacacgatccagacacacacacacacacacatccttgcatgaaaaagggtaaaacactggctgcaaatcaaacgcatcatcgtctgtgaagctcgatcacctgaggcagcggcaactaataacctctacaaaacccgcatgcatgcagtgctaattaacctgaggcatcgagccaccttgcacaaagggttcgccgccccctcttgctcttatctgaacattctgcaccgcaacgaccacctcttcttctccttgttcggtttcagaaacgccagacgatgtcagcagcttggtgggctcatgtgcacctgaagcgtccttctggtcgtcctcagcgtggccgccgtagccggtgacgcgctcgacgagcacgaagaacatgtccatgacctgagctgcgaaactggccatgggaata

SEQ ID NO: 161606 - DNA, 340 bp, Zea mays
  Clone ID: MRT4577_78963C.1
gtgtcttttgatttaccttcacctgaattcgagtctcgtgatactaccattctggggtgcggtaatcaacctgtatgtggatgggaaggttgtaagttttaaatcttggaccggcagaggaacaatgtgggacccatatataagattctcaagtctggttacttaggattggttaatgaaaacctattttaatgaggctggtacaaagcagtggtctgtgaaggaaagaagcagtgcgatatgagaatactcctgctgagcggaatcatgctgatatattgagacgctctttgatttgagatttggaaagccacttcgagctggcactacatcttaagct

SEQ ID NO: 161607 - DNA, 289 bp, Zea mays
  Clone ID: MRT4577_78964C.1
gtccgtcgtagccccacatcgtataatttttaacttggctagtcctgatactcgtacagttactagtgacacttgatcgcaggacaacaacaagataatgagctaccatctatccttcgcatctgtgtgcctgcatctgctgctgtcagcaacgctctcttcagtcatgactcatcctcgttttatctgtcaatggattatgtatattaacatgcataactagtacacgcctacccctgggatcaagaatggcgaataataccaacggaggcacctccttgtcgtggtc

SEQ ID NO: 161608 - DNA, 290 bp, Zea mays
  Clone ID: MRT4577_78965C.1
aacaaatccctagatgtaattaacaacgccgtacctctccgacacacaccttaaagagctggggagccggccatggtctcctgacctctagctctaagcacacccattcccctacgacccgaagagtgaagttgacatccacccgctgcccatatctactgctgcagagcacctagccctaaagtcactacatcaccagacaccgcctcaatgccccctggaacgtcagtcatctgcacgcacatctgaacacctctggacctctggctcttcactatgacctcactact

SEQ ID NO: 161609 - DNA, 332 bp, Zea mays
  Clone ID: MRT4577_78966C.1
ttgggcccggtcccttttcactggactgcggtgggcccattcattcttaaacccttctgcgcgcgtaggcctcgtcttgtcctttcccagcacaaccttttcttcttcttcggcagggtgccttttcgttcttcttttcgggctatcaggacgaaataactggccgcgctgcacgccggccggcttgagaagaagcgcttgccccgggcgcgcggttccgggctaccaggacgaaataactggccgggctgaacgccggccgccgggagaagaagcgctggcccgggcgcttttgccgttgtttgggcgggccattccgaccagggttcccc

SEQ ID NO: 161610 - DNA, 687 bp, Zea mays
  Clone ID: MRT4577_78967C.1
cattgggtacctcgaggccggccgggtcacgcaggatgatttgatgcatgtgttctccaagctgccgcgcgatctcaacttcatcgaccacacgagtaacatctcctggaaagcgtttgcgagggcgatgccggtgatcatagacccggcgctgtacatgaagaaaaagggcgatctgttctgggtgccggagaggcggagcttgcccacggcattcaagctgttcactggtgcgtctactgctctctcactctccacccgtgattgttaacctgacattgacagagcacactcatttattcagtgctagcacccaactacagtactacccatcgcacggtagcagtgcctatttctgtcatctttctctgtatacagtagttgattggtccacaggagaactaatcccagcattcagctagattgttttgagttgtcgccattgtaagaaactgaactgtctgaatcatgaagcgattagcactgccggagttggttgagcagcaggtagttgcaaagccctagcgtgctttgaatgcttttgatttcgctctcggtggcaaactcgctagagagtctgttccttgtggacaagagcctgtaccctttctctctgttctttttggataagagaagaatcgaaataaagatgaaacgcatgctaaaaaaaaaaaaaaaaaagcggcc

SEQ ID NO: 161611 - DNA, 1279 bp, Zea mays
  unsure (1)..(1279): unsure at all n locations
  Clone ID: MRT4577_78968C.1
aattcggcacgaggcgccactctccgcgctcgcacacgccgcctcctcctccccgtcaccccttcgccgtggtggctcccgtcgtcccacgcctccctcgtctgcaagcgctgacgcctcctcctctccaaccctaccttcgtccgccgcttccatgtcctccacagggcgcctcacctcctcagcttcttcgccgaccacaacaccggcgctccccctccctccctccggtcgtcgtcacgctgcgtcttggcccaaccgttcaggtgctcggtgcttaactctcctattgcacacccatgtttaacttttcttgaattttcttaggaattgaggctgtagggtatatatgaggggttaattcagccgaactgttcagtaacgtggtaactgttcttcagggtgcgagtttgttgtactataaaggtttggtaacctgaataaaacaaatgaacttctgttctagtttcactatcaccaggttgcgggtttgaaggccaaaaccttcagcactggtcctccaaaaccttcagcgctggtcctgcctatgctagtttcatttgcatggataattcggcaagagggaaaacatacattttaatatctaggcgaccatttcagaagacgtgtagttagaaatcagtaactaagaacagatcttaaccttatacattcttggtctttctttttgtcctgtatttttttattgtttgggtgtaacaccattattacatagcttggttgatgcatacactactacatggtatttatatcgtcctgacgattgttacatcaaccacattacacattatatatagcagtatagaataaatgttgtacatgtctaataatgcacactaataattgtaaatttgcaacccacttatccagctgattgatattgtgatcagttcacgttgcaagagtttctataaggtggtctgttatccacactacaatctacaaacttcatcagtacatcctcatacaagtgcagatcaaattgcatggtgaaatgtgtacttacaaattcgtttgtaagtgaacttagctaattatatggatactcacatagttttttggataccgatcataccaataatttacgaggaggtgcacccattcagcttcccagtatctaattgtactatacactccttccataggtaagtttataaataaagcttcgttntccatacaatatgattatgctcctttttatgtgaactgcaatattggtcactctatatcagtaaagattgagtgttgcacatgtcta

SEQ ID NO: 161612 - DNA, 317 bp, Zea mays
  Clone ID: MRT4577_78969C.1
ggatcgagccatgtggctctgagacatgttatataagcttggctgcatacacaaggcgggaaacgagggcatacgaacgcttatcttactgaacgggattagaaacttaattgtttacacatgcccacgctagcccttcacccttgcagagcgttttccactttggaagaatgaccctaggctatggaccatcacgaccccttgttaatttggcacccgttgagaaacatcagcattggggaggatgttgtgagctactataaaactggtaccggcgtgaccatggaggacactgctgctcatgaacatgggttata

SEQ ID NO: 161613 - DNA, 459 bp, Zea mays
  Clone ID: MRT4577_7896C.1
cttccggcgcgggcttaagcccggggggttccgcgcctgggcccttattctttttcttttcacatgggtgggatttcttattgcggaaggctgccttgtggccagaacaatggcccacccctaccaaaacccggaccagggcctattctaacgggaactccttttattggaaaacgggccgaaaggcctttttcccggttgggccggccttaacttttttaacggccttcctgggcaaggggacctacctaactttttccaagtcccggacccccgccgggggggcccctaacggcggttccaccatgggcttggcccctaacacctaactaatggccgcccccggccgtttattcctgaagaattccaccaccagggtccttttgaacgtaacctaataaggaacacggggtaatgggtaatggaatccgttgtttttggttaaggtcctggaataag

SEQ ID NO: 161614 - DNA, 275 bp, Zea mays
  Clone ID: MRT4577_78970C.1
atgactgtccacacatgacacaacgacaccaagctgtcctcgatccagcatgccctcgagtctcgtaccccgcacatcatgtagagagacatcgcactaccaccaccgcaagcgacgacgcagagatgtttctgcgacgtatcctcgaccgacggaggtggcctgtagcctctgagggaggcgcgcgccgagaacgaaacgacgtagatcggcgtacttgtacggtggcgcccaacgcgcggaaggttctcactctgtcctactatcgacgcgat

SEQ ID NO: 161615 - DNA, 478 bp, Zea mays
  Clone ID: MRT4577_78971C.1
ggaggatgccgacggcgttggcagcggatatatgtccggaaccggcggcagcatggtggaaggagaagggatgtttgttgagggggctgtgatgggtgtgggcagagggttcaaggaagggatggtgatggtgggattcgtggaaggcatggccatgccggcggcgctgcttctcttcctcctagtcctctccgccttcgaggccggggagcttgcgcgctgctcggctgctgctgcaggtaaaccggcagtcctcgtccatgatgacttgagtccggttcaagacaccagccccatccgcaacagtcccctccacgaacccgactcccgccattatagccttgcctttcacaacatccaccctatccatgccttacctgaacgctatgcacacactcatcatagctcccctagaacgtcgtccctgctctgaccaccattcagccgctgctttccgtcatatatctgctgcccatgc

SEQ ID NO: 161616 - DNA, 390 bp, Zea mays
  Clone ID: MRT4577_78972C.1
cgcaaacaacccaacgtcggagacttggatcatgctgggttgatcgactcgcagcaggtctgcttaggatccccccgtgctccgccgggatttggaaactggacaggtgggagagcctcacctcagactggtccatcacacaaacctggcatgattctttttctctcggcgtttttttttctacttcgttttcgggtgggattgggttttcgaggatcgggatagatattgtatactacagcctgcatagcgagtggtgtaccagcagatccacgacggcagtttgcgttccctgcatgggatgagcgacggtgcatttttcttcttgttcttctcgcttagatgataatgaacttgttcaagtagttgtttagtcaattatgcgtcgct

SEQ ID NO: 161617 - DNA, 334 bp, Zea mays
  Clone ID: MRT4577_78973C.1
ggacaagccatttcctcaccaaaaaaactttttccatggaacattttttgggttcgagaaacggaaaacggccttccccataaagcaaatttaaagctggttttgacaaacccaaaacagcacccccccccaaagggggcttctttattaagggcccccggccaaaacccggaaattgccacccaaacaaaacccctaaagcttttttcccctcttaccgccttttttgaaagtgctgccaggggggaccggggtaaccccctaaatgcgcccaattttaatcccgaaacaagcaacccccctgagggcaaactggcccccaagtccaggggtt

SEQ ID NO: 161618 - DNA, 533 bp, Zea mays
  Clone ID: MRT4577_78974C.1
ctccaagcgcaatggctcctccttgcttacctaggtacctctgcagctagccgccatagcaagctaggccgaagcagaggatctaacagagcggggaaaagaaaagaggagtaatggccaaggtccaccccaacgccgcggggtccgtcgttgccacagcagcagcagtaggccgggccccggcggaggctgatggagagccgtccactgtgctgacggtgtggcgcaagtcgctgctcttcaactgcgacggcttcactgtctacgacgccagcggcgacctggccttccgcgtcgactgctacgccggctccacccggcgctggcgccgcgccggcgtcgtgctcatggacgccagcgggaagccgctcctcaccgtgcgccgcaagacgcggctcggcctcgcggagcgctgggtcatctacgacgccgacgccgacgacggcacgacgacgacggccagggccacgccgctgctctccgtccgccgccgcatcggcgcgtgctgcaagacgctggcgctcgcccactcc

SEQ ID NO: 161619 - DNA, 121 bp, Zea mays
  unsure (1)..(121): unsure at all n locations
  Clone ID: MRT4577_78975C.1
cgggcggcancccgggtcgaccacgtgtgcggaggattcaagcgatccagaccggcaattactaattggaaagctactcgacatgcaaatatcttaatagttgagcgggatagtgaggcta

SEQ ID NO: 161620 - DNA, 592 bp, Zea mays
  Clone ID: MRT4577_78976C.1
ctccccttccgccgcgcgttcttctgtctctttgacgcgtactcctccactttggcctccttctttgaccgcctaatctatcgcctccacccatggtcaaggagaatcctcacatcgaccttgtggatataggccacatctattctgcgcctcctcacaaccaccggatcgcctgctactcacaaacattgcactctgttgaccacccctgagatcgacaggtgtcagaatgacttcgctgaaatctcccttactgactttaagaatgatttcatgcttgaccacctcaaggctgcacctggtcaggggtatcaccattgatattgctctgacgaagtgtgagaacacctcatgctattgcacacgctgattgatgcaccctagacaccgtgacttcatcgacaatcttgcatcactgagacctcgcatggctgactgcgctatccttatcgttgtctccaccaatgtcgcctatgtggataatatctccacggatgaacaccactcttgagcatgctctgctagcgttccacttcgtggtgaatcagaagatttgctgctgcgacgacatggacgcaaccactcccatgta

SEQ ID NO: 161621 - DNA, 300 bp, Zea mays
  Clone ID: MRT4577_78977C.1
ggttcgaattcccgggctctctctctcgccccccccccgcataacatcagctgttcactgacaacaagagcctccacgatgtgagcgagtgataaacttctagcactactggccaacgcacagaagtacactgatcctgcaccttaaccgaatggctccaatgactactactataccagtggatgagatcatgatatataacaggcaacaaaaacagcaatgcccaattactgccactaaagctatcaactacacggagactgttaacataccttaccagttactatcgacaacgtccta

SEQ ID NO: 161622 - DNA, 354 bp, Zea mays
  Clone ID: MRT4577_78978C.1
ctcgtcggagcaactaggactagcgcggccaggccgccataggccaccgcggtgatgaagtgcagcactctcgctaccttacgagctagtcgggcacgtgcagttgcagcgaaaatgggcgaggtccgcgtgctaaggcagggggtgtctgcatggagctccggcgaggttgcgccgaacggtgatgagttcacgaaccgatagaggccggtgatgagttcgctcgggctccggcgacctgcaatggggaggtcggaaatgtggtcttccggcgctcgagcaggagtggtgggaccgtggtatcagatattcgagaaaatggtacattggctcaaaaatatcttggataggaac

SEQ ID NO: 161623 - DNA, 2053 bp, Zea mays
  Clone ID: MRT4577_78979C.1
cattgggtacctcgaggccggcattgggtccctcgaggccggccgggagagagctcaccaattcaactgaacagcaagcgcacctaccctacctgcaagcgcaccgcccgccgtcgaaggcgaagacctagttcccggtccgtcgcgatggctgccgtggcccgccgcggccccggggcgcgcctcctcgcggcgctcctcctgctggcgctggtcgtctccgggcactgcctggacgcgcaccaccgcgggctgaagcgccggcggcggaagcacgagatccattccccggtcaagacggtggtggtggtggtgatggagaaccgcagcttcgaccacatcctcggctggctccgccgcacccgccccgacatcgacggcctcacgggccgcgagtcgaaccgcctcaacgcctccgaccccgcctccccggagatcttcgtcaccgacgaggccggctacgtagactccgaccccggccacggcttcgaggacatccgggagcagatcttcggctccgccgacacctccgcggtgccgccccccatgtccggattcgcccagaacgcgcgcggcatgggcctcggcatgccgcagaacgtcatgagcggcttcaagcccgacgccgtccccatctacgcctccctcgccgacgacttcgccgtgttcgaccgctggttcgcctccgtgcccacctccacgcagcccaaccgcctgttcgtccactcggcgacctcccacggcctcacctttaacgcccgcaaggacctcatccatggtttcccgcagaagaccatctttgacagcctcgaggagaatggcctgtcttttggcatctactaccagaacatcccggccacgctcttctaccagagcctccgccgcctaaagcacctcattaagttccaccagtacagcctcaagttcaagttgcacgccaagttggggaagctgccaaattatgtggtgattgaacaaaggtactttgattgcgagatgttcccagcaaacgatgatcatccctcgcatgatgtggcaaggggacagaggttcgtcaaagaggtgtatgaaacactgagagccagtccgcagtggaacgagacggccctgattatcacatatgatgagcatggtggattctatgaccatgtacctacgccggtcgttggagtgccccagcctgatggaatagttgggcctgatccatactacttcaagttcgaacggcttggggtgcgtgttcccacctttctcatctcaccttggatagacaagggcactgtgatccatgaaccaaatggtccacaggatacctcgcaatatgagcattcgtccatccctgcaacagtaaagaagctattcaatttacattctaactttctgacaaagagagatgcatgggctgggacctttgagagctacttcaaaatccggaaaacaccaagaactgactgtccagagaagctcccagaggtgacaaagtcattgcgaccatttggtcccaaggaagattcgtctctctcggaatttcaagtggagttgattcaacttgcctcacagcttaacggcgatcacgtactgaacacgtacccagatattggcaggaccatgactgtcggggaagcgaaccgctacgcagaggatgctgtcgccagattcctggaagctggtcggattgctttgagagctggtgcgaatgaatctgctttggtgacgatgaggcccgctctcacaagcagggcctcaatgtcctctggtttatcatcagagctctagtagatggttccagtctgcccacaaattacacatcgccattccctctgattcagctcttgggtggtgtagtgcaaatatgatagtttggttctgtaaatagacagtcggtacatgtcaaagcctcaatgtgtagtggggatttctaaaagcaatttgtgggtacctgcttgtcaagcagctggactgcactctggagtaaatgtatgatactgtacagtaactgaaaaaaaaaaaaaaaaagcgggggcttaaacatgtgtaatatgatacttaaccc

SEQ ID NO: 161624 - DNA, 455 bp, Zea mays
  Clone ID: MRT4577_7897C.1
ggaaacaagggaacaagcaaactaaacccgtgtttttacaagcccccttttcatgccttggaggtcttcccggggaaaaaaaaaccaaagccattttgggccctaacaaatggaagaccaacccctaaaaacccaataaccaaaaaatgggaaattgggaaattatcaccctaagaaacaaaagaacttcccctcttcccaaaatttacaaaaaaaatgcaatcttcccaactgaaagctatttttttacctttggcaacttctggtgatgcgggtggcttttttggaaaggtgtaaacttgtttttttggggggtttctggaccccggggcccctatccaagaggttgagcaaacccacctttttttttgggtaaccaaaaataaacccccttaaaaaaaacttatttttctcccccaataaagagggggtccccttaaaaaaggccccccccg

SEQ ID NO: 161625 - DNA, 784 bp, Zea mays
  Clone ID: MRT4577_78980C.1
atgagcattcgtccattctgcaacaggtaaagaagctattcaatttacattctaactttctgacaaagagagacgcatgggctgggacctttgaggactactttaaaatccggagaacgccaagaacagactgtcctgagaagctcccagaggtgacaaagtcactacgaccatttggtcccaaggaagattcgtctctctcagagttccaagtggagttgattcaacttgcctcgcagcttaacggcgaccatgtactgaacacgtacccagatattggcaggaccatgactgtcggggaagcgaaccgctacgcagaggatgctgtcgccagattcctggaagctggtcggattgctttgagagctggtgcgaatgaatctgctttggtgacgatgaggcccgctctcacaagcagggcctcaatgtcctctggtttatcatcagagctctagtagatggttccagtctgcccacaaattacacatcgccattcactctgattcagctcttgggtggtgtagtgcaaatatgatagtttggttctgtaaatagacagtcggtacatgtcaaagcctcaatgtgtagtggggatttctaaaagcaatttgtggggttgtgtgaattaagtctgtactgtacatgcttgtcaagcagctggactgcactctggagtaaatgtatgatactgtacagtaactgaattttcatgtctgtaaacatgggcttaaacatgtgtaatatgatacttaaacatttgcttggaaggatgagggttaacacc

SEQ ID NO: 161626 - DNA, 1053 bp, Zea mays
  Clone ID: MRT4577_78981C.1
ccggccgggacctttctctctcaccttggatagagaagggcactgtgatccatgaaccaaatggtccacaggatacctcgcaatatgagcattcgtccatccctgcaacagtaaagaagctatcaacattctaactttctgacaaagagagatgcatgggctgggacctttgagagctacttcaaaatccggaaaacaccaagaactgactgtccagagaagctcccagaggtgacgaagtcattgcgaccatttggtcccaaggaagattcgtctctctcggaatttcaagtggagttgattcaacttgcttcacagctcaacggtgatcacgtactgaacacgtacccagatattggcaggaccatgactgtcggggaagcaaaccgctacgcagaggatgctgtcgccaggttcctggaagctggtcggattgctttgagagctggtgcaaatgaatctgctttggtgacgatgaggcctgctctcaccagcagggcctcaatgtcctctggtttatcatcagagctctagtagattgctccggtctacccataaactacacattggcattcgctctgattcagctgtggctgaatcagagctcttgtgtaacgtggtaagagagcctaccacttggcggtgtagtgcaaatatgatactatagcatcatgtaacagacagcatggttttgtaaatagacgtcatgatattggacatctggattctgatacagtatatgtcgaagtcccctcctggatagtgtgtagtggggatttctaaagcattgtggaattgtacctattctgtaaaaaaaaaaaaaaaaaaaaaaaaaaaaaaaaaaaaaaaaaaaaaaaaaaaaaaaaaaaaaaaaaaaaaaaaaaaaaaaaaaaaaaaaaaaaaaaaaaaaaaaaaaaaaaaaggggggggccttttaaaaggacccaattttactcccccggccatgcaaagtaaaattttttttttggggcccccaaaataaaatccctgggccgggttttaacaacgggggaaggggaaaaaccctggggt

SEQ ID NO: 161627 - DNA, 1849 bp, Zea mays
  Clone ID: MRT4577_78982C.1
tcgaggccggccgggccgggatcttctctttctccgtcccctccccaacacgcgttccccaaattctcccacggtcccaccctactagaaatccccatatccgcggcggcgccgtccatcggattcgatcctcctagcgagtcgtatccatctgatcggcggagccggggcaccagccaccatgtgggcggcatcgtgcctggcgtcgtgctgcgcggcgtgcgcgtgcgaggcgtgccggacggcggtcggcagcgtcggccgccgctccgcccgcatcgcctactgcggcctcttcgcgctctccctcttcgcatcctgggcgctccgcgaggtcgccgcgcccctcctccagtcgatcccatgtgcgcggcgctgacccgaatcccccctactttccctcggttcgattcgtcggttcagttcatcgaaacattcatcgagacctctctctctgtttccgcagggattaaccacttccacaagacccccgaccgcgagtggttcgagaccgacgcggtgctcagggtcagcctcggcaacttcctcttcttcaccatcctcgccgtcatcatggccgggataaaggaccagaaggacccccgtgacaagatccaccacggcggatggatggccaagatcttctgctgggtcatcatcgtcttcctcatgttcttcgtgcccaacggggtcgtcagcttctatgaatctatatcccagtttggctctgggctgttccttctcgttcaggttgttctgctgttggattttgtgcacggatggaatgagaactgggtcgccaaggatgagcagttctggtacatggctctgttggttgtctcggttgtctgttacattgccacgttctgtttctcgggtctcctatttcactggttcactccatctggacatgactgcggactcaacctgtttttcattgtcttcacgttgattcttgtttttgcgtttgctattgttgccctgcacccaaagatcaatggaagcttgttgcctgcatcagttattggtatgtactgtacatatctgtgctacagtggactctccagtgagccaagggattacgaatgcaatgggcttcacaatcactcaaaaagctgtgtcaactggtagccttacgttgggactccttaccacggttctctctgtggtctattctgctgtccgcgctggctcctctgcaactgtgctctcgccaccagactcaccacgtgggaccgacaagccattgcttcccttcagcaaggcagacgaacaagaagataagaaggatgtgccgaggccggtgacatactcctactctttctttcacctcatcttctccctggccagcatgtactcggcaatgctcttgactggttggtcaacttcggttggtgagagcggaaagcttgtggatgttgggtggccatctgtctgggtcaggattgcaacccagtgggcgacggcaggtctgttcatatggtcgcttgttgcacccgtcctctttcccgacagggaattctaagttcaaccacggtaagcctggagcaccaaacgtgtctactgtggcagctaatatatcctatcaagtatgttgcctttaaaacatgctccaagcgtggatggcaaaaagtcggtgtttgtccactgttatcaagtttgtctacttaataacatgtgactttaggcattgtgccactatcttaacagtgaacgtgtgtgctgcttgtattgtgtatatactggagaattttaagattgcatcatgcgagcgtgttgtgtatcgattgcttggtggctgtgtctgcggacttaaatcctttgctatgttgattatctcttctaattg

SEQ ID NO: 161628 - DNA, 270 bp, Zea mays
  unsure (1)..(270): unsure at all n locations
  Clone ID: MRT4577_78983C.1
tagggaaagcnggcacgccagcaggaaccggaccgganaacccgggacgacccactttatttgtagcaacatacaaagagaagcacacgagcaacatcatagcaccaaggggagccaacataaaagcccacctagccctacaagatatacaaaaaagcgcagataccccgacgtccacgacacaatgcccacaacacaacctcacaaaagcgacagccgagggaaaacaaaacacaactaaaacaagccaacaaggcaaaagaggccaaa

SEQ ID NO: 161629 - DNA, 133 bp, Zea mays
  Clone ID: MRT4577_78984C.1
acaccaaacagcagtattacacgctcaaagacatcacaagaacatttgggtgttcttggatgatctagcgaagagcacatctgggatgggttacaacatgttttgttaaaacttctgttttttggtattgggt

SEQ ID NO: 161630 - DNA, 509 bp, Zea mays
  Clone ID: MRT4577_78985C.1
ccggccaactgccaacgatggcgtcgactgcatgcacggcccttcggaatgcatgggcaacatcattgaactttgcgcccgcgagctttaccccgaccctaagataaatctgggtttcattatgtgcctgagccgtgactactcagatatccccggccgatcccttgtcgaagactgcgcgctcgaatccgctatcgacttccagcaactgaacgaatgtgctgtcaaggaagatggcggctatggtttgagtctcttgcgccacagtatcaaaaggaccgcagacgccggcgtgacgaagagtgctaccattcgtttgtttttcgaaattcactgcatccgcgatggcggcgagtggtccgactgcccccacggttctagtgtcaacgatctccttattgcgattgagaagcttcgccgccagtcttaagtgggtcaaagatctcagtccacaactcactcgcctctcctagcgtatagctcatcgcgatgccgtccatgcccgcctc

SEQ ID NO: 161631 - DNA, 289 bp, Zea mays
  Clone ID: MRT4577_78986C.1
catcgccatgcactgcgcggtggaccgcacgacgctcctgctctgttctcccaggcacagacaggcacttggaaggcagctttgctcctctggccacccggaaacctcccagcagttcagatgggacaaactgggggcctgtcagaacagccaatgtgccgggaaggccaggccccggcctgctccgatgaacgtcaggacggtggctgcagcagggaaccagggctggccttggatctgtccagtagggtcactgactgggcagggtttgctgcatagaggatggctg

SEQ ID NO: 161632 - DNA, 299 bp, Zea mays
  Clone ID: MRT4577_78987C.1
atattatattttttcttcatcacttctttggggtgggttttttagctgagcgaaccatgcccaaatcgagacgaggattcttatgcaaaacataaagtttttgctgctggggccctaattcgataacccatacacaaccatctttagggagcagggggacaaggatgggaaagcgccgccataataataataataataataaaacacatccacttgactagcttggcttggattgggacaaagggggacccgggcacgggctatacataaataaatggagaggctgcccatgcctgggg

SEQ ID NO: 161633 - DNA, 286 bp, Zea mays
  unsure (1)..(286): unsure at all n locations
  Clone ID: MRT4577_78988C.1
ccaacgaagaagccncnacggaagaggaggaaaacagcggcgaccaaccaccagagagagaaaanancanganangcagaggagccgaaaccgagagcgacacagaaacaacaaagcgcgaggaaaacaaggaggcggacgcanccgcaacaaaaacggcaaaggcccaggaagagnccgccccaaaaacagggcacgaggaggagggncccgaaaaggaggacaacggggngaagnccccggangaagaaggagaaccaaaggagangcagaagcagcaaccaca

SEQ ID NO: 161634 - DNA, 387 bp, Zea mays
  unsure (1)..(387): unsure at all n locations
  Clone ID: MRT4577_78989C.1
ccggccgggactctctctcctccccttgtttctctactaccgcgcccgacccagcagcagccgcctgagacaaccaggagcccgcgcacccgagcagcccaggcgcccgacgtcctccccatccgagccgcagcacgcgccttgccgcgcgcgccccgacgcccgctcgcctgcacgacccacgccgtgcgcgccaatcgaagctgcgtagccaaccccgcgcgaaggccgaccgcgacatcaagcgccaggnacgncnnagctgcgnnactgtttcttttctgcgttaatggagtttattgtgtccgtttctctcccctattaccttcattcaaactccatgaacgccattgatgaccgattgaaggcacctaccgctgtttctct

SEQ ID NO: 161635 - DNA, 1654 bp, Zea mays
  Clone ID: MRT4577_7898C.1
cctccattttatgcctccgaccgccgacgccaccgccggcgccttcctcttcccggccgtcgagatcccctgccgcgtggtccctgaacgcgggcgcgaggagcctcgccggccgtgccgtcgcctcccctccagccttcggggacgagcccgccccgatgtcctacaagactggaaagcgggagtggaaattccagaacaacccggtgagcatggacctcgaggccggccggggaattgcgatagcgagactcatgcaggcacacaagggggagttcccgaggccgccggtgcacacgtcgtcgcctcctctccactcgcacactcgcaccctgcgtccgcctgccgcctaccccaggcggccccctcccatcgccatgcctccgtccgccgccgccaccgccgccgccttcctcttcccggccgtcgcgatcccctgccgcgtgttccctcaacggcgggcgaggagcctcgccgtccgtgccgtcgcctcccctccagccttcgcggtcaagcccgccccgctgccctccaagactggaaagtgggagtggaaattcgagaacaagccggtaaacatatactatgaggaacatgagcaggaggttgctgagaatatgaagaacattctcatgatccctacgatctctgatgtgagcactgtggaggagtggagggtggttgccaaagatattgttgggcggaaaggagaacttggctaccgtgttacaattgtcgattggcctggtcttggttattcagataggccatcactgaactacaatgctgatgtgatggagagctttctggttgaactaatgaattcaccaaacagtccagtcgcaaatgcagatgatgaactgatcattgttggaggtggtcatgcagcaaccatagctgttcgtgcagctggtaaagaccttataaaaccatctgctgttgctgctgttgcacctacttgggctggaccccttcccatcgtatttggccgcggttctgatatggaaactaggtatgggcttctacgaggaaccctcagggctccagccctgggctggatgatgtacaatgttctggtgagcaatgaaaagtcgatccagtctcagtacaagtcccacgtctacgccaaccctgacaacgtgacgccagatatcatcgagagccgatacgagttaaccaaaagaaaaggcgcacggttcgtccccgcggccttcctgacaggcctccttgatcctgtccaatcgagggaggagtttctgcagttgttcgccaagttagacggagacgtaccagttctggtagtgtcaacggtcaatgctcccaagagatccaaggccgagatggaggctctaaggggctctaaaggggtgacgaagtttgtggaggtcgcaggcgctcttctaccgcaggaagaataccccttggcagtcgcggaggaactctacagcttcctgcaggaatcattcgcagcaagaaggtgaatgtgcgtgcgtgcgtgcgcacaactgtgccagaagacaggttctcaagtcccacacatcgtgagtaaattcgttagcctgctacagtgtactggaggtttttagcaacaataaagcggcatcactcgttcacttccctaaaaaaaaaaaaaaaaaactcgagactctcgtgc

SEQ ID NO: 161636 - DNA, 530 bp, Zea mays
  unsure (1)..(530): unsure at all n locations
  Clone ID: MRT4577_78990C.1
gctgtaccaagcttgtcacttggaaattccaaagtacaggcgtgaaacaactcaattctgcaccgagaatgacacctgaaggccagaaattcctttcactgggtattgtgtcacctagcccagcacctcgtgatttagtaaaatgccaggccagttcgacagtggttgccatacctccagttcatgcgccaggccatggaaaattgccatccatgaagatcgagggccatgattctctggtgccgagtgtgaagccaagtctagcaccaagtaaagcgccaaagctgcatgaacctgtgatagctgacacgagcatcaagggctgtgattctctagcactgagtatcacaccaaatgtccatgatagtctagcatcaagtaataaaactccaaagcgccatgaatctgctatagttgatacgatgccagaaagcagtcgctctcaaggcgagggtgtcgccgctaaggcctatgatgctcgtnaaaccaaaaactgggagccgaagaaaagacatgcagcagtaactggc

SEQ ID NO: 161637 - DNA, 4637 bp, Zea mays
  Clone ID: MRT4577_78991C.1
ctgtgagcccgagacgcagcgcgaggtgcggccccgtcccctcgccaccggaggagcaggacgacgaggtggcgccggcgcgaggtagtcgcgcgcctggaagagcggcggcatcagagtcgcaggcggaggcgaggaagtgaggggagagccctatagccaccgccgcggggcgtcctgctcgctgcacgcactcccaccattgtgcccaactcgaagctcagactcgtgctgtcgtgcacttcccctcccctagcatcccaagctcctaactgagaaaacaggagatgggaagagacggggaagagactaggcgccggagccgcaagagatcccgcgacgcctccccctcctcgtcggattccgattccttcgactccccatcctctccgagcagtagccctgagcgacggagccgcagcagtaagcggaatagatcatcctcatcgcaccgccacagccgcaagaaaagcgaccggtcgcggagatcccgcgacgaggaccgccggcggcggagaagacggggccaggagagaaagcggcacggtggggatggtggcaggtcctccgactcccaatcgtcggaggaggatagggcggaggaggcgcgggagatcgtccgagatatcctcatcgaattgccggccatagccgaagagcttcgccagcttctccaaattatagacagtggtgaaagcattgatatttctggaatttctgacaaactattggtgaagcgcttgaagaaacttttccgatctctgagattgaaagaaagtgcaagtggggcttacttgctgccttcaaaaaatgttcctacgcttgatattgttggatcattactattagcaagttccaaacttgcagacaacaaaagtggaaagccagtgtcaccaaatagagaagcactacaacaggctaactttgatgtgcaaaataaagataaagattatattgtttccgaagagccaaaaattgttgatgtggaagaggaacctcctaaaagaaggataattggtcctgcaatgccatctcgtgaattactggctgcagcagctgaaatgacagaggctcttaggtgccgggatgctgaactggaagccaatgatgatttgctcataggccctccaccgcctgccgtagttgctgaagctgcatctgcaaatgaagctgagcgatttgaagaggttactagaatattggcggctgacacaaattcaccttatgaggttctgggggtaaattggaagatgtcaactgataacatgaagaaaaggtattggaagttgtctcttttagtgcacccggacaaatgtccacatccttccgcacaagaggcgttcgtgaaattaaataatgccttcaaagacttacaagaccctgataagagaggtgcaatagacgagaagataaaaaagaaagaggagatggaacaatttgaggttgagcttaaagcaatgcgtgaggctgcggaatggagacgaatacaaggtgtatcactcgcaggtgatgatgaacttttagcaggtccaaaagagtcacagagacctacgagagatgaatggatgaccacattgccacctgagagaaaagcaggagtgccaatgcattcaactacatcatttagtatgaatggtaaagaaggacgtggagacacaagtgtctggactgatacccctcttgatagagcacaaaaagcacaacaaagctatctagaagcctacaataagacaaaggcaattgcagaaggcgacgacgtgaagagcaagaacccggatgcttcaatcgtagataaatacaacacctccaaacgatcagtgtcgcttgtgcagaagcaccgagagagcaaaacggagaaaaagtagcaaaagccgctcgagaaagaggaatgggagggaaaccacccatggaagccattgcaccgggagaaggatctgtctgctggtcgccagaatggggccttagacgcagagaacatgtcgcaaggattatctgtccgcttcgcgtctggtgctgttcagcggaacttgctgagagctgtgtggaaagataattacccgtggagcatggtgaagaatagataattgtagttggagagaaagtcttttggaggccttgaagaagcttcattactgtccatcattatggtacaggccttctgttgaagcagtgtctagtgattctgtaatggcagcaccaggaaaattatccttggataaggcaggtggagttttttcattaactcttagtgttaaccatgttgattcacatgcaccaaatggtgtgtctgaacaatccacagttcttagcaccaaaggatgtgaaacccttgcagcggatatggtgcccaatggtcaagattgtccggcaccaagtggtgtgccagaaacatctagttctgctgttgccatgcgtggggcttctacaagtgtggaacccaagcgcagagatcctcctgtacagattgtgccacctggaagctctgcaaccccatgtgccaaaaatcaagattcttttgtaggaagagtgacacctatagctcgtgatgggcttttgaggacaatttgtggaagctcttcatctcctggcggttatgcttctctagcgcaagctaatacctcccaaaccaatggagtttctgccccaggtgtcactcctaggggctatgaatctgctgtaccaagcttgtcacttggaaattccgaaagtacaggcgtgaaacaagtaaattctgcaccaagaatgacacctgaaggccagaagttcctttcgctgggtattgcgccacgaagcccagcactgcgtgatttagtaaaatgccaggccagttcgacactcgttgccatgcctccagcgggcctgggaaaatcacggtccatgaagatcgagggccatgattctctggcaccgagtgtgaaggagccaaaaggcaatggtggtctagcaccaagtaaaacgccaaagctgcatgaacctgtgatagctgatatgagcatcaagagctgtgattctctagcactgggtatcgcaccaaatggccatacccatgatggtccagcatcaggaagtggggaggccaagaaagagcaggcagcactagtaactggctcgcagagtaaatcatctgtaccaagtcttgacgctagcagccatgttaccggggcagcgagcgcccttgtcgcactatcaactctgcgggagaagggcgggcgttagaggagcagcagcagcagcagtgtagttcccgttggatcagatcctttttctctactgtacatgtttctatgtacaggaatcatccccgtcgactctgatccccagtgcgtacggttgctgttggtggccagtcccctatatgttgcttggcagcaaatgttttggttaataattagtttttataaaaggaatattcacccttgttatgttctctacatgtaaattatctgaggtatacttgcattattatgagtgctataatcttttcttttactacatgctctaaactgtatcgtgtattcaataataaaatgttaatttactccctcctgaggcgattaaagaccaagaacccggatgcaatcgtagataaaactccaagtgcttgtgcaggcagagtaatgtccagttattacatcctggtcggcagatggcaaagataatgctggcatataaaaacgagttatgttaccaaggaccatcgtcctgtaatatcgatcgtgcttggtgtgcttattttctcagtgtattatcgggtgagctaaaatggtgccatagtttgttcgtacgatacaattactttttttttcaacatgtattaggattgtaatttctttttactgatgctaaaatgtctagctcatggggttgggttaaaaaaaaaaaaaaaaaaaaaaaaagttcccgttggatcagatcctttttctctactgtacatgtttctatgtacaggaatcatccccgtcgactctgatccccagtgcgtacggttgctgttggtggccagtcccctatatgttgcttggcagcaaatgttttggttaataattagtttttataaaaggaatattcacccttgttatgttctctacatgtaaattatctgaggtatacttgcattattatgagtgctataatcttttcttttactacatgctctaaaccgtatcgtctagcatcaagtaataaaactccaaagcgccatgaatctgctatagttgatacgatgccagaaagcagtcgctctcaaggcgagggtgtcgccgctaaggcctatgatgctcgtaaaccaaaaactggggagccgaagaaagaacatgcagcagtaactggctcacagggtaaatcatctgttccaggtcttgacgctagcagccatgttactggggcagcgagcgcccttgttgccctatcaactctgcgagagaagggtgggtgatagagcagcagcggtgttactaaaaactgtagttcccgttggatcagatcctggttctgtgcacttgattccgggccatttccatgcatatacgtgtggttatagcagtgatgtaagcaggtgggaatgtatggatcattgtatgttctaggacaggaatcaccccgtcgactcttctgaacaataaaccctctttgatcct

SEQ ID NO: 161638 - DNA, 595 bp, Zea mays
  Clone ID: MRT4577_78992C.1
atctccctctgggcgctgacctaccccgactcctactgtccagatcttcgccggctgcgatccctccatcacagcagaggtgattccaagatgacgaggtcctgcactgacgagacactcctgatgcaccccctcggaaaggcgcacgctgccacacctgccgatctcttcattattgacctctacgctgagttgttgcgcgctgccacttgaccattattcactggtgcttacatggagatctggatgggacgcttcccttcgactccttcctctcacgagtcctttcctgcatacgaactgcacttcttgctggttgcctccgctttcaagtgaacaattacaacagataattcagggaacttcccccagaaagggccttggctgatctcctgctatgctatctggtgctccacctggtgatcatgaatttcctccgataaacaactgctgcaccatgttgactaaaggttctgcagaccgctcttgtggtcgctgattgacgcctttagatgctctataatctgtgcgcgatcatgatgtcgaatatccatatgatctgatgaattaagctgagtattctcggaggctacta

SEQ ID NO: 161639 - DNA, 560 bp, Zea mays
  Clone ID: MRT4577_78993C.1
tcttagctaggacaaaatattgttctctttggggtggtgtcgtagcagcaatagtgattgggtttttgcttgacgacactgtaaagattgtgattggggattggaagaataagctctcttctctcaaaaaaaaaaaaaaaaaaaaaaaaaaaaaaaaaaaaaaaaaaaaaaaaaaaaaaaaaaaagggggggggggggaaaaaaaaaaaaaaaaaaaaaaaaaaaaaaaaaaaaaaaaaaaaaaaaaaaaaaaaaaaaaaaggggcgcgccccttttaaagaaccaaattttacttccccttccttccaacttaaaaccttttttttggggcccccaaaataaaattaattgcccctgttttaaaaccgttggacctggaaaaaccttggcttaccccaattaaatcccttggaaaaaaatccccttttccccagttggcttaataccaaaaaggccccccccaatcccctttccaaacatttccccaccctaaagggcaataggacccccccttttaccgccccttaaaccccgggggttggggtgtttccccccaggg

SEQ ID NO: 161640 - DNA, 274 bp, Zea mays
  Clone ID: MRT4577_78994C.1
aatgaaaattggttattttgttaccaaggaattttttgtttttttaacaaaacagcaatcctaaaggggggattaaaaattcctgcaaatgggatccatacggtcaaaaggtcccctttacaggatgttgttgtttttgttggctcaaatataattggaatggagggattcagcattggtgccatcaggtttgtttttaaacaccaacttggttttccccacacaatgccaccaacttgaatttttttttgttttttaattggaaggaaaagaa

SEQ ID NO: 161641 - DNA, 256 bp, Zea mays
  Clone ID: MRT4577_78995C.1
cattcactcccatccatcatatatccttactacatcactcacacttcttcacaaaccctattcttatactccaatattttcctcaaatatttattcatttataatctaaatctccctattatctacaccaaccatcctctattctaattaaaatatcaattattctcaaatcaataatctacattctattcatccacaactcaatcaaaactttctccatttcatcttattaatcattacaattttcttaccccac

SEQ ID NO: 161642 - DNA, 518 bp, Zea mays
  Clone ID: MRT4577_78996C.1
cgttgctgtcgggagccctcagccctcccgcgcatctagggttttgcccatggaccccgacgccggcggggctggggccgggggccgggcgggcttcgagcgggcgtgccgggctggcccaacaccgtccactccgaggtcctgccgtcgctgccgctccccaccctcccgcgcgagctcggcttcgacgcgctccgcgacgacgagcccctcgccgcgcccgaccgccccgacatgatcatgcaggccgccaacatcgcccgcatcctcgccgacaccgacgtctcccacctgggcttcaccgcggcggacaacgtcgaagtggatcccagccggtgctcctggctctggagggaggtgctcaagcacaaccccgacgccttcaaggtcaaggcgcccgggccgtcttctcaaggtccatttggaggcccaggataccacaatcaagaacgtgagaagcactttgaacatcttacacctaatatgagcaaaacacgaaatggatctgcattttctca

SEQ ID NO: 161643 - DNA, 651 bp, Zea mays
  Clone ID: MRT4577_78997C.1
gttggtcgccaatcgcagtatcggcaccgttcttccccgcttctccagtccagctcaccagccgcccctcctccgctgctgactgcgaagtgcgaatcaaagccaccaccgcgcaaaaaccatggcaccggtggaggcggagcagcaccggcgaagggcgctggcgcttgcggcgcacgacgcctccggcgccgtctcccccatccgcatctcgcgaaggtacgcctacgcgttcgcgcatgcgggtggtgctggcagctggccgtagccagacgacactgcccgctcgacctgtttctagcagccgcctagctagtggtgggctgctggcctcacccaattgcggtcggttgatgaaatgtgcatcggcgtggaatcgggcgcgtgcatgcagtgcagggttagcaagccgacgcgcgcgtggaaggaatctggcgtcgcgggttgctggatgtttcgcctcccgtctgaggaagtgcgcggctaatttggcttggtttggagttgaggtgcaatgtcggattttgcaaggttatgagaggcgagcaggatctttgattaggggtgtgctaaagtttagcccgggtcacatgaatcgtttgacttttaaataggagtatgaaatatagatcccaccaactggattagatt

SEQ ID NO: 161644 - DNA, 475 bp, Zea mays
  Clone ID: MRT4577_78998C.1
gcaacttaagcaaaagataagaaaccactatcattatgcaagtaaacgactaaaattttaatgattaaggttcctgtacaaatactgtacatcaaatatcaagcgtgacccttaaaaagtgccctccgtgtctgtacagctgatacaagtcaatcaactaaactatcagcgtgctatgtacacacccccaacaattttttgtagtcagtgaagatagaagcttcatcgccgagtgactcgtgtgaccaccactgcaataaactcatttagaccactgccagcaagccactagcacccttatctacataactatcaattaccctaataattacatcttcataattcttcaattatggaccagttaagagagtgcaattatgaaaggtggaaagatccttgaccctctgttatggcatacaagagcttctctttatcctttctttgatgagtacggaggccgcttgagataatttgc

SEQ ID NO: 161645 - DNA, 1431 bp, Zea mays
  Clone ID: MRT4577_78999C.1
gacacctggcagcagcagagcccataccccccaaccctagtcccagccagccccacccgcgcgccgacgggtccaagtccaagccgcgggcggcggccggctacgtgaagttccgcccggcgtccctgggccaccgcgaggcccgcgcgctccgggaccgcctcgcggtggagctcggccaggtccgcgccctcctctccctctccccaggatccgaattgccagcgcaccagtcgagctcgcgggacctcgccggcgccggcgatggcctcctcgcctacttcgagaggatgtacaaggaggcgctcgtttgtttagaggaagagcgcaagcgccttgagccgccgaggccagtggcggctgagctgccacctccgccggcagttgagcctgtcgaggcgaaggctaagacgagagcagggaatgtgaggatgcggaagcccaaggcgagggagcctaacaagagggagatgagcctggaggagaagaacatgctcaggctggggctggtgagcctgcccgaagagaagatgcacaatgtgcttcagatcgtgcgcaagaggaacaacaacccggagatgcttggggatgagatcgagcttgatattgatgagatggatgttgagacacagtgggagcttgatcgtttcgttactaacttcaacaaggcgctcaagaagtcccagcgtgctgcgatgttgaatggtggcgttgctgatgtaaccagtactgctgtggctgaggatgacactgcacctgtgggcgatgtgcctacattggttggcaatgacgatgcggagagtgaggaacctgtgaagagcactacagtggctgagcaggtggatgagtatgttgatattggggatgaaatgccagcagccacttaccaatccatggagatcgagaaggacgctgagggtaggactggctctggtggttctggcagtggctcttcatcgtccagtggttctgagtcgaggagctcaggggacagtgcctcaggagctggcaatgctcattctttgacttaggggaggttggtaacaataggatttgaaaatctgaatgatccgagttcgtgttcttgggtggtttgtggctgtgcagggctacaggtaattgtaagtatgtagctgtttatgagacatgggtgtctgcttaggcttcgattacgttagtagtagataacaaactggctttgtgggtgtctgacagtagtacagcaccatgtgtatgtaagctggaggtggaaggtactggtgtgttaaaagtagctgatcgaccttctcgtatgtagggggccagggctaatgtatgtgttcttaatggtagggttgttctggtgcagatctctcatgtaattgatgctttgtgcatgacattaaagtatggttttataagtaacaatgcagtatcatttgttgggtgacg

SEQ ID NO: 161646 - DNA, 1598 bp, Zea mays
  Clone ID: MRT4577_7899C.1
gaggtctgaattcggctccgccactacgcaaaacggctgcgaggcggcttgtctcggcgactgcaactgcacggcctactccttcagcaccgatggcaaatgctctgtctggaatggggacctgctcaacgtggaccaggccgacagcaccataagctcccaaggtgttctttaccttcgtctcgccaagagtgatttccagggtttgagcagaggcaacaagaggacaccgacggcggcgatcgctgcaggcgctgttggttctggaatactagtgctcgccgtgctagcgctcgtaatctggaggtgcaacaatgtgccgccgccgctacacgccggcgtcggagacggtggcggaatcatggcgttcaaacacaccgatctatgccgcgctactaagaacttcagcgacaggctcgggggaggtggtttcggctccgtgttcaagggactgttgggtgactcgaccgctgtggcggtgaaaaggctcgacgatgcccggcaaggcgagaagcagttccgggctgaggtgagctcggtcgggatgatccagcacatcaacctggtcagactgatcggcttctgctgcgaaggcgacaagaggctgcttgtgtacgagcacgtggtgaacgggtccctcgacgcgcatctgttccagcagagcagtgccgccgccgtcgccactgcgctggattggagcaagaggtacaggatcgccgtcggggtcgcaagaggactgtgctacctgcaccagagctgccgcgagtgcatcatccactgcgacatcaaaccggagaacatcctcctcgacgcgtccttcgcgcccaagatcgcggacttcgggatggcggcgttcgtcggccgagacttcagccgggtcctgtcctgaccacgttcagagggacagcagggtacctcgccccggagtggctgagcggggtgccggggtccccatcacgcccaaggtggacgtctacagcttcggcatggtggtcctggagatcgtgtccgggcagaggaacacgccgccgcaggctctcagcaggagcggttactaccacgccgcggcgtatttcccggtgcaggccatcacgaagcttcacgagggagacctgcagggcttggtggacccgcgcctacagggagacctcagcctggaggaggcggagaggctgtttaaagtcgcgttctggtgcatccaagacgacgagtgcgaccggccgaccatggctgacgttgtccgcgttctcgagggcctccaggagctcgatatgcccccagtgccaagactacttgcagctattacagcacgcgccaatgcggatttcatgtgatagatagttcatagctagactgctagactagataattccatctccgtcgtgacgacgcgaggcctcatgatgattgagctcgagcatggctggcatggcagcaccttcctgcttgactgcgtctgcgtggtcagattaagcctttgataattgtaagacgatctgaaaatctgagtggttctatggcgttgacaatcattagtgcaattgacaataagtcaatttgcattgcttaccccaaaaaaaaaaaaaaaaaaaaccaaa

SEQ ID NO: 161647 - DNA, 822 bp, Zea mays
  unsure (1)..(822): unsure at all n locations
  Clone ID: MRT4577_789C.1
cattgggtacctccgagccggccgggccgggcccgtcgagggaccggtcgccttggcggactcccgctagtgctcctccacgcccatctctctcttttcctcgctgcagccacggatcttggtagcagggacgccaccgcatttccagaatccaaacggaattttacaggaatcgcgctggaatttcacaggaatcagttcaatttcacggaacaaacgcaggagcaaggaaattttgtcacgttcccctcatttgtttcctttggcgacgactaggcgagtgctgcccgctcttcacgaggttttcatctgcgacgaacatcctccagggatggagtactttgatgcaaggcggaagcctcgtaatgttggaaaaatcattgcagccttggtcctcacaacactctgtatatttgttctgaagcaatctcctggttttggtggcaatagtgtgttttctcgccatgaacctggtgttacccacgtcttagtaacaggaggagctggttatattggttcacatgccgctttaaggctcttacaagatagctatcgagttaccattgtggataatctatctagaggaaatatgnggagcagtaaaggttctgcagggcttatttccgcagcctgggagactacaattcatcttttgctggatctgggggaccagaaatctgtcaacaagatatttgctgaanatgcatttgatgctgtgatganctttgcagctgttgctttaatgtgggagagagcacattgggaaccccttaggtactatcacaatattacatcgacacttttacgtggattttggaggcc

SEQ ID NO: 161648 - DNA, 327 bp, Zea mays
  Clone ID: MRT4577_78C.1
gggcttactacaccaacctgctaatccagcagtcaacaccgctcgtttttctgtgggggacaagtgcaaacacacaatggcagtgaggcactgtatcccactgatttgctctgacctctcgaggctgggccgacctcataattcagagaaacaacacaggtccgcaaatgcctgatagccgctaacgagcacgtagactcttggcctacgctccagactttccgacagcgccaagaacccttcttcaccggtagtaaagcactcatagactctgtgtcagattaacatggacatgcagggacactggtgtgtacgctagctgttgag

SEQ ID NO: 161649 - DNA, 653 bp, Zea mays
  unsure (1)..(653): unsure at all n locations
  Clone ID: MRT4577_79000C.1
ggccgcgccggaagccagctccggggccgcgtacccgtgccacccgctcgacgcgggcgccgacgtcgtcgtgcccgtgtcccgctccaggaacagctcgggcgggcaccgcgtccgggtggcctgcggggcgatggactgctggatgttggtggcgtagcgcatgagcccgcactcggacacgcacgcgccgccgcgctcgcccaggaggatgttggacggcttcacgttcgcgtgcaccagcgccgggcgcgccgggaacgtgtggatgtagttcaggccctgcgccgcgccgaacaagatgctcttccttgccgtccagtccaggttcctcgcgcctcctccgttggcttgcagaagggactggaggctcccgtttggnaggaagtcgtagacgagcagccgctccccgttggagttgcagtacgccctgaggctgacgacgtgccggtgccggagccggccgacgagccgcatgtggcggtcgaacgccttgctccggccggcggggaactgcagcgcgctgaggcgcttgacggccaccaagacgccgtcctctagcaccgccttgtacgtgctcccggacacgcccttgccaagcacctctgcggatgccttgaggaggctctccagccgcagctcgtcgccgccct

SEQ ID NO: 161650 - DNA, 534 bp, Zea mays
  Clone ID: MRT4577_79001C.1
aaatcgagaaggacgctgaaggtgtaactggctctcgtggttctggcagtggctcttcgtcgtccagtggttctgattccaggagctcaggggacagtgcctcaggagctggcaatgctcattctttggcttaacactaggatttgaaaatttggatgatctgagttctgttgttgggtgatttacgtagagctagtggtaattgtaagtatgtagctgtttctgagacgtgggtgtgcgtaggcttcgattacacagttagtagtagataacaaactggctttgtgggtgtctgttagcaccatgtgtatgtaagctggtggtggaaggtattggggtgttaaaagtagttgatcgaccttctggtatggagggggccagggctagtgtttgtgttctttgtagtacaattgttctggtgcagacctcttatgtaattaatgatttgtgcatgacattaaagtatggttgtataagtcccaatgccaaaaaaaaaaagaaaagggggtccggtgtataggatcctaggtttgg

SEQ ID NO: 161651 - DNA, 1989 bp, Zea mays
  Clone ID: MRT4577_79002C.1
tcgccgccgggcctgcgcaaaaaaaaaatatcgcagctagttactccactccccccatccctcctctctctctctctctctctctctctcggatccgaattgccagcgcaccagtcgagctcgcgggacctcgccggcaccggcgatggcctccgccctactggccggacagggcggggcgcgccaccacggctggggggagacgcgcgccccactcgcgcccatacctcccaaccctaaccccagccagccccacccacgcgccgacgggtccaagtccaagccgcgggcggcagcctcctcgccggcggccggatacgtgacgttccgcccggcgtccctgggcccgcgcgaggcccgcgcgctccgggaccgcctcgcgggggagctcacccaggtgcgcgccctcctctcccgcatcgacacctggcagcagcagggcccgccgccgcgcggggctccgcggcgaggtgcggaagcggtgcgggcagatcctcaccaggctgcgcaaggacaagcggagcgtgtggttcaacgcgcccgtcgaggtggagcgcctcggcctccacgactaccacgccgtcatcaagcgccccatggacctcggcaccgtcaaggagggcctcgccgccgggaggtacgcctcgcacgacgacttcgcggccgacgtccgcctcaccttcaccaacgcgctgcggtacaacccggtcggccacgaggtccacaccttcgctggcgccctcctcgcctacttcgagaggatgtacaaggaggcgctcgcgtgcttcgaggaagactgcaaacgccctgagccgccaaggccagtggcgcctgaattgacacctccacccgcagctgagcctgttgaggccaaggttaagccgagagcagggaatgtgaggatgcggaagcccaaggccagggagcctaacaagagggagatgagcctggaggagaagaacatgctcagggtggggctggagagtttgcccgaagagaagatgcataatgtgctacagattgtgcgcaagaggaacaacaatccggagatgctgggggatgagatcgagcttgatattgatgagatggatgttgagacacagtgggagcttgatcgtttcgttgctaacttcaacaaggcgctcaagaaatcccagcgtgctgtgttgaagcagtacagcaccatgtgtatgtaagctggaggtggaaggtactggtgtgttaaaagtatcagcaatgtgcttacgttggttgacaatgatgatgtggagagagagaaacctgtgaggagcgctacaatggctgagcaggtggatgagtatgttgatattggggatgagatgccaacagccacttaccaatccatggaaatcgagaaggacgctgaaggtgcgactggctctcgtggttctggcagtggctcttcgtcgtccagtggttctgagtcgaggagctcaggggacagtgcctcaggagctggcaatgctcattctttggcttaggggaggttgttaacaataggatttgaaaatttggatgatccgagttctgttgttgggtgatttacgtagaggtagtggtaattgtaagtatgtagctctttctgagacgtgggtttgcgtaggcgtggattacacagttagtagtagataacaaactggctttctgggtgtctgttagcaccatgtgtatgtaagctgggggtggaaggtgctggggtgttaaaagtagttgatcgaccttctggtatggagggggccagggctagtgtttgtgttctttgtagtacagttgttctggtgcagacctcttatgtaattaatgctttgtgcatgacattaaagtatggttttataagtaacaaagcagtatcatttgttgggtggtgttcttaatggtagggttgatcgaccttctcgtaattgatgctttgtgcatgacattaaagtatggttttataagtaacaatgcagtatcatttgttgggtg

SEQ ID NO: 161652 - DNA, 434 bp, Zea mays
  unsure (1)..(434): unsure at all n locations
  Clone ID: MRT4577_79003C.1
gcggggaagatgaatgcatttctcggatcgttcatccggaacaataattaaaaaaaacaactacctatcatcattggttaccaacttcttatatcctcctttctctttttgcccttttagtgagcgcaacaaataagtccattattcaacagtgctcacttgcttctaatgccattattccatagatcctcccgccggttacttcaatgggcttcgagcatcctnccgcgcaagcctataggctacaactttcgcttgcggcgagcgccttacaacaaccaattgcccaattgcgacaacaatccttggcacatctttccctacgaaccatttcaacgccncctccaccacattttctggcctcacttagccacctatccggggcgcaccctgtcgcctactttgcaacaaagctgcttgtctccaacccactt

SEQ ID NO: 161653 - DNA, 462 bp, Zea mays
  Clone ID: MRT4577_79004C.1
cccacgcgtgcgcccaagcgtgcgctacacagtggactgagtcacacagagcctactaaccagaactacctaccaggtattaactcacgtggactatctagctagcaagcattgggcatgggattctacaaactgcagccatctggggcggcggcatccaacacaaagcggtggggattcccttctaccccagaaaactggagcaggtggcgcccgccgtgcctgcagtgcatcatgcctgttctcaggcgaaacagccctcagcgaccaccgtgtggccgattacaggaccgccattgtcaaccgcggtcgccatggaggatgctggaaactgcatggagctagacggcgactactacgtcgacagccagacggtctcgtacatatacagggtgcacgatctgctcctgagcgagctcatggccaatgactgtcggatgtactactgaccaccatgcgctg

SEQ ID NO: 161654 - DNA, 382 bp, Zea mays
  Clone ID: MRT4577_79005C.1
cttcttttttctattttttaccctggctaggccaaaacccttgcttagtgtttcgatatattacaaaaaccacccataaacatttaaaacaagaaacctattgtactatacatttcaacccaaacccacccctattatattttataacaccaacaaatgaacaccatacaaacccttaaaaacccaaatcttctgatcctcacctcccaaatgcaaaaaacattctggtacataaaacacccaggctaaacactttttactaacttaccctcccctcttgcggtcctataataaaccctccccaaagcaattatacattattatcgcccattttcaaaatacataatagacttatccaccatcttctgcatattattgcccc

SEQ ID NO: 161655 - DNA, 350 bp, Zea mays
  unsure (1)..(350): unsure at all n locations
  Clone ID: MRT4577_79006C.1
atcgaggtggtcgaggggaatcgttcgagctgttgtctacagccgaacacgaggaggtnctcattttggggcagcaagcacaaagattggtgtggagaaaaactggagggctctagatcaaagtgcaggtctgtgtcacgcgacagcataatattgcactcgtgaataatataaggggtaccgctatgagtgggatcttgcgcggcatctgggaagatattggtgctttttggatacaaatggccattgaaggaatggacagcaaccgcggagaaagggaaccagcattgatactaatatattgagatctgaagtgattgagaagccagatgaccaatctgggatcccct

SEQ ID NO: 161656 - DNA, 257 bp, Zea mays
  Clone ID: MRT4577_79007C.1
tggatttcagatctgtgcaaaaacgctggtgcatggcttgtggttgacaatacctatgagtaagtcaatactgtaaagcaataatttttcaaaagcagtaatatagtatttcgtggtacctgttagaaagaactgagaagagccgtgaattacggttgtagtagggacagatcatataagccattagagctctactccctcctcttgaaacagtatcaaaatgaaagccactctggtggcgtacacaggtaggagtt

SEQ ID NO: 161657 - DNA, 280 bp, Zea mays
  Clone ID: MRT4577_79008C.1
ccgagctttgggagccggagctcgcagcagacatgtgccatttgccttggtggcatgagatcagggcagggtcatgccttgttcactgctgaatgctcccacaagttccattttcattgcatttcttcaaatatcaagcatggcaacctcatctgaccgatatgccgtgctaagtggaaagaactcccaggcgctcaacctgcagatgccagttatggacgagctagagttaacccattaaattgagcccaggatgaagcgtggctgttgttcgcagctt

SEQ ID NO: 161658 - DNA, 253 bp, Zea mays
  Clone ID: MRT4577_79009C.1
taattccgggctcgacacagctaactagtaattcggcctccatgattacgcatggccgaaggtccttccacgcaccccgcggtgtagaggagcaacaccatctcctaccgctccaagagcagtaagattaactggacggacgtgccttaaccttggagcgcttggggctgcaggatgcctaagcgatggaaggttaaggcaccttcttgcactgaagggtgctcaccttggacgacgaggaatggttgttctt

SEQ ID NO: 161659 - DNA, 326 bp, Zea mays
  Clone ID: MRT4577_7900C.1
ggcaggtcccaaggattttttttttttaaataccccacccccaccaacaataaaaaaaaaaacaagggtaaaggcaaacccaaaaaatttttcccccccggaaaaaaaacaaggtacctgcaaaagaaggtttttaatacctcggggtggcggggcttttttttgacacaccttgtccacaaaattaacttaagcccgggaacggctacaaggaagaaggccaggctgaaaccctattcgaattttcatgaactgttggcgccccccacctggatccccaccccaatttttaccggggaaaaaaaaagagccaaccttccccccca

SEQ ID NO: 161660 - DNA, 292 bp, Zea mays
  Clone ID: MRT4577_79010C.1
taccggatccgcacgtttcccgggttcgtacccacgcgtgcggggattcagcacccgcagcaggagggggaggtggcataacctagatattacggctgcggaggtgggggccgccaaggacatcgtcgaggataaggccgccgtgccgtttccaccgtcgcccgccaagccggccgacaacgactccaaggccatcgcagctcatgcttccaacgactctgctgctgtaaaaccttctacatcttttgcttgtagctcaacttgaaagaatatgcttaactctccaagtatc

SEQ ID NO: 161661 - DNA, 286 bp, Zea mays
  Clone ID: MRT4577_79011C.1
gtattccgacctgactgttactgttataaatgctggtctatccctatatatgaataagttagatgaccttttataagcgcagtttacttaagttttacgccgcctcgcactaagcagggttttttttctagagggtgtggaggcacggacacgcgcttggagagagactcccacttcgggggtccgcagtgatcaggggtctccttgggacctctttgcgcggagcgaaagtttataacttgttttgcaagcctctcttctgttgagggtaaaaaactgattattc

SEQ ID NO: 161662 - DNA, 1296 bp, Zea mays
  Clone ID: MRT4577_79012C.1
gaatcggcgcagcacgactacaggcatatggacgtggaagcgagccatgagtctccgcccttgcgcagcaagacgatgcgccgcctcctggtggcgaccaactgcgtgatgctcgcgcttggcgtcaccggtgggcagctcctcagccgcctctactttagcaagggcggacaccggcagtggctctccggatggctccagaccggtggctggccgctgctgctcccgccagtggcggcttcctacgtccgccgccgagcgcgcgaccggagcgccccggtgctgctcacccagacccagccgcgcatactgctggccgccgcggggctcgggctcatcgcgggcgtggacaacttgctctacgcctggggcctcgagttcctgcccgtctccacctccgcgatcctcatctccacgcagctggccttcacggtgctgttcgcgtacctgatcgtgcggcagcggctgacgatggcgacggtgaacgccgtggcgctgctgacggtgggcgccgtcgtgctgggcctgcatgtctcctctgaccgccccgcgggcgtcaccaggagtcagtactggctgggcttcacgctcaccctgggcgccgcggtgctgtacgggctgttcctgccgctggtcgagctcacctacaagtgcgccgcggggggcggacgccccgtgacgtacgcgctagtggtggagttgcagctggtgatggggttcgtcgccaccgcgttctgcaccgtcggcatgatcgtcaacaaggacttccaggtgatgcatgataactccatttatcaaatttagggtttaaagatagttcagtttttaggggctagttttagtcactctattttattctatttttagtttctaaattgttaaatacagaaactaaaataagttttaattttcgtatttagcaatttagggataaaagtaaaatacaataaaataaaatagatggaaactaaaatatagttttaatttttatatttaataatttagggataaaaataaaataaacggactaaaattagtctaaaaaacaaacacgcactcccttagtggtacggtacagcttctccggtacctcctctttctactttattttttaatccgaaaatcaaagcggctcctttctacgatgacaaacagagccaccgtcatagtacagtaccaaataaggtcttggtggaatgagtccatttcttatatgctacggtagtagttaattattaactttgacaaacgcagtggtaatgcatcaacttactgtattccgaatcaaataaactg

SEQ ID NO: 161663 - DNA, 352 bp, Zea mays
  Clone ID: MRT4577_79013C.1
ttgtaagccttactacacttcaggctagatagtactcattagtcagtacagcacagtggcgccgaccacatgacgatgatctaccgctcggagctcgtaaacatcacgctggtactgctcggtcctaacctgcgggcatccgaggcgctgacgcccaagcagggcgtgaggtccaagacctgcctgaacccgcccatgctggttcccccggacgacgtggtccacaaggtgtactacgacatccggtacccccggggtcacgtggggctgaagagcttcaacggtgaggtggtaaacgagtgccgctacaccaggaccatcccctagagggtctactaccactgggtagaga

SEQ ID NO: 161664 - DNA, 481 bp, Zea mays
  Clone ID: MRT4577_79014C.1
cgtgctgtcgatcttgaagttaaggcaagatagatggcttcatattgatgatgctaagctcgagcacaaccatccatacaaccagtccactacatcacttattaattgttataaaaaactaacagatgccaagaatggggtatctgcctcacgattgaagggtcgcaggaacattccagctgaaaaagagcaagggaacttcacggagataggaaggcttaaatttggggaaggagacgatgaatatatccagaagttttttgggaatatgcagaacaagaatccttacttcttctacttagtagatttggataatcagggacgtttgaggaacttattctggagtgatgctaggtcacgggcagcgaatgattactttggtcatgatgttgtttactttgacacctcatacttgacagagaaatatgatttgccactggttttcttcactgggatgaataatcatggtcagcctgttctg

SEQ ID NO: 161665 - DNA, 112 bp, Zea mays
  Clone ID: MRT4577_79015C.1
tactcttgccatttctctatcactgactcgtttcgctctgttgccttgctttgtcgagcggtttcaggtctctcaaaggcgagatttaaattatggactgaatttagggata

SEQ ID NO: 161666 - DNA, 457 bp, Zea mays
  Clone ID: MRT4577_79016C.1
tccgggctagacgtacgcaaatttactctcttattatggcatgtgtaatgtcgtgaaggatattttgttgcaatgctactttagaaagggagtacgtggaggctcagctgaacctgaatcagatattgtgcaggcttgcagaagctttctagatcaacagcagtgtgttaatgtgtggcgatttatctaaactatcaacgagagaaaagacttgacagagaacctgaagcagctacagtgcaggacactaatttttgttggtgagaattcccagttccatgctgaagctgttcacatgactgcaaagcttgataggcgatatagcgctcttgtggaggtacaagcttgtggctcggttgtgacagaaaagcaaccacacgcaatgctgataccaatggagtactttctcatgggatatggactgtataggccaagacagataaactatagccctcgt

SEQ ID NO: 161667 - DNA, 482 bp, Zea mays
  Clone ID: MRT4577_79017C.1
gttccgggggcccctttgccgggacaagattgacgggggggggaacccggggccctgaacattcccaaacaaaggtgggcggagaaaccatggccctggcaaaaagcccaaaacctcgtcttggccaaagtcagggggcggcgaaaaccctggggcgggggccaaagggcaggacccttttggggcccagcccccgccggcggggtcttagttatcctttacccctggggaaagaatcttgggggcctcccccggcgggacaagggtgtaagaagcccctggatcttgggggccatgctcgaccccctccccgggggggggaggggagggccaccggcctggggtaacggacggccgggcggcccccttcttggttcgggggaacaaattcccgggcttgggggcccccgtgggaccccacacccttggcttttgagggggggacacacctgggaaatggggggcccccttgggccccccca

SEQ ID NO: 161668 - DNA, 1968 bp, Zea mays
  Clone ID: MRT4577_79018C.1
catcggaatctaccatgggataagtagctttgttacctaacataaaagctgttgcacaggagtgtgttgtactgtaatacgtccatacctgatgattacatttcatgttggggcacacgttacaccaattcaattcggtgttgcctattgaagaatcttcctcataaaaaaacatattgtattccactcacaattgccccaacataaaatggcaaggcaaaatcacgtccacgcagattgttcactacccatgtcttctttcagtgacacagtgactatcagtgtctgtacattattcttccgggcctctgttatttccattgctatatatacgtctatattttcccatataagggagtacaagataatgccctgtgctgagcagcacgacagatacagcacattttacaaattttgtcttgctaatttgctcgcaccaacttcacaacgatgaatggatatgcgaagagggttgcatgagctccaaaacgagggctgaagcgccgccgccgccattgcaaactccagcaacaccaaattttccatttttctgcctaagaatcccaagcaaagtgacaattatccgtgcaccactgcaaccgataggatggcccagggaaacagcaccaccacttaagtttagctttccggaagggataccaagaagcctctgattagctatagcaacaacagagaaagcctcatttacttcataataatctatctgtgaagtttgaagagctgcatttgatatagcctttggaatggcaagggctggagctgtcgtaaacagctcaggtgcctgtgcagcatcagcataccctgtaatccttgcaataacttcaaggccaagattcttggctctctctccactgacaaggacaattgcagcagcgccatcacttatactagaagaattgccagccgttacagaaccattcgtcttaaaagttggcccaagtttcttcagctttactggatcaaactttgcaagactctcatccttgtcaacaacaactggtggtttccctctaccagaagaaatttcaacaggaacaatctcccaagaaaatgcaccgctatcccgagctgctatgccacgttcattgctgaggatagcatacgaatcctgctcctcccttgagattgagtgctggtctgaacacaattcagcacacattcccatcgggaaatcgttatagacatcccacaggccatccttgagcatcccatcaacaaggacatcatgtccgaaccgtgatcctcgtcttgcttcagccacatattttggggcattcgacatgctttccatgccaccggcgaccacaacatcgttgatccccagctgaatactttgagccgcaaacatgacagccttcattcccgaggagcaaactttgttgacggtggtacatggcacggagttgggcaagccggcgccaagggctgcctgccttgccggagcctggccgaggttggcgctgaggacgttgcccatgaaaacctcctgcacgagcgccgggtcgaccttcgccctcttgagagcgccctggatggcgatggagccgagcttggtggcggggagggacgacagcgacccgagaagtgcgccgatgggcgtgcgggcgacgccgacgatgcaggcatctcgagccttgaggccctgactgtcaccactagtagtagcagccgagctcgacgacgccatgatcgatcgacgggctgatcctagtaaggaagccggagatgaagatgcatcactggctcactgccaccggcgacgagcgcacccaagggagcacttgggcttcctgatttccggcggcgacgggggaggagcgccgagtacggagtggattgggagagacgggcacggctcgcttctctagaggctcgaccacgccacgtcgcggtgcgtggcagacgagacaagacgtaacggcccggccggcctcgagggtcccaatg

SEQ ID NO: 161669 - DNA, 651 bp, Zea mays
  Clone ID: MRT4577_79019C.1
aggataactttggcgacacatagctctcggaattcgattcagatcaagtaaggcggacaggcttatctgggagcatatgacagtgaagaagcagcagcacatacgtacgatctggctgctctcaagtactggggacccgacaccatcttgaattttccggcagagacgtacacaaaggaattggaagaaatgcattttgtgtctgtggaagaatctttggcttctctccgccgccagagcagtggtttctccagaggcgtctctaaatatcgcggcgtcgctaggcatcaccacaacggaagatgggaggctcggatcggaagagtgtttgggaacaagtacttgtacctcggcacctataatacgcaggaggaagctgctgcagcatatgtcatttctgcgattgagtatcgaggcgcaaacgcggttactaatttcgacattaggtaattacattgaccggttaaagaagaaaggtgttttcccgttccctgtgaaccaagctaaccatcaagagggtattcttgttgaagccaaacaagaagttgaaacgagagatgcgaaggaagagcctagagaagaagtgaaacaacagtacgtggaagaaccaccgcaagaagaaagaggagacggaagaagagaaagcagagc

SEQ ID NO: 161670 - DNA, 187 bp, Zea mays
  unsure (1)..(187): unsure at all n locations
  Clone ID: MRT4577_7901C.1
atcctnggtcttgtacgaggtgcagcaaccccatncnngttggaggggtgccanntctttttatgattacccatantgannngatgtacnnntcgataagtgggctggccctttcatannncggcgatgtgnntttcctagnnnaaataatcannatatatnntgattgggagaatttatcnnntgg

SEQ ID NO: 161671 - DNA, 351 bp, Zea mays
  Clone ID: MRT4577_79020C.1
gtatcttctagtagacgggcgcgcctctttgttttctttctttttcttttctttctaggaacagtatttaatgaaatatatatcaacatgaggcctgctactgtacagacagcaccaaaaaaagcagctagagggcactcgttcacggagccggggacatagaccttatttctaattagcattatggatgcatgcatgcattggaattaggacaagctgccgggattattattacatagaggaagaggcagaggacaggcataactaggccattccatggggatgacggatccaatgtgacatcatgctctataaaggatgttaacataggccttgaaatcggaggagctg

SEQ ID NO: 161672 - DNA, 523 bp, Zea mays
  Clone ID: MRT4577_79021C.1
cttctcttgtaatattcacagtatagtcaaatggttcaaaatggtacatgcaaatttcagtattctgggaaagcaacaagtggtaacggcgaacagcaacgccaccaggggttaaacgcttaaggcaagaggctaaggaaggtgtcaaattggatatagctactaggcctgggactcctttgactggaaatgctggtcttccggttccttcaagggaactgatgaacttgacttatgaactgcgttttcctggctcatgttcatggattaaatggttgaatccctagggtccatgttgcgccttgcgccgcttacaaagtaccctgtgtctcctgtctgttctaagtggtaaagctgcaagctctgccggatggggctggataatccgtttaaaacgaccattgaaatcttggattgcttcaaaccacggatacctggagcaaatgaacctgacaaaggttgctggggacttggattggcgatgtacactgtaggctcagtgcttgggctcgtgtatttgggg

SEQ ID NO: 161673 - DNA, 335 bp, Zea mays
  Clone ID: MRT4577_79022C.1
cccatttcttgtgtgacacgccctctacctgttgccgatcctgtctactagcagccaggcaggttcactgttctagctagcagcatcgcacaaggcagagctcgactgacacaatggcgggcggccaggttaacgtgctgaccacactggaccagaccgacacacaatggtaccatttgatggcgatcgtcatctgcgccatggtagatcttcaccgacacataccatctgttctgtatcgcgctcgcgaccaagctgctctggcggatctactactccgaccccacctgcaaggacccccgaagcctgccgcccaacgtgatcgacgccgggac

SEQ ID NO: 161674 - DNA, 589 bp, Zea mays
  Clone ID: MRT4577_79023C.1
ggaaacaaaaaaccccggcttgttttattattacgggcccgaagtttgggggttttcccctttggttaaatggacccgaccttataatttaacgggggggggaattttttcccccacccgaaaaaaaaaaaccaaccccccggggccctggggttttacccaaccaaatttataatcctaatccaaattgggaggtttgtttgcttgggggggtaaaaagttcaaacgggaggaccgcttaaacgggaccaaaaaatacccgaagggggggggggaaaaaaaaaaaattccccgactaaaaacccccccgttgcctttgggggggccggccgaaattatttttgcctttgccccgcgcgggggggggggaaaaataaaaattgaaccccccccgggaatttatcccggttgaggaaaggaaaacccccaaaaggtttttttgggcccaaaaggggtagccacaacctaatttagttttggggcccccatcccgggccagggttcggggctgttttggtggggggggggcccctgagggtgggaattttgtttgttggggtttaaaacaacccatgctggccctgggggg

SEQ ID NO: 161675 - DNA, 265 bp, Zea mays
  Clone ID: MRT4577_79024C.1
gcatacgagagcgatcgccgcaccgtcaactccgacccgcgtccatcgagtggagacatggcggtcgtcatgcgcgagacaattggatatgccctggttccatgattgctaggggtgttatgcttggtgcagaccagcctgttattctgcacatgcttgacattccgccagcagctgaagcccttaatggtgttaagatggagttggttgatgctgcgtttcctcttctgaagggagttgttgctacaactgatgttcgtggaag

SEQ ID NO: 161676 - DNA, 602 bp, Zea mays
  unsure (1)..(602): unsure at all n locations
  Clone ID: MRT4577_79025C.1
actcacttccctacagtcctcgtaccgtctgctccctctctctctctacctagctctagctagccttcctgtagcgcggcagaatgagcatgcccctgcctccaccacggaggtggctgacggagagctcctgcatgctgctcctcctgtacactggcacctgggagtggacatgtctatcgtggcctacgacgagcccacagagcgatgatgcgccaagcgttgtacgcacgcccgcatggcactgcagggacggacctacatggcgcacaaggatgcggatgctggtgaccaggcccaccccaacagcctatgctgactttcaagcaccccatcgaacatggactctgttagcacattgggatgacatggagaagatctggcaccaccaccctctataatgaactccgcgtggcgcctgaccagcaccctgtgctgctgacggaagccccactcaaccccaaagctcacaggcagaagatgacccaaatcatgcttgagaccttcaatgttcctgccgtgcatgtcgccctccaggctgggctttccctgtacgccggtgggcggacaactggtnttgtgttggactctggtggtggggg

SEQ ID NO: 161677 - DNA, 491 bp, Zea mays
  Clone ID: MRT4577_79026C.1
ttttttttttttttttttttttttttttttttttttgggtgttttttattattgataaaggtgtttttctttttttttttttatagaaaaaaaaaacccccactttttacccaggcaaagggagctccaaggggagggaaaaaaaggggggggggtaaccaaaaaagggaagggccgggccgcctcaaaatgaaagggggggggggcttcaaacggaaagagcgcccacgggttttttaaggggggggggggggggaaaaaaaaccccaaacccaagcaacgggaaaaaaagggggcaggggcaaacaacacgcaaaagggaaaaagagtcccaaccccggggaacctgaaaaacaaagaaaggggccgggagaaaaaaaaaaccgaaacacacggggcccggaaggccaaaggggctcccaaccgggggggaaacaccgcaaccgggggccaccgagggaggaaacctgaagaaacagggggggccgtac

SEQ ID NO: 161678 - DNA, 382 bp, Zea mays
  unsure (1)..(382): unsure at all n locations
  Clone ID: MRT4577_79027C.1
gtgatggggagcagcaaccatcggcgtgaggagagccaggaaaacgacgcgcacaccaaaacgatcctgggcgtgactggacggttgctgtggcgcaggggatcgacacccgagtgcatggcttgaggagggagatagcagaggggaggagccagagtgccagacgccatggtcaagggctagagcagagggggacttggtggggaagacgcagggcatggagcggaggtacgacaagctcgtagtagcaccaaagaaactgctggtgaggagccgagctggagcaggggcgagacggccatagcgagggagctcggatgggcgaaatccgagcaggggcctggggcgcgcgcacggnggatgggagctcggccatggacct

SEQ ID NO: 161679 - DNA, 895 bp, Zea mays
  unsure (1)..(895): unsure at all n locations
  Clone ID: MRT4577_79028C.1
aaaagatccgtaattccgtatcattgtttctctcctgagtctcctccttatcagagtctggggaaagtgctccctccgcctccatccgtccgtcgtcgcccggcgaaccgatcgaagctagcaatcaaatcagaaagagcaagagaagcgcccgagtccctaggccggaaagctatggacagcgccgccaactggcggtcaacgcagggcaccgaccctgccgccggcggcgtcgatccaaacgcggctgcccccgccggaagcgactggcgcacccagcttcagccagaggcgcgccacaggatcgtgaataagataatggagactctgaagaagcacctgccagtatcagtaccagaggggctgactgagcttcacaaaattgctgtgcgttttgaagagaaaatctatactgcagccaccagccagtctgattatttgcggaagacttcgctgaaaatgctgtccatggaaagtcagacaaagacacaacagaaccctggaaatgttcaagtgattccaaatcaaaaccctcctggtccagcacctggccttcctccacaagttagtaatccagcacagtcatcagctatcccattgatttctcagcaacagacacggcaatcaaatgcctctacatctgttcaaggttctcttcctagtcttggtcagaactcgtcgagtgtcagccaggcatcgacgctgcataatatgtctgtcatgccacaaaataccatgaacaatggtttagcacaaggtactccacaagatatgtatgctgcacaaaggcaaatggctggtaggcagcagcaacaacaacaacaancagcacataatcagntaatttatncacaacagaaatacttgaaaccagaattgcagcagaatcacttat

SEQ ID NO: 161680 - DNA, 364 bp, Zea mays
  Clone ID: MRT4577_79029C.1
gtaacgccacaaacaccagcttttcaaaattacccagcagggcctcaggaaaaaaaaaaacacctccaacaaaccacagaagggtggagtccaacaagaaaaaccggggacaaagggccaacccaacacaagagccatttgggggccccttaaggggttggaaggtgattcctaaacaaaaagggtgggaggggactggaaaaaataggaaaaaagttggacttgttggggatcaaaacccagccaagcccactgaacccacaggggttgggagccaaccgaacaagcccttaaagaagggaagaggcccaaccccacttactaaagggaaggaaaaaaaaggggtaccaaacgggcagggtgg

SEQ ID NO: 161681 - DNA, 556 bp, Zea mays
  Clone ID: MRT4577_7902C.1
ctcagcctgaataacaggtaaaaaaacacccgcgtcgtggctgcgccccgggacgcgctgcgggggctgagccgccgtcggtgttgagtaaccgccaggggcgaactgcgaacgggtccgtgcccaggccgcctgcgccgcgggggactcacccgcgcgcgtgctgccatggccgcgcgccgggtgccacgcctgtgcgccggggtgggaccgcttgcccgcgcgctgccagggccgcgcacccgctctccgtggctgctgcgcacgcctaggccgtgcctctgggaggcgcttgcgcaggccatggccaccggggctactgggctgtgcttgcgctcgcagccaggggccgagcgcccgagcctgcgccgaggccggggcctgcgccggcgtgcccgcgcgccgaggctgggccacgcctggcgtagggggctgcgcccgcctgccgtcaggggccgcattggccgcgcccgtgcgacgccggggacgccgcgtgccttgcccgtaccgtctggaggctgtgtgccgtgccgttattcttagccgtcagtgcttg

SEQ ID NO: 161682 - DNA, 210 bp, Zea mays
  Clone ID: MRT4577_79030C.1
tcgcttcttgtttgttctcctggcattcactctaaccaacgacggatgatctctcgatgtcccggcgattttgatattcagattcagcttataagacttcagagaaagctatggatttttaggttgaaagtcaatgtgctgttgatcattgtggtgagggagtagatgtacctagggtgctcggccacgaagtaatagtatgatggggct

SEQ ID NO: 161683 - DNA, 208 bp, Zea mays
  Clone ID: MRT4577_79031C.1
ttttaattatttctttatttaaaagaccggaaccaggggttgtttattaacatgccccgggatcatctcgcaggcggatcgagacgggtacacgaggaggaatggaaggtccatctaagagccccgccgagggaaggaccgaccattcattctttattccattcacactcaagccgggggaacccgataaaaagaaaaaactccaaaa

SEQ ID NO: 161684 - DNA, 927 bp, Zea mays
  unsure (1)..(927): unsure at all n locations
  Clone ID: MRT4577_79032C.1
atcaaagaatagaatacaaattacacttgactgctacagctctctttcttctacctcacgccttctctattgtgtcttctcgatctctctctatctgctcgttctccagtagcgtaccacaacgctaacaattggtatcagaggtgttcgatcctccacttcaattcgccaacgacatggctctcgatttcaaactcatcctccacgagttcaaccggcggttcgacgagctgaacactcgctgggaccggcgcttcgacacattcgccagtgcgctgcccaccgtcatcgccgacaactggggcgggtgcttcgacgacggcgagcaatattgcgcggcaccatctgtcatcgccgacgactggggtgggtgcttcgacgagaggcaacagagagacacagaggctggccaacctggaggcgcggcggcgccacaaggtccagttctcattcatcctggccacgttgctcgcgactccgaggacgtgcaggccactcgtcgcagctctacctcggcagcctctgtcgcgactccgaggacgtgcaggccgcgcagctcgcgcgctccttccgtgccctctccggttttgtgattccctgcgccctctccggcttcgccgccgcatccgggtttacgtggtggtgggccaccgcagtcccaccatccgcgaggcagccagcagggcccccgcgctcgacgataggctgctgaagcccctcgcccatcaccgtcttctggggcgtgcctactgcgaggaggatggggtcttccacaccatgccacaaggtgttcgacgctcgttccaactccgacgcgcagcctgtctgctcgcccatcaccggncacctgtctggacgcgcagcctgctgcgtcaacatgctcagcagcatcaactgctcaagaagctacaccaacatcactcctct

SEQ ID NO: 161685 - DNA, 2384 bp, Zea mays
  Clone ID: MRT4577_79033C.1
gccggccgggtcgggacttcgtttctgatagtttgcgtcagctaccagcagatctttgtagaaaaccaaaggaacagaacaggctagcgtggcctaagctgcagctgtcagcgtcgccgccgccgccgccgccgcgatgatcaccgggcgggacatctacgacgtcctggcggcgatcgtgccgctgtacgtggccatgttcctggcgtacgggtcggtgcggtggtgggccatcttcaccccggaccagtgctccggcatcaaccgcttcgtggccgtcttcgccgtgccgctgctctccttccacttcatctccagctgcgacccctacgcgatgcagtaccggttcctggcggccgactcgctccagaagctggtcatcctggcggcgctggccgtttggcacaacgtgctctcccgctaccgcaggggcgcggcggcgtcgtcgctggactggaccatcacgctcttctcgctgtccacgctgcccaacacgctggtgatgggcatcccgctgctccgcgccatgtacggcgacttctcgggcaacctcatggtgcagatcgtggtgctgcagagcgtcatctggtacacgctcatgctcttcctcttcgagtaccgcggcgccaaggcgctcatctccgagcagttcccgcccgacgtcggcgccagcatcgcctccttcagggtcgactccgacgtcgtctccctcaacggccgcgaggcgctgcaggcggacgccgaggtcggcagcgacggccgcgtccacgtcgtcatccgccgctccgcctccgcgtccaccacgggcggcggccacggcgccgcgcgctccggcgccgggtaccgcccctacggcccgtcctcggccatgaccccgcgcgcctccaacctcaccggcgtcgagatctactcgctgcagacctcgcgggagcccacgccccgcggctccagcttcaaccagtccgacttctacgccatgttcaacgggagcaagatggccagcccgctggcgcagcccggcgccgcacgcgcgccggggctcgacgagcaggtggccaacaagttcgcgtctgggaagggtggcgacgccgcggcgtaccccgcgcccaaccccggcatgatgccaccgccacggaagaaggagctgggcggctccaactccaactccaacaaggagctgcacatgttcgtatggagctccagcgcgtcgcccgtgtcggaggccaacctccgcaacgccgtcaaccacgccgcctccaccgacttcgccgccgcgccaccaccgtcgatgccggtcgacggcgccaccccaaaaggcgtgagtgggactgtcacgccggccaagaagccggaccccgcggccaacggcggggacctggagatcgaggacggcctcaagagccccgcgacggggctggccgccaagttccccgtgtcgggctcgccgtacgtggccccgcgcaagaagggcgccgacgcgccggggctggaggaggccgcgcacccgatgccgccggcgagcgtgatgacgcgcctcatcctcatcatggtgtggaggaagctgatcaggaaccccaacacctactccagcctcatcggcctcgtctggtccctcgtctcgttcaggtttaacatccagatgccctcgattataaagggatcgatatctatattatccgacgcagggctaggcatggccatgttcagcttaggtctgttcatggctctgcaaccgaagctcatctcctgcggtaagagggtggcgacgttcgccatggccgtgaggtttttgaccggcccggccgtgatcgccgccacctccatcgccattgggctccggggagtgctcctgcacgtcgccatcgttcaggctgcacttccacaaggcatcgtccccttcgtgtttgccaaggagtacaactgccatcctcaaatacttagcacagcggttatattcgggatgctcatcgcgcttccgatcacgatactctactacgttcttcttggaatttagatttctgggtaggcagagccgctaggattctaggaatgtagcagtgaacgaatgcaaagtgaagcaatatggatatcctgaagaccatcggagcagagaaataggggaagctaataggaccctagacagaaatgcagatgagggtgggaaaaaaaatccttgattctatttttttttgcatttcctgttaccgttttagattcaaagcaaagtttagagctttgagcatggaggattgaaccgttaaccgggcaacttggtactaaagattcctaccagttgattcctttgcccagagagacatgttctgcaaatttctgcctgatctgatctcatacaaattgggataaagtaatagaagtggttctcg

SEQ ID NO: 161686 - DNA, 861 bp, Zea mays
  Clone ID: MRT4577_79034C.1
agaagagctacgcacttccctgaaagaattactatttaaagaggggagtttccgatggaatcgtttggaaaatttattgcgtaatgccaaaaattcccctggctttgattttgattatgtgcttaatgaagcaacagaatttttactttcagaccggggacaattcattcgcgatcgcctggtggcggaattagtcaacagtattgatcaactggggcgcaacacttggcaacaggtcagccacaatatccaggaaagaattagttttctgggtgacttaggtaatggcaacggtaaagcccatcaaaccaaaacgatcaaagttgtgcctcaacccgccatcgctcaacaggaggaaacttggcagcatttacaaaatctttggcaaattcttaaagagacccccggttttgaccccctcaagtttgtgccggtgttgagtcaaattattgttaatcccacttcccgtcggatgggtcaacaggtggcggaaggactactgcaaaaggcgatcgccagggtaatccggcaatgggccctggctttggaaagtcagcccaatccagccatcaaaatccgcaatgcagcctaggccatggttgccataggttccagtcaaaattttgctgaggcgagatcaagccagtgccggtcaatgagacaataaaaggttacgtccccaaattgccttggtaatgagtctgaattggattagtcgcgccgatcgcctacaagccttacccccctatgtttttgcccgcctcgatgagttgaaagccaaggccagggaacagggcctggatttaattgacttgggcatgggcaaccccgatggcaaagccccccaaccgattatcgaag

SEQ ID NO: 161687 - DNA, 613 bp, Zea mays
  unsure (1)..(613): unsure at all n locations
  Clone ID: MRT4577_79035C.1
gccagctgccggcccaccaaggtctgcccattggctgtgcattctgaccgagtgggacgagttcaagaccctaggactaccatgaagatcttcacaacatgcataagcccgcctttacttcccagacataacattgaaagtcccacaagctcaaggagatcgggttcattatatactccatggggggggggctcgactcctggctcaaggacatgccctggggacgactaatcccacccgacttacctatggattttatacaccggaaggaagaggaaacaagctggttgaccgccctttattacactttgataactcaggctactgtaccgattctctcttgtgtgaagcataaaaaaagggttgacgggctgttagtataccatgactatcggtgtttttgtttctggggacggctgcacatgtacaataggtcacgagccttgcgttctgctcgaggaagctgtccacgtaccaatggacctgctatacccggctgattgttgacttgcctttctaggagttactacncactacttataactcagcagggtgcgcagcttcttctgctccctgagtcgtctcctctcctctacctgcctgaacctggctt

SEQ ID NO: 161688 - DNA, 833 bp, Zea mays
  unsure (1)..(833): unsure at all n locations
  Clone ID: MRT4577_79036C.1
gaactgcccactgccgcactgcgacaccgctccacccaccccaacctaggcagtaggcagtaggcatcaagcgtcctgcgtggctgcgtccaagtccaagcgccgtccggccaccagcgcaggtaccgagccaccgaggtaggagccagccaccgggcagatcccaggctgccagccaccggcgtccagcactccggctgccagctaccggccacccgcagcgcaggccacaccaatgggtagcaaccgcatggcgccatggctgccgacgaacaccagcagcgagacggccagaccccaggttatgttactactattatttctatatgatatatttgtctaaagtataaagtctaaacgctatatgaaatgtgattttatatagctatatatgagtgtcaaatagagagttatatactcatatattgtttgcttctataacagtaattcgatttattatatcttcgtcgaggatagtgacacgtcacgtcagtgtccggccatcgcttgagaggcgcgaatgtcttcgctgcgccgtcacgatccaggctcgcatccccttctgacgcgcacccattgcgggcagacgtttgggctttgtgtggatggatcatggacgacataccnacgtttgtttttctaactaaatcttcacttctttgaatcgcagagtccaacccaaggatggtttaggctactgaagggcaatgcactgattcttagactattgaagaatttacaggatgatgtgcaggagcaggcagctactatngcattntctatttattgtactcttgccacgaactgctcgnaattctctttcagtttgttgc

SEQ ID NO: 161689 - DNA, 275 bp, Zea mays
  Clone ID: MRT4577_79037C.1
accttcttttaactcttgcgtttatggttgatcccgagttttcctacgcaggagatatgccaatcattccattaatagatagatagaagaaggtacaacacacccacacacacgccgcaaacaacataccaacagacgcaccacacccctcacaggacacaacataccaaccaacgcaacaccactaccacacttaaccactctggacatgatacaagactatccccccggatcaagcataaacgcaagagttgaaagcaggttcaaccccttgg

SEQ ID NO: 161690 - DNA, 449 bp, Zea mays
  Clone ID: MRT4577_79038C.1
aaaagggaaaaaaaagggtttggcccaagaaaaatggggaaaaatttaaaataaaaaactgggggggcccgcaaaaattttggaaacccaggcctccatgttttacggaccccggggggttttttttcccccccccggaaacggggggggggaattctagcaccccctggggcaaaaaaagggggggggaaggcccttgcaaacccccccgggaaaacctttggtaaggaaaacttttgcccaatgggggccccttgagaaagggcccttgaaggggaagttttggaaattgaattttcttggcaaaaccaaaaaaaccggccccccttgggtcccggggtaaaaaacgggcgggggggggcccccaaaaggtttgggggaaaaaccccccatttttttttcctttaaaaaggaatggaatggaaggggaaagtttttggggggggggg

SEQ ID NO: 161691 - DNA, 313 bp, Zea mays
  Clone ID: MRT4577_79039C.1
caaaacaaaaaacttttttttggacccttaccccaaaaaaaaccaaaaagggggcccccccaagggggggttgggggaaaaaccccgctgggtttgcaaaaacaagggggttaaagggcaacaattgttgcaattgaaaaaggggccccccgttaggcccaccggcctggaaaaacggcaacaaccggggttgtataaaaaagggagcggggcccaccccacctacctggctaaagggaaaaaattgttcccgctgaaaaaaacccggaaagtccaatccccccaattggttaaagggaaaaaattgctgggg

SEQ ID NO: 161692 - DNA, 284 bp, Zea mays
  Clone ID: MRT4577_7903C.1
actcctataggggattgggttcctcgaggccggccgggtttttttatgtccatgaaacattgatccactgagaaaatatatcttcaggtgccaatctacgacaataccttctgttctgttgctagatcaattttatttgttctcaggctcaggccacatgcgatggtcaagtcagaattcttgagttagcctttgtgaggcgtgttggttcttcggaagagttgagcttctttgtctcaaaaaaaaaaaaaaaaaaaaataaaaaaaaaaaaaaaaaagcggcc

SEQ ID NO: 161693 - DNA, 615 bp, Zea mays
  Clone ID: MRT4577_79040C.1
ggcggacgacagccgtcggcactcgcaaattcagcatcgtgctgcagggcaacgggagcggagatggcacgagcgacagcggaaaagggaacgccgccaacggcgagaacggcggtggtggcagcctgcaggtaacggagcagcaggtggccaggttgatggaggaggacatgggcaccgccatgcagtacctgcagggcaaggggctctgcctgatgcccatctctctcgcctccgccatctcctccgccacgtggccgtccctcctatcccgcccctccatgggcgcaatgggagacgctagaggtcccctgcacgacggcggcagccctgcgtcgccgccactggtgaattgtggtgatgattccagcaccgtcaaggatgccggtgccggcggtaagcggtgaaggcaatgatcttgtcttgagaggttgcgtgtgaaagatcaacatgtccaagtgaaaaatgaaatgaattgggctaaaagttctggcaacaattaaatcttatcaaattgtctatttcactctttattattgaataggctacttcacttcttatgtctaataatattttctatcttatgtacaaaaaaaaaaaaaaaaaaaaaaaaaa

SEQ ID NO: 161694 - DNA, 771 bp, Zea mays
  unsure (1)..(771): unsure at all n locations
  Clone ID: MRT4577_79041C.1
nnnnnnnnnnnnnnnnnnnnnnnnnnnnnnnnnnnnnnnnnnnnnnnnnnnnnnnnnnnnnnnnnnnnnnnnnnnnnnnnnnnnnnnnnnnnnnnnnnnnnnnnnnnnnnnnnnnnnnnnnnnnnnnnnnnnnnnnnnnnnnnnnnnnnnnnnnnnnnnnnnnnnnnnnnnnnnnnnnnnnnnnnnnnnnnnnnnnnnnnnnnnnnnnnnnnnnnnnnnnnnnnnnnnnnnnnnnnnnnnnnnnnnnnnnnnnnnnnnnnnnnnnnnnnnnnnnnnnnnnnnnnnnnnnnnnnnnnnnnnnnnnnnnnnnnnnnnnnnnnnnnnnnnnnnnnnnnnnnnnnnnnnnnnnnnnnnnnnnnnnnnnnnnnnnnnnnnnnnnnnnnccgagggtggtacgcggtggacacggtgttcgacggcagcaagctggggatcgagccgcacgccgcccagatcaaccgcgccggcgacctcctcctgctcgactccatcagcagcaacatctacagggtccagctgtcgttgtcaccatgtgagcacgctctgcctccgaccactccctgtccttttcaggttttccagtcttcatgggattctgcttccctcggtgatgtgagtagttagggagggagttattggtggtggttggtaggggctgatgttgcatgctgacttcatcaagcgctgttcctcgattgcgaaatgcctactattttgttcattgctatagtatggacaatatgaaataatagctgtttgcgatcgtccccc

SEQ ID NO: 161695 - DNA, 363 bp, Zea mays
  Clone ID: MRT4577_79042C.1
tttttcttcctttttcaaaggatttttggttttttaaaaaaataaacacacaatccaacgagatgagtaatactgcgtgagattctttatataaagctattcctcgcaatacaaggatgcaaataaagattcaccgaataaatttgtatgcaaatggagtgtttctaaaatccataactgatctctattcacactttatttcttaatctgactaatcagccattccataccttcatgcagaccttcttttgatttagctgagcatgcaacgatggaccattgtctatctttaatcaactgaagcgtcaaagtttctgaaatctcatctgcagggagggcttgaagcaagccctgcttgttagc

SEQ ID NO: 161696 - DNA, 1252 bp, Zea mays
  Clone ID: MRT4577_79043C.1
cctcgaggccggccggggatatagtacctcgactactgccactctagtgcccaccggccacccctaaaccctcgcttcgcccccaacgtttgctcacccagaccaagatgctccgccgcgccgcccctacgtcggctgcactctgccgccgcgcgctctctaccacgccatcctcttcccgcaccgcggcggaaaccgcggcggtctcctctgagttgaactccgtcctcctccgctcgctcaaggagcactacctcgaggtctgcaagatgacgccgccgcccaaggtcagcccgcccaagcccttcaccatcgtcaaaggcgccctggaccagccgtcgggccccgtgctgcgccgcgaatacggcgaagacggagaggagatctccatctccgtcgccaggctcgccaacatcctgcccgccggcgccgactctgactcggacggtaccggcgagggcggtggtatgagcgcgtccatcagccagctcctcctccacgtcgacatctccaagcccgggataggaaagtcgatgcagttcctttgcgggctgtacccggacgctcttgggatccattcggtctgcctccgatcgaagaacgccgacccgtttgatggggatatgacttcgaagggagagtaccgagggcgtattttccaagagttggatgaaaaggttcgtgatgcacttcatctttacattgaagcccgcggcataaatgagaagctcttccgttttctccaagcttggctttatgtaaaggatcaccgcaatcttgtacgctggttcaagagcgttggttcattcatcagtgaccaaagccaaagcaagatgtcaagaaccccgcgctgaagatgatcatctgaaaggcggtcgtggagcagttttctccaggatggataattgtcctaggataaagtgaattatatgcaaagtcgcgccagcgaggagttttggtttatctttagtttttattcgccggggaatcagtggtctggtggttgaattagttatcattagtccttgtgatctgctaccctatcatgctgaggtgcttgtcagattctcaattattcaaactccacattttccatcgaagcgcaagaagcacgtattgagagacccctgttagtgatctcaatcaaagatcgccttctattgtcgctttctaattatagggtgtagtcaggtcatgtgtacgcgttggtgcatccagccctacatcgttcaggctctatggttttcctcct

SEQ ID NO: 161697 - DNA, 277 bp, Zea mays
  Clone ID: MRT4577_79044C.1
atgagtggcacatatatataaataggttattgaatgggtattctcttttccctttaatttaaaaagtgatatttatttattaaaaggagcattggtagaattattggtttatagtatcttctttaataatccttacaattacatatactaataggatgttaaaattatcatcgtgtttcctatttgtgtttagattcttataaagcatgagatgagtaatcaagggaagggtcgcatctccatgtttgccccatgaatagaatccatttgacaagcc

SEQ ID NO: 161698 - DNA, 204 bp, Zea mays
  Clone ID: MRT4577_79045C.1
ggggaaacctaaacaactaaacctgttagtaaatcagggttgcctaccttttttcgggccttggcccccggtcattcccaagcccatgctttcccccccgttttcattccatagattacgttgccccccttttttgtgcattaaacgagcgcattcattccttcccccccccaaaacggggggccctttatttttaaaactagt

SEQ ID NO: 161699 - DNA, 314 bp, Zea mays
  Clone ID: MRT4577_79046C.1
gaagaccctgcgcttttattacctcgtacatatatataaataagcaaaacgtcttatgctttaaaaaacgccacattcaagcctgtggatgggacggcacactgaaacatatatatctagaggaatgcgcacattgcttcagcgcaggctggatgcgcacacgtagacaacgacagtggtgaaccagctactggttcgggccccccctcaatgaggatccctcgcccaccccaccctcttcttattgctcgactggagcgccggggcctaaacacagccactcctcgtggtatatgccaatgggtctccggcta

SEQ ID NO: 161700 - DNA, 431 bp, Zea mays
  Clone ID: MRT4577_79047C.1
aaactcaaaacctggggcctttagagggattgtttgctctaagggacatgtggtacataacaagcgcatttttttcaggcgtcaaatttttacgaaccccatctaactaaagctaccaccggcccaaaatgcttgttcctggaggggggctgaagctaaaggctgtttaagacgtggaaaaccatgctgcactaggcactattccctatccaggagaaaaatcctaacgcatgaggtattgaggtcaataggtttttccctgaaaccccccaactatactctgcccctaatagggcacaaccataaacaaatactcgcccatccgagaccaaaaagggcgtcgggaggcctatcccaaacggctcagatcatatgcgagcctttactagtccgggcggaaggcctccagctcttgccaatccagttaataa

SEQ ID NO: 161701 - DNA, 247 bp, Zea mays
  Clone ID: MRT4577_79048C.1
ttcacgcggttgccgactccagtatttggcactggttcaccggacagaggtggcaaaaacttcttgactgactccatgactggcggtgtttcagatgcagttaagaacactgcagctgctcccatagtactcgcgatgctcggtattaggagtcaggaggacaggccgaccgctgtgaagcgatcataagcggccatacaaatacatgacgggggcaaacgggccatcatggttgagggtttctgtt

SEQ ID NO: 161702 - DNA, 145 bp, Zea mays
  Clone ID: MRT4577_79049C.1
cccggggtcgcactacccggcgtgggagcataggggtagggacccagctccgccgttgtctgggcgagtcgtataatggttcgtgcctgcccccgccgttgcagccagtgccgacgcctaacagtcgtcgactatgcagctgccg

SEQ ID NO: 161703 - DNA, 223 bp, Zea mays
  Clone ID: MRT4577_7904C.1
ggctgtcttcctgtctctcctgtctgtccacctcctcctcttcctctcctttaccccactttcactgccactttcatcaggtttgtgtctcatctccctgcgtgtcttttcctttgtctgtctttttctttcccccatgcacatcatgtagattagctgaagatgtttattacaatcactctctgtggggggtggcctgctgctcctcagaatctggtgcttg

SEQ ID NO: 161704 - DNA, 358 bp, Zea mays
  Clone ID: MRT4577_79050C.1
gtcaaatccttcagcttcaatatttttttttggttgcaactagcgtgacctcatatgccgtttatcacaggctctacaatggtcaccacgatctatcgtccatatcatcgcattgctcaacttctacacacatctcttcccatatatctatcaaatccttctacgatcgtcactcattgactgcactttactcacatacatacccgctatcgatgtcctctcacaacccaatctacttatcaactcgtcaacacaattagatcatacccacttcttctcagtactctacttatctgcacctggatcctatctcgatgaatataacacatatctcaagcactcaactagattcatgttg

SEQ ID NO: 161705 - DNA, 314 bp, Zea mays
  unsure (1)..(314): unsure at all n locations
  Clone ID: MRT4577_79051C.1
aatacatgggacacctggcccctaagggcctaccactaataacaagggtaaacgcctcatgaacggcgggaatatatatatatatatatatatatagatagatatatataccatatgagatatgagatcatatatagtatatatatcatatatgcgaccatatactctatgagangatcgaccggcacgggcggcctggggatgccaccggccccgggcggggtcccctctatctgctggcgtgcactccgggcacgaggggcgggagggcatgagggacctccgtgcttcttggaagggccggcctacagggg

SEQ ID NO: 161706 - DNA, 192 bp, Zea mays
  Clone ID: MRT4577_79052C.1
cccacgcgtccgcccacgcgttcgcggacgcctgggcgcaggtccagaaggtggggccgcgggatccggtccttcctaacccatcccttttttcggggaaggccatggccaaaccaccaaacttgcctaaggttagcaaaaggctatagaaagcgcaccggcttttaagaatggggggccccctggggttct

SEQ ID NO: 161707 - DNA, 584 bp, Zea mays
  unsure (1)..(584): unsure at all n locations
  Clone ID: MRT4577_79053C.1
gaccagagacctccatttctattatttgcataacagagatacaaccgtacgtaccagtcgcaaaagcaaccaagcaccgacatacaagggaaagtaaacataaccgacctgattcaggtcatcgacatccagaaccagagtaccggtacacatcaatctctagcgaccccgtagcatggtaccagcagtcattttctgactgctgcttcctactgtaccactcatagtctattgtattgtatgttacagaagcgcggccgtgtggtgagctcaacacagtgaaaccgttcgagtaacctatatatatataccaattccagtcatagcacaatcaggaaggactcccaacttcaggactcccaacttcagggctgtcacttcagtcttcaggggcacaactttggcttacaactctgcatagaacacaagatcatatcatccaatatctatgacgatcgggtaaagcgcaatcagtggtcagaatacaatagagccaccataatctgcagctcgggtagccctgtaaactgcaatgctgcactaagctgccatcggatgacacngaagtatatggtaaccagcta

SEQ ID NO: 161708 - DNA, 449 bp, Zea mays
  Clone ID: MRT4577_79054C.1
actcgataatggtgccctcatagcggcatgtgtttcctagaaataatcaatatattgattgagatttaaaaaaaaaaaaaaaaaaaaaaaaaaaaaaaaaaaaaaaaaaaaaaaaaaaaaaaaaaaaaaaaaaaaaaaaaaaaaaaaaaaaaaaaaactttaaaacacaaaacttaaccacttctcaagaacaatttgtggccgatttcagcctccattgtagagggcccaaagactccctatagaaggccccaattacaacctatatggactcgtataaaaatggactcaactgggaaaaccaacgtgttacccaaaaaaaccttgtcggaacccaacctagttgagaagggggaaatacccgttataacaccctttccaatagccaaaagaaccaaacgggccgccctaaccaacaatggcaaacccttaaaggcgaaggtaaaccc

SEQ ID NO: 161709 - DNA, 1929 bp, Zea mays
  unsure (1)..(1929): unsure at all n locations
  Clone ID: MRT4577_79055C.1
tgctaagagaaaaagaggacatcacaatggagagcaaaatgatgatttatctgactcctcagtggaatgcatacctaggggggagatctctccagatgacattgttgctggtattgggtccaaagcgttttacactctgtcctgttaaaatctacagtcagcagagggtttttgctgtccaagtgttcgagctgcataagctgataaaagtgcagaaattaatcgcggcatctccacatctgcttattgaaggtgatcctgtccttggcaatgcattaacaggaaaaaggaacaaacttcctaaaggaaattcgaaagttcagaccctgtcaatcacaaacaaagatgatatccagccaaccctagagcaaccagagttatcaaaacaagacacagaaggaaacttattggcccattctcatgatgatggacttggtgacaaccatcataatcaagctgcaacaaatgaaacctttacaagcaaccctccagctatgcatgttgctcctgacaacaaacagaataactggtgcatgaatccaccgcagaatcaatggcttgtcccagttatgtcgccttctgaaggtcttgtctataagccttttgccggcccttgtcccccagttggaaatctgctgacaccattttacgccaactgtgctccgtcaaggctgccttctacaccatatggcgttcctattcctcaccagccacagcacatggtccctcctggtgcccctgccatgcatatgaactacttcccgcctttcagtatgccagtgatgaatccaggaacaccagcatctgcagtggagcaagggagccatgctgctgcgccacagcctcatgggcacatggaccagcagtcgctgatctcatgtaacatgtcacacccgagtggcgtttggaggtttcttgcatcaagggacagcgagccacaggccagcagcgccaccagccctttcgacaggctccaagtccaaggtgatggaagtgctccgttgtcattctttcccacggcttcagctccgaatgtccagcctccgccctcatctggaggccgggaccgggaccagcagaaccatgtaatcagggttgttccgcgtaacgcacagactgcttcagtcccgaaagcccaacctcagccgtcatccggaggccgggaccaaaagaaccatgtaatcagggttgttccgcataacgcgcagactgcttcggagtcagcagcgtggatcttccggtcaatacaaatggagaggaaccaaaatgattcgtagctggttaccatatactttcgtgtcatccgatggcagcttagtgcagcattgcagtttacagggctacccgagctgcagattatggtggctcctgtattctgaccactgattgcgctttacccgatcgtcatagatattggatgatatgatcttgtgttctatgcagagttgtaagccaaagttgtgcccctgaagactgaagtgacagccctgaagttgggagtccttcctgattgtgctatgactggaattggtatatatataggttacttgaacggtttcactgtgttgagctcaccacacggccgcgcttctgtaacatacaatacaatagactatgagtggtacagtaggaagcagcagtcagaaaatgactgctggtaccatgctacggggtcgctatagattgatgtgtaccggtactctggttctggtagtatatgctgctgtataattcagtgtttaattatctatatattgtacattagctgtcaaaaaaaaaaaaaaaaaaaaaaaaaaaaaaaaaaaaaaaaaaaaaaaaaaaaaaaaaaaaaaaaaaaaaaaaaaaaaaaaaaaaaaaaaaaaaaaaaaaaaaaaaaaaaaaaaaaaaaaaaaaaaaaaaaaaaaaaaaaaaaaaaaaanaaaaaaaaaa

SEQ ID NO: 161710 - DNA, 286 bp, Zea mays
  Clone ID: MRT4577_79056C.1
gcggggatctcccatagtattgtcggcaggtcagagacacacctggcgaaccgcagctagcagcgacctaacaactaatggctaccaagatattagccctccttgcgctccttgcccttttagcgagcgcaacagatgcagtgtagttagtgcacagtgctcagtagctcctagggccattatagcacaggtgctccgacctgccacttcaggtgggctgtgagcagccagccgggcaagcctattggccacagctagcgcttgcggagagcgcctcacaacaacc

SEQ ID NO: 161711 - DNA, 619 bp, Zea mays
  Clone ID: MRT4577_79057C.1
gtcgcccacctccggaccgcacgcatactggaaacggggggggggtgggcagattcatcacatagaacctgctgaaaaccttcttctcttgccagtgtgcattcttctccagaacctgaggcttctggttctggaccgaactttcaaagaggtcaactgtccaatgatacatctgcacaggacgaacacgaagtggatgacaccaaagtcgaacccaatccagaaatcccccgagatgcagaagctggtgacgctgatgccgccgccaccgccgcagaatggtctgacaacaactcggatgtgttcctgtcagacacgcacacgccctcgagcagcacgccgtctagtcccccaaagttcgacgaagacatcctggaggctggtatggttggaactcggttacaactcactgaactgaagatataatgggtctcctttcttcgactgtaaattggggctcacctgatccatggatgatggagctgcccacacccccaaaatatgtactttcacagatacgtttacgcaacaccatgggcaaatgatggtagtttcaccccccctatcctcgagcatgtacagctgattttctcaaacattataaaaaaaagattgggca

SEQ ID NO: 161712 - DNA, 302 bp, Zea mays
  Clone ID: MRT4577_79058C.1
actaagcgcgagatattcatgggggggggggaaccataacaaatcatttccaaatgataatcaactctatacactcaacaacacaaaactggatatatcaacccacatcacctgcccccagccacctacaccattattcttcatcaaaagcctactattacttccctcccactcagcttaaaccataaccataaagaaacctgctccacaactgcatatattataatgcatatccatacaaaaaataactggcaatccattgtatcgaaccttatatctcacaactgtccaagacaacttca

SEQ ID NO: 161713 - DNA, 185 bp, Zea mays
  Clone ID: MRT4577_79059C.1
ccgcaacgcgccaccgatccaccccgcgtcctcggcctccctccctccggcgagcggcggcgcgggcggccatggaggtgttctactacgtcgtgttcggcgcgctggtcgccgtcgtggtgactctagagctcgataagagagataaggaacgagaacacactacatccatccacaactaatac

SEQ ID NO: 161714 - DNA, 498 bp, Zea mays
  unsure (1)..(498): unsure at all n locations
  Clone ID: MRT4577_7905C.1
gcgtccgtgttgctgcccgggggggggggggggcttttggcncggcccacagggctgctgcgttccccgttggagttgccgtgtttcttgaagcctgctgttgccggcttcctgctgcggatgggacttgactnccttgttggagctgttgccnnccccgaaccttgggggggggggtggtggatccttggtctcgcgttcgattggtgtccttgtgtccttgctggcganggtcgatgtcctgctccttggtggtggcctgatctaccccttttgctgggcgcggggttgttctgttggctgctctctcgtgggggagggtcgtcttgggctcgcgccttctcttcttggggtggcgtgggccgtgggggtttctcttttgcttcccgctggttttgtggtggcgggccggtttgcggctgatgctggtagcgcgattggccctggccctgctgtccctggtggctgggtgggtcttggtgttggccctggtgcccc

SEQ ID NO: 161715 - DNA, 564 bp, Zea mays
  Clone ID: MRT4577_79060C.1
gacacatggcaagggcagattaacttaattcaaatgcatataagcgtattaaagcatgacacgtcgccaccacattctgtttacacgatgaacaccagctaacacaacaatatgatgcgcatagattacgtcagatcctatcccttagttataatgcaaagagctgatgcctttctccagttggacctaagccccctcttagaattcccgaacaacacttaggcaatgcaatctagtaccctaaacttcaaggaggcttccttgctcctagtaccgatcacggcgttcatgacgcccagatcgatcataatccctagaacttccccttggtgaatatgacctgcggtggcttctggaatcataactacgagactgcctggaatctctctctctttccctgtcatggaggcgatcatggctttttatgcgggcatactccctgtcacggctgctgctgcggtctattaatcggaccctgttggaatccctggcacgttccccgctcttttcctggaccttctgcaaattagttgggctagcttcgtttttgttctttttctgagt

SEQ ID NO: 161716 - DNA, 1966 bp, Zea mays
  Clone ID: MRT4577_79061C.1
accacactcaaactcgcatcctgtggagtttttacatagaagtcgtcacttattgcgccgtggtggatgggcaggggctcgtgtcgaacactcgaacagaaccaccgccattctagaggcatccagtattccagcccaatcctatctttgtattcctctccctcgtctcggaagtctggttcgccgaacagtcccgaacccccgattcactgccgctgccccgtctcgtcctcttcgccagcgaaaaccctagtctaggggacgggagcgcaatccacgcacggcaacatggacgccatccgcaagcagctcgaccagctcatgggggccaaccgcaacggcgatgtacgggaggtcagccgcaagtactatgatcgcgacgtctgccgcctctacctcgccggcctctgcccccacgacctcttccagcttaccaagatggacatgggcccgtgcccgaagctgcactcgctgcaactgcgcaaagaatatgaagaagccaaagccaaaggtactgataactatgaccgtgaattggaagaaaccattgaaagactaattgttgagtgtgaaaggaagattcagagagcccttaagcggttggaggaagaggatgctaaggcagctattgctatttctgttactgaggttacacagactaaagaagtaatggagttatccaaacaaattaggcagaagatgaaggatattgatgcttttgatcttgagggtaacaccgaggggaaaattcgggccactgaagaacttgacaagctaaaagaacaaagggcagaagagcaggcaaagatgttacttgaagctttcaacaaagaccgtgcttctttaataaactctcttcaaaatgccactcaaacaactacacctgtcccccctgctgctccggatgcacggacacaagaaatgataaacgagaaactgaaaaaggcagaagaactaggtgagaatgggatggttgatgaagcccaaaaattgttggatgaggcggaagctctgaagaagctggccacccgaccacaggctgttccagactctacaaaaatgagcgctcatgtccagataactgaccaaaagctgcgcctgtgtgacatatgtggagcattcttgagcgtatatgacagtgaccgtcgcttggcagatcattttggagggaaacttcatatgggttatatgcttatacgtgagagattgtctgaactgcaggaagagaagaacaaaaaacggaagctagaccgagctgagtatgacagaaggtccagggaaaggagcggggaacgtgccagggattcgagcagggatcgctacatagaccgcagcagcagccgtgacagggagtatgaccgcagaagaagccatgatcgctaccatgacagggaaagagagagagattccaggcagtctcgtagttatgattccagaagccaccgcaggtcatattcaccaaggggaagttctagggattatgatcgatctgggcgtcatgaacgccgtgatcggtactaggagcaaggaagcctccttgaaatttagggtactagattgcgttgcctcagggctagtttggccacctcattttttcaaggatttctatttttccaaggattgacaaccttatttttctaagggatttctattttcctaagaaaaattagttcattttcccctgggagggaataccttggggaaatggaggtgccaaactagcctaagtgttgttcgggaattctaagagggggcttaggtccaactggagaaaggcatcagctctttgcattataactaagggataggatctgacgtaatctatgcgtatcatattgttgtgttagctggtgttcatcgtgtaaacacaatgtggtggcgacgtgtcatgctttaatacgcttatatgcatttgaattaagttaaaaaaaaaaaaaaaaaaaaagcggactctactctagagcgg

SEQ ID NO: 161717 - DNA, 546 bp, Zea mays
  Clone ID: MRT4577_79062C.1
aattcggcacgaggccagctttgaccgcctcccctcccctcctctcctgtgttcctccataccccactccccccgcaggagcggcgcggcggcggcaaaggcaaaggcaaaggcaagatgttcgggcgcgcgccgaagaagagcgacaacaccaagtactatgagatcctcggggtgcccaagtcggcgtcccaggacgacctcaagaaggcctaccgcaaggccgctatcaagaaccaccccgacaagggcggtgaccccgagaaggttttccaccccctctcccctcttccgatctggccttgatccgatctggcgcgacccgctgcggtagaccgaggttcagttgcgtttggtagattcacctttaggaagggtcgcgcgtgggtcctgatgatgtttaggtccctcatcccgtgtccatgatgtgcagggccggtccggcataattcaaggccctgtaacgaatttttcctctgttaaggatctatgatatagattgattaatctcgtctataaacagtgattgagccattaacatgtgaa

SEQ ID NO: 161718 - DNA, 826 bp, Zea mays
  unsure (1)..(826): unsure at all n locations
  Clone ID: MRT4577_79063C.1
ctgtccactagggttcgtcccgccgtcgcccttgctggtggacaccggcccgctcctccaccgcgacggcttggcgccgccgtccaccgaccgcctccagatctgtccccgtccgcctgaagatcccctccactctgccaccagggactcttctcctgctgctgccgttacatggggagaggagcaccggctagccaccaccgctggatgcctccatcccccttcctccttcgcccgacgaacctcttcactccgggaacttgctgctgctgctaatccgagctgcaccacctacctcgctgaagctctgtcccggcagctctctgtgagatggaaaaggaaaaggctaattgggatgcacatcacataactatcttctgagatatgcaaggacgaggtcgatgctggaaataggccaaagggatgtttgaaccgtagagggtacacacatcttgaagataagttctttgataggactcgaaaaagatgttcgcagaatcaatttaaaaacaaacgggacatgttgaagagacaatatgtacaattcatgttgttgaaaaatgcggcaactgggctaggttgggatgatgtgaacaaaaccattatagccgatgatgattggtggaaaatacatcttaagaaaaatcctaagcatgcaaagtacaagaagaaggngctggccaacttggaagaaattcatgtcatgttcgccaacgcacatgtcaccgnngctacatcatctattcctggggagatgtcagacaacacaaatgatgatgatatgcctgatgttggagaagagtctgaggaggatggaaatgcattg

SEQ ID NO: 161719 - DNA, 513 bp, Zea mays
  unsure (1)..(513): unsure at all n locations
  Clone ID: MRT4577_79064C.1
cggccacgccgccacccaagaaccggggacagcgcagcaccggccaccaggcccgacgncaacacngcgcagcacacnccagccgcaacaacggcagacgacggcgacacacacgcggcaggccaggcgcacgccgacggcgacaagcccggcccccgcaacggcaagcacgcgcgaggcggcagccagcaccggcaaaaccagccaggcggcggcggcaccggcacgcccgcagccgccgacgcccccccccccggcagggaccacggcggaagggacaacgagagcccggacagcacgccggacgggaacgccaaccgagacaggcccaccaccgagcccgagcgcaaggaagcccagcccagagccgcagcgacagacggcaacaacaagccgcccgaacgacaagaccaggaacacgaacaccagcgccgacaaccccaccacaaccggcgccaacacccccacgcaacggcaccagcgcccacgaccccgcacacggacaccggcaac

SEQ ID NO: 161720 - DNA, 2412 bp, Zea mays
  Clone ID: MRT4577_79065C.1
atggcagaattcatgaggggccatccccctgtctttgcccattctgttgatcccatggacgccgaagattggttatgtaccatagagcgtgagttgcacactgctcagtgcaacggttgtgagaaggttctgtatggtccctgtctgctaaggggagcagcacagtcttggtgggagtcttacctcgccacccatgccgaccttgaagccatcacctgggaagagttcagggacaactctcagtccgggagtaggagtcacccccgctactcaagtaacccatctaagcaattcaagcaaggacaccagcaccaacatcagcgtcagcaccagcagcagtatcagaggcagtttcctcagcagcagcatcagcagtaccgtcagaacaaccagcagggaggaagtcagtaccagcgtcagaacaaccagtctgataggatgtgtccgaatctaaggattgagataagggggatatacttccccgttaacctagtagtaatgggtactcaagggttagatgtcatcctagggatgaaatggctatacaagaacaaagccactgttagttgtgacaagagaactgtcaagttggtgtccccatccggaaaggaagtagtaactaagttgtacttgcctgaactagaaggagcctgtcagtatttgtcagtggatgacaaggaggccaacctgattgaggatattataattgtgtcgaagtttctcgatgtgttccctggggagttaccaggcatgccacctgaaaggaaagttgaatttaccatagagcttatcctaggcaccgccttgatttccaagagagcctatcgagtgtccagaccaaaattggtggaactcaagaaacagattgatgagttgttggagaaaggctacatcagaccaagtacctcaccttgggtagccccagtgctatttgtggacaagaaggatggaacaaagaggatgtgcattgattacagatctttgaatgaagtcactatcaagaacaagatccgaccttcggatgtaccaaagacaacatttatcaccaagtatggagtatatgagttcacggtcatgtcatttggtttgacgaatgcgctagcttacttcatgtacctgatgaacaatgtgttcatggactacctcgaccagttcgtagtggtgttcattgatgatatccttgtatattcccagaatgaacaagagcatgaagagcatttgaggaaagtacttcagaggctacgagattatcagctgtatgctaagcttagcaagtgcgagttctggatcagcgaagtcttgttcttgggtcacattataaaccgagatggactagttgtggatccaaagaagggtttctccaaggttgccaggccaatgacagccttgctggcaaagaaggttgagttcaagtggaccccagcgtgccaagaatcatttgagatgttgaagaagaagttgacaacagcactgaagtgtgatatctacatggatcataagagcctcaaatacatatttactcagcaaagcaatgtggtcgcagatgctttgagcagaaagagtcaagtcaatatgttggccggttacccgatgttgtatgagctaggaaaggaattcgataggctgagtctcggatttttgaaaaacactcaaggagtgacagttgagttggaaccaactctagagcaagatatcaggaagggtcagaaagacgatgagaagatcaacgagatccggcagctgatcatagataggaaaggcccagatttttgtgaagacgcagaaggagtggtatggttcaaggataggctatgcgttcccgacatcaaatcgatccaggaactgattctcaaggaagctcatgagacaacatattctatacacactggtagcgagaagatgtaccaagacctaaagaaaagattctggtggtacagtatgaaaagggagatagcagagtatgttgccagatgtgacagttgtcagaggattaaggcagaacatcaaagacccacaggtttgttgcagtcgttgcagattcctcagtggaaatgggatgagattaggatggattttatagttggtctgccccgcactcgtgctggctatgactccatccggatagtagtggaccgtttaacaaaggcggctcatgtcatacgagtcaaaaccacctatagtagcgcagtgttggcagaattatacatgtctcagattacagatggtcagacagagagaaccaaccagatcctcgaagatatgttgagaacttgtgctttgcaagacaagttaggttgggacaagaggctaccatatgcagaattctcctacaacaataactaccagactagtctgaagatgtcaccattccaagcactctatgggaggaattgcagaactccgttgcattag

SEQ ID NO: 161721 - DNA, 377 bp, Zea mays
  Clone ID: MRT4577_79066C.1
cccaaaaaaactttttccctaaaaaaaaatcccctcccataaaaaggggcaatcgggggaatggccaaaccggccccccaggggggggggggaaaccacgtaaccaaagggcggaaaaggagaaaacaagcgggctggggagctaggcaggggccccattacattatacccacaggccaaagttccccaaaaagaaaacacccccggaagttggtttaaaagggaagggaccgggttggtgaaattgaaggcccaaaaaccccgaaagggggggggcaaccggggccgcaaaaagggccgggagctccccctggggttgttgctaaaaaaaggaactgaaaaaccacaccgaatggccccgggaaccggggaagggg

SEQ ID NO: 161722 - DNA, 580 bp, Zea mays
  Clone ID: MRT4577_79067C.1
accggcgaccggcacccgaagttcggggacggggtgctgatcggcgccggcgccagcgtgctcggcaatgtgcgcgttggagccggggcgaagattggagcaggggcggtcgtgctacgggacgtgccggaggggaccacggccgtcgggaaccccgccaaggcagtcgggaagaaggcggcgccgcagcggcggccggaagagcaacctggggtcaccatggagcaagggtggtcggactacgtgatttgataactttcagagggtctgtttgcaaatatttagtgcaggagagtttccctcccagaagatattatttagtccaagtcgttattgagagataggtgcattgccgttgctgcattgcataaagagggagctcaattaggcattgagccctagagcaactccatatttttctttgttttgcgtgaggggaataacaatactatatgcatctgataagttagcggttgcttgtacatatactttcaagctataaattatacagagtcccaagcaggataaaaaaaagaattcaggaggcagtaactgagctagagaaaaaaggggggggccc

SEQ ID NO: 161723 - DNA, 142 bp, Zea mays
  Clone ID: MRT4577_79068C.1
tccagggtccgtcacggtccgggacctgcggcgctgtaatacagtagctagcctaatgcctgtaatgaaccgtcatataatcctttaattagctgccaattttatttcttatagtttcaatgtggttatctcatgtatatct

SEQ ID NO: 161724 - DNA, 145 bp, Zea mays
  unsure (1)..(145): unsure at all n locations
  Clone ID: MRT4577_79069C.1
ggggctnaccttnnagttgccntgaganacacgaggactctgtaacacaagggnnattgcntgagaatggtgtcgcntggaaactganatgctgagancttgagatctgagancctctatcgctgatctgncttccattatggtg

SEQ ID NO: 161725 - DNA, 319 bp, Zea mays
  Clone ID: MRT4577_7906C.1
gcgtcgctccctctcctgtctccccctcccgctctgtctcgtggagacgactgggccggcgtcgcagctgccctacacggctacgcccaggtcttgttcgggcccttagccgtgacgagcaccaccagggagtctaagaggctaaccttctggctggaaccgatggacttcgaaggctatggcttccgtggaagtactttccagcagacatacagctggtatgatgcgcccgtcatcgacaagcgacaacatgacgccgtggactaactgatgatgacaccctcagctctagctcgccagggaaccttgcagaacgaat

SEQ ID NO: 161726 - DNA, 318 bp, Zea mays
  unsure (1)..(318): unsure at all n locations
  Clone ID: MRT4577_79070C.1
aacctaatttgctgancnaaatcatggttaggaagttattctgtggcaacgaaatgatataaaggccggcggttttaaagaatcaaggttaccttccccttccttccaacttattacctttcttttggtgcaaccaaatataattccacggcccgtcttttaacaccgtcggaactggaaaacccttgccttacccaaattaaatcgctttgcacaaaatccccttttcccaagttggcgtaaaaccaaaaaggcccccaccaatcgcctttccaaaaatttgcccaccctaaatggcaaatggaacccccccttaac

SEQ ID NO: 161727 - DNA, 110 bp, Zea mays
  Clone ID: MRT4577_79071C.1
aaaggatggttttaattctcatgtggataaaattccacaatttcgttgtgtctacttatatcagggcttacaacaccgggaaaacaaattgtgagaaaatatggtggtta

SEQ ID NO: 161728 - DNA, 306 bp, Zea mays
  Clone ID: MRT4577_79072C.1
ccgtggtggccgtgatgctggtgttccaagcggtggagaccacctcggtagccgctatcacctgcgggtatgtgaggtccgccatagctccctggctcttctactcccgcaagaagttgacccgcccctgcgggggggctgtagcgtgctcatggaacctaaacagcctcatcaagatcgtcgctttctggctcacctactgcaactgcctcaataacaacacactgggctatgatatggactcaacttcactgatgcctacataaagcaattcctgcgcggcgccattatcagctacactcagtt

SEQ ID NO: 161729 - DNA, 987 bp, Zea mays
  Clone ID: MRT4577_79073C.1
gggagttcttatttcctgagcagattggagctcccagtcctcatttcccacagcttaccagggcatggggggactgggaggagctaccactaccagcgtctgcgctctcagcctcctctccgccctgctgcttctgcactactgcctcctcctggcaccttctgccgctgtggtctccaaggagaggacgcagtcgagaaagctcttgcagagcctcgtcgtagtagcacgcgtcagctcagactcggagaaggcgcgaccagaggtggtccgggcagcggccaagccggcagccatgggtcccggcggcgccgcggtgtccgagaacctgaagaagcagacgccgagcaggtccaacccgatacaaaactagctggagtgggaagtacaccatagtcttgtgagcgactcgatcgaaaggcattctcgatctgcagctgctggctgctgatgtggagccgctgtaggttttttttcctctcctctggctagaacagggacatttgtttgcttgtggtgtacagtaaaggatactgtagcgaggttaggcagataggggattttcctttttccatgttgctctctttcccagatgttcgtagatttttttttctctctcacattcatcttctctgcttctccatgggccgaagcccaccccgatcctggaccatctatatatggattgggctgagatcttcataacggcggatgctgaaaacagataggctgtttggaattgaaaccggaccagacactatcattgtacgaacaaaactacgcccgagagcacgaattgaaaccgaaccaagccactactgcatatgagtcttccggctcgttcttcaacagtcacgagtatttagtcttgcaagatggtccttgctgattcacacgattctcacgtgcccaatgctactcgggttagagcctaagctaatgatgctttgaactgctggactttagacgagtggttaaatttttttt

SEQ ID NO: 161730 - DNA, 376 bp, Zea mays
  Clone ID: MRT4577_79074C.1
ccattcttcgccaaataaaccccctaaaagcaagagaggctataccccaaatgtgagatctttttattagggtcccatctccccgttgcctgggcgatcctagttatttccgcccctgcccccttctgctcaaatagtgccacctcctcaccattccctcttattcatctgccttcgcctttcgcggatctcgtcaagggcccctccttcctttagaaagtcgtgcttaccggcgctctcaacttctgtgccgagatttatctttatggaggtcaagttacattattgaataatgacaatggggaatacttgcttttcctcatctatcaatgcttattttaaacctccaaaatctatttctggttgtataccaatc

SEQ ID NO: 161731 - DNA, 425 bp, Zea mays
  unsure (1)..(425): unsure at all n locations
  Clone ID: MRT4577_79075C.1
actttctgtaacataaaaagtggaatccaacggccggcgtaaaacaacaatggcggccgtgatataaaacctccttatnctccttgctctttctacatgtgttgctaacgcgacaattttccctcaatgctcacaagctcctatattttccctttttcccccataccttccatcaattatagcttcactatgtgaaaacccacctcttcaaccatatacgcttcaacaagcaatctcagcaagcaacatacctttatccccctttttgtttcaacaatcgccagccctatctttggtgcaaacattggtacaaaccattaactcacatcaacttcaacaaactcttctacctgttatcaaccaaataactttttcaaacctttcttcctactcttcttaacaacaatttgttccattcaacccac

SEQ ID NO: 161732 - DNA, 204 bp, Zea mays
  Clone ID: MRT4577_79076C.1
aaaagcaggggcgcgggcaggtaccttttccggaatcacttggaacgacccacgttttacataccgggccatcggctgggtttactggggggggttttctggaacgattatgtgtggacctacagactacatacacgctggatagatgccgctgtggcgaaaaaatccctgtcgatgtgaaacgatcacaaattgggcaatggg

SEQ ID NO: 161733 - DNA, 222 bp, Zea mays
  Clone ID: MRT4577_79077C.1
cagtgcttagcaccatgcctaggagacggaaaaggcacgttgatgaggctcaatgcatcccaagcccttgtatgctctcacatgcattcttcgtagccttttgttcccacagctcatttttgtggacctcacacgtccagggtatgcggccttactctgatcctcatcattcagtaacaggctcatgtatagctgcgataccatcgtgaggtcttttgtatg

SEQ ID NO: 161734 - DNA, 446 bp, Zea mays
  unsure (1)..(446): unsure at all n locations
  Clone ID: MRT4577_79078C.1
ccccaaaaaaccgggaaagggaccctcttatttggggggggccccaacccccccccaaaaaactttttttggggataccccccaaaaggccccccaaaaggggccccccccaagggaggggcggggggagggggcgccggggtttgccaaaccaggggggccaaggggcacccatggggggaggggaaaaagggggggggggttacccccaaccggggggaaaaaaggccgcaccggggggggggccaaaaggggacccccgccgggggcaacgagcgggctaaaggggggaagaattcgcgggcggaaaaaaccggcgggggccagggccaccaatgggtaaaagggaaaaagtggtgggggccgaaagaagcgcctaccccccgggcggaagggaaaaagnctggggcgcgcaaaaagcccccggggccaaggaaaaccggggg

SEQ ID NO: 161735 - DNA, 474 bp, Zea mays
  Clone ID: MRT4577_79079C.1
tggcttggaacctttgggctgatttatgtgcttgggtcgttgctttctgtggagggggtggagtttggggatgtgttcgagcttaaggagcctgttgtggtgttgggtagtgtgaagtttgttgttagtgttgggcgtggtaatgatgttaagagagttgttgcgccttggagttatgagagtggtcttggaagtagtcttagtaatcctcttcctgttcctttaacatcggtggagatgctgttgaggaagaaggattctgctaatattgtgtcgcattagttgtcggagaaggagcgtgaatagttgttgctgctgttgctgttgtagtagtagtagtctgagttttttgcgctggttcctacggagacgatgatggaggaggagtggtggagtagtgatattgggcgtcgtcgtcgtggtcgtcgtcggcctgaccgtcttcggcggcattggcgttagcggcggtgacgt

SEQ ID NO: 161736 - DNA, 146 bp, Zea mays
  unsure (1)..(146): unsure at all n locations
  Clone ID: MRT4577_7907C.1
aagacacgtnctagactgaggagacggaccacacacacaagcagtaccttggcagaggccggggccatctcctccagagcctacgcactctacgagaagcactaggcgaagaacgaccctttgctcgcgcaccgacacaagatcga

SEQ ID NO: 161737 - DNA, 142 bp, Zea mays
  Clone ID: MRT4577_79080C.1
acccggtcttttctcccgctcccagctcctggggcgggtgttgacaaagtcggcgcggaccaatccataaaactaccataaacaagttgcaagacacccagtatgccagccgagcgcaagctcctgacccaccccatgaacc

SEQ ID NO: 161738 - DNA, 439 bp, Zea mays
  Clone ID: MRT4577_79081C.1
atctctccaagcagctcatagctctagttctagctatcgggaagagtatgggagaatggttccgcttctcgctgctgccatgaagcacgctgcatgccatcccggctgaatgaggcagctagccatgacccaactctgactagtttcccaacgcgtacctcgtgtgcattgtcttctcaccattaccagcgctgagaaggtagatagacgttatctttactactcaacttgcaaaagcatgcaggcaccaagtgatccaaccgtggataccctcccctataccacacacggactgtgtcccctctgacttcgccatctctgcctacacttcagctgaccaaatggcacgtgcctgacgcgaaaatggaaagggggattgcccctgggccctcttcggccacgatcatcctcgctaggatgcatggacgagtagcaattc

SEQ ID NO: 161739 - DNA, 292 bp, Zea mays
  Clone ID: MRT4577_79082C.1
atcgcgagggccgcccttttttttttttttttttttttaatttttttcaggaaacttgggtagtactgaaggatttcaaaggcatcctaacaaaccacgctgtgtacgtgacgcgcccaaaggccgggagcaaagcgaactcaactaaactaaacgccgcctgccttgcctgatgtctccgccggcgcctttagggggtggcatgctttttatagcttgaggagaaacgccttcatcttctcctttacctccaagccctgagaggggaaacactgggagggcctaagatgga

SEQ ID NO: 161740 - DNA, 157 bp, Zea mays
  Clone ID: MRT4577_79083C.1
gttcttgaaccaatcggcttattggtgatgattaatcaagagggggcgtccatcatgccggaaccagaaccggttcaatgatctacaagccggagataatggccattggactggtttccatgtattggaagcaagttaagattgatccacaagattt

SEQ ID NO: 161741 - DNA, 490 bp, Zea mays
  Clone ID: MRT4577_79084C.1
cccacgcgtttgtaaatgcatgaacatagatattgtcagtgaagtagtgcaatcatcaaatgtgcacacgttcatgtaatgaagaagtttaaggatgtacgctgaagcgaagtcattgccagaggcggcattagctacactattaaccaactaataaagtactacttgattggccataatgttatgtttgcagcctcgattttttgttttaacatcattcaaagtaatttttgctttaaatccccaaaaaattgttctggcaggaggaaagccttcgaggtgtgcctaccattcagaatattgtcgtcggaagggtgcaacaatcagaacccaaggaataacaaggtgatcctgcaccaaacagggatccgattgagttgctgttgggatcgtccactgtgcatgtggaggaaatgatgctagacaccactgtcactgtgcagacggatacaaggagctcaggtgccttttctgggttcgttgagctaga

SEQ ID NO: 161742 - DNA, 268 bp, Zea mays
  Clone ID: MRT4577_79085C.1
attaatgcgggcgcctgctgccgagggggggggcgacgccccgcttctctggctcgttccgccgctgggcctctccggcactttctggtgcatctggcccttcaagtcccagctccactggtgggcgcagctgatgccgtgcatgctgcgcttcaggacaggcctgtaagtcgtgcggggggcggtccgtgtgctggctgggctagttgtgcggcggcgactccgctgggcatttcttctgccggtcctccccggtgcacgcgagccg

SEQ ID NO: 161743 - DNA, 166 bp, Zea mays
  Clone ID: MRT4577_79086C.1
aattcggcacgaggcacccagcgacagacaacaactacccagtccgtcgtcccggcttccgtgcgggccggggtttcccacgagcgcgcacggcacggcgccgtctgcatggtcacgagtcggctggcggcgttgtccgtggccgccgccacgctgaccaccactg

SEQ ID NO: 161744 - DNA, 529 bp, Zea mays
  unsure (1)..(529): unsure at all n locations
  Clone ID: MRT4577_79087C.1
cctcgagccggcgggcgggtttgcctatctgcangggatattcgagttctccccctagagtcgaggtgatacgtgatgccttcgtcagactccgcgagaataggaccaggtgtcttcttgccgtgggctgttgcttggcctgaggcgctagtattgtgcgaaggggcgtgagtgccaacccgatatccgtgcgtgatcagcttcaacgactccatgcgcgacacctccaactacccgttcgtatacggcaacgactcagcgactggctcaagccgcactccggccacactacgctaagaccttcttcaaccgcgcctacggacgcgcctccaatgtgcgcctcgtggtattctttagtcggaccacgactgcgctctcgttcgtgcgaccgcatctgagccaacggactccggatgactcccaacgcggcccctacttcgacctcatcctcgacacgtgcctcaggacgtactcataccgcgtaacgtgcttccacccatgtgaaactaagtggaccgctacatgtaga

SEQ ID NO: 161745 - DNA, 166 bp, Zea mays
  Clone ID: MRT4577_79088C.1
cagaccatactcaaacacgatctctttattggacaagacaataacaagactggcgcgggtatttttaaacatcattcttaatcatatgaactacaacataaccaaaaatatgagacccatgaatactaaaccattacaacacataaaccacgaccaagattatcaa

SEQ ID NO: 161746 - DNA, 380 bp, Zea mays
  Clone ID: MRT4577_7908C.1
ctcgtcttctctccctagccgcgccaccaaatccagagtgaaggagagggaaccgacgcgagcgacgatggccaaggggaatagcgaaagcaccgaaccatgactcttgctcggaggcgacgcctctgatctacgcgaggatgcatggaggaataggtgcaccagcacattgtctacttcctgaacactaggggggcatgcgagaccccctgccgactaccagaaggcggcgaagagcccttccctctagcctattcatgcaaggtgcaaacggtccaaggcggaacacctccaagaaactggatgtctccgccatggcctgcatacaaggtgaagcttgtcaggcctgaacgcgaagagcactagattcaatgctccag

SEQ ID NO: 161747 - DNA, 267 bp, Zea mays
  Clone ID: MRT4577_79090C.1
gcagctcccggcgcccggcaagcccacggagttcgagcagcgcctcatcttcgagatctacaagtccatcgtcgcgtccaaggagctcaccaccatgctccactcctccgccgcgcacctgccgcccgccgcctctgcggcgggcctcccgtccacgcacctcctcgacatgtgatgagccgcgccgctggatggagaaggagagagaacgcgcgcgccgccggttatcagttgtaacgtaacgtaacgagagaggtttggaggaga

SEQ ID NO: 161748 - DNA, 888 bp, Zea mays
  Clone ID: MRT4577_79091C.1
ttcttctaccctttccgggtagtcgatggcagctaccttaacaaccaagaagagttccgctagttgaactcgaaagctcgaggcccaggcgacgcgacgcggccacgcccacgtccttccatggcgaccgctctccccgcctccgcctccgccgcttgccttctccagctctcccggcgcggtctccctggaacatcttctgtgctctccccgcttcgcaccgccactttccgctggcacggtgcctgtaacgtggcctgttcatgctctcccggcccccggccggcggttcccgcggagcgaagggacggcgtcgctggccatgccacttctccagagggaactgtacgaatcgtcgccgtggttggagaaggtagcatcagcccgattaaggacgcgccctgggaagaggtcatgcgccacacggctgataggctgaagtgggtcgatgaaggatttgaaatgcttgtcttcacggataatttggttggtcatgataacctcaggaaagagttactatcacactgtgatatgctagtcaatgttgcaataacaaatcaggatgctgttcagtggcttataaacaacagcaaacacatttctaatgtaatttgctttcagtcatctccgtctttagtaaacaaactaggtggcacatatgttcagtacactggagagcaggacatgtttgggaagctaacaagtattggaaaaccaagtggcatagaggaatcaactgaagttatgaagaccatatctaatgcttgggaaagacacaattcagatgacattagattttgcttgcttgttgttgtaaatgcatacataagaccggttgctatgctgaaaaatctaagggcaaaaggcctttctaccctaacttgcatg

SEQ ID NO: 161749 - DNA, 281 bp, Zea mays
  Clone ID: MRT4577_79092C.1
ctcggcccagagaggggggtggggggataactgaaaggcgttcgtctttgctcaccataaaagggccttgtcgggaagctcccactactttttgttaggacaagactcacccccatgccgtgtcatgccattgccacccatccttgggagctgcagctgcctatataataccaacagtgccgaagcaagaacatccaccctgcaccaccaccgccgggcaccagcgtcgtcgaagctgctcactccatcgccgctccaagctgtgagtccgagcatcaaca

SEQ ID NO: 161750 - DNA, 455 bp, Zea mays
  Clone ID: MRT4577_79093C.1
ggacagggaccataatttttatttcgattccatggaggggacactgggggacttttggtagcccgggattacaaagggaacaatatgctaaaaaacctagggggggctttcctaaacaccaaaaaaaaattggcgatgggccaaacgggggcccacatttaagctaaattagctatcgattccaaaaaaaaaacccccgccaaactgggttaaaagggaaaaaacactaacaagggactccaaaaggaaaaactggaggtgccaccggcctgccctcctgggtaaagaaattaaatggggaaaccccattccttgaaacgacgggttttagcttcattccaattgaaaaaaaaaactttcgaagctaaagactgaccgggtggatgggttttccaaaaccaaaaaaaaaaaactctgggatagggggcacaactttggaaaaaggaaaaactttc

SEQ ID NO: 161751 - DNA, 524 bp, Zea mays
  Clone ID: MRT4577_79094C.1
ttcgttttctaccagttgcttcgtctcgctttcatcctctccgcgtcactggggtttcgtcggtgtcaaggactccgcttccgcccgaagacttcgccttccgcccgaagacttcgccttctcttggcttgctcaccagctgcgtctctttggttagatacgtttttctcctttgtctttcgtcgtccctttcgattcgatcgatacctggatccagatccattcggtgatcatatccagcttcctttacttgagatcctcttgctttttggagatcctgttgcttcggtgcgtggagattgagatctaagcgacaagtattttcttttggttaactggttcgcaagaagtgcagatggacatctggttccaaattcgtgcttatatcatatctagctgccagcttggtcgtgaacacgtttatttccacagttgtgctcccattcttgcctcgtcgattgttttgttttggtgcacaactgatctcgtttgtgtcaaatagtatgtatgaagttcaaattttg

SEQ ID NO: 161752 - DNA, 242 bp, Zea mays
  Clone ID: MRT4577_79095C.1
attattagcaatgacctgattgaacaattgaaatgaaaataaaaaaatactccatctgttccaaattataaataaaaaaaaatataataaataaaaaaataaaataataatataatccttaagctttgttaactcaatgcttcggaatttaattcttttgtctcctaatctcgtttgcctgatctgtaaattgtgtgcccgttcacatttcccacgcaccattccctgcccacacgcagacg

SEQ ID NO: 161753 - DNA, 652 bp, Zea mays
  Clone ID: MRT4577_79096C.1
ctccatagatttccatcgcacacctctctagtctccatccgtcgggacgccgcatctcgctttctctcccagttgcttcgtctcgctttcatcctctccatgtcacttgggtttcgtcggcgtcaaggactccactttcgcccgacgacttcgccttctcttggcttactcaccggctgtgtctctttggttagatgcgtttttctcctttgtctttcgtcgtccctttcgactgggtcgatacctggttccagatccgtttgtcgatcatatcgagcctcctctacttgagatcctcttgctttttgggatcctgttgcttcagtgcgtggagattgagatctaaacgacaagtattttcttttggttaactggttcgcaagaagtgtagatggacatcgggttccggatttgtgcttcgatcatatccagctgccagcttggtcgtcgacacgtttatttccacagttgtgctcccattcttgcttcgtcgattgtttcgttttggtgcacagctgatttcgtttgtgtcaaatggtatgtatgaagttcaaatttcgccttcttcgatttatgacatgtaaatttgctgcatttcgtttgtctagcataaggctgtctcaggtcggaagattccggttgtgctcattgc

SEQ ID NO: 161754 - DNA, 625 bp, Zea mays
  Clone ID: MRT4577_79097C.1
cgctttcatcctctccgcgtcacttgggtttcgtcggtgtcaaggactccgcttccgcccgaagacttcgccttccgcccgaagacttcgccttctcttggcttgctcaccagctgcgtctctttgcataaggttgtctcaggtcggagatttccggttgtgctcattgcgaccaagacgaagaagacgacgacgatccgtccacggcggtcgtctcctccacgagcgtattgactccatagcccgctatgggtaccttgagttggccatcgagcagatggcagagaccgcaaacgccaccaacgcactcgaccacgggcttcactaccttcggtcgaccgacaatgcatgtgcggcgagggcgctgttatggtggggatgggagaactccgatgctcacgctggtatggcctcttccgtcgaactttccttgttcttgcctccttcggtgaacttcctcggttcttgcctcctccggcaacttcatgtactcacagccgatgttgccgccacacaccgtctcctgtgctcctcatccggcgaacatccactgctcgaaccaccatggcgctcggctacagggcgtcatgacagcagctccccaagcgatgcaagccgcctgttc

SEQ ID NO: 161755 - DNA, 381 bp, Zea mays
  Clone ID: MRT4577_79098C.1
tgtgagcacgatgcatcaagggacatacgaaggttacctcggggtgtcgcaggtggcgatgaacggagaccgaaggaggacattcaaccactccaatgaggcagtcccaccccaagatggctggtgtcctacaacccgaaagttttgggacaagacgatgatgtgcacgaagatccgcaactgcagaaacgggttccgctgagtacgtatgagtaacaacatctacctcaagcttaaacgtccttgactgcgacaagagggacgtcgaggtcctcagtagggcaaccaataccctgaatctggaagaggaggaagggcgacaactcgaatgctgaaagatgcatgactactactgaacctacgtatgatagtgaccatcgc

SEQ ID NO: 161756 - DNA, 1181 bp, Zea mays
  Clone ID: MRT4577_79099C.1
acatttttctcctttgtctttcgtcgtccctttcgattcggtcgatacctggatccagatccgttcgtcgatcatatcctgcctcctctacttgagatcctcttgctttgtggagatcctattgcttcggtgcgtggagattgagatctaaacgacaagtattttcttttggttaaccggttcgcaagaagtgcagatgcacatctggttccaaatttgtgcttcgatcgtatctagctgccagcttggtcgtcgacacgtttatttccacagttgtgctcccattcttgcttcgccgattgtttcgttttggtgcacagctgatctcgtttgtgtcaaatgcataaggttgtctcaggtcggagatttccagttgtgctcattgcgaccaagacgaagaagacgacgacgatccgtccaccgcgaccgtctcctccacgggcgtattgacgccacaacccgctatgggtaccttgagttggccatcgagcagatggcagagaccgcagatgccagcaacgcacttgaccacgggcttcactaccttcggtcaaccggcaatgcatgtgcggcgagggcgctggtatggtgggtatgggagaactctgatgctcacgctggtatggccacttccgtcgaactttccttgttcttgcctccttcggtgacttcctcgattcttgcctccttcggcaaacttcctgtactcgcggctgatgttaccgccacacactgtctcctgtgcttctcctccagcgaacatccactgctcgaaccaccatggcgctcggctatagagcgtcatgacagcagctccccaagcgatgcaagccgcctgtttgacgaaatgtgtgagaagcaaaatagagacatcaatggtgttttcatgtgtctaatacattttaaaaaaaacatagctagatagcattttcgacaggaacaaaggattcgtaatgcgctcggctactgggcgtcatgacagcagctccccaagcgatgcaagccgcctgttcgacgaaatgtgtgagaagcaaaatagagacatcaacggtgttttcatgtgtctaatacaaatttattttttaaaacatagccagataacattttcgacaggaacaaaggattcgtaatgtaatttatataatgtaattattttgattaatctatgattcaatttccat

SEQ ID NO: 161757 - DNA, 609 bp, Zea mays
  Clone ID: MRT4577_7909C.1
ggccgcttttttttttttttttttaaagtaatgaaccaaggatctattatgcatcctttagtcaaggcacaacatactgccaactctaactataaaagattaattcgcgaattcagataaattattgaatgcaacacttgagggctacatttacacgccacatgttacctacaataagacaaaactataggaaatagaaaaaatatataagtgtcgatgatcattcaaaagcctcctcgatcagatcgatcatcttttcccaagtctgaagttgttgaatgctctattttcttttcttcttttctgttattagttgaaggcgcacttgcacacccttacttgcatcacttcattacataactcatgagccagtctacccgatgccctttaggacaagtctgttactccctgttggaagcgcgcaacaaaaaaagcttgcgcagacgggtgatatccagcttctagcatcgctgccatcacagaggacgtggctagccatgggcggaggcatggtgcccatcagcgaacggaggaagatggcggcggcgcggtgccatggaggaaaatgggagacgaagaaacgacggtggtgtttagggtcccggccgg

SEQ ID NO: 161758 - DNA, 735 bp, Zea mays
  Clone ID: MRT4577_790C.1
ctgaggctggggggcaaggtgcagacaagaaaaaacttactgatcaaagagacttatttcaaaggatcttagattttgtcaagtatggtgactgccctgaagaatcaatcaagattgctggaaaacgtgatgttttaagggtgtcgtcatggtctgaattaatccagttgaatttcttaaaggggtttctggggaaaggctttctgaagcatgttcaggagaatggacttcttcaggatatatttgacattaaggttgacaaaaccgaaaccctgtcgtccactaacaagaaaatctttaggtctgaagaggaaaaaggaagagctctgaaattgaacaaggaacgtcgtctagcccaggtaaggaagaatgctgtcatgttggacgactaacaaggtcacaagggtgggaaggcaacagccattccgcgtctctgtttaaactactatttactgggctgtcatgttgggccgttgtctgtgtaaactactatttactggcacattccattggaggttgtgccgtcatagtactgagacacttgagttatactgatatagtgcacgtaagcgatttactattcgtacatatggaacgtcagatagcatgacttatgttggaataataaagttaattagaagttcagctaaaaaaaaaaaaaaaaaaaaaaacaaaaaaaaaaaaaaaaaaaaaaaaaaaaaaaaaaaaaagaaaaaaaaaaaaaaaaaagcggcc

SEQ ID NO: 161759 - DNA, 319 bp, Zea mays
  Clone ID: MRT4577_79100C.1
atacagtccgctgcctccgcgctcccgggggacccacgagcgccacgccggaatcctagccctccccaacccagtcgccatgcgagagagccgctcaccaatcggtctgaatatgaactccacattcgttggcatctcaacatccatccaagagatgttccgccgggtcaaccagcagttcacggccatgttcaagaggagggggcccctgcactggtacacaggcgagcgcctacttgagaaaggatgccaccaaggaggtttgcatgatgaacgaccagaaccctcggaggaaacgggcccagcacgaaaatgttga

SEQ ID NO: 161760 - DNA, 380 bp, Zea mays
  Clone ID: MRT4577_79101C.1
tgtagcgatgcgacaatctattgtacaatcaatcaaggtgaggctgtatgttagcacccataattcatgatgtcaggattaataattagaatacaaccacaacattcaatattatgagaggagatcatctactgtatcctaaccatctagacttagagatcatcttgaacgtctgttttgaagaggatgcacatttgtttagaaatagtttcgttgcttttgtggcgagagctatgtgttctgtctgtgttgtatgattttaaaagagttgtagattgtactatactagggcgatcgccgtcatgatactgctattagacgtaatgtaatattgtgaattgtattatatataatatttaaaacaaaagattgagaggaat

SEQ ID NO: 161761 - DNA, 839 bp, Zea mays
  Clone ID: MRT4577_79102C.1
gggtacccccgggttcggccggggaagacttcgccttctcttggcttgctcaccagttgcgtctctttgcataagggtggctcaggtcggagatttccggttgtgctcattgcgaccaagacgaagaagacgacgacgatccgtccacggcggtcgtctcctccacgagcgtattgactccatagcccgctatgggtaccttgagttggccatcgagcagatggcagagaccgcagacgccaccaacgctttctttttcgggcttcactaccttcggtcgaccgacaatgcatgtgcggcgagggcgctgttatggtggggatgggagaactccgatgctcacgctgccgatgttgccgccacacaccgtctcctgtgctcctcatccggcgaacatccactgctcgaaccaccatggcgctcggctacagggcgtcatgacagcagctccccaagcgatgcaagccgcctgttcgacgaaatcattttcgacaggaacaaaggattcgtaatgcgctcggctacagggcgtcatgacagcagctccccaagcgatgcaagccgcctattcgacgaaatgtgtgagaagcaaaatgaacatgcccgcgtgttaggtcctttatgtgacccaaataactgaatttcagctaagcaccagatctaatatctctaattcttcgagcttccatgggtgaggcaattaacacttactccaatttgttcttccttcatggtgctacttaattcaacatgttcttcgttgcaatgattatagttacacttggtttatcaccattgctttcagcttgataaagccttatctttgctacatacttaat

SEQ ID NO: 161762 - DNA, 1152 bp, Zea mays
  Clone ID: MRT4577_79103C.1
attcccgggtgggtttcgtcagcgtcaattggccgcttccgcccgggccggggccttctcttggcttgctcaccggctgcgtctctttggttagatacatttttctcctttgtctttcgtcgtcccttttgattcggtcgatacctggatctagatccgttcgtcgatcatatccagcctcctctacttgagatcctcttgctttttggagatactgttgcttcggtgcgtggagattgagatctaaacgataagtattttcttttggttaactggttcgcaagaagtgcagatgaacatctggttccaaatttgtgcttcgatcatatctagctgccaacttggtcgtcgacacgtttatttccacagttgtgctctcattcttgcttcgtcgattgtttcgtttaggtgcacaactgatctcgtttgtgtcaaatgcataaggttgtctcaggtcggagatttccggttgtgctcattgcgaccaagacgaagaagacgacgacgatccatccacgtcggtcgtctcctgcacgggcgtattgacgccacagcttgctatgggtaccttgagttggccatcgagcagatggcagagaccgcagacgccagcaacgcactcgaccacgggcttcactaccttcggtcgaccggcaatgcatgtgcggcgagggcgctgttgtgctggggatgggagaactccgatgctcacgctgggcgtcatgacagcagctccccaagcgatgcaagccgcctgttctacgaaatgtgtgagaaacaaaatagagacatcaacagtgttttcatgtgtctaatacaaatttatttttgccccaaggttctcctaaatcgtcatcaacttcgtgaaggtgtttgctttttgcgcacctatcaggagcaccatcacttttggaccatgaatgcttccctatagatatgaacctactgttagactatttgtggatatgtacatattgacttaacacctgcaagcacactgttgctaagtgttgatgtatgatctaaacacctgcaagcacattgttgctaagtgttgatgtatggtagttgaatactacttagtatgtattgtagtctaaatccactctacagctggtatcaactattatataaaaacaacgtcatatgctt

SEQ ID NO: 161763 - DNA, 1721 bp, Zea mays
  Clone ID: MRT4577_79104C.1
ccccgcgtccgccacgcgtccgccacgcgtccgctcgctttctaccagttgcttcgtctcgctttcatcctctccgcgtcacttgggtttcgtcggtgtcaaggactccgcttccgcccgaagacttcgccttccgcccgaagacttcgccttctcttggcttgctcaccagctgcgtctctttgcataaggttgtctcaggtcggagatttccggttgtgctcattgcgaccaagacgaagaagacgacgacgatccgtccacggcggtcgtctcctccacgagcgtattgactccatagcccgctatgggtaccttgagttggccatcgagcagatggcagagaccgcaaacgccaccaacgcactcgaccacgggcttcactaccttcggtcgaccgacaatgcatgtgcggcgagggcgctgttatggtggggatgggagaactccgatgctcacgctgggcgtcatgacagcagctccccaagcgatgcaagccgcctgttcgacgaaatgtgtgagaagaaaaatagagacatcaacggtgttttcatgtgaattcggcacgaggattttttaaaacatagctagatagcattttcgacaggaacaaaggattcgtaatgcgctcggctacagggcgtcatgacagcagctccccaagcgatgcaagccgcctattcgacgaaatgtgtgagaagcaaaatgaacatgcccgcgtgttaggtcctttatgtgacccaaataactgaatttcagctaagcaccagatctaatatctctaattcttcgagcttccatgggtgaggcaattaacacttactccaatttgttcttccttcatggtgctacttaattcaacatgttcttcgttgcaatgattatagttacacttggtttatcaccattgctttcagcttgataaagccttatctttgctacatacttaattaatgcttcaaagcatcgagcggccgcccgggcaggtacaagctcagcttcattgtcactgatggaacatgtgaagcagagttcttttgttttgatagcatagccagaaaaatagtaggaaaaccttgtgacaaccttgttacagcagttacaacttctcaaggtcccccggtagacctagccactgttatgtgactgaaatttaccctttgcagttgccatcaatatgtcagcctactctgtcacaaacagtcttctctattctgtctattttaacaaatcatgtaagacatgccttcatgccatctaacatgcctaaccatcctcaagagttgtatacacaagatgaagaacctagccttccggtcacacaaaactctccaacaacatctttggcgaaactatctacctgtagcaacgaaagaaacgagggtgatgaccaacgtacaagtgaactcaacaagcaagagttatcatcaccaccgaaaaggtatttgctttttgtgcacctatcactatcaggatcaccatcacttttgaaccatgaatgcttccctttaaatatgaactagctgttagcctatttgtggatctatacatatagacttaacacctgcaagcacactgttgctaggtcttgatgtacggtggttgaatgctacttactatatttttttattatagtctaaattaactctacaactgatatcaactattagagaaaaacaatgttatatgcttatatttgattatgtgcctgcgcattctat

SEQ ID NO: 161764 - DNA, 179 bp, Zea mays
  Clone ID: MRT4577_79105C.1
cacgcctccgtaagctcggaattcggctcgaggtcaaaactagatcacccataataagaggacccagcccatggctattacaaaggcggttctactgatggaccacccggtaacgagctggcacatgatggagttgaagaacaaaacgacggtgatcctatactggatgaatacctgcc

SEQ ID NO: 161765 - DNA, 106 bp, Zea mays
  Clone ID: MRT4577_79106C.1
cccacgcgtccgcgtttcgatatcttgaagatccattcaagacaaatgagcttgatgcgatgcattgatctgaacaagatcgcggaacagatgaatggggcctcaa

SEQ ID NO: 161766 - DNA, 327 bp, Zea mays
  Clone ID: MRT4577_79107C.1
actggcaccggaacttttattaccaaattctacaagtcccaaaaattttactttaggttcatcgcagggatttcaatcgcggtcctatgaattaaaccttgtactcacacgaatcttggacagttatgaaagttgtacactcactcaattgtccagtcctaatatgagatattgacaacgtacttatatttataagaaggcctaacccacccatacttaagaccatcatgagcagcacaaaactttcaccttgataacgaccgggcccaaacccctgggtttggtattactcagcttgacttacccgactagaagaaaagactgtca

SEQ ID NO: 161767 - DNA, 610 bp, Zea mays
  Clone ID: MRT4577_79108C.1
cccacgcgtccggccggattgagagcttgagagatagcgtactgcactgtcgactagactactacccttgcaatgaagagggcaccggctgtgtgtcttctggccaccttgttggcattctacttcttggttccctccattgctgtagctctctcaagggtgcaaaagatggccatgcaagaggatggtcagataccatcggttcaaagcagcactctacagccaaagatgaaaaatgagaagtttgtgccagaggatgatgaatccgtgatcaccgcgaggatggccttcgagacacaggactacgctcccccggggcccaacaaccaccacaagccacctgcaggctggagatgaactcggggctcacttttgatcagtgtgtcgtgctcttggctcacgaaacttggagagccagcgcccgttgcaatgttgtttgtcctagctataatagaatctacctattcattatgtcacgaagagaaatgtgatgttttgtgttgttgactattatgattactattacatatggccgtgtggttacgttgtgatgtgtaagttccctttaaagattgactttaaaaggaaaaaaaaaaaaaaaaaagcggcc

SEQ ID NO: 161768 - DNA, 439 bp, Zea mays
  Clone ID: MRT4577_79109C.1
caatacgaagacccttcaacgggcagcagtggcttaatgaccctatctatcacatagatccaccgtcagattactcacagatgaagaggtttcacctgatactgcgactgcggtaccgggaatgctaggcgaccgatgggccgagcaatatgccctcccattacgcgcggctcccgcccggtcatgactagcggtgtcggaagaagaggaggcgagtacggcggtccgcggtattaagtatcagccgtgaggggccgattagacgctgcgggctctgacgagaggactcgccaccggtactggtccagtggaacgcacaactttgccagccgttccagcagcttaaaaaaaaaaatctacaaggaggagactccttgtgaacaggggagctggaggctttgacgctgaaatgtaaagcatacggagctacggattcagc

SEQ ID NO: 161769 - DNA, 317 bp, Zea mays
  unsure (1)..(317): unsure at all n locations
  Clone ID: MRT4577_7910C.1
nnntaanattttttttttttttttttttttttttgttgagtttattattggtggggtggtaaatttttttttaaaaaacaaaaaagccattccaaggttgtggataaacaaaatacaggctttacaattaaaataaatgtaccaacaatttttatttaaacaagaatgcaaaaaatattgctcccaaatgtgcgttaaacctgaacattctaaaaatttaattacccttatttacttgaaaacaaaatattttacaaattccaaaaaaaaaatttataaggtccccaatttttcccgggtagaatattttaatttgt

SEQ ID NO: 161770 - DNA, 386 bp, Zea mays
  Clone ID: MRT4577_79110C.1
ggagtgcgcaagccgattatgaccacctcactccagccgagaggcgttacattgaacagaagcagaagatcgatgtacacaagctggccaaggtggctgacaagtcgcacagggaccgcatccaggacttcaaccagtacctcgcaaatcttagtgagcactatgatatcccaaaggtcggccctggttaattaaggttcgcacaagtgttccagtgtgctggacctatgcttgcagctcgacaatttcgcgtgggtgcgctctgaaacaatggattgtgctggctttattaaagataaactgaggacctatgagcttgagagctgatagcactgaatggtgtgggggagaccatgtgtaatatagaaaaaaaaaaaaatataaag

SEQ ID NO: 161771 - DNA, 531 bp, Zea mays
  Clone ID: MRT4577_79111C.1
aaccgagtaaccgggctctctaacaaatatgtgagtagctggctagatgagccattatggtacaagttacaaagtacagatactgacaaaatggtactgatagaactgggcgagggagtcacacagctgacctaattacaaaatagctaccggacaagcgaggggtttgtattcagcataagagccgtgctacataaactgaggacatgaagcggagggggaagtgaacgaccgtcttgtgtaagaaccaaatagcactctacatagaactggccctgggtgcaaagtttgatggatggaagccatgccatgatccatacttgtgtggattatgggacagttaatattctcaaatatccacatcctgtggatggggacacaccgtatggagcttgtccaccacagcaagccactacgggatattccatactatatcgggcacgagaaaggaaaatccacatagcacctccataacaatcagcatagatgatggatgctgcacgatgaagcttgcgaagcttattgagctgc

SEQ ID NO: 161772 - DNA, 206 bp, Zea mays
  Clone ID: MRT4577_79112C.1
agcaactggggggtaccaatttttgtcgagtgcgtgccgaaacacaccaccattccaatactaaactcatattaaacaaagggctcaaccaacaggccaccaaaaacttccacagaaagaacccttaaatatctggcgctccaaacacataacacgcctaccatataccttttacatgaaaagattggtcctgaaagccttgaaag

SEQ ID NO: 161773 - DNA, 266 bp, Zea mays
  Clone ID: MRT4577_79113C.1
ccgacgcgtacgagtactatttctccaagcatcaaactttcactttctctaaatttgaggtcacaaccggcgggggttaacaccatgatagactgcatgtgctcacaaccagatggagtattgacatataatgtaagcacctgaatttggactcaatttgccatcccactgtcactgcatctcactgatcacacacttgccgagatccatagaaaggttatacatatgtgtctgctgtgcatatatgcatttacctgcatatacat

SEQ ID NO: 161774 - DNA, 635 bp, Zea mays
  Clone ID: MRT4577_79114C.1
aaaacataaacggggttagggaacccaattccgggggagggacacagggggcctttttttagttggcccaacctttattttttttaacaggggggaaaccttttttacaaaaaggaaagggttttagaaaggccctaccaaaaactttttttaaaaaaagttttaaaaaaaaaaccaccgggggaaacattaacaacaaccccccctgggggttttaagttaccccccaaaaaaaacaaaaaaggggatttttccccccaaattttgaaaacggatttttaaggggcacataaagtaaccgggtcccgggggggaaaaaacctttttaaaacctgcccgggttgttttttttcccagcccgccaagtaaagggcaaaattttgagaccaactccggggggcccccggaaactaatttgaaaaaaacccaaggcctttttttcccaacggagggtggcaatccgggctgtttagcaaaaactggggggggccaaaaacaaaggggggtcccccccataaaaagctgggggggccccaaaaggctgcacccaatttttccctttgggaaaggggaaatcgttggaaaaatcaccgtggaaagacccatgggattttttgtgggggccccaatgcttt

SEQ ID NO: 161775 - DNA, 885 bp, Zea mays
  Clone ID: MRT4577_79115C.1
aaaggttgccgaggaaaccgtcagcagtgtttgaccaaacttacttatgcagcaaaggtggccgctttttttttttttttttcgaagaaacgagtccaattcctggagcaagtaagcagcacatcaacacagtcgccgctggacgagaagcgccacacgaattaacaacaaaggcctcaacagagtagacacgggaatagcaagcgtgttctttttttgcggctgcagcgtttcggcgacccatgcggtggaaactgaaaagggaggcgcagtaccttttgggtggagaaggaggcggcggcaaagcgagcgaagacgacaagggtgggagcgatgagggaggtgcagtaccttttgggtgaaggaggcggcggcaaagcgagcgaagacggcatggcggagaactggaggtggaagagcccaagcggtgtttagtctctcactctaatccccaaagcggcgccataaaatacaagctcgcggctgcagggcgcccaactgccacctgacatgccaaccccgtggtcgagctgaacccaggcaaaacacgacgagctcactatcgcgtcggagaacaggagaggggcggctaggcctaggcaggggggtggggcggaactcagcgccttggcctaggggcgggtccacgcctccgcggaaggagctcggctgccagtgccgaccaccgacgatggggaggagctcgtccagtcgtcctgccaggcgagcgcgcgacctatgtggagctcggggcggtggcggctccatcatggcggtcgtctcggttgtgtgaggaggagggcatgggaccgggcgggggcatgaaggagtgcggatctccgggcttgaccgcgctgggacggtacgcctcccgccggctcgagg

SEQ ID NO: 161776 - DNA, 556 bp, Zea mays
  Clone ID: MRT4577_79116C.1
agagggggacggattaatccattccgcttcacagaccaaattcaatgtttaacagtcatggagaactcatccatcaaaccgaacaccataatttttttttttatttttacccgctgcccttggggctgaccggggggccactggtttgccagccaccgagtcgggggggaatgaactgttttttttgggagccaagcaggaaacccagtacgacacaagcggaagaagaacacgggggcccctgcccgccaaaaacattgaagttgaagtcttcattttaccaacccacatgtcatgaagcgaaacagcggggactcgtccatgatatacaggttcctggtacagatgcagaggggccacgggagaggacaccggggggttaccctagggctggctggctgacgacgtgacggcctttttgttttttccacccctcggcgccgagccgccctgcacttccctaagttttttttctgggcctccggggccgcatgatacacagggtcattttcaggtaccggtccgagttgatccccggggcgttgtttgggggggg

SEQ ID NO: 161777 - DNA, 320 bp, Zea mays
  Clone ID: MRT4577_79117C.1
ccctgtcactagacataaatgaattagtacaaacgagtggcactaagcacaaacgcacagggagggactcgcataaccaaagatcgatcgatcgatctgtgaccaactgtaaggtagcatcattttttgtagctgctgaccactgtgtgctatggcattcaaagctacggatcatggcgatgaccagcgcaaccatggaacagcacatttaccaggggactatcttccttcgctggatgtgcagcctagcaccacttgcagagctcgatgatggtgccgtcccgcacgcagacgggttccttgtaagtcccgtaaggcgt

SEQ ID NO: 161778 - DNA, 477 bp, Zea mays
  Clone ID: MRT4577_79118C.1
tcgagctttctagtttgcggccgcagtggcgtggcccgcacggtcctgggctacgccgacgccgtcgcacaccacgccggccaggccgtcgccgagggcgccaagattatcaacgagcgtgtgagcactcagaactacaaaagtgtgaagcaaacagtgaagcgattggaagaggttgcggtttcatcacgcagggatgagagagttcaagtgctaaggcgctggctcggagccctacaggaggttgaggctgaagttggaggttcgggtgggtctcagaggcagaatgtctctataagcaagccaaactcttcgaaaccatcattggccaaagttttgttttatgatgctgatattggagggccttctatgaactttcgagatgtattgctttatagccacgcacttgagggtattacgttgtccatgattcttgagcttctagggagaagaggtttcccttcttctagaaatttt

SEQ ID NO: 161779 - DNA, 1139 bp, Zea mays
  Clone ID: MRT4577_79119C.1
ccctcgaggccggccgggacctaccggccatcctccacccacagacaggcttctgtgaatttgtccaattccaatccaaaccctaacaaccaacaacaccgtcgatcatgatcgtcgacaagtttgaggaagttttgcagacggcagcgcttccagctgctgcctctgttgcacccatcccctccgtcattcctggaagcgagcctatctaccaggttgccggtgatgctggacaaaaggtcctctgggttgtctttgccatcatgttggttgcctctggtgctttcactctcatgtcatggaatgtccccttgaacaagcgtctctaccatgtcgttactaccatcatcaccctgactgctgccctctcatacttcgccatggctaccgcccacggtgtttccctgacaaagattgttgagcgtgagcagcacgaccacgttcctgacaccttcaccaccacctaccgtgaggtctactgggcccgttacgtcgactggaccatcaccactcctctcctgctcctcgatctcggtctccttgctggcatggccggtggacacctgatcatgatgattgttgccgatatcttcatggttctgaccggtctcttcgctgctttcggctccgaggacactcctcagaagtggggctggtacaccatctcctgcatttccttcatctttgtcttctggcacttgggtctcaacggtggagccaacgccaatgccaagggtgagaagcttcgcggcttctttgtctccatctccgtctacactgccattctctggactgcctaccccattgtctggggtattgccgacggtgcccgcaaggtcagcgttgacactgagatcattgcctacgccattctcgacgttctcgccaaggctgtcttcggtgcctggctcctcattgtccactccaacatgcgcgagagcgatgctgagctcaacggcttctgggccaacggcctcagccgcgatggtgctatccgcatcggtgaggacgacggtgcctaagcgcattctgtcaatgctagatacttcaagcaagtttcatacgattgccttagacaagcgtggttcgcctcaagtgcaagctcatggagacccgaaacaggttcgatgatccaaaaa

SEQ ID NO: 161780 - DNA, 367 bp, Zea mays
  Clone ID: MRT4577_7911C.1
tgctatcattcgcgggcctcgctccaaacccgtgctgcctttgcagcccgagcgcgacagctcaccgtggtcggaggacaccaaggccaaagagtgcagccttcacaatgacatcatcgatagggactcccaggcggcggcccccatgttcgtcaactgcaacgggtcggcggtcgccccgaacatattcatgagccccagcgtcgtgtgcctcaccaccacactaatccacaacctggtgcgcctgaaaaaccgttcctagccgtggctacaagattcttgcgcgctctgatgctcgttctgtcaggccatggaggcctactacgtggagctggccgagaagctggctgtgtccggggtgaaggtg

SEQ ID NO: 161781 - DNA, 171 bp, Zea mays
  Clone ID: MRT4577_79120C.1
cccacgcgttcggagtcctgctttttcgccttctttccctgcaccatctcctagagcattggtggcttcatttaaggaccgatgtgtggcatcaaaccctccgctattcatccgcttgtacatgtcatgcaagcttgcttgctgggactgatgcgcgacacctccctttaa

SEQ ID NO: 161782 - DNA, 372 bp, Zea mays
  Clone ID: MRT4577_79121C.1
ggggcctggtttccttgatacatgctttattacagggaaaaaacagggtcacattacaaaccaagcatttaaggaaagctgaaactaaaaactttggcttaacgggaaaaacaaaggcaggcgagggccccccacctggggggcccaacaaaggccacccacacaagaggaaagccacagcggccctcccacccccggaaacggggggccaagggcccccagcttcttttttttagcctaaaataccttgaggcagacagccaacagtttactttccccccccccaaagaccaaaaagaaagggggaccccaccaaagtaactgccaggcttaaaacggccttcccttccaacgccctctttacagcacccc

SEQ ID NO: 161783 - DNA, 521 bp, Zea mays
  Clone ID: MRT4577_79122C.1
aaaaaatggggtttgttttttttaaaatgtttttgttaaaaaaacaaaaactgggggggggcccaaacaaattttgaaaattatactagggccaagggcgggaaaaaaagaggggcaaattttgaaagccaagggcgggaaaaaaaacggggggaatggcaaatagggcccccaggcaaaggggggcggggatattccttttaaccataaaaacggggggggggggaaaaaatccatttacccatcaaaactactaagggggggccccacacaaaaaagaaagcccagggggttgtttaagggaaaaaaaaaccggggggagaaggaacccaaccccccccctgaaaaatgaaaccgaggggggccaggcccttggggggggggacgcctgcaacaaacaaagggggggagctggggaaaccaagggcccgggaacaagggaggggggggggggatgccctatgcccataaagaggggcctccccgagggcaagcaaccgaatgcccaggaaaaatgcacc

SEQ ID NO: 161784 - DNA, 249 bp, Zea mays
  Clone ID: MRT4577_79123C.1
cctcgaggccggccgggatagtttttcttcttcttttcccatttttttttcttccatccgatatccatattccattcggcattcgattcagtaggactggcggcatatctgttcgttcgtgttgctacagtgtaggaccgtggctcggacagattggttgggctggctcggtggtgttgtgctccgttcatccatttgtataataccctgttgattctctttcacaaaaaaaaaaaaaaaaaagcggcc

SEQ ID NO: 161785 - DNA, 1070 bp, Zea mays
  unsure (1)..(1070): unsure at all n locations
  Clone ID: MRT4577_79124C.1
agggagcttcggctcattcgcggggaaatgtgtaccgacttaaagagaaaaggctatttaatcctcatagatttgtatataagtcaataataaatgtaaagggcatgaatgtaatttctcacaggctgtgtcctgtgcctataaatagatgatcagtacccccgtactgttcacgctgacatatacttgctcgtgcgtcacgcttgtactttcacctactgtcaagctgaaggtacatttgtaattcaatattatttctacttttccatgataataaaatgaggatgaattgacaatgctatatgattgctcatgttatctctcgccggtgttatggtgagaacaaaggccataccaccgggatgtgccatgttaccatccaaaagcaaaaggaaatagccgaagctgcagcacaacaggctcagccgaagcaggtcatgcacactgcttcgtatcattcgccttacatcccagaatatgtaggcaatcaccctgcagtttctgttgcttcggcaagtcaacctcaagcttcttggcaacagcctcaaccaccaccaccaacgcaacgaggtcagcagccagaagggagtcagcacgctccacaccagcgggacttcagagaacagtctgaagctcgcacagtcaatagcactgtgccagagtcgaagcatatttactgacaaatatcctacctcgacagcaacttttcgcattttcgcattcagtattactttctttttaataaggaacaattatgggaagtttaagtgctttttatcggttttcaatctcttgtaacagtttcactttttaccataatgaaaatatatcttctccgaaggcttaagttgccgaagcatgagaatttatggtggcaaggaggaccttcgaattatcaaaaatttgttctaaggaacgcaacgcaatttcttcgaagcagcaaaaagtcgttcctaagggagcgtagtgtaagttttctgctcaaaagtcgttccgaagggagtttcggattgtgccaaagatttcacatgctcacagcctttcctctncaaaatagtagcaatccccct

SEQ ID NO: 161786 - DNA, 361 bp, Zea mays
  unsure (1)..(361): unsure at all n locations
  Clone ID: MRT4577_79125C.1
ttccacctnctcaaactntcntcctaaancttntgcttcaccacctnaccnatnangantgcggcaancttctaactgagtgccggaanncnattccttcacngaangatggcnggaaagttataatcggtgatattatgattgaccactgtgggcctatnctnttttctcacctcctgatggacatcggcatgatgaccatgacaaaaggacggcagagagattaaaaaaaattgagcgaactcttcaccaaagcaaggttcaaccaatacaagatccttaaggaattttgaactcntgtttccttcgaaatctatccgttagatttcacctggactattcatatatatttacatacata

SEQ ID NO: 161787 - DNA, 593 bp, Zea mays
  Clone ID: MRT4577_79126C.1
ttccccgatcgtttaaatattaatagagctcctgcagagatctgggggggggggggggggggggggggggggtatcgtcagggttcggggtatatgagtaatccaactacttcaaaaccccccctccacgacacgcccaatcaccagacttcctgtccctcccagcaaccaacagtccgactaccattggaagtatagtagccacctcgccccgacccgttctcctcggccaatgattaccaaactggaccacccacccgagacctgcacgccgatgtaccaagctgataagccaaacaaaattgacacaagggtggatttaataccccgttccgagtcgtcgcccacgtgcccctatactagatcgttacggatagtacgatatagtctaagtaggatcccgctcaagtgagaagtcgcacaaaacaagtcttatgtactagcgagcctactaaagctggatgaggataaggtttttaaggaggaggtaataaagtaataggatttcgttctggaggacgtaaactccctcctctactctagaatcgactataacccgaagtttgtccaggataccctcttaagtacccgga

SEQ ID NO: 161788 - DNA, 377 bp, Zea mays
  unsure (1)..(377): unsure at all n locations
  Clone ID: MRT4577_79127C.1
tgccactctgagcttcccattaacctcgagctctggtcatcacaattaattaaaacaaaccgttcccgcagctcgtgccgacaatggcggcctctgttgagcggcacctggccccccacccgtggccggccaatgcgcctcccaagagcttcgacatgttccgctccggcggcccaggaggcaagcgccgcaccggccccgactccgactccgaggacgaggacagcattcccccggactggcggtcgctgtacagcccgcgcctggaggtggagccgtccgcccacgacccacgcgacgaggccacctccgacgcgtgggtgcgacgccacccggcgctcgtccggctcacggncaagcacccgttcaactcggag

SEQ ID NO: 161789 - DNA, 1061 bp, Zea mays
  Clone ID: MRT4577_79128C.1
ccggccggggccctgtctctcttcctcctcgctccctccgccttgtccctctgtaggtcacttggtcaggttctcatccccttcttgctccctctgcatcgtccctctgtaggtccacgcgctcctcccgtccacgcctgcgagtatctcttctcagagtctccagatcggggcctccggcagccgctcgcgccaacgctgtcgccgcttgtccgctccttcaccagacaccagcatgcgacacacttctagaatcaaacaggcggtgggaaagagaaaaaaagggaggacgatctcggctctctcacgccgttaaggtcaacaaaggtggggagggccgaccctccggcgttgtcgtcggcgcttgtgcctggtggcggcaggcacagccccgtggacggcaagattaggagtgggggagtcttcaaccatccatcgcaccgcggtcaaagggtctgcgccgcctgcatccagcaggccatggcagtcagtcttcaaccagctactgcctactgtgccaccgtcaaaggggcccgcgccgcacacttccagcagaacaggcggttagactggctccaacaaggccctctaaagggtcctgtaccctaaatttagaggacgaggacgtcctctactccctccagcaacgtcctctaaacggtcctctaaatttagagaacgctgctggatcctctatatgtagagtttctctaaacggttctctatctatttgaatactttaaacaaccgatttataaaactaaaatatgtaccatacatttgaaagtatgacaaatacgtatgtaccaaaattaaaaaattaaaaatgtttttaatataggtatttacatatagaggacgtgatttagaggacgttgttggagagaaagtagatataggagatggaatcttttagagaagactgtaaaggacggatatagaggatgtatatagaggacgttgctggagacagtctaaggccgctattgggggaaagtgagaagctgtataacccagtcctggtggggcaaggccgaagtttttcattaaccccgcccggg

SEQ ID NO: 161790 - DNA, 168 bp, Zea mays
  Clone ID: MRT4577_79129C.1
acatggaacaactttgggggggaaattttttccaagcataatacatacactatacacgacgcacactttactactcacaattgcacactacgtacaccttccacataccaacaatccttacaactacattcaaatttcagtaacacccaccccagtaaagtttattac

SEQ ID NO: 161791 - DNA, 453 bp, Zea mays
  unsure (1)..(453): unsure at all n locations
  Clone ID: MRT4577_7912C.1
ggccgaaccagagccccgtcccaactccaccacctctcttctctacggcgcgagcaagggcggcgccggccgcggcgtcggcgggaaccgggcctcgctctcctcatctctccgatcacttctgtcttgtgaaaatggcggatgaactatgctcaatgtctgtgggtcagaagttccatgggcagtccgtgctgttgagcagaatttcttcctattctgccatgaacaaccctgtattcaacaatgcctattctgcttacaatgtgccccagaggtcatatcatgggatgaatgcaactgctggactctcatctgtcatggcaccatctcctgtctttgcttctgccccaaaagagaaaggcttttcctgatttatgatcgactntatgatgggtggagtttctgctgctgtcttcatgacagctgcagcttcgattgagcgtgtcatgcttt

SEQ ID NO: 161792 - DNA, 268 bp, Zea mays
  Clone ID: MRT4577_79130C.1
tccccgtccacccaatccttccgccaatccttccgaacaaaaaaactaaatttaaaaaaacaaaaaataatacaataaatcaagaaaattatactacactgcagacaataaaccacaaacaaaccatatacaaaagctaaaaaagatactattaaacacaaagctaacttacccatcaagaaatctctatctccatccatcaaggctcctcttcactttctcctaaaccatatcgttcgctacctcaaaaatgatcaatacgctcaac

SEQ ID NO: 161793 - DNA, 839 bp, Zea mays
  Clone ID: MRT4577_79131C.1
cgggcggtgagccctctgactcggaggagaactcctcctctgagtactccgagtcgccgaagtcctccgagggaggagtcggctcacgcttccgcttatcgttggagtgatgcgaagaactaccacctttcttgctcttgcccatggcggagtagaaggaaaattaagaaagtaagcaacaagcagcagtaagagttgtgaagatgccggagaagcaaacacactatttatagaagaagaagtcaaccgctcacctcctaccacggccactgaacagtcccaaaaattcaatatgcaattcaaaccgtctcgaaacacgtcaggcggctggcgccgttccacgtaacacgacacccattgggactccagttaactgcttgggcgatatgattacacctgcggtcacgtcaagttactactcagaagcagtttgctaaacgctcagcgcaccaagccatcccttgcctacacccattgcggggacgtccaggaattttcaatagattttcccaagcagtcacatccatacagtatacgcaatgaatacctcaagacagaaggaagatatcaacagggatcagaggaaggccaaatatagccgatgaggtacaagtctaatcgacagaagcattgaagcacgaagtgatatgaagactagccaaggccatctaccgaacatccaatcagtcgcagatcaaataaattgcaagccctagcaagatatggacagatcgcgtactcgactatgaagacaaaaatgaatgctgacctctaaagcataatgttgatgatataatgctgaactctaaagcattcgacaaaaggaaaggatgatttct

SEQ ID NO: 161794 - DNA, 439 bp, Zea mays
  Clone ID: MRT4577_79132C.1
acgcgtcgttctttttttatcattttgctttggcattccttttgttgaagaaacaatttccggaccagcagctttaaaaacatgcctcttgaaaatgttccaccaagctcattgagtgggatacatcgtctacacgatctttcccactgggtgtagcattcccgaattgagcgtacccaacacctcgggaacgcgagaaatttctacactagtctaccagatttcccatccaaaaagacaacactttggatgccaaacagctcttcctgcttgagaatatattccgagtggcgacatgggggcatgaccaccaggacccccaaaatccagcagggaagatgtacataatattgctgatgatacgggcagctgctctattgccacaggaactccctccattcccagaatacttcaacctcttttgtccaccaccttaatc

SEQ ID NO: 161795 - DNA, 276 bp, Zea mays
  Clone ID: MRT4577_79133C.1
ctacgtttccgcgccaaccacgccggccgcagcgaagccgctgctcgaatactagactagtccgaagagccaaatggtggtcgcgtgaggggcgggcggcaggagatcggcccgcccggggaggggggagactacgatgcgggcgtgggagatgcacccgctctgctgcctcgccgccggggagtggccggtctcgggcgcggcccgcgacgaccgctccccgccgcccgagggctcgggggaggcgccggcggtggcgggtgttgctgtacaagt

SEQ ID NO: 161796 - DNA, 640 bp, Zea mays
  Clone ID: MRT4577_79134C.1
ctagcctcgtcgcatggcctcctccttgctccgctccggccaccgcctctttctccgacgccaccgcctacccgcggcattctccaccgctacggccgaggagctaatcgacgtacgcaagcttcccaccaactacgacccctccaccttcgacccgtccccctatccaaggacgaagccaaggcgatcatcgagcggatgaaggcagttggcgccaaggtcgtcatggactgatcagaacaagcctttttcaacggtgaaatcctgcaactgcgaatctatgcttcatttcagatcaactttaagtgcaaggatggacgggtggattgtggacagttcctctatgaacttgcggaaattgatgtggcacagcgctaataggttttcaagcacgttaatcaaatgaacattgatcctgcaatgctatagggtattggcatcaatcgctcgtcattatgttcgaatttgtgacctttcaattgtgggaagttaaaatgacatagttagttattttgttcatcgcagggtcttgtttgagactggatgtccatatggatacaataacattttgctcttggttctgtgaatgtacaaatcgattcttattgaatgcaacttaactctcgactgttgttgctag

SEQ ID NO: 161797 - DNA, 1181 bp, Zea mays
  Clone ID: MRT4577_79135C.1
cattgggtacctcgaggccggccgggaaaactcattgccctccccatgcggccatgccgcaccccacagccagaaccctagcctcgtcgccatggcctcctccttgctccgctccggccaccgcctctttctccgacgccaccgcctacccgcggcattctccaccgctacggccgaggagctaatcgacgtacgcaagcttcccaccaactacgacccctccaccttcgacccgtcctccccgtcccgcccgccgccgtccgaccgcgtgtggcgcctcgtcgaggatgtctcctccctcaccctcgcggagaccgcggctctctcctctctcctcctccgccgcctcgacataccctccgcaccacccatcgccatcctcaactccgccgcggggctgggcggcgccgccacggccggcgcggcgggggagaaggcgggggcggcgggggcggccgagaagaccgtcttcgagctgcggctggagggctacgacgctgcgagcaagatcaaggtgatcaaggagatccggtcgttcaccgacctggggctgaaggaggccaaggagctggtggagaaggcgcctgcggtgatcaagggcggcctatccaaggacgaagccaaggcgatcatcgagcggatgaaggcagttggcgccaaggtcgtcatggactgatcagaacaagcctttttcaacggtgaaatcctgcaactgcgaatctatgcttcatttcagatcaactttaagtgcaaggatggacgggtggattgtggacagttcctgtatgaacttgcggaaatttgatgtggcacagcgctaataggttttcaagcacgttaatcaaatgaacattgatcctgcaatgctatagggtattggcatcaaacgctcgtcattatgttcgaatttgtgacctttcaattgtgggaagttaaaatgacctagttagttattttgttcatcacagggtcttgtttgagactggatgtccatatggatacaataacattttgctcttgtttctgtgaatttacaaatcgattctttttgaatgcaacttaactctcgactattgtttgctatgcttcgcctccagctccatgcgcgtgcaaagattcacggttgatttgtggacctgccctctatgaacttgcgaaattgatgtggcacagcgctaata

SEQ ID NO: 161798 - DNA, 165 bp, Zea mays
  unsure (1)..(165): unsure at all n locations
  Clone ID: MRT4577_79136C.1
cacgtgatgcttcctcgacccagacgggctttttttacaccatgtgtggtgtcaaagacncccaacaagatcttgactccagcttccccgtcaacatcaaacccatgagcgagtcccaaggcaccggggggtggtggctggatctcccatatcattagtgccaga

SEQ ID NO: 161799 - DNA, 278 bp, Zea mays
  Clone ID: MRT4577_79137C.1
gctttttcactccatcctccaagccaacctgttcatggttacacacacgcgtgtgggattacatctacaaccttttcattcatttccatgccctcctcactttgctcttcctaatcatcataacacagatagcccacccacaacttacctaaatatattgatacatacatacttatctaactctgcacctacatcatcggagcacccagactactcaacggggacgtaaaccacttccaatttacgagctatattctcctatgaaaacacatatatac

SEQ ID NO: 161800 - DNA, 673 bp, Zea mays
  Clone ID: MRT4577_79138C.1
aattcggcacgagggttaactctgtactgaggcggcagcgcggaggccgatgggctggcgtccgagcctgcctgggagcctatgggagataccgcgcgctgttgtggcaggcctacgcgctcagggccgatggcccggacttatatgacaaacaactatggtgcacctccaagctcctacaccttatgtagcattccttgcccgctaatgctcatttggcccaactaccgtataacctggctaaaaaagcgttctttgcgagaaacacaaactatgatctgctgccggtacctcaaatagtatcatacttggatgatcatgtcgacggcagcgagcctatctctacgcaaatacatggagaaacacttatcctgacgtgcatgaacgtcttcctctcaaagaagcaatgagcgtagaacaactgaacctttataattcacagtcgactgacgtggacaccgagacataatggaatgatctgtgcgagccgatcactactatagaacttggcgtgctgtggctataataagagggctagggtatatgaggagaaaggatgcatctgatgactactagtctgtacctcatttgcttgagcatggatagaggacggtgcaataggaaatggtcttctttctccacaccgtttaccagtgcctatgacctgtatcat

SEQ ID NO: 161801 - DNA, 389 bp, Zea mays
  Clone ID: MRT4577_79139C.1
gctgaggggaggcaggggagcccccgcggcgccgttctgttcgaaatccccaaaatggtgggatgaaatcaaatcagatgtgggcaccctcagcccattcatggcgatcgtgtacaccctggtcgcgcggtgcacggaggtgctggccgagttcgccgccgtctcgggcaacgccggcgccgaggcccgatggatcctcgagaagctgtcggccgacgccgagaccaggcttgtctttgcgcaggaccgtgacattttccacgtcctccgatccgacgccgacagcatcacctttctgtgtatggtcaacgacacctttggaagaaggatcctttttttctacctggaggccatccaaatgaggttcatgaaaaactacgggagatgtt

SEQ ID NO: 161802 - DNA, 314 bp, Zea mays
  Clone ID: MRT4577_7913C.1
gccgcgcgaacaagcagggggagacaggacgccggcttttccaccctgcgctcgcggacacgcgaccaccccgcgcgcccctgccgcaagaagggctacatcccgctcaccacctacctccgcacctacaagatcggcgattacgtcgatgtcaaggagaacggcgccgtgcacaaggaagagccgcacaaggtctaccactcccgaaccggtcgcggctgcaacgcctcatagcgcgacatcagcgaggagcccaacaagcatgtcaaagggcgcataatgtttttttttttcccccaccccccggcagtatg

SEQ ID NO: 161803 - DNA, 762 bp, Zea mays
  unsure (1)..(762): unsure at all n locations
  Clone ID: MRT4577_79140C.1
ggccgctttttttttttttttttcggaacaggatcacattgcattccataagaaacggttatgccatacaatcgagggaggggggagaggctagctagccgctgcacgataacaaagcatcacatgacacactagccccatgccattccaccagccattatcactgttactgaataaatccatcaaagcttaacagtttgtttcatttcaaggttaccattgagcatcccctgagaacagatggaggctactatcgctttgtcaggtcagtaattgtgaatcggcttatcggcagggggagcaagtcagggattcatgcaagattgcctgcaggatcaacacagattctcacatttcggcgagaggaccagagatcatatagatcagtggattctgcattggcactttgcagtgaatcgtcaatggtagcgccatgacggtcaccaccctctcgcgaagcagccacaagctcctcaaactgcagcatgagagaaataaaccttcgcatcacctctgaagtagttgaacagaccagctagactttttatggctgcggctgtagattctttagttcatgcgacaatacttagtagttatagagttgcagccagccgaactgcttctgaagcagaataaaagtcgcttccatctgtaagcatngtaaggggtccacagctncgtgggtttgcaaaaggggtgtttcttttggacatgctttcagagctctatgtatgtaaccatgtatgaacagtcattttccat

SEQ ID NO: 161804 - DNA, 355 bp, Zea mays
  Clone ID: MRT4577_79141C.1
ggcgcggtcggcggcgcggctgttcctttcgccagcgccgccgccgccgccgcagtgcccgtcgccgcggcgctcgtcgtctccttcctcgccttcttcctccactgagcgacgtaccgtgcggagtgctggaaacctgagatggatcatcgtgcttggttcacccgattaataattaattaatcgttgttttattaattcacttattgcttgcggttgcctaattatgagatcgtctgatgttccttccttccttcctaccttggtgatgcgtgggtcgccaaggtggtttcgtctctgtcatcctgcctgatctatgctaatacttatgaacccaatttggtttttgccatcc

SEQ ID NO: 161805 - DNA, 500 bp, Zea mays
  Clone ID: MRT4577_79142C.1
ctaaacaatctcttggttcccttcctcctttttccattaaaaaaaaaagttcgtcaaaaggcctgcatgccccacaaagctttcggttgaacaatacaaggagcatgcaggcgaacgaagcaaccaaacgggcagaagcccccaagccccatgcaaaaaaagggaataaaaaacgggccaacccacccccccagtctccggtcaaacaaaaaaacactactggatcgggcgggggcccccacttttttaacaaacaaccataccaactttttccaacagaaaagggaaaaacccagattttcgccccgggggtgcagggggaacaaaaaaacaaccaggaccgacggacggatttgccactcaaattccaacaaccacaaggagctcccaaagcggggaaaacaaaaccagcgtgttcgccacaaacgcgccgggggccgaaactgcccgcacccccaaccctggaaagggcgagtcaccccaacaaaaaaacgggggat

SEQ ID NO: 161806 - DNA, 529 bp, Zea mays
  Clone ID: MRT4577_79143C.1
aattttccttatgtgcccctccgcgaggaaggttcaaaatccatcgctcgtcatccatcccattcatcaatccctccgcgaggaaggtcgccggcgacgatgctggaggagcggtccggcgacgccggcttcaccaaggacgcctacgcgctcaagtggaccttcaacaacgacctcggactcgtcttcgtcgccgtctaccagggcatgctccacctgctctacgtcgacgacctgctcgccgccgtccgcaaggagttctcccagatctacaatcccaaacgggtctcctatgacgatttgttcacggagacgcttcggcagctgcacctcgagggcgaggcgcgcgccgaggacatgaagaagacagggagcagcccgacaacccctcctctggcggtgccttgcgtgcgcccagaggactcatcatcacctccagagactgcgctgtcgatggcatatttacacagaacaaggatttctaacttgattcactattgctgcttgccaggtgactgatatgggctgc

SEQ ID NO: 161807 - DNA, 745 bp, Zea mays
  unsure (1)..(745): unsure at all n locations
  Clone ID: MRT4577_79144C.1
aactgcaaatacattaatctttttccttgccagagctcgagacatggctccgaaggagcacatcttcctcctcctacgtcctgccatcccactcctcgttctgcttccccttgttgcatccacaaccagcaaccacagtttcagtttcctataccatggcttctctggtgtcaacctcaccctcgacggcaacgccatggtcacgccggacgggctcctcgaactcaccaacgacaccatcaacctcggccacgccttctacccgaccccgctgagcctgagcgggtcgcccaacggcacggtgcggtccttctccctcagcttcgcgttcgccatcctctccgtccacgacggcataagcgccgacggcatggccttcttcgtcgcccctaccaagaacctctccaacacgtgggcgcagtacatgggcctcctcaacagcggcaacaacggcaacgccagcaaccacatgttcgccgttgagctcgacaccacccaaaacgaggagttccaggacatggacaacaaccacgttggcatcgacatcaacagcctcaactccttgcaggcctaccgcactgngtactacgacgacgggagtggatccttcaacaacctgacccttatcagcggcaaggcgatgcaggtatgggctgactatgatggggagtccacgcagatcaacgtgttcttggctcctctcggattcgctaagcccggtgaggcactgctttcgtctccctat

SEQ ID NO: 161808 - DNA, 206 bp, Zea mays
  Clone ID: MRT4577_79145C.1
gtgttcttagattaattgactacgagctctatggagcctgggggtggatgcaccccggcgtgcgtagtctcgtttggtggtgagtgggagagagaggattacaagatcgatcctttggtaaatggagtctcgtttatcagggtagctaccgctgggacttggtgtggtgtaatatatgatccaaccagtgatgagtcaatgcatgc

SEQ ID NO: 161809 - DNA, 350 bp, Zea mays
  Clone ID: MRT4577_79146C.1
cataaggatcagcaacagccattcctggtgatgttaaacatgaaatgctgggaatcggaggcagcatgttcaaactattctcagagtccatcattccatgccacgcagttcaagtgcacacttaggaaacgcaatccgtccgcgttcgtataaagagaccctactccactatacgagcgacaacggtacgccactacactccggcggaagctaatgaacgcgtcccacgagaaccccccctgacagctgggtcactacaacagaccacccctacggctggccaatttttccctgtacatggcacgctacagggcccgtgcaacctacaagcatctgttttttgagctatg

SEQ ID NO: 161810 - DNA, 1477 bp, Zea mays
  unsure (1)..(1477): unsure at all n locations
  Clone ID: MRT4577_79147C.1
atgcggactacaatgtaatatctgatcttgcactgaagagggtgaagcaggatctaacaatgcatggtggtcaagtctgcagcagtattgctccagctactcatttggttgtagtttcggttttacaggtctataactttgacaacctgtacaagagcttccctcctgctgaaagacgttatctacatgacaaaagattacatgttgtcagtaataagtggttggaagattcagtggagaaacaaatgaagctctctgaaactgcttacagccttaaaccagatacactagaagaactagaaattgaaaggagtgaggaaaatgttcagcctccggagcataagtttgaggaacacaaggagtttgaaagatctcatgcggaaaatatgccaaggaaaaggagtaggccaaccagttcaagaactgcaagggctgctcctagagcagtccgccgaataaggcctagaagaggaaaccagaaagcaaaaataggtgatgttgaatctgaagaaagtggccccagcgaatgccaagatgatgaaaatttggacacagatgatacctctaagattgaagaaggtattaccaacaaaaacaaaggactccctgcacctgcttcaaaaccagcctggagaacaagggctacaaaaggaaatcagcatacaaaaatgggcgacggtggatctgggccttgtgaaactgggaaagatgatcagaagttggacacagattacatctctaaaatggaagtagataacattgataatgactgtggaccaccgccaggtgctcagcttttcacgttgggggagcaagaggtcaaaggtgtcaaattgaacaccgtggaggagaaacaagacatccctttccagagaacaaccgctgctgaagcgatgagtagcacgcctggtgagaagatagaacaaatggctgatccgttgcacgccatgcttctggatatgttgccactcctgggccagaaaaggacagaagatacaagcaaggcgcccttggcgaaagctgagaaggatccacctgcgataggaagctccacatccaattctgagattctgttgccagatgctggaacatccggggttccagccccagagccaagtgcagctccaccaaagaagaaaaaagtgagttacagagatgtcgttagtgaacttctgaaagattggtgagcgagcttggtcagtggggataacctgcggtctatgttttactcccgtaatcgctatcttgtaaataggacagcgccatgtaagtaaccatgtttgtagggtcaccttggctgcttgtcgtgccctgccctctggagctcacttgttttgcctgttgagaattttgactgttaatcctagcaacactgacgttgagttggaccaatatgcatgcggaatgctaggattctacagagtggaagtggaagcctgttgtccgctctctgcaatnggttatggatctttgcact

SEQ ID NO: 161811 - DNA, 401 bp, Zea mays
  unsure (1)..(401): unsure at all n locations
  Clone ID: MRT4577_79148C.1
gtcgcccatgcgtccgggtggcttttgctatggcacacgttcagcacgcagccacagcttcacaccgctcggcatgtactcctcgctcgttccttcgcctatctctagcgtcacaggtgatgcacagcggacgcgctaacatgatctgcatgtctacgcattcctactncaggtcatcgagagcaggagagggggcgggaggagacgcgcatcagcagctgaaggactccatgagctacaactcctacgtttaggataccgacttaccagccgggtcttaagggagttcgcaggaagaggagtgccaggacatttgtgttcactactcgacgccgttgcgatctgttctattaaagaatgaaaatgttgtcgttcttttagtgatcgaaccatcctggact

SEQ ID NO: 161812 - DNA, 351 bp, Zea mays
  Clone ID: MRT4577_79149C.1
ggggccgaatggaaaattttttcttttttaaaggggttcttggcaaaaataattaaatgattcccttttttggggaaaccatccccccccccaaatttggttgggaaaaaacggccttaaccttttaaaaaaaaattggagaatcctccatgcgccttattctggagtacctgtttttgttttgggggggggggggaaaaattaagagtgggctcaaatacgttttttggtaaaaaaggtggggggaataatgggcatgaaccccccaaaggggggggcccacgtgaagggtaagggttaccaaaaaggatgggtgaaacttaccatttcttttaatgttgggcaaaattt

SEQ ID NO: 161813 - DNA, 702 bp, Zea mays
  Clone ID: MRT4577_7914C.1
cccacgcgtccgcccacgcgtccgcccacgcgtccgcccacgcgtccggtatgattgcctggagccagtgcttcttgttggtaccctgcaggataacttcttggccagcttcttgctcgggtggggtataaccattggtgctggccttgcctcctaccccattgacactgttcgccgtcgcatgatgatgacatctggtgaggccgtcaagtacaacagctccttggacgctttcaagcagattgtcgcaaaggagggtaccaagtccctcttcaagggtgctggggcaaacatcctccgcgctgtagctggtgctggtgtccttgctgggtacgacaagctccaggtgatcgtcttcggcaagaagtatgggtctggtggcggctaaggatatattatgatgacgatgacgaacaacaaacatgatgttttaggtgcctttaataacatacgtatggaccctggacaccaattttaagtttagctctcgcagaggttggtgagttgtttgtagtgtggctgtgaccgcatccctttttgcgtcggagattggaaataagtgacgttagaaatcctggcagatgttttggggtagacgatttggctgcatcagttttttatttggttttgcgcatgcaaagggttgctcgaatgttatctatgttggtttcggaatcacagcttcctgtgtttggtgagcgt

SEQ ID NO: 161814 - DNA, 202 bp, Zea mays
  Clone ID: MRT4577_79150C.1
agcaaaaccactgggggagcaccacaagttatatcagggtcgaacccgatgcagagcctgactactgatccttacaacacacgggaggggggaatatccgacgaaccgatagcatgaaaacacaatccatcacagtccagctatgtaggggcgtgaccgcgtgacggcctaggagctgatgcgcctcgccgccttgctggac

SEQ ID NO: 161815 - DNA, 849 bp, Zea mays
  Clone ID: MRT4577_79151C.1
tcgaggccggccgggaccagcccaacaacaggagcgcggcggcccctccttccttcctcccacctctctcgcgcggcgctcgcttacctcgcctcgcattccgttcgagcaggggagcggcagtgagaagggagggaattaaggcaagatgttcatcgagagcttccgcgtcgagagcccccacgtgcgggtcatgcttgtggggtggggaggcaacaacgggtccacgctgacggctggggtcattgccaacagggaggggatctcatgggcgaccaaggacaaggtgcagcaagccaactactacggctccctcacccaggcttccaccatcagagtaggcagctacaacggggaggagatatatgcgccgttcaagagcctcctacccatggtgaacccagacgaccttgtgtttggaggctgggacatcagcagcatgaacctggcagatgccatgaccagggccaaggtgctggacattgacctgcagaagcagctcaggccctacatggagtccatggtgccacttcccggtgtctatgatccggacttcaccgccgctaaccagggctctcgtgccaacaatgtcatcaagggcaccaagaaagaacaggtggagcagatcatcaaggatatcagggagtttaaggagaagaacaagtggacaaggttgttgtgctgtggactgcaaacactgaaaggtacagcaatgtatgcgctggtctcaacgacacaatggagaatctgctggcatctgtggacaagaacgaggcggaaatctcgccatcaacactatatgccattgcttgtggtcacggaaagggtgccattcatcaatgggagccc

SEQ ID NO: 161816 - DNA, 1394 bp, Zea mays
  Clone ID: MRT4577_79152C.1
gagaggtattctttgtcatcgctcacagtcacagaggcagccactgccgacggccgacggcctcccatttcgctcccctcctactcctatgctgcggtccagcaaaagttcgggccttccggcaatccgccggcgcccggcggctcaaatcgcatctaccgcggctagacgttctctcttcctccctccgatccggtggggtccatttccttcaattgtggcagtggccgtctcgaaccctctataaatcccccaccccggacacccttccccgaccacacagctcaacaaaggagcgcggcggcccctccttccttcttcctcccacttctctcgcgcggcgctcgcttacctcgcctcgcattccgttcgagcaggggagcggcagtgagaagggaagggagggaattaaggcaagatgttcatcgagagcttccgcgtcgagagcccccacgtgcggtacggcccgacggagatcgagtcggagtaccggtacgacacgacggagctggtgcacgaggccaaggacggcgcctcccgctgggtcgtccgccccaagtccgtcaagtacaacttccggaccagcaccgccgtccccaagctcggggtcatgcttgtggggtggggaggcaacaacgggtccacgctgacggctggggtcattgccaacagggaggggatctcatgggcgaccaaggacaaggtgcagcaagccaactactacggctccctcacccaggcttccaccatcagagtaggcagctacaacggggaggagatatatgcgccgttcaagagcctcctacccatggtgaacccagacgaccttgtgtttggaggctgggacatcagcagcatgaacctggcagatgccatgaccagggccaaggtgctggacattgacctgcagaagcagctcaggccctacatggagtccatggtgccacttcccggtgtctatgatccggacttcatcgccgctaaccagggctctcgtgccaacaatgtcatcaagggcaccaagaaagaaacaggtggagcagatcatcaaagatatcagggagtttaaggagaaagaacaagtgggacagggtagtgtgctgtggactgcaaacactgaaaggtacagcaatgtatgcgctggtctcaacgacacaatggagaatctgctggcatctgtggacaagaacgaggcggagatctcgccatcaacactatatgccattgcccgtgtcacggagggggtgccgttcatcaatgggagcccccagaacacctttgtgcctgggctgattgatcttgctatcaaaaacaactgcttgattggtggtgacgacttcaagagtggacagaccaagatgaaatctgtcttggtcgatttccttgttggtacc

SEQ ID NO: 161817 - DNA, 363 bp, Zea mays
  unsure (1)..(363): unsure at all n locations
  Clone ID: MRT4577_79153C.1
tctttttactcaacacagcacanncanttccgcgcgcgttttttatatcgcgccgcgcgaacatttcatttttccnncaccaccaccacaaccagccgnctccccccgcgtctgtccccaaccaggtgttcaaaatcttctgccgtgccaactagaactactgcctggccgtccgcgacggcaccgtcttgctgtccccgctcaaccccaacgaccaccaccatcacttttacaacgacattcgcttcatcacccgggtcaaggactaggaaggcatgccggcggtcgcgcttgtcaacaaagccacgtntcttgccatcaagcacttcctcttccagtcccacccgatcaaactcccgcctt

SEQ ID NO: 161818 - DNA, 694 bp, Zea mays
  Clone ID: MRT4577_79154C.1
ataaacataaagttccatcaatttgataaaaaagtagcagcaagcttcaacaaacaaatgatcatgtgtgtctataatcatgagataatagagtaaaccaccaacatgtgttcttgttatcacacaatattcatgaggagataatagagtactcaacacagtttctgagtacagtttctgagtattgcaataggaaagataaaataaattgcttcatgtcatgacaataaaaaggacagacccaaagtgccaaaggagtacgcctccaaataaactaccaaaaaccagaataagtgttgagttttctgaaactatatgaagcaagaataatggatgccctgcaaaatgctgttgtaagtggcactcggtgggtgcttccaccaggcagatttcatagctccatttcaatgaagaagtcgttgtcgtcttcttgggccacatagtctttctcgtccttcaccagccgcattgtggaggtcgccatgtcgctcgcctttctccagctgccggcttgcaggatcctgggcccaggctccagcgaagagagggagatctgttgccttgcgcgagaaagagggagatccggtgattgcgcgcgaaaaaggcggcggtgcagaccagtcaattaaaaagtctcgccagtggcgggacggccccagaaacaaggacgcgtgggtgaccgggaatacggccg

SEQ ID NO: 161819 - DNA, 341 bp, Zea mays
  Clone ID: MRT4577_79155C.1
acgtgaagaagagtagacgatagcaggagacgacgccggcacgagaaaggacaccaacaacatcgccgagcacagctacaagaccggagcgtggaagacgataaacgagaagatggctccactctggaagacgacaggccagagtaggaaaaaaacaacggactacattgatttgacaccagagatagacacacgaatcgagctactcagaacactgagaagagactctgcgcgactaaatttatgtggagatagagagagcaagagtgatcacaaggattgaaaatatcgatgaggagcaagcaaagatggaagacgatggtgatcagaagcaagaagga

SEQ ID NO: 161820 - DNA, 380 bp, Zea mays
  unsure (1)..(380): unsure at all n locations
  Clone ID: MRT4577_79156C.1
cccctttctgcattaattccgcaacgaggggggcagcctccctctccggatcccccatctgctccgccgccggccagcgcatcgctccccttggctgccaggatgactgacgcgccatttctgcctcgtgggaggctcttcaggctgncccatcctttccggggcgtgacctggcacacctacctgggcgggcgctgcgatgtgatcacctccgttgccttccctcttgcgcttgctgcctcccccttgttcgtgatcgggcgcggcgcttacaacctgtctcatggaatcggcgtgcgggggtgatctgccccggggttgctcgttcttctactcggcgtgggctgtgccctccagactctgacgtcttctttgcttgc

SEQ ID NO: 161821 - DNA, 200 bp, Zea mays
  Clone ID: MRT4577_79157C.1
cggggggtggtcgagcaattacgggctcttctccgaggggccttaccgcttctagagcagcaagggaggctatgggcccaagccacgaagggaaggctccttgccgacagatcataggggggtggcgccgttttttttagcccaggcaagccccacgagcttctcagctgatctcccggagcatatagggcttctccgga

SEQ ID NO: 161822 - DNA, 218 bp, Zea mays
  Clone ID: MRT4577_79158C.1
gaaagatactgccgttgtttatgatgaggtggggataaagctgtactctagctgccgcttccaccaccgtagctctcattatacggactatcacctgcaagagaaccagcaactaagagactattcacgaagttcatcccctggccggtcctaccggccacagtatagagcctctcagcagacgaatcaccctatcttcttgccctgcagagggtgta

SEQ ID NO: 161823 - DNA, 287 bp, Zea mays
  Clone ID: MRT4577_79159C.1
atgacactcagctgtcatgtctggacatgagtgcccagggaatatgcccaagctatgccttgtcctcttgtcctgtttgcatttcactgggagcttgcactatgcagctccagtttcctgcagtgatcagggtcctgcaagcagtggggaagggggccaaggtattggaggactctcgcccagctttggaagcctcatccgcgtgtgtgtgtgtgtgtgtatgtgtagacaagctctcgctctgtcacccacgctggagtgcagtggtgcaatcgatggtcactgca

SEQ ID NO: 161824 - DNA, 1463 bp, Zea mays
  Clone ID: MRT4577_7915C.1
ccccgcgtccggggtggtgagaagcagttcaatggacttgttgatgtttaccgcaagacccttgccagtgatggtattcgtggcctctaccgtggattcaatatctcttgtgtggggatcattgtgtaccgaggtctttactttggtatgtatgactccctgaagccagtgcttcttgttggtaccctgcaggataacttcttagccagcttcttgctcgggtggggtataaccattggtgctggccttgcctcctaccccattgacactgttcgccgtcgcatgatgatgacatctggtgaggccgtcaagtacaacagttccttggatgctttcaagcagattgtcgcaaaggagggtacgaagtccctcttcaagggtgctggcgcaaacatcctccgcgcggttgctggtgctggtgtccttgctgggtacgacaagctccaggtgatcgtcttcggcaagaaatacgggtctggtggtggctaaggatgtataatgatgatgacgaagaacaacaaacaggatgttttaggtgcctcctttaagtaaacatacgtatggaccctcggacaccattttaagtttgctctcgcaaaggctggtgagtttgtagcgtgggctgtgaccgcatctctttttatgtcagagattgaaaatagttgacgttccgcatctagtcatctcgtctcaggttgcggccgaaccagagccccgtcccaactccaccacctctcagcaagggcggcgccggccgcggcgtcggcgggaaccgggcctcgctctccccatctctccgatcacttctgtcctgtgaaaatggcggatgaactacgctcaacgtctgtgggtcagaagttccatgggcagtccgtgctgttgagcagaatctcttcctattccgccatgaacaaccctttattcaacaatgcctattctgcttacaatgtgccccagaggtcatatcatgggatgaatgcaactgctggactctcatctgtcatggcaccatctcctgtctttgcttctgccccaaaagagaaaggcttttctggatttatgatcgaccgacacgactctcggcaacggatatctcggctctcgcatcgatgaagaacgtagcaaaatgcgatacctggtgtgaattgcagaatcccgcgaaccatcgagtttttgaacgcaagttgcgcccgaagccttctggcggagggcacgtctgcctgggcgtcacgcatgatgggtggagtttctgctgttgtctccaagacagctgcagctccgattgagcgtgtcaagcttttgattcagaaccaggatgaaatgctcaagactggcaggctttctgaaccgtacaagggtattggggactgctttggccggacatcagagatgagggttttgtctcactgtggagaggaacacagctaatgtcatccgttacttccccaacaggcattgaactt

SEQ ID NO: 161825 - DNA, 265 bp, Zea mays
  Clone ID: MRT4577_79160C.1
acgacactacacctgtcacatgcttccccgacgaccagggcggtcagctgaaccatggcagactcctaaggcaccgtaggtagtcacccgttcgcaccctcaagttcatgaccaaccagctgctggcccgaagcaatacgcgcttgaggagatccaccccggccgcaccaacgtctacaaggcggagttgaaggacaggcttgccaaggcctacgaggtgaaggaccacaacaccatctttgtctacaagttccgcacccacttc

SEQ ID NO: 161826 - DNA, 332 bp, Zea mays
  Clone ID: MRT4577_79161C.1
gggggggggttttttttttttttttttttttttttttttttttttttttttttttttttttttttttttgggacatccatttcattttaccggaggaaggctcatataaatttaaccggatgacagcaaagaactcaaggttttgacatgggggggggggacaaggagcaaccctcgctaactggggtcaaaggactggggacgatccgactggggggagatccttacagcaacagccaggcccagttttgccagggggaccaaaaactgggggatcttgatgacaaaccccggggacttatactggataaagggcggttgattgggggggg

SEQ ID NO: 161827 - DNA, 1619 bp, Zea mays
  Clone ID: MRT4577_79162C.1
tgggtaattcggcacggggtagagcttagcatagtagctccacacgcgcacggaggtagtatagccgggagggggcacagagagaggagcgaacgagaggaaggagcagcggcaactacacgccagagagagggaaggggaggttggccagagagccgagagcagccctgcagtcgagagcatccgactgctagctactagcaatagcataggcagataagctcgggccgggccggggcacgcgcacaatgaggtcgcggcggtggcacagcgtggtcgccgtagcgctggcagcggcggcgtggtggtggtgcgcggcggcgcaggcgcaggcgcaggcgcagctgagccagagctactacgcgtcgacgtgccccgacgtggagacgctggtccgcggcgccgtcacccagaagctgcaggagaccttcaacgcggcgccgggcacgctccgcctcttcttccacgactgcttcgtcaggggctgcgacgcgtccgtgctgctgtcgggccccgacgacgagcacagcgcgggcgccgacaccacgctgtccccggacgcgctcgacctggtcacccgcgccaaggccgccgtggacgccgacccgcgctgcgccaacagggtgtcctgcgccgacatcctcgccctcgccgcccgcgacgtcgtctcccagacgggcgggccgtactaccaggtggagctggggcggctggacggcaaggtaggcacgcgtgccgcggtgaagcacagcctcccgggcgccggcttcgacctggaccagctcaacaagctcttcgccgccaacgggctcacgcagaccgacatgatcgcgctctcaggtgggcacacgatcggggtgacgcactgcgacaagttcgtgcggcggctgtacccgttcaagggcgccgccgccggcccgccgatgaacctctacttcctgcggcagatgcggcggacgtgcccgctgaactacagcccgtcggcgttcgcgatgctggacgccgtgacgccccgcgcgttcgacaacggctactaccggacgctgcagcagatgaagggcctgctggcctccgaccaggtgctcttcgccgaccgccgctcccgcgccaccgtcaaccgcttcgccgccaaccagaccgccttcttggacgccttcgccaacgccatggccaagctcggccgcgtcggcgtcaagaccgccgccgcggacggcgaggtccgccgggtatgcaccagggtcaactagccctgcccagctccagatgcaatgcatgcgagccacgtccacgtgcacatgaaatgaagctagctagctgctagcctagctttagctagctcgttattactaggggcgccgggggttgggaaagaatgcttcatgagtcatgtccgtccattcatccatccatccatccatcacacggttcacagtcagtcacagtgtactattgattcgttggtccgccgattcttttcttttccttggtgattgttgtgtatgtagcagaagtaataataattaaaaaaccatgtaacaagaagagggatgagctttgagctccacacttgtactgcatccaatccaatgtaaatgaatgccacggttcgtcgtcctcaa

SEQ ID NO: 161828 - DNA, 340 bp, Zea mays
  Clone ID: MRT4577_79163C.1
attattcattgaactttattatatcattatagtagaaatagagacaatgtcaaattataaatgtaccttctggttggaaggagatgaaaatacaagggtgacgcaaaagcaaatgccaaggtaacgtgaacaggacgggggtactgtaaacatatgtataggaacgggggataaatgatacaaaattacatacatgtgccttaacattaggggataattctagagcaatatatcgaggcctagaaggccttttgaactttaaatgcgtacactttcttgcgaagatgccgaacctgttctggttcacagtttctatgctgagtaaaccacttcaagcttt

SEQ ID NO: 161829 - DNA, 322 bp, Zea mays
  Clone ID: MRT4577_79164C.1
tttttgtttggttttttttattttttttggggctaaaccctttcctaatttcctgctttacttccgcgtgccggcgacgccaaaactctttttttgcgccacccgaattcaataaacctggcccttcggtcacaaaaacaaaaaggccccctccctgtttgaaccaaacaaaaacccctcccaaaaaaaccccattttggcccctaaaaaactagcaaaaagcccccccccgggcgccaaatccaacaggtgcaaaaccttaagggggggggggacccgcccctaaacggggcaataaaccccccccccccgtggaaacccc

SEQ ID NO: 161830 - DNA, 285 bp, Zea mays
  Clone ID: MRT4577_79165C.1
cccacgcgtccgagcgctaactgcaaccatgataacatgcgctcctgacctataatatttgagagtcaaatattataggtcaggagcgctaactgcaaccatgatatttgactctcaaataatttctgtactgctgctcggcagcgtgcatgcaaactgagcattttcgagtcagcctctgcgtgtgtgcgggctaattcaactatgaaattcattcgaatttctttccactttcactttggtatcttcagtgaatatgtaaatctttgatgttcttctgcttta

SEQ ID NO: 161831 - DNA, 616 bp, Zea mays
  Clone ID: MRT4577_79166C.1
ccgcagcttgggcacggctttgcgaggctgaccctgccgcagaccccgtcgctcgccgtcgcgggcgggccttcttaggaggagctgcataagaagcgggaggaggaatacgacccctttacctccaccaatgcgcaggacctcgcgcagccgcttgtccatgcccagatccctttcatgatccatgtcggcaacgaccactacatgaatgagcgcctctgactacaggctgagcgcctggtcctgcccgttatgatcatggggagccgagggtcaagggcctgcctacaaggccatacagggacgctagtgagtggtagctattactgaatacaccactgagcataccccatcgtgattgcttcataccttgtatattcttcacataccactggagatgcataagggacaacaaatgacatgctcactgaaccaggagacgaacctgtttatcactatgcacctggagtgcagaaagaaaaccttgcaacgccgaagcaataaaacgaagaaaactggagcctgcagagactactgaagccattctgcgtatcttaaacatggactggctcagtatctacacttctggatataactgcgctgaatgatcagtggc

SEQ ID NO: 161832 - DNA, 897 bp, Zea mays
  Clone ID: MRT4577_79167C.1
ccgagtcgccggccgggaaaaaaaaaaaaaaaaaaaaaaaatacaaagcagaatcatcgcctcctaattcctaaagcagcatcggctactaccactgtctcttgctcacacagctcgtctgtgcagcacctagctagtgaacgagaacgaccatggcgtcccaggccatcgagagccaccgtgcaggcgctgaggtcgtcaccggaggagacgcaatctgcaggaagaagtcaatcgagctgctggaggagctcggcctccccaagggcttcctgcctcttgaggacatccaggagttcgggtacaaccgcgtgacagggttcatgtggctggtgcaggggaagaagaaggtggagcacaccttcaaaaagatcaagcagactgtgtcgtacgccactgaggtgacggcattcgccgagaagggcaagctgaggaagatcaccggcgtgaagacaaaggagctgatgctctggctcagcgtcgtcgaggtctacgttcccgaggcctcaccagagaaggttaccttcaagactggcactggcctatccgacaccttcgatgcctctgcctttgcgctgggagagtaattagcagtcataaaaatggttggcttcaaaagacatgcataatctatcttttgtatttgtaaatttttcatatatcttgagatgagtttatgacccatactcatgggcgatgcccattgcaaacatttctatgattttcttgtttatcggatataattttaaaaatatctcacttcaaaatattaatattaaaacaaatgtcctcgcaggccgcagccatatgtagttcttcttaaaaaaaaaaaaaaaaaaaaaaaaaaaaaaaaaaaaaaaaaaaaaaaaaaaactcgagagggggggcctgtgtacc

SEQ ID NO: 161833 - DNA, 385 bp, Zea mays
  Clone ID: MRT4577_79168C.1
gggaacaaaaatttccaggactttttccaagggggtttaaaaaaaaggggggaacaaagcaacccccttggggggaaccgcttttttatggcttttacaaaaaaacgggattgctccatcgggggggttttgtacaaggggggcccaaaaggaaggcccccaactttgggggccccgggcaagggaaaaccaaaaggcctttagctctggttccaccctctaaaaagcagggaagggggcctttgaaaattggggggtttttaaaaggggaaacactgggacctcatgggggcttaaaaaacccccgggctttcttaaaaaaaaagactaggtttagggggaacttgaacctaaacttgtggttttttttcccaaaaattggggg

SEQ ID NO: 161834 - DNA, 926 bp, Zea mays
  Clone ID: MRT4577_79169C.1
acccatgttttgtgcgcgcacgcgtcctgcttcttctcgccaacgacaagccgcacgcagcgtctcgccagctagctgatcatgagcaacggcgacacgctcgacaagctggtggtgttcctggcgaagcgcgacggcatcgacaagctggtcaagacgttccagtacgtgtccaagctggcgcactggggcgccgagtcttcgctcccggagctcgcgcagcgcgccaagagctgggagacggcgtccgggctgagccgcaaggcgttccggtcgggccgcttcctggccgggttcaacgcgctgcgccgcggcccggtcccggtcccgggggagctcggcgcgctggccgtgctggccaacgccggcgagatggtctacttcttcttcgaccacttcacgtggctgtcccgcgcgggcgtgctcgagccctggctggcgcgccgggccagcttcgtgtcggccttcggcgaggccgtcggctacgtgtttttcatcgccatggacttcatcatgatcaggcggggcctgcggcaggagagggagctgctgagggaaggcgccaaggacgccgcggagaaggaggtgcggaggatccgggtggacagggtgatgcggctcatggcgacggcggccaacgccgccgacctgatcatcgccgtcgcggaaaccgatcccaacccgttctgcaaccacgccgtcacgctggggattagcggcctcgtgtcagcgtgggctggctggtacagaaactggccctcgtgaactgggccgcttcggcctacatgtgcatatttttcattcacttatttaactgcggctgcgatgcatgatgatattgccagatttgaaccttttctatctccagcaataacctttaaggcctaatttgaaaactcaaaaaaaaaaaaaaaaaacccgcggcc

SEQ ID NO: 161835 - DNA, 2222 bp, Zea mays
  Clone ID: MRT4577_7916C.1
gctccggccaaccccagaacgaccagtcaggaaacgcgatgtccagcgtggcctcactgccgcagtaccggaacaacggaggaggaggaggctggggctgggccccgtggcgttcgcagggtaccctcgggccggcgggggtctggccgaaccagagccccgtcccaactccaccacctctcttctctacggcgcgagccagggcggcgccggccgcggcgtcggcgggaaccgggcctcgctctcctcatctctccgatcacttctgtcttgtgaaaatggcggatgaactatgctcaatgtctgtgggtcagaagttccatgggcagtccgtgctgttgtgcagaatttcttcctattctgccatgaacaaccctgtattcaacaatgcctattctgcttacaatgtgccccagaggtcatatcatgggatgaatggactggcgggtactcgccgctcgatgcggccgggggttttggacttttcactcttccaggaatccaaaccctgggtcttctataccgtgcctcatctagtcacctcgtcggaggttgcggccgaaccagagccccgtcccaactccaccacctctcttctctacggcgcgagcaagggcggcgccggccgcggcgtcggcgggaaccgggcctcgctctccccatctctccgatcacttctgtcctgtgaaaatggcggatgaactacgctcaacgtctgtgggtcagaagttccatgggcagtccgtgctgttgagcagaatctcttcctattccgccatgaacaaccctgtattcaacaatgcctattctgcttacaatgtgccccagaggtcatatcatgggatgaatgcaactgctggactctcatctgtcatggcaccatctcctgtctttgcttctgccccaaaagagaaaggcttttctggatttatgatcgactttatgatgggtggagtttctgctgctgtctccaagacagctgcagctccgattgagcgtgtcaagcttttgattcagaaccaggatgaaatgctcaagactggcaggctttctgaaccgtacaagggtattggggactgctttggccggacaatcagagatgagggttttgtctcactgtggagaggaaacacagctaatgtcatccgttacttccccacacaggcattgaactttgcgttcaaggatcacttcaagcgcatgttcaactttaagaaggacaaggatgggtactggaagtggtttgctggaaatctggcttctggtggagctgctggtgcttgctctctattctttgtctattctctggactacgcccgtacgcgtttggccaatgatgccaaggctgcaaagaagggtggtgagaggcagttcaatggactcgttgatgtttaccgcaagacccttgccagtgatggtattcgtggcctctaccgtggattcaatatctcttgtgtggggatcattgtgtaccgaggtctttactttggtatgtatgattccctgaagccagtgcttcttgttggtaccctgcaggataacttcttggccagcttcttgctcgggtggggtataaccattggtgctggccttgcctcctaccccattgacactgttcgccgtcgcatgatgatgacatctggtgaggccgtcaagtacaacagctccttggacgctttcaagcagattgtcgcaaaggagggtaccaagtccctcttcaagggtgctggcgcaaacatcctccgcgctgtagctggtgctggtgtccttgctgggtacgacaagctccaggtggttgtcttcggcaagaagtacgggtctggtggtggctaaggatgtataatgatgatgacgacgaacaacaaacatgatgttttaggtgcctcctttaagtaaacatacgtacggaccctcgacaccattttaagttcgctctcgcagaggctggtgagtttgtagcgtggctgtgaccgcacctctttttatgtcagagattggaaataagtgacgttagaaattgctgtcttgctgcatcagttttttatactccgttttttgttttgcgcgtgcaaagggttgctcgaatgtatctatgtaggtttcggaatcacagcttactatgtttgatgaaggtgtatgttctgtgacctttgaaagcatcacttcatctgtctagcgctacatgattttaaggatcaaaaaaaaaaaaaaaaaagcggcca

SEQ ID NO: 161836 - DNA, 253 bp, Zea mays
  Clone ID: MRT4577_79170C.1
agaagatgaattaatgaggaaagtcattgagtttataacagttacctggtgtgcgaagtgagatgcattggaccgggcgcacgggttgctgagggtgtggtttgatatggttgaacctgaaagcaaccggtatttaaacatttttgcctggagttatgaacattattatgtaggatttgattttttatttgaagttgatgggttgtattttttttattattttttttttttaaattttttttttttctacatt

SEQ ID NO: 161837 - DNA, 415 bp, Zea mays
  Clone ID: MRT4577_79172C.1
tgggcggacccttgggcggacccttgggcggacccttgggcggacccttgggcggacccttgggctataacctctaaaatattcttcatgaaaacatattagttcctgcgtaaatgtgatttgcaaacttatctgctgtttaaattgtagaccatataagttgctatcctatctgctgacgaagtcggtcatgcattgggctagcttccatgttcattttgatccttttcaagcatcatttgtaattcttaaaggttgaacctatgctgtgattttttatttcaaaagtatagtgatctattagcagtttgatttcatgtgattcatctttctaatgttcttgatagtgattttctcgatgaaataattggttcatgatgtttttggtcatatccaggtagctgctaatggagat

SEQ ID NO: 161838 - DNA, 465 bp, Zea mays
  unsure (1)..(465): unsure at all n locations
  Clone ID: MRT4577_79173C.1
gtgggtgtgtgtgtgtttttttttttttttttttttttttttttgttttttttnnttttttttttttttttattttttttttttttttttttttttttttttttttttttttttttttttttttttaaaaaaaaaaaatcttcaacctaagaaccacttggggtgtgggggggccccccccaaaatttgggcccccttccattttccaccaggcaaccgttcccctggggggcccctttccctaaaagaaacaacccaccgggggaaattaatgctaaagggggggggaatcccttgcccatttttaaaaaaagggggtttttaaaacccttaacccgccccaaaaaaaaaacccctctttgccgaaaaaatgtttttcaaaaaagggaacctttatcaaaaaataatgggaccccaaaatctgattttttctgtaacccctttcggttttggaaataacccaag

SEQ ID NO: 161839 - DNA, 645 bp, Zea mays
  Clone ID: MRT4577_79174C.1
gggtacctcgaggccggccgggccgggagtaccgactgagactgcatgctatgctgacttcaggaacggggatgaaaggtcaactgttattattctggtcagaaaaaaaattaaaaggctgcaggaaaatagagcaatcccgctgcttactgcggtcgacttgtcgttggcgtctcttcttccgctcctacgccacgacgtatgtccatataacctccgctaaagctcctcttgtcgcggccatttcgtcagccatttcccagattcccaataggagcaggttcccggtctgatatccaatcttttcagttgctcagcttcaatcgtcggaaattcctccagaaagaaaactacaatcgcccccccataggtggaaaaggttaccatttctgacagggtgaccagactggctacgttttgccgagcaaaggtatgacgtccgatcggttacagatgttgatccggcgagggaccgacgctgtcgaagggaatgcagacggatacgcaaagaccgacaaggtcgaatgcgatgggagccaatgcgcacccgtcatctgacgacgacgctgacgactactgtctactgggcggacgtcagtcgatgctgccgcacaagactgacaacgagcgcgaccactaccgcat

SEQ ID NO: 161840 - DNA, 235 bp, Zea mays
  Clone ID: MRT4577_79175C.1
aaaaaaaaacaggcctttgggcgggcaatttactagtacaacattagtcacaacatgcccaaacccttttaaaaaaaaacaaaacattttttttttcttaaaggaaaaacaaacaatccgaaaaaaagggggctggggggaaagcttcaaaccatgaatatgcgttccaaaaatgggaacccaacgccatggtttgaccaactaattaatctttcggccccggggggggccccgg

SEQ ID NO: 161841 - DNA, 340 bp, Zea mays
  Clone ID: MRT4577_79176C.1
gcgacaaactatcttctataccttatcagatctggtttcagctcatccaaagagcctctctctgttagccgtaacctcaaagctcaattacgctgatatgcttgaaaaaaggataaaatcaagatttggaaaagctactcttgatgtttcttatcccattttggatgatgtgttggcctcactgaaactctggttaactttaccactgggagacgacagtcctcctcattttcatacttggaacaagaaaattgttaaactttttgagattgaagatgacacagagaaccattttctggcacttataaaaaacgaatactcgtacacgagagacatgttt

SEQ ID NO: 161842 - DNA, 432 bp, Zea mays
  Clone ID: MRT4577_79177C.1
atggtgcgtgtggcggggcttagacacgcgttggtgcgcgtgtgggggtggcggggagtgggggcggcgttggtggcgcgcggcggggaggtgccatgcgcggggagcggcggcgtggtggcacacggtagggcgtggtggcgcgcggcggggaggggcgtggtggcgcgtggcgtggccgggcggcggcggggaggggtcgagcgcggggagggcccgagcgcgacggcggggagcggcggcggcgagggagttagtgagagtgagagtgagaaggagaagagaagggtctcagatttgaactgcaagtcactcgaaacttggaaaaccgtgcatgcaaaaattatatacatgctagttagcacaagttacgaccgatttcaggagcggaccgaaaacttcgagcaacatgcttactcaacatggccgtga

SEQ ID NO: 161843 - DNA, 266 bp, Zea mays
  Clone ID: MRT4577_79178C.1
gggaagtgggggttttccaaataatttggggggaattggtacacattaataagttacatatttgtgcgtgtacatgggtgaggggggggggggggacattaataatttggggtaagaatttttaagggggtttttaaaaatgggattcccaccggtgaatttgggattcctaaacggaaggggtacaagatttgcaaaggaattaattcaattttgggggaaaagaggtgtctttttaaaaaaaaaatacctttttttgtggaagg

SEQ ID NO: 161844 - DNA, 183 bp, Zea mays
  Clone ID: MRT4577_79179C.1
ttttggggcagaagcatgagtcattctctgagagcaaaattctcgtccttatcaaggacctatatatcacagctccaaattttcttgagttgacacacaccatgttatacaattttacacgctagaatgctaaccatatgcagatagaacctagccatagaaaatataataagaaaaaatgac

SEQ ID NO: 161845 - DNA, 535 bp, Zea mays
  Clone ID: MRT4577_7917C.1
cattgggtacctcgaggccggcccgaagcacggctcgtttatagtgccgagctgggcccgacacgagaaccgtgccgtgcttgggccgctggctcggcccgcagtgccggcccggcccgcagtgccggcccggcccggcacgattatatgttttttattttacaaaatataatatatatatatttacattttatattcgatatttacaacaaatgcagtcgagttctactggttagtctgtttcagttagtgctttcagcctgttagagggaggtcgtgggttcaatttctcacccagacatagttttttgctattttccctcatttaataggagagcacggcccgattatccatcgtgcctaatgggcccgtgccgggtcgagccgggccgcccgtttgggcatctatagtccaggtccagtccagccatgattaagcacaggccgaggccccccaccgttgagccatcgatcgaccggtcctgtcgtcgtcctgcggttgccaagcattaaaaaaaaaaaaaaaaaagcggcc

SEQ ID NO: 161846 - DNA, 101 bp, Zea mays
  Clone ID: MRT4577_79180C.1
gacaatgccaccagctgtgaaagttcaggacatgatgaacattccgacgtctagagaactcgagctgacgtgcttggactgctcatcgtcgaacttgctcc

SEQ ID NO: 161847 - DNA, 271 bp, Zea mays
  Clone ID: MRT4577_79181C.1
caatgttacgaatgttgctgtgaaggatcttaagcgtgggtatgtggcctccaactcccgggatgaccctgccaaggaggctgctagcttcacgtcccaggtcatcatcatgtaccaccctgggcagattggctacggccatgcgccagtgctggactgccacacctcgcacattgctgtcaagtttgcggactcattaccaagattgatatgcggcctggcatagagcttgggcaggagcccaaattcctcaagaatggtgatgctggta

SEQ ID NO: 161848 - DNA, 626 bp, Zea mays
  unsure (1)..(626): unsure at all n locations
  Clone ID: MRT4577_79182C.1
cgcccggcagccgtaccccccttctcttcgtcgccgctcagcacaagcctgtcgtcgtcgtaaacacagagagggagctcgtccatgtcctcctgattcctcttggcgatcgagggagtggccgaccggcgataatctagctagccagcctcgccatgcctcgccagaggaccctcacctccgaggcggccggcgggcggctgctgctcgtggtggtcgcggtcctgctatgcctgtccgtgcctctggggcgtgcggcacccccgggcgcggaggtcgcggagttccctgggttcacgggcaaactcccctccaagcactacgccgggtacgtaacagttggtcgacatgagcaacgaaagagacacctgtactactaccttgccgtctctgaaaggaacccaagcttggatcctgtggtcatctggataaatggcggtccagcatgttcagggtttagtgcatttctgcattcatttggaccttttcgaatggagggctcccaattcatatcaacgacggtccacgaataaccgtgaaccttactcatggacaaaaatggctagctcctcttggtcaatccccacangtgtggctatcntacctgatcntgaagangactaccc

SEQ ID NO: 161849 - DNA, 326 bp, Zea mays
  Clone ID: MRT4577_79183C.1
ggcacaaacacaaaccggcaagcgcgcgaggctaaaaaacaagggggcccagcctgcgcttaaaggtgcatgacaaggtcccagtaaaactgctttactgagcacagcaacccccaataaaatcacatgaacctaaccccttcgcccgcataaagctcacatgggcgcttcacactatttacatcattgggtccagatggctgcttcaccccattacatgcatgggctggctggccctcacgaacccgctgctgaaccctaacgataacacgacaaatcctatgctgaaccccaaccaaattcaatttaaatcctgtatgaccccc

SEQ ID NO: 161850 - DNA, 188 bp, Zea mays
  Clone ID: MRT4577_79184C.1
accgtgtccatcaggaaacatatatagtataacagcggactgatagtgggatctgagcaatagagcttaggtatgcgagcgagccgtaaggaaatgtaatcgtcggcaaggcagcttgtattgaatagtggaggtggaaacaagaatgccttcaaagcacttattgctacaaaatacagtgggatcaa

SEQ ID NO: 161851 - DNA, 532 bp, Zea mays
  Clone ID: MRT4577_79185C.1
acaagctttttttttttttttttttttttttttatttttttttttttttttttttttttttttttttttttttttttttttgggggggaccaagggttgttttttgcccaccgatttcccccctggttggggtttccccccccacccggcggtttgaccaattttcccccttttttttgcccccgcttttttttttttgccctggttgggggttgggcttaccagccacccggatccgtggttccaaaattggttccttgggttggatgaaccatacttggtgggcgcccctttttttccccccccttcccccacccttggtccctgggccggaccccccttagggggaatttccaccccctggggggcggttcttgggggacccggcctgggacccaacttgggggaaacaagggcaaaagtggttcccgggggaaaatggttttcccttacaatttcccccaaaattccaacccggaggataaaagggaaaacccgggggggcctaagggggggcctacccacctttatt

SEQ ID NO: 161852 - DNA, 678 bp, Zea mays
  Clone ID: MRT4577_79186C.1
gatcggtgcgtaccgggagcatgtagccgaaggttccggcgacggcggacatggtgtcgtgtggcgtcgtgccggcggcttcgacgagcatcctggcgagcccgaagtcggcgaccttggcgttgagctccgcgtcgagcaggatgttgctgcacttgacgtcccggtgcaccaccggcggggagcactcgtggtgcatgtagctcagcccccgcgccgcgcccacggccaccctcaccctcgccggccagttcagcggcgctcgcctgaccgagggggccctcgccggcatcgagctcccagccggtgccggccacctgtggccgtggagccacttgtccaggctgccgttgcccatgtactcgtagacgaggagcttggtctccgcgcgggagaggcagcacaggagcttgacgatgttggtgtgccggacgtggccgagcacgtccacctccgactcgaactcccgctccagcttcctctccaccttcccgccggtccagatccgcttcacggccaccaccgtgccgccgctcgcgccgctccggctggggcactccacgcggtacacccgccccgccccgcccttgccgatgaggttctcgtcggcgagcccgtgcagcacggggccctcgtcgaagtccagcggctggaaaggggtgagcttccaggcttcct

SEQ ID NO: 161853 - DNA, 544 bp, Zea mays
  Clone ID: MRT4577_79187C.1
aatcccaaagaggcgcgtccttccactatttcccagcgctctgcgtgtgactcgggtggtatgatgtctactgccaacgttagctttatggggttcgtcgaggcgcacaatgtgcaggaccgggtcgccaagctcttataaactggaagatctgtcgaggccgggctccgcgcaagtacgttcagagacccggagaccctcgaagcggcgaggagatcgcctccagcgcgctaggaggaaggccagacgcgacctcgccgtgaggccggccgggaggccttccaaaggggacctggaccaggatgacgccatcacgagcgcgtgcggatacttcacagggacgaggaactggttgacaaacactcgtaggatctggctcagctggacactcgggacgacgatgagctgctccgcgcgcgcaaggggcgttgcatcccgggaggcgcgcacctgctgtgatactactgcgatgccgatcgagaggcggacggagagacattcaagatgtggcactgtatgtacgatgacatgctcaaggagccct

SEQ ID NO: 161854 - DNA, 353 bp, Zea mays
  Clone ID: MRT4577_79188C.1
ctgagttttttttaaagggctccctggacctggagctattcctggttgagacaacaggactcagctgggctaccaggtaccaaataacacttgacacaacctggagctgaaattacctgcacgaaaaatttcgggtttgcattatgcactgtgatgtcaatacagaaaacatactcttgggtgagtcattcatgcctaaggctgctgatataacactagcagagctcttaggcagagacgttatgcttgtattgacaacactgagaggaacaaggtgttaccttgcgcctgaatggatcagtgatgtggcaattacagtgaaggcagaagtctttagctatggcatgatgctc

SEQ ID NO: 161855 - DNA, 485 bp, Zea mays
  Clone ID: MRT4577_79189C.1
ccggtcgaccacgctcgcccgtgtccagattcagaactagactcctccggtccggtcctccccctcccgccccgttcgctccagcgctcccgccccgtttgccattcactgcgatggcgctcacaggagtcacgtacgcgggctggaaagagccgactggccgtcggaagctggggtctctaccggggccgggggttcatgctccaatcgcgcgccgctagggcgaggccactctcgcgctcgctggagaggaacgagcacatgcccagacatgtctgccgagttcactcgggcctgaggtatggcactgctaagtaccacgggttgaccactgtaactgcggtgcatgggtgggatggggtcatcatcaccactcgctctgtcaacaccctgatcagcttacatgctgggctgtgattacgggtcagaggtttttgctcagtgctgcattaccctggtcaagcgtggaacgtgttagcttgaga

SEQ ID NO: 161856 - DNA, 426 bp, Zea mays
  Clone ID: MRT4577_7918C.1
aactaaatataaatcaaaaaacaaacaatataaaaaaaaacaaaattacatacacatacggggcaaaataataaactgttatataatataacacaaaattcaattcactagccatacattttacaacaatcataactataaaaaaccgtggcgcctcccaaattaatccaactttcatcacatccccctttcaccatatatcttttttttgggtcaccccaattccaatccccctccccaacttttacacagcctgaatggaaaaaaccatgcgctctccaaatttaaattcttcgcaacaattcccctttttacccgttgggttaatactaaagtggccagacccatacccccttctaaatattgtcccacccttatttttaaatggaccccccccttatctccccctttaaccctgggtgtttt

SEQ ID NO: 161857 - DNA, 315 bp, Zea mays
  Clone ID: MRT4577_79190C.1
attttggaatcgagacctacgttccactctcgacgaagcctagacccatcgaactacgctgagcaccggcacctcgatgtctccacgcgccatcccgcagcagcagggacacgcaaacttgctgtcgcctatcacgacaaccgcctccgcggcggagccggagcgcggcgcccgagatccttggtcgcctgctagggctccggctagaggttcccctcgaacgtgtcgaacgtcgtgatcctccacgatggcatgcgtctgtcgtcgggccccgggcgctgctgcatgcattaacaggccactaccacgtcgttc

SEQ ID NO: 161858 - DNA, 635 bp, Zea mays
  Clone ID: MRT4577_79191C.1
tctctgccggactctctcctttttcccatctcctttctaccgctcaggctcctgttcttttattagcgctgccgcctccgcctgggagcttcatgtgtcggtcgcctcccccgtctcccaccccagcggagtgggacttcaactccgctgagccatccctttgccttcctgtctcttccccttctctacaaatggagaatgaagtcgctgccatctcttccgtttctccctctctcccccactcctctctagtggagacagcagcaccattattgacgctaatggcactgacaactccattcctctccccggcgctccctctgctcttccccctctctataaatcgcgagctcatgacccgtggagcctgttcctggctgcccaacctctccacgcgctctgttttctctctcgtcgtggaactcgccgccgccgcccctattcgtcatcgtcggagtcaccgaacacctcctgtcgccagcacgtgggttcccgagcgcctcgtcgatcccgccgccggtgtcccgctgtctcgactgccggttggagttcctgcctcatcgttgaccatcaccagctcgcctgtcgcgctgtgcgtagaaacagagaagagaaggttaaaggtagaagaaaga

SEQ ID NO: 161859 - DNA, 653 bp, Zea mays
  Clone ID: MRT4577_79192C.1
gcccctcctcgagtttttttttttttttttttttttttttttttttttcaagaaaaaggcccttttttccttaaggcagcggggggcccaggtccctttcccggggaatggtcctttcctaagggaaccggcggttgatttcgaaatttggggagagggcaggcttaaccccaatttaaaatccgttccaaccttggtccccaccccaccgcaaaaataattttttaattgattgcattaccccaggcccttgcccaggcccactttttacaaacccaatgggggggcaactttaggggcccatggcccaaattggctttttgacaaatttaaaacccttgttcaatcaggtaatcgccgaccctttccaccaccttttggcttggccctggagtcttgggttaatcttaaatcccgttattaagggccttgccagttttttggatagaaaggcctccagggcctttttttcttgggttgacacctccaggttaacctgggatcaccttgtccttggaccctccaacaaaaaaaccagtgggggcaaaagttccaggttaataaaagtcttttataatccaagaaccctcttaaggttttacctgggggaagttttggaactgtccccaaaccttgccgtcggggccaacaat

SEQ ID NO: 161860 - DNA, 612 bp, Zea mays
  unsure (1)..(612): unsure at all n locations
  Clone ID: MRT4577_79193C.1
gccgggnaaaaaaaaaaaaaaaaaaaaaaaaaagaaaaaaaaaaaaaaaaaaaaccaaaaaaaaaaaaaaaaaaaaaaaaaatgaagccctgtcagtggtcgccgaacacaaaaaccacacagcctggcctgcattcccccacgcgggggtgggggaccaaaatctcgatccccattttttcgagcgagggggggctgttcggaaagggtaggtacaaggggggggccctgggggccatcgggctcctagggctttggtccatgttcgccgcctccgtaacgctgggcttgtcctccgtggatctcgccaccacgttgggggacgcgagcgatccgttcatcgacgaacttgatcccctggacgattagcagttagcaccatgctaaactgttaataaacagctacccttacatgaactttagtctccattggggcagggggatggggcaaagagaaaagctagggcgccggatgggggatgtgtccacccgcccagatattcatgtccggttaccacggttctggcaagaagcattgggggctgcttttgaggagcttgcggggggtgttgcgctgcctacgggtgcgggtggtggggggtggggggggtg

SEQ ID NO: 161861 - DNA, 306 bp, Zea mays
  Clone ID: MRT4577_79194C.1
tcgttttataagaaacaaccccatatacgggcacggggtgatttatactgaaaaaatctatctctgtgctagagtggagcacgctgaagctagccataggagagcgctcataaaatgttgacaagacgtactctgtatatttaccacgaccattgcgcgttttgcaacctgtacaaggatcactagcaggccgagctcaccagggaccgtacctaactagatgggcgggaagcgagcttgctggcagtgaactgaaccacagacacggggcagcacgccctggaccgaacatattaacacgccttg

SEQ ID NO: 161862 - DNA, 486 bp, Zea mays
  unsure (1)..(486): unsure at all n locations
  Clone ID: MRT4577_79195C.1
cccacatcgtccggactcacgcgtccgcggacgcctgggcggacacgatggtccgnctagagcgcaacgacagcgtgtaccccgaccccgtctggtacttgcgcgtgggctcctgggtcacggatgcgacgctcaagtacatgaagctggggctcaacgccacccccaagctgtcccctaggctgctcgacaccccgggccccgtgatggtcgtgccgggcaggagcgccaccgccttctagctggacgacaccgggtgggagcttatggcccatcactgcgggcagctggtgtcggcgctgtggagcgacatgatcaggaacggactggacatggacgccgcgcccgggggatcagtatgcaggctacactacgaccccactggggtcatgaacatctgcttctggttcggggctgctgcctcggcaggagattatgcggagggtctatcggcgtcacccacgactggggtgaggcgctgttcac

SEQ ID NO: 161863 - DNA, 518 bp, Zea mays
  Clone ID: MRT4577_79196C.1
atttctaaaaaaaaaaaaaaaaaaaaaaaaaaaaaaaaaaaaaaaaaaaaaaaaaaaaaaaaaaaaaaaaaaaaaaaaaaaaaaaaaaaaaaaaaaaaaaccccaaataaaaaaaaaaaaaaaaaaaaaaaatttttgccttccccggggggccctttaaaggggcaatttttgaatttttccttccccctgggggcggttgggcctttcttttagggggcccatttcccctttttgggggtggttttacatttcattggccgggtttttacaccttcgggcttgggaaacccctgggtttccccaattttttccctttggagcaattcccctttttcccatttgggtttttaccaaaaaggccccccccgttcccctttccaaacatttgcccaccctaattggcaattggcccccccctttagcggccctttaaccccgggggttgggggggttccccccagggggccctttacttttgccgggcccttagcccccgctcttttggtttttttcct

SEQ ID NO: 161864 - DNA, 643 bp, Zea mays
  Clone ID: MRT4577_79197C.1
cccgttcgacccagcgttctttcgcccaccaccacaccacaccaccgggggggggggggacgccatcgagaacacgaaggcgatggcgacagcgctgaaccgcgggctccgctccgggctccgcctcctcgccgccggcgccgaggcgtccaagccagcttctcgtggattccatgccaccggcgtgaagagaatgggagggcatggccatgatgagccatactacatccatgccaagcacatgtataacttgcacaggatgaagcatcagggtttgaaggtgacactctccgtgctgggagcggttggcatcggtgttggagtccctgtgtatgcagtcatattccagcagaagaagactgcctctggctgagatgatgcctctcgctgcctgcatatggagacttattttgagcgacatttttttgaagacacgacttttctgttaataatgttatggcttgaactttccaggctgtggagattggggaaaactcagcgctgatatcatttgttacttttctgtttcttgtcatgcttcttgtgttgactgctgagcatggttagctggtgtgttgccttttgaggtgtcacttgcttttgtatcaggatgcttgcaatttaatggaaattactgtgtagt

SEQ ID NO: 161865 - DNA, 692 bp, Zea mays
  Clone ID: MRT4577_79198C.1
gggtacctcgaggccggccggggtcccgtgcaccaaccaacaagccgccatgtccaaccttcgctcgcagaagcgcctcgccgcgtcggttctcggcgtcggaaagcgcaagatctacctcgacccttctcacatctctgagatcggccaggccaactcgaggcaaaacatccgtcgtctccgcaaggatggctacatcatcgtcaagccccaggtcgttcactcgcgtgtccgcgcccgcgagcacgacgccgccaaggccaagggacgtcacaccggtaccggtaagcgcaagggtagcgccgaggcccgtatgcctaccaaggttctctggatgaggaggcaacgcgtcctcaggcgcttgctccgcaagtaccgtgaggagggcaagatcaaccgtcacctctaccacgagctctacatgaaggccaagggtaacgtcttcaagaacaagcgtgttctcatggaccacatccacaaggccaaggccgagcagaaccgtaccaaggttctcgccgaccaaatggaggctcgccgtgctgccaacaaggctgcccgtgcccgtcgtgccgagcgtgttgccgagaagaggtctgccatcctcgccgtcgaggccgagggagagacccgcgagtagatctatgtgccaaactgagattggtttttcgaaaaaaaaaaaaaaaaaagcggcc

SEQ ID NO: 161866 - DNA, 938 bp, Zea mays
  Clone ID: MRT4577_79199C.1
gccggccgggaaagaacatcgtcgaaggccggccggccacaaatcacatcgaaatcaccctctcgcccaccaccacaccacaccaccggcggcggcggcgacccagtcgagaacacgaaggcgatggcgacagcgctgaaccgcgggctccgctccgggctccgcctcctcgccgccggcgccgaggcgtccaagccagcttctcgtggattccatgccaccggcgtgaagagaatgggagggcatggccatgatgagccatactacatccatgccaagcacatgtataacttgcacaggatgaagcatcagggtttgaaggtgacactctccgtgctgggagcggttggcatcggtgttggagtccctgtgtatgcagtcatattccagcagaagaagactgcctctggctgagatgatgcctctcgctgcctgcatatggagacttattttgagcgacatttttttgaagttaaaagcttggacttcatcctatcttggttgttgcctgatactgcattttcttaccataagttgtaacctcgtttcttccggtttggtgtaggacacgacttttctgttaataatgttatggcttgaactttccaggctgtggagattggggaaaactcagcgctgatatcatttgttacttttcagaaaaaaaaaaaaaaaaaggccctaaatgctgagcatggttagctggtgtggttccttttgaggtgtcactttcctttgtatcaggatgcttgcaatttaatcgaaattattgggtttggggaaaactcagcgctgaaaacatttgtaacttttctgtttcctgtcaagcttcttgtgttgactgctgagcatggttagctggtgtgttcccttttaaggtgtcccttgcttttgtatcaggatgcttacaatttaatggaaattactgtgtagtagcc

SEQ ID NO: 161867 - DNA, 259 bp, Zea mays
  unsure (1)..(259): unsure at all n locations
  Clone ID: MRT4577_7919C.1
ttcgtcaccaaccncatgtggctgttgacttggcctacaacaaacnaggaatatgtgatcatcccattggacacagcatcgctntgggacntaggnagtnttatangtgtgagtctgtgcagaaaggggcaacgatctttttatcacggatgatgtttggtatggnatctatgctggaaccaanccaggtagaggagttataagttangggggtaatataggaattgaagtactacaagcagatttagttgataggata

SEQ ID NO: 161868 - DNA, 832 bp, Zea mays
  unsure (1)..(832): unsure at all n locations
  Clone ID: MRT4577_791C.1
accttcggaccttcctcccctcctccgacccttttcacgcgcgacgccttctgcgcccccgccgcccaagactcgtcaccaacccgcagcgagcctcctccactgacgccccctatcttcccctcgctgcagctctctcgttgaagagctgcatccccagtcagtgctcagcccgccgaaggatcggtctccttgacggcctccccgcggcgagtgcagccgcccttctccaggttttcacctgcgacgagcatccaccaagtacgcccgcctccttctgccccccttcctgctgtgcgaagccgagcaccccggactctaatttgatcttctggctggaaattcacgttgacggtggcgagtagggcttctaccatcggtagcctcatctcaaggagcaaaattcttccatgatccctttaaaccggaggacaagcctgcccagggctgggatggactactttgatgcaaggcggaagcctcataatgttggtaaaatcattgcagccctggtcctcacaacactctgtatatttgttctgaagcaatctcctggttttggtggcaatagtgtgttttctcgccatgaacatggggttacccacgtcttagtaacaggaggagctggttatattggttcacatgctgctttaaggctcttaaaggataactatcgagttactatcgtggataatctatctagaggaaaacatggagcagtaaaagttctgcagggcttatttccgcagcctgggagactacnattcatctttngctgatctgggggaccagaaatctgtcaccagatatttgctgaaatgcatttgatgct

SEQ ID NO: 161869 - DNA, 150 bp, Zea mays
  Clone ID: MRT4577_79200C.1
cgcccttaccagcggccgggcggggggacacacttttctcatttttacatggctcatcatgagagcacgctaaggtcacccaactcgacaatgagatggcttgctggccctgtcttcctgagataatcttcatggatctctagatggcct

SEQ ID NO: 161870 - DNA, 436 bp, Zea mays
  Clone ID: MRT4577_79201C.1
agcgaccgtagacctgatattgtggcggtttgcagaggcggcctatagcttgcaggctgaggtcttgcacgggaagtttgattatcgccaccatattcagaacatgctttaactcgctggtattaggcaccaaacgtcttgcttcagtcatctcgcataagaacctgcaggagacatgtggccaacgggtgccataatggctgagctggggacactccattctctcttcactggatccagtgcactagatgagatgcacaacatatgcaaagtcatgcgacgaccaaaagaccactatcgacctacacgactgtctgttgcgtaagcgaagacatctcactgcgcacagaccagacgcgggcacctgactgtggtgatgaccactggttgttgctaggcaatggaactgatttcatcaatatgctcatgtgatcct

SEQ ID NO: 161871 - DNA, 1139 bp, Zea mays
  Clone ID: MRT4577_79202C.1
aaagcacaatagtgtaccaacaatggcagccaaaatattttgcttccttatgctccttggtctttctgcaagtgctgctaccgcaaccattttcccacaatgctcacaagctcctatagcttcctttcttcccccatacctctcaccagcggtgtctccaggaggaagcacatcgtcgaaggcccgaccgcaacaaatcacaccgaatcaccctctcgcccaccaccacaccacaccaccggcggcggcggcgacccagtcgagaacacgaaggcgatggcgacagcgctgaaccgcgggctccgctccgggctccgcctcctcgccgccggcgccgaggcgtccaagccagcttctcgtggattccatgccaccgtcgtgaagagaatgggagggcatggccatgatgagccatactacatccatgccaagcacatgtataacttgcacaggatgaagcatcagggtttgaaggtgacactctccgtgctgggagcggttggcatcggtgttggagtccctgtgtatgcagtcatattccagcagaagaagactgcctctggctgagatgatgccccaccgctgggagcatatcccgattcatttgcaaattgtgttttgctgttcagaattcggcttctgtgccaatcatggtagcaggcctcatgattgtagcctcagggaattctttgaagactgattgctctcctgcagcttttgtcctcaacattctagattcagaagacggtgacgcccctaggcaagaaacctgaataaatcttatgatacccccatgctccttagcaattgttgcaagctgttcaggcatatggtggtttacttcttcgaagctgtagttccttgtttcatactctcgtcctatgaggttaataaccacatttgacttggccataacagccttaattgaatcaacatctctcggatggtacttcatgggcacaatctgacccaagtcacccataatcttcaggtgacgaggagaatcctcacaacctctgaatgggacaagcacttgagaccccatcttggctgcacaacattaaggtttgagtatccttctattcgaattcatttaaagctcaagctcaccaagtgtgcacaagaagcgcccaagaaac

SEQ ID NO: 161872 - DNA, 1293 bp, Zea mays
  Clone ID: MRT4577_79203C.1
gaaaagtaacaaatgatatcattgctgtgtttttcccaatcttcacagcctgtaaagcccaagccttaacattatgaacagaaaagtcgcgtcctacaccaaaccggaagaaacgaggtttcaacttatggttagaaaatgcagtatcaggcaacaaccaagataggatgaagtccaagcttttaacttcaaaaaaatgtcgtttaaaataagtcttcatatgcaggcacgcgagaggcatcatctcagccagaggcaacctactactgctggaatatgactgcatacacagagacttcaacaccgatgccaaccgatcccagcacagagagtgtcaccttcaaaccctgatgcttgatagtacaccgtaatttccatgcagcatcattaagcatcgggatacaaaaggaagtgacacctcaaaaggtaacacacctgctacccgtgttcagcagtcagaacaagtagcgtgacaagaaacaggaaaattaacaaacgatatccacagcctggaatgttcaagccacgatattattaacagaaaaagttgtgtcctacaccaaatcgcaagaaacgaggttacaacttatggtaagaaaatgccgtatcaggcaacaaccaaggtggaatgaagtccaagcttttaacttcacaaaatgttgttgaaaataagtctccaatatgcaggcaacgagaggcatcatctcaacctgaggcagtcttcttctgctggaatatgactgcatatggagacttattttgaacgacatttttttgaagttaaaagcttggacttcatcctatcttggttgttgcctgatactgcattttcttaccataagttgtaacctcgtttcttgcggtttggtgtaggacacgacttttctgttaataatgttgtggcttgaacttaaaaaaaaaaaaagaatggggaaaacccgaaaaaaaaaaaaaaaaaaacaaaaaagcggccctatccctgctgggatgggctggcataggcgctggagtctgtgtgtatgcagtaatattccatgaaaagaagagtgcctctggctgagatgatgcctctcggtgcctgcatatggagacttattttgagcgacatttttttgaagttaaaagcttggacttcatcctatcttggttgttgcctgatactgcattttcttaccataagttgaaacctcgtttcttccggtttggtgtaggacacgacttttctgttaataatgttatggcttgaactttccaggctgtggagattgcggaaaactcagcgctgatatcatt

SEQ ID NO: 161873 - DNA, 488 bp, Zea mays
  Clone ID: MRT4577_79204C.1
tccaatttctttaaaatgaaagatccaaacggccccttagtgaaactacggagcataggggagatgtgtgtttgtagtgaaacatgtttgcaggcatcacatgtttggttagattttcataagcgggaaactatcaattttgggttttatgtgcatctgaagtccttgagtaatgatcagaaacaaaagatggttagaatgcaatgagaaagatcatatacgaaagctgagatatattggcactgaagcatggctacgtacaagctgtaggcgaccatagagggtcatggaaggatccactacgctgctacttatgctgttctgcagcagtgtgtcgctgccattatcctcctgctatagtatcagggctatggcaccgctatatacttcaataaagctgacattggcctttcagttgaaattgaagcaatcgtcgtttaatactctattgtttgcatcttctatgtacaggcaaaagggatgaacta

SEQ ID NO: 161874 - DNA, 1083 bp, Zea mays
  Clone ID: MRT4577_79205C.1
cctcgaggccggccgggtattctggtgtcctaggcgtagaggaaccacaccaatccatcccgaatttggtggttaaactctactgcggtgacgatactgtaggggaggtcctgcggcaaaatagcaaaatgccagaatcgaccgcaacaaatcacaccgaatcaccctctcgcccaccactacaccaccggcggcggcggcgacccagtcgagaacacgaaggcgatggcgacagcgctgaaccgcgggctccgctccgggctccgcctcctcgccgccggcgccgaggcgtccaagccagcttctcgtggattccactgccaccggcgtgaagagaatgggagggcatggccatgatgagccatactacatccatgccaagcacatgtataacttgcacaggatgaagcatcagggtttgaaggtgacactctccgtgctgggagcggttggcatcggtgttggagtccctgtgtatgcagtcatattccagcagaagaagactgcctctggctgagatgatgcctctcgctgcctgcatatggagacttgttttgagcgacatttttttgaagttaaaagcttggacttcatcctatcttggttgttgcctgatactgcattttcttaccataagttgtaacctcgtttcttgcggtttggtgtaggacacgacttttctgttaataatgttgtggcttgaactttccaggctgtggagattggtgaaaactcagcgctgatatcatttgttacttttctgtttcttgtcatgcttcttgtgttgactgctgagcatggttagctggtgtgttgccttttgaggtgtcacttgcttttgtatcaggatgcttacaatttaatggaaattactgtgtaatagattaaaaaaaaaaaaggcccctaatcatttgttacttttctgtttcttgtcatgcatcttgtgttgactgctgagcatggttagctggtgtgttgccttttgaggtgtcacttgcttttgtatcaggatgcttacaatttaatggaaattcctgtgtggtaacaacaaaaaaaaggtcatcccaaccaaaaaaaaaaaaa

SEQ ID NO: 161875 - DNA, 880 bp, Zea mays
  Clone ID: MRT4577_79206C.1
gaccctcgaggctggccgggtaaagaacctgtgcggcgcgcgaaggcccgaccgcaacaaaacacaccgaatcaccctctcgcccaccaggccaccaccacaccacaccacaccacaccaccggcggcggcggcgacccagtcgagaacacgaaggcgatggcgacagcgctgaaccgcgggctccgcctcctcgccgccggcgccgaggcgtccaagccagcttctcgtggattccatgccaccggcgtgaagagaatgggagggcatggccatgatgagccatactacatccatgccaagcacatgtataacttgcacaggatgaagcatcagggtttgaaggtgacactctccgtgctgggagcggttggcatcggtgttggagtccctgtgtatgcagtcatattccagcagaagaagactgcctctggctgagatgatgcctctcgctgcctgcatatggagacttattttgagcgacatttttttgaagttaaaagcttggacttcatcctatcttggttgttgcctgatactgcattttcttaccataagttgtaacctcgtttcttgcggtttggtgtaggacacgacttttctgttaataatgttgtggcttgaactttccaggctgtggagattggggaaaactcagcgctgataccatttgttacttttctgtttcttgtcatgcttcttgtgttgactgctgagcatgtttagctggtgtgttgccttttgaggtgtcacttgcttttgtatcaggatgcttacaatttaatggaaattactgtgtagtagcaaggggcttgacctggatcttggaaaaaaaaaaaaaaaaaaaaaaaaaaaaaaaaaaaaaaaaaaaaaaaaaaaaa

SEQ ID NO: 161876 - DNA, 528 bp, Zea mays
  unsure (1)..(528): unsure at all n locations
  Clone ID: MRT4577_79207C.1
cttcgccgtccagtgacacctccccatcgacgcctggaggaggaggtgggtactacgggcccccttcaccttccagtggcacctctccatcgacgcctggaggtggtggtggctactacggccccccctcgccgtcctctggcacctccccaacgacgcctggtggtagcggcggcggatgcagtgctcctccttcgccgtccagtgacacctccccatcgacgcctggaggaggtgctgggtactgcgggcccccttcaccgtccagtggcacctctccatcgccgcctggaggtggtggtggtggctattacggccccccctcgccgtcctctgacacctcccccaccacgcctggcggtggtggtggcgggtacagtgctcccccttcaccgtccagtgacacctctccatcgacgcctggaggtggtagtggctactacggccccccgtcgccgtcctctggcacctctccgaccacgcccggtggcggcgggtactacgggcccccttcgncgtcttctgaca

SEQ ID NO: 161877 - DNA, 359 bp, Zea mays
  Clone ID: MRT4577_79208C.1
ccatgcttgagtaattgtttgtagttcgtctttctccatctctgactgcccattttcacacatatcaatctcaaatatctctaccttgaaaatagctaggacaaaatgccttggtgctagcaactcctagcgcctattgccaccttttaaacagagatattcactgttttcaggtcgggtgactagctgggcgttccagaggtccgaccaggcgcctaatcacgattagggcgacgattttggcgcctaatcggtcttggtcgacctttggttgtctcctaatcgtcctagatatttctggatgtatgtataattatgtatatataagcaatactacaatagacattatataaatctaa

SEQ ID NO: 161878 - DNA, 1980 bp, Zea mays
  Clone ID: MRT4577_79209C.1
ttgggtacctcgaggccggcggggttcggcacgccggcaaatcctcagatccgccccctcctccgcctcctgtaccctcacgcggtgcttccacagccctcccacctccgaatccagatccgccgccaccaactcctgcttctcacctcctaggctgcttcgcgcgacaacctccgcgaggagcagcaggagcggcggcggcggcatggggcgggacggcggtggcggtgtcgccggcggaatgtctgaatcggtgctgcggaaggtgctcctctcctacttgtacgtcgcggtgtggatcttcctctccttctccgtcatcgtctacaacaagtacatcctcgaccccaagatgtacaactggcccttccccatctcgctcaccatggtgcacatgggtttctgctcatccctcgccgtcgcgctcgtccgcgtgctccgcgtcgtcgacctccccacctctccctccatgacgccgcagctctacacctcctccgtcgtccccatcggcgcgctatacgcgatgtcgctctggttctccaactccgcatacatctacctgtccgtgtcatttatccagatgctcaaggcgcttatgcccgtcgccgtctactccatcggcgtcctattcaataaggagaccttcaggtcctcctccatgctgaacatgctctccatctccttcggcgtggccatcgccgcctacggcgaggcgcgcttcgacgtgcgcggggtcgcgctgcagctcgctgccgtcgccttcgaggccacgcggctcgtgctcatccagatcctgctcacatccaagggcatctccctcaaccctatcacctcgctctactacgtcgcgccgtgctgcctctgcttcctcgtcgtgccctgggtcttcgtcgagctgcccaggctacgcgccgtaggcaccttccaaccggatttcttcgtctttgggaccaactcactctgcgcctttgcgctcaaccttgctgtgttcctgctagtgggcaagacctcggcgttgaccatgaacgtcgcgggagtagtcaaggattggctgttgattgcattctcgtggtccgttatccgggacaccgtcaccccgatcaacctgttcggatatgggatcgcgtttttaggggtggcctactacaatcatgtcaagctgcaggcgctcaaggctaaggaggcccagaagaaagccgcacaggctgatgaggaggttggatcgctcttgcaggagcgcgatggacacggtgatcataagagcgacaatcaggcttagactgtcagatctgatcctggccttcccatattggttggttctcgagccattcatgatattgctaccattctcatttacatgtgagagaagtgttcttttcttagcttgcattcggatagaagtgttcatcttgagaaagatgttatgtttacatttaacgtatgataagtgtgcatctttttcttgcaatgaaaaatcaatcttgcattgtggaccataggctactagacgcatctattttgtttacactaatgaaataaaattctaaaaaaatgttgtgaatatggtgccactagcctggaactgcagaataactgaaaccaataaagactagtaattttcttgttgtacttggtcattttcgtgttctaatttttgctggaatactgtacaggggatctgatgcaaggtgcaaagactagagtttggtctacggttgctttcaaggaggtggatgacggtttcttgcacttctttaactttgtgtctggagagaaaatcagaggtattaacgtttaggaaatatgcacctgcttggtggagagctttgctttgttattttagacactttgttctacagaaaggcagccatgccttactactatctcacttgcccattgcctagatttatttgtcctgctagtagattaggtactaaaaatgtactgctgcagattgttaatttggtggttattttcgat

SEQ ID NO: 161879 - DNA, 315 bp, Zea mays
  Clone ID: MRT4577_7920C.1
aaaaataggatactaggattatatattcctggggcaacgcaggggccttcagctaattattacaaacatgtttaaggggctggcccggttttgggcccgacagccccactacctggaaacttaattacaaaaatgttgggctcgggccccgggagagcaatgaagcgccacccggggtattggtaaaaacggacacttccctacgtacaggacaaatcattcaagccgggcctcaaaaaataggccacttaatagtgtgggcacccactgattattcacaaacaaaaacttacagatccaacactaggactaaaa

SEQ ID NO: 161880 - DNA, 1753 bp, Zea mays
  Clone ID: MRT4577_79210C.1
accgcgctcattccatgctcccccaccggcccacctaagcgaagaaagatttttgggacactccagcggtccagcccgacctctttccaaaccggcaaatcctcagatccgccccctcctccgcctccgcctccgcctcctgtaccctcacgcggtgcttccacagccctcccacctccgaatccagatccgccgccaccaactcctgcttctcacctcctaggctgcttcgcgcgacaacctccgcgaggagcagcaggagcggcggcggcggcatggggcgggacggcggtggcggtgtcgccggcggaatgtctgaatcggtgctgcggaaggtgctcctctcctacttgtacgtcgcggtgtggatcttcctctccttctccgtcatcgtctacaacaagtacatcctcgaccccaagatgtacaactggcccttccccatctcgctcaccatggtgcacatgggtttctgctcatccctcgccgtcgcgctcgtccgcgtgctccgcgtcgtcgacctccccacctctccctccatgacgccgcagctctacacctcctccgtcgtccccatcggcgcgctatacgcgatgtcgctctggttctccaactccgcatacatctacctgtctgtgtcatttatccagatgctcaaggcgcttatgcccgtcgccgtctactccatcggcgtcctattcaataaggagaccttcaggtcctcctccatgctgaacatgctctccatctccttcggcgtggccatcgccgcctacggcgaggcgcgcttcgacgtgcgcggggtcgcgctgcagctcgctgccgtcgccttcgaggccacgcggctcgtgctcatccagatcctgctcacatccaagggcatctccctcgacccccccacctcgctctactacgtcgcgccgtgctgcctctgcttcctcgtcgtgccctgggtcttcgtcgagctgcccaggctacgcgccgtcggcaccttccaaccggatttcttcgtctttgggaccaattcactctgcgcctttgcgctcaaccttgctgtgttcctgctagtgggcaagacctcggcgttgaccatgaacgtcgcgggagtagtcaaggattggctgttgattgcattctcgtggtccgtgatccgggacaccgtcaccccgatcaacctgttcggatatgggatcgcgtttttaggggtggcctactacaatcatgtcaagctgcaggcgctcaaggctaaggaggcccagaagaaagccgcacaggctgatgaggaggttggatcgctcttgcaggagcgcgatggacacggtgatcataagagcgacaatcaggcttagactgtcagatctgatcctggccttcccatattggggatctgatgcaaggtgcaaagactagagtttggtctacggttgctttcaaggaggtggatgacggtttcttgcacttctttaactttgtgtctggagagaaaatcagaggtattaacgtttaggaaatatgcacctgcttggtggagagctttgccttgttattttagacactttgttctacagaaaggcagccatgccttactactacctcacttgcccattgcctagatttatttgttctgctagtagattagggactaaaaatgtactgctgcagaatgttaatttggtggttattttcgatatataatgagcttaccgtaatctaaaaaaaaaaaaaaaaaaaaaggactagttctagatcgcga

SEQ ID NO: 161881 - DNA, 299 bp, Zea mays
  Clone ID: MRT4577_79211C.1
tttttgcaccgatacttttttattccaaactaggggcttggaatctggggggcccattacacttcggcccgacttacgaacccaccctagctaaatgctgtcctttgaaaaatcgacaaaaacatcaaacacttaacagaaaattcctaagctgggagggctaatggactcgctcactaaccctcgttggaaggggctacctgcccaattcttagtcggtgaaccctgctcacctgctgcataaattaattaccccccccgctccctcagagacggtatgtttggcgcgctctcctggg

SEQ ID NO: 161882 - DNA, 447 bp, Zea mays
  Clone ID: MRT4577_79212C.1
aagggaaaagaagggggaaaaaaaggagggaaaaaaaggggagaaaaaggaggacaaaaaaacttggcgacggggggagaacaaaaaccggggcgcaaaaggcaaccggaaaccaacaacaaagggggaaattaaccggttaatcaacgagggaccaaaacggggcggggcccaacaggaaggaaagagcaggggcctatcggggtaattctttgtgagacgcatgggggccaccctggtcggaccggtctgggagggggccccgggggacgccccccaaaggggccccaagggcgggccgcaagagccccccctgtcaaagggtgaagggggggtgagggggccttaacaaaaaaccaaaaaaagggcccccttgggccaaaatgggtccaaccccccattgggccgggaacagaaaaaggaaaaaaaaggggggggcgaattgaa

SEQ ID NO: 161883 - DNA, 406 bp, Zea mays
  Clone ID: MRT4577_79213C.1
ctggctctggacctttgggctgatttatgtgcttgtttatgtgcttgtttatgtgcttgcgtcactggcgtcgtaggacccggaaatgcgtcacccgaccagaagatgagtgcttcgataagcgggcattcacacttcgcacggattacccctccgcagtagcccgccctgtactcttacgcaccctctaacccggagatcggagagagaataatagagagaaatcgacgccgaggataattacagaagcaaccggccatgtccgagaggaggaacccggtaaatagggatcacaccccggagagcgaccccggcctccacccgaaacctccacgccgtgctaacatatcgacaacccttaacgctcggccgcgtcctcatgaagacttaaaaccttccggattaa

SEQ ID NO: 161884 - DNA, 268 bp, Zea mays
  Clone ID: MRT4577_79214C.1
gaggcagaggcagcgtcactgacgcggcatctagggcggactcggcagcgagccggatggtgacccgaagggacgccgggcgactgatgctcgtgtcggccaccgactgggccatgctcggactctgagtgctcgacttacagatgcaggcatgcagctcccgcggcgcagtcctctaagatattccctaaagagagagtagagctctctctgagtaggagtcgatggggctctcattcaaaccactccagcgctgcaccaggacctg

SEQ ID NO: 161885 - DNA, 175 bp, Zea mays
  Clone ID: MRT4577_79215C.1
gaatttgttaatgcaccacacaagtgcggaataaagactgattcaacatacaaggtagcattacatattgtaggttagcattacagcattatgcagtttcacacaattcatgttagcttgtatgttgaatttgttaatgcaccacacaagtgcggaataaagactgattcacatt

SEQ ID NO: 161886 - DNA, 395 bp, Zea mays
  unsure (1)..(395): unsure at all n locations
  Clone ID: MRT4577_79216C.1
tcctctagagcggccgccgcgccggcgagctgcgcgcagacctcggctaaggcggtgaggatggcggcgtggtggggcggggcgttgagggcgagcaggcggcgcagcatgccgcggaggccgtcccagtcgcacaancccattttcaaaaccatttgcaccatgctgtcgcggaagtccgcgcgcggttccgacgactccttctccaccgccacgcccaagccgtccgcctccgcctccgccttctcgccccgcttctccttctccttcttcttcttcttggtcgcctgctgcgccttggctgcggctccagctccgtatgcgacgcgcgaagggtagcagtagtagtagtcggaggagtaggccgacgcgtaaccgccggtgctgcgtgtggc

SEQ ID NO: 161887 - DNA, 319 bp, Zea mays
  Clone ID: MRT4577_79217C.1
aaaggtcccaaagcaaaacccctttccctataaaagaacccagaacagaagaactggggggggcggcccaatccccagccaaacatttttttagccccccaggggaagggtttctcccccgggggcgaggggaaacgggcccccccaaacaccccccaaattaactggaagaccgccgagccaataggggccctagcctccccacccccgatgggataatagcaaaggggggaagacccccagaacagccccgggggtccctctttttcccccaaaaaaaaaaacccagcttaggcgaccccccccattttgctctccc

SEQ ID NO: 161888 - DNA, 231 bp, Zea mays
  Clone ID: MRT4577_79218C.1
cccgtacatattatctcattctgacgcctataaaatttatttgcagaaggctacaaaattaggggggggatttacacttagggggggctggccagaaagaacaactgtagtctccctacctcctactcggtatgatacacctgcaaataatattaacatgaatgtgcatgctaagacaaagatctactaactcaatgccccatgggatgcctacaccattgaagatttcct

SEQ ID NO: 161889 - DNA, 367 bp, Zea mays
  unsure (1)..(367): unsure at all n locations
  Clone ID: MRT4577_79219C.1
ccggaccaggaaaccgggggcgacccacgcgaccgcccacgcgaacgaggacttgtgggttgacgaacacaagccagctgaagaggtcgatcaagcgaggaggaggcgcgtcaagcgcacagcaacagcttcccaactgcaaccgaagcaaccacaacgtccatggaggcacagaacggggagngggcagccctggagcagaagaacgcgggcctccacgccggcaacgccaagctgccgaagctgagcccgaaccccgacggcaacgcgctggacaacagccataggcaaggcacagcaggccggcgagcccaggcgacgagaccaagctcagcccaaaaggccagaggatgcgggaggagcacaa

SEQ ID NO: 161890 - DNA, 271 bp, Zea mays
  Clone ID: MRT4577_7921C.1
aatgcatgcactcataccaggtgctacctccagattttgctattggcaagctgatgagtgaagtatgctaatctgttgtgcagtttggcactatgcagactgaggttaatacggacagtggcatcttgcatactgaagtatctgctccttttgtgaagccaattgcgagtgagtgctgctgtggacataaatgataatgtggctggtggatcatcagtgattgattctgcagaaccttgtttgcaaaatccgcatctcgcttgggatcctg

SEQ ID NO: 161891 - DNA, 528 bp, Zea mays
  unsure (1)..(528): unsure at all n locations
  Clone ID: MRT4577_79220C.1
gaannctccgggtcagacccaacgccgtccgaaccggctaagaagggtcataggctcgtctcgcattcatgtaagcactatctcctggagaatcaaatccacctgcttcagctgagcgccaatctccaatccagagtggtcnnngtggacgctcannttatctaactagtggacncanncgtgaggggatgctctacctcgtattttgggttcaaagctggtngnnttgtgaggaagaggcaggnnctgtggattattnctcacctcctgaagaaaggggtgannaccagngctcatctttactctccttncaccacttggtgccaagggaagagggcgctttcaaggaaccatctaaaactncattgctgagtggctcttgcagatgaagttgatctaacgctgccaaagggctcttccaaacagctacgctcatcaaagaagaaggacgaagattgagcgttgttgccaaaggtcaaaccgttgagtggaagcttgtatctctggtgcactttgcactagaaacta

SEQ ID NO: 161892 - DNA, 259 bp, Zea mays
  Clone ID: MRT4577_79221C.1
gtaagggctgggcgcactaccaaatagcgcctattcaaacatgtgatgatcaaggacccagccttctatgtgccctggcccctaatacaacaaggtctcccgcaacgagacctcgcctacagccacggtggggcctacatgtgatatatggggaactcgcataccacatactaagtccagccccaatcaacctccagatatatttgcccctcctcaccttttatatctaatacgataccctcttgcagagcgctctaga

SEQ ID NO: 161893 - DNA, 979 bp, Zea mays
  Clone ID: MRT4577_79222C.1
gcacgaggtaccgactaccgagcggttggttagcccgtcctccctcttcctcttcctcctccttttgcacttggaccttagccgttacccgttacccgttataaataaataatagagcggcgtgctgcgtgcgccactgcaagactcttctgctacggtgctcgcttctctgtctcggtcggcggactctgtcgctcctcctcctagcgcgagcgagcgagctagctcacctactctgtggctggacctcgcgcgcgcgcgcgcgggatggcgccgtcgtcctcgccctcgccttcggcggccggctcccacgcgggcctcgccatcgcggccaccgccatggcgctctccggcacgctcgtcctctactccctgtgccgcgcgaagcagcagcgactggtgctcccctcctcctccgacgacgccccgtcccctcgccctcggctccgcccgtgcctctcttcgtccgagaagcggaagaagaagaagcgggagatggcgcggcgcggcagccagaagcgggtgcgcttcgcggacgacgtcgtaggcagggacaatgccgccgccgccgccgccgccgccgcggcgccaagggaggaggccgagccgtcgtgcgccgcggcgctcaggacgcccatgccggccaaccgggaggcgctgtaccgaggcatgctccgcggccgccccgtgcccagggtcgcctccgccgccgcgccccggccccggtgccgccccgcgccggccccggcggcgcccgctccccccccgcggccgccgggtgcggctccccctcgcggtcgtcgtcctgggccgggacaatgccgcctccgccgccgccgccgcgccaagggaggaggccgagccgtcgtgcgccgcagcgctcaggacgcccatgccggccaaccgggaggcgctgtaccgcggcatgctccgcggccgctccatgctcagggtcgcctgctcctactagctagctaca

SEQ ID NO: 161894 - DNA, 257 bp, Zea mays
  Clone ID: MRT4577_79223C.1
tccttccataatttttaataaaaaaccgtgggataaaaacatttttgggttgaacaatacaacaatggtaaccaccaagacaaataatttaatacacaggcaataaacaaaacaattacatgatatcattaaggaaaataagctaacacacccaaccccccatttgaaccctccacaacacaaaatgaagataaacaacccaattttacaactactacaaacaatacacaagatagcacaaccacaaccctttctcc

SEQ ID NO: 161895 - DNA, 435 bp, Zea mays
  Clone ID: MRT4577_79224C.1
atgtggtcgaatgtgggagaaaagaccctagaagggcctgccttcgtccaagaggcagaagaaaaagttgctctgattcgcaaaagactccttgaagcccagagtcggcaaaggagctatgctgacaacaggaggagggaactcaactttcaagaaggtgatttcgtctatatcaaagtttctccaatgaaagcttcagaaatgcttaaagtgccagattgccacatcatggaagatttagtccagattcagaaagatctgcagtatcgagaaaaactactgaagattcttgactcagctgttcgaaagaccaggaactcagaagtaaggctctgtaaggttcaatggagcaaagaaggagtggaggaggaaacctgggagagtgaggactcaatgaggaaggagtacacttcccttttctcgaattcagcctga

SEQ ID NO: 161896 - DNA, 299 bp, Zea mays
  Clone ID: MRT4577_79225C.1
cccacgcgttcggccactcgtacgaacgtggtgcttgttggtattgctcgcgggggtcgatttcaggggctcgatctcactgtactagtacagagttgtagaccaaccaatataaccaaccgtcattcacgattataatgcgatcagcgtccaatgtggacgggttcacccacttcgaacttgttctaaatgtgtggcaccagtattgtacagaaatatacaaccttttacttgtacattctttttaacttttaaggacatggtagatttcatattgagatgatttttgtgttttttta

SEQ ID NO: 161897 - DNA, 323 bp, Zea mays
  Clone ID: MRT4577_79226C.1
ctgggtttttttttttttaaacgtaaatttgtttgaaccaaggacaaaagaagctcagttaagagtatgatggcaacgtgctaatgaaaacacaaaatgtagcatgaaataaccgttgctagagtgcctaatacatgaatagagacagtttaattgaataggcatcaaattgagtgccattccggctcatgtacataactgaagatactgccgacgcattgtgggatatagaccacctaggcacccaccctatgaaattttgagttaattgcactgcttagctttccattgtagtataaccattaactatgaccaccagtgga

SEQ ID NO: 161898 - DNA, 343 bp, Zea mays
  Clone ID: MRT4577_79227C.1
cgatgatgtggcctgctttgccgatctcgccctcgtctaccaccgccgtgggcgtgccactacctcgactcccactgactcggggcccgtcaacgagcgcggcttgcttcgctgatccgccgtcgtctatcaccaccatgagcaagccatacccgcggctcccgacgccccagcagcctgcaccgagcctcttgtgtaccacctggtcgccatccaccgcgactacaggcacgtacacccgatggtgactcggcgcgccgacagcgttctccaccctgtcgaggggctgatcctagcaactgatacgactgccactcctgcggacgcctacccgatcccctcc

SEQ ID NO: 161899 - DNA, 283 bp, Zea mays
  Clone ID: MRT4577_79228C.1
atggaccctaagtttctgaggaacttgaggtactcaaggaagggcaacaagaagagtggtgaggctgaggcagaggagtaaaatgagtggtggctgagtttgtggcgacaaatgcatctcttgtatcgctagggttttagttgtgaacttaattctcacttctgtatgatcgaaggagataccatcaattggtaccaaagtgatttttttttgtcttgtcgcctatctggaatttaattaaaaccatcagttgtccttttgcgaattgggcccttgatgtgtc

SEQ ID NO: 161900 - DNA, 536 bp, Zea mays
  Clone ID: MRT4577_7922C.1
tcggttttttttttttttttttttttttttttttttttttttttttttttttttttttttttttttttttttttaaaaaaacgggggggggctttgattttgttattcttgcaaaaataaattttccccaacttttttttgggggaacctttttaaaaaatccggggccgaccgggggggatttattttctcatatttcagaaaagcatgaaaaatccagggccaacctggttcgtcaattaggctttacccggaccaatggggttgacagggggcaaaaccagccctgtgttttttttcgaaaccagtcctgcagcctcccaaacatagacatccttaggctcctgcccacttgggagctcccaatcaaaagggaacaaaaggctggccagggcaagctccaagttggccactccaaaatttgctcccgggcccatgcgagggccaaacccgaacgggagggcctcgaagaatgtccccttgaagccaaggggggagttctcaaaccgctccggaatgaattcctcggggttttc

SEQ ID NO: 161901 - DNA, 537 bp, Zea mays
  Clone ID: MRT4577_79230C.1
atggggtccaggcatagtgcttgctctgccgaggctgagtgccgaggttctttcgttttgcttttgttagtcaccctcctgcggggagtggttgcctttggtgcaatctatgctcagagactcctcatgaggccgaagccggggtcgggcgaggacgtgattcctcccgaggtcgaggttgaggccgagccctggggtcgggcgaggcggagaccgccttccgaggtcgaggttgaggccgagccctgggggtcgggcgaggcggagcttcctgtggcgcctaaggctggactcagctgctgtcagcctcaccctggcgggtggcacagcagtcggagaggggcgagcggcgctgttttcctgtcaggtcattcagtgggagggcgaagtgactgcgatcacttcgaccttgacgactggggcacgtgtgtcaggataaggcgccaggcgatccttgcattgaatgcgcctgcgatacggtcggttggtgagacgatttggccagggttgcttcactatgaagcctgcccgagctag

SEQ ID NO: 161902 - DNA, 136 bp, Zea mays
  Clone ID: MRT4577_79231C.1
ttgttttctgtagggaattttcccggttttttccccaacggggtgagaacggacggatagctcaagctctaatcaacccactttgcagcactggcggccagaaggaaaaaagccggaaactaatagggcccctagc

SEQ ID NO: 161903 - DNA, 490 bp, Zea mays
  Clone ID: MRT4577_79232C.1
gccgggcttccttcacggattcccaaatactcgcttccaataccaattctccgatccacgttcgttcccgcaccctcgcgctccgctgatccggcggcatgcggcgccgcggcgtggcggcggctgatgcggacggtgacgtggagttgcggttccgcggggtgcggaagaggccgtggggccggtacgcagcggagatccgggacccggcgaagaaggcgcgcgtctggctcggcacattcgactccgccgaggacgccgcccgcgcctacgacgccgcagcgcggatgctgcgcgggcccaaggccaggaccaacttcccgctccccgccgcagccgccctccaccacccccacatgcccgctgctgccgccgcagcagctccaccatacacaacatatcccaccgccacgggcgtcgtctcgacgccgccggtcgccagaccggcttgcagcagcctcagctccaccgtggagtccttcagcggcgc

SEQ ID NO: 161904 - DNA, 689 bp, Zea mays
  unsure (1)..(689): unsure at all n locations
  Clone ID: MRT4577_79233C.1
ngaantctcggcanncgaggnctcagnttctactgtactacgtgctggcggtcgggcgtgcctatcgacgcatcgagtcactttcgtccgctctatacttgtgctgcgttcgtcatatgccggttgaattgtggttctaagaacactagggaaggatctttctccagacttcgcacttctggacgacgaggtaaggaagggtgtacacgcgggcatactcggcgttcgcttcttggaggcgactgcaattaactttactttctcttaccgctagcgtctggcaggataccaaggctaatcgctagctacctaaaatgcagctctagcacatccaacatgagagctcatacttgagatattttttacccaagtcttcaactatttattacctaacgacctagccaaccataactaatggagctaagtcttagccctaactagtatctcaaacaggcctttaaccttcatgcttgtgcggcgtggttttataaacatgtaaccacaggttggctccaatcttgtattactgtcatttcggaacataagatgctggtaattaaattgatcggaactatgagtctcttctgctgcacccagattcataaccataatcatgtttaaacacgtgctggatgaagagtcatctttcatttatcaagggcaactgattttggactacatatcgggct

SEQ ID NO: 161905 - DNA, 565 bp, Zea mays
  unsure (1)..(565): unsure at all n locations
  Clone ID: MRT4577_79234C.1
ctcaattctgtcattgctgcgcgtgtgtgtggggtcagatatttggggtcagctgctttcagcaaagccatccaggcacatgatttgcacacaggaatggatgtatgtgttaaaattataaaaaacaacaaagattttttcttttcttttcttgatgagatcaagcttctgtagtgtgttgacaagcatgatcctggngacaagtaccaccttttgcgtctgtacgattacttctactatcgggcaaatctgtacgagtttcagaaattcaacagagaatcagggggtgaggtttacttcacaatgccaagactgcagtcaatagctattcagtgtctggaggttctgcagtttctgcatggtctcggtctaatccactgtgatttgaagccagaaaacatattggtaaagagctacagcagatgtgaaataaaagtaattgatcttgggagcagctgttttgagactgatcatctatgttcatatgtgcaatcacgatcttaccgtgcacctgaggttatactgggcttgccttatgacaaaaagatagatatatgggcacttg

SEQ ID NO: 161906 - DNA, 356 bp, Zea mays
  Clone ID: MRT4577_79235C.1
ttttctttttcgaggttagagtatggtattcattagcaactagtagttgcatgcaagctatggtccaagcaaactaacgcaaccacgcaattggtttacagtaggagcacaacacaatgggctgacatagcccacacatgttacggtaacataacatggttacagcagatcagtgctaagcattgaatatagctactagggcaaggttttgttgcagcacatagccttccattcaaacagtttaccagctatagttcccgccaacctgagcctttcacgagttcttcacaatgagctcagcgactccccagtcctcgtagcttccatcaagtaagtaccgactaattgtgaagggg

SEQ ID NO: 161907 - DNA, 1238 bp, Zea mays
  Clone ID: MRT4577_79236C.1
caacatcatataacaaagtttgttgtgtttgctgtactacttattttaaacattgtttgcaggagcatttgctgatagtctgtgaacttctgaaggcaaatctgtacgagtttcagaaattcaacagagaatcagggggtgaggtttacttcacaatgccaagactgcagtcaatagctattcagtgtctggaggcgctgcagtttctgcatggtctcggtctaatccactgtgatttgaagccagaaaacatattggtaaagagctacagcagatgtgaaataaaagtaattgatcttgggagcagctgttttgagactgatcatctatgttcatatgtgcaatcacgatcttaccgtgcacctgaggttatactgggcttgccttatgacaaaaagatagatatatggtcacttggttgtatattagcagaactttgcactggaaatgttcttttccaaaacgattcgcctgcaacattacttgctcgtgtgatgggcatcattggcgccatagaacaagctatgcttgcacagggacgggacaccttcaaatatttcactaagaaccacatgttatatgaaagaaatcaggaaagcaacaggcttgaatacttgattccgaaaaagacatccttgcggtaccgcttgcccatggctgatcaagggtttatcgagttcgttgcgtgccttctagaggtgaacccgaagaagcgcccaagtgcctcagaagcattgaaacatccatggctttcttttccttacgagccaatatcttcatgacacaaattgctattggatcctgggtggcttaacatatgcgacaacacctaagcaccatgaaattttggtagatcaaggcgaaagattttctaccacggctgagccatggcaaacccagattcggtttgatcacgcgtggtgccacaatcagctggtctttgacgctgtgtgcaatcaatccatgccctgtgttgtgcttgtaatataactttgtttttttctctctttctagccccgatgtaacaggccattttgttttttaggtactttgtgatgcatttttagcaatagggctgtcatgttgtacatggtgtgatcattgttgaactccgtgccatgctgtgcacatgttagggttctaacccaagcccagaatgtcattcattgcattgccaggtcttaaggaaaaaaaaaaaaaaaaaaaaaaaaaaaaaaaaaaaaaaaaaggatataaaa

SEQ ID NO: 161908 - DNA, 2658 bp, Zea mays
  unsure (1)..(2658): unsure at all n locations
  Clone ID: MRT4577_79237C.1
gttggctacacccggcaaccaattgaggatgaaacctggtttttagcacatgagattgattatcctagcgacaatgagaaggcgactggccacacaagagggaacgatcgtcatgatcgccctacaaaggatgaagatgatgaccagtcatttgttgaggaagattcctacatatctggtgagcaatattttcatggaaagaatattgcacaaataggtacttctgagggcactatggtccgtggaatacctgatagtgatatggtagcccagtatgttggccaacgtttagcttgtgaatagcttactttcatgaattgagaaccaggctggcaggactttgtatcaaagaacagtgagctaggtaggctagtcattgggacaagcctttatgatcccgaagcaacccatcctgaggtcctttgtgtggaggatgatcagcatagcactgttacgtcaattggtgttggtataatcagtgatgctgatgatattggcagtaatgtgcgagaaagtctgattggaggtagcagtgaaggggatattgaattcttcaatgagagcagcttgagcgtcaatggaaaaagacatcctcagcaggatactgaaaagaagagagtaggtgctaaaggagtaaaacatgaccaaatcatttacgctgctgatatccagaagggcaatctaccaccaggagcggctgatgtagggttttcttttcctccacctttgcattctgggaaaaatcatgagtctgatgctaaatctttgtggtcaaagaaggatgaaatgtattgcattaatgatcctgatgactgtcaaaatggcatggtatcagatgatatgcttgccacatggaggaaaaagaacagtgagtcttctctaaggagctctagagatgaaatgacgtctgatgttgttagatcaagaaattcaagtgcatcctatgacgaaacagaggacacgtcgaatgctcggcatcacaaactagatgacgcacaagaagacactggaaccaacttggatgatgaggaagcagcagcgttgcaagagcaagtcaggcagataaaggcgcaggaggaagagtttgaaacattcaatcttaagattgtgcatagaaaaaacagaactggctttgaagaagacaaaaacttccatgttgttctcaattctgtcattgctgggcgttatcatgtatcagagtatttgggttcagctgcattcagcaaagccatccaagcacatgatttacatacaggaatggatgtatgtgttaaaattataaaaaataacaaagattttttcgatcagagtcttgatgagatcaagcttctgaagtatgttaacaagcatgatccagctgacaaataccaccttttgcgtctgtatgattacttctactatcgggaacatttgctgatagtctgtgaacttctgaaggcaaatctgtatgagtttcagaaattcaacagagaatcagggggtgaggtttacttcacaatgccaagactccagtcaatagctattcagtgtctggaggcgctgcagtttctgcatggtctcggtctaatccactgtgatttaaagccagaaaacatattggtaaagagctacagcagatgtgaaataaaagtaattgatcttgggagcagctgctttgagacagatcatctatgttcatatgtgcaatcacgatcttaccgtgcacctgaggttatactgggcttgccttatgacaaaaagatagatgtatggtcacttggttgtatattagcagagctttgcaccggaaatgtccttttccaaaatgattctcctgcaacattacttgctcgtgtgatgggcatcattggctccatagaacaagctatgcttgcacagggacgcgacacctacaaatatttcacaaagaaccacatgttgtatgaaagaaatcaggaaagtaacaggcttgaatacttgattccgaaaaagacatccttgcggcaccgattgcccatggctgatcaagggtttatcgagtttgttgcgtaccttctggaggtgaacccaaagaagcgcccaagcgcctcagaagcattgaaacatccatggctttcttttccttacgagccaatatcttcatgaggctaactgctattggatcctgtgtggcttagcatttgtctcaacacctaagcaccatgaaattttgatagatcaagacggaagattttctaccacgactgagccatggcatcagccgaagtccaaaacgcaaatgcagattcggttcgatcatgtctttggtgccacaatcagctggtcttaggcgccatgtaaaatcaatgcatgccatgtgttgtgcttgtaatataacttggtttttttttcccttcatttccagccccgatgtaacaggccattttggttttctaggtacttggtgactcatttctagcaatagggctgtcatgttgtacatggtgtgatcattgttgagcggccccgtgccatgctgtgcacctgttaaaaaaaaaaaaaaaaaaaaaaaaaaaaaataaaaaaaaaaaaaaaaaaaaaaaccatcnagctccaactatatgaacccttctccccaagattaaaaagaaagctccccccaaacatccacatttgggccccttgagggaaattgatttc

SEQ ID NO: 161909 - DNA, 652 bp, Zea mays
  Clone ID: MRT4577_79238C.1
gctgcttgcctgagcctgaccatacttgccgcacccgcactacatgttagccattttcagccgattcttagaaattgaagacaattaaacaagctcatacttcaaaaaaatcatttccccctttttctaatgtacattctgtctagtctcccttgtttcactaccagtgagcagcaaaatgtttgttagcttctcctttgaagttttgcactagagaaccatgccaaacaagctagagaagtcgatagttgtgttcaaaatgaaatgtctcgcgtttgaatttgtgttgtccacgagttcgaaaccgaacgtgccctaatcttcaccaccgtggtgggtgtgcgtccattactcttaccaaacccatcatgtgcctccaagcatctttcttctaaacccatcaaagtatcaaactgtactgttgtacctggcgcgcagttggaaaccctaccaaaggagcagttcacgaggacgaaagacaacgtgtcgtcattgtattggccggaagactccaaatcgctcgagcgtcgagccgagtggaatgaagaaagagtgagaagcagcacaaggcgggaagccgggaacggataagataacaatcaacaaacaacaagcccgcgcgagactgttctttctccatttcccaatggcc

SEQ ID NO: 161910 - DNA, 1735 bp, Zea mays
  Clone ID: MRT4577_79239C.1
gggtacctcgaggccggccgggggaatttgctttggttcactcgaggcgcggccgggaagaagctgacgaagggctaatcccccggcacccgttaacgctgtgggagtgtgagcccacccggccacccgtttcggctaatcccccgctcgccttctcccatcgccatggctgccgcttcctggtccgcgcccaccacctccttcgcgccggcgccggcgccgccatgggggccgtggaggaccaaggcggcgcctttacccatcaggacgcttccccgccgagtgcttctcaacgcagttggcgaatccgccatggttgctgctggtgacacattgcttggtttgtatgagaaagagcggttaggcctgttgcagtatgccgacgacgagtctaaagaagagaggtactgggaaaccttggatgctgatttgcgttactggaccagatccctgcgcccagtgcagtggtatcctggtcatattgcaaaaacagagaaagaattgaaggaacaattgaggctcatggatgtcgtcatagagatccgtgatgctaggattcccttgtccaccagccatcctaagatggactcatggctaggcaaccggaaaaggatcatagtcttgaatcgcaaggacatgatctcaactgaggatatgaatgcatgggctacttactttggtaatcagggcatcaaagttgttttctccaatggccagctgggcatgggtacaatgaaattaggtaggatggcaaaatcagtagcatctgttgcgaacacaaagagaaaggagaagggattgcttcctcgtccggttcgagctggaatagttggatatccaaatgttggcaaatcttccttgattaatcgcttgctaaaacgaagaatgtgcccagcagcacctaggccaggtgtcacaagagagctgaagtgggttcgttttggaacagacctagagttgttagattcacctggaattttacctatgcgaattagtgaccagacatctgcaatcaagcttgctatatgtgatgatattggagaaaggtcatacgattttgctgatgtggcggcgattcttgtgcagatgttgataagacatcctgcagtaggttctgaagcatttcgaagacgatataagattgatgtagatagtgagtgcggtaaaacgtttgtcacaaagctctctgttcacttgttcaatggagacacaagccaggcagctttccgcatattgtctgactacaggaaaggcaaatttggatgggtagcgctggagagacctccaacatgaacaagcgggatatcatagatccttagataaaagacatgtgcttgttcatgtagtatcacacaatttagtgtcgttcattggaccactctcgacagttttcactggacctgcacctatacgaggaattaattcagaatagctgtccatctgatgatctaaagacaaaacttaagaaatgctcctgctgttattagacagtccagagcaaacgagctgatttgtatgatctattgaatgagctcaactatgtttctatgtaacggaattaggtttgagaaatgaaagattgtatgtctcctaatttagttgctcaaaaaaaaaaaaaaaaaaagcggccttgttcttttaggaaaagttgctcctgtacttctggatgattcattagattcgggaactggtgtaacattttaggcccagacaatagacatccctctacaaattc

SEQ ID NO: 161911 - DNA, 362 bp, Zea mays
  Clone ID: MRT4577_7923C.1
atgggcattggttgatgatggcagattggcgtggaaatggacccagagagagggctaagatcgacaaaaacatggtgagtatcatcgtatatactttcatgaggagggcgtacaacgacacaagggtcatatattgtaattaccagacgggcttttgcctccttgaagtgagttaatccaggctgagcatcttgtgagacaaccagctctttactataatgaactgctggagcaacgtcatgctggtacatgaataatgcatccatatgtagcaaggactaaaggtccaagaaggctcgacctatttgagtctggggtgaatcatgcactggttgtcggcataggaatacagatactgcaac

SEQ ID NO: 161912 - DNA, 277 bp, Zea mays
  Clone ID: MRT4577_79240C.1
gaatctcgtgtattcattgggaatctcaacactcttgtggtcaagaaatctgatgtggaggcaatcttttcgaagtatggcaaaattgtgggctgctctgttcataaaggctttgccttcggtcagtatgttaatgagagaaatgcccggactgctgtagcaggagaggatgtcagaatgattgctggccaggtgttagatattaacctggctgcagagccacaagtgtaccgaggaaaagcaggtgtgaaacgatctgcagcggagatgtacggct

SEQ ID NO: 161913 - DNA, 137 bp, Zea mays
  Clone ID: MRT4577_79241C.1
ctagtgctagatcacgggcggccgctcgtgatctagtagcctctcttcaggttgtgtttctgctcaagtgaaccaagagcagcctcatgatggttctacgcctctgagagtagatgacaagaatggggattatgttt

SEQ ID NO: 161914 - DNA, 399 bp, Zea mays
  Clone ID: MRT4577_79242C.1
tcgccaatctgacctcaggaaagtaggggggggctgatggcaccacaccactgaccgggcgggggttgggttcaaagctggggtcaacgaccatcaagcgacttacgaccccctgagatacaacaaccacgataccgtctgcgagccctattaccgcggaacgcccaaactggggggggccgctggaataatccggatctccaacagctccagattcttctagtgccccatcctctacaggtctacactgatccactacccaatgcttgatcgtgacatagtaccattctttcccatggccccaaccgctgtgggctccaaggcaaatacgtgttatggagcttatgggtctcacctagtcgcagaggttttagctaccaacatggcaaacatcattgc

SEQ ID NO: 161915 - DNA, 433 bp, Zea mays
  Clone ID: MRT4577_79243C.1
aataattttttttttttttttttttttttttggtgtttttttttttgtttttttgtttcatttatttccctttttttccacccgcttatcaaataagctgttttttaaaaaaacaggagttgggccaatcggggcctttctaaaaaaccaaacgggccttaaacaggggcctagttacatttttttaaacaagctccgcagttaaaaccgcctttgcagttttaacggcccagggattccacccgtttgtgattgttctcaaaaggccaaacaatggggtccaattttgttttttaaaccatttacactgccgaaccaggattctttgttaaacccccagaaaaatcttccttttttgggcccaagcaaaaaaatttttggtgcgtggaccacggggtccaaaaattttgcccccgcccccactttttttttg

SEQ ID NO: 161916 - DNA, 483 bp, Zea mays
  unsure (1)..(483): unsure at all n locations
  Clone ID: MRT4577_79244C.1
ccgtcgccgcctccacaaccccggaagctgctcccctctctcttggacgtgnccagcttccatctctccagccacctaccctctacatcacacgggcgctaccacctttcctctacctctcacggccgccggcctctccaacgcctgcacactcatccagcgacggatcttgcctatatcagtactgtggtcataactctaccagacaaaggagaagatgcaggcatctagggccacgcttttccaggagtacaccgaggtacaacgagagaagtctgctgaccctcgatatgcagccaatatgtcgatgattccaacacactcaagtggactggctcctctcaagggcccttcccgaaactccttatgaaaggaggcggggcttcaactatgccttcgtcaactcccagagcaggactcctctactggcctccttcaagctccgatcttttaaccccaaatctttcccaccccaaatggggc

SEQ ID NO: 161917 - DNA, 1008 bp, Zea mays
  Clone ID: MRT4577_79245C.1
gccggccggggactcccgtttaaattgccggccgcatcaagctgagggctgaggcagagatgccaacagaagtcacgtcgacaccagccggccggccggactgcagctcgtcgtcgtcgatgacggccgggaccatgcgtgtgctaggcggggaggtcagcccgttcacggcgcgggcgcgtctggcgctggatctgcgcggcgtggcgtacgagctcctcgacgagccgctggggcccaagaaaagcgacaggctcctcgctgccaaccccgtctacgggaagatccccgtgctgctcctccccgacggccgcgccatatgcgagtccgcagtcatcgtccagtacatcgaggacgtggcgcgtgaaagcggcggcgccgaggctggcagcctgctgctcccggacgacccctacgagcgcgccatgcaccgcttctggaccgccttcatcgacgacaagttttggccggcgctggatgccgtctccctggcgccgaccccgggagcacgcgcgcaggccgcggaagacacccgcgccgcgctgagcctcctggaggaggcgttcaaggaccgcagcaacggcagggctttcttctccggtggcgacgccgcgccaggcctcctggacctggccctcggatgcttcctaccggcgctcagggcctgcgagcggctccacggcctctcactcatcgacgcgtccgcgacgccgctgctggacgggtggagccagcgcttcgccgcgcaccctgcagccaagcgcgtcctgccagacacggagaaggtggtgcagttcacgaggttcctccaggtccaggcacagttcagggtccacgtagcttgtcaaattcagcgtctacagtctgttttagaaacttaaatcactttcaggattctcggaaattgagagaaaaataaaatagaattcactctcactttcaggattctcggaaattgagagaaaaataaaataacttttcactcaaaaaaaaaaaaaaaaaaaaaaa

SEQ ID NO: 161918 - DNA, 627 bp, Zea mays
  Clone ID: MRT4577_79246C.1
cctcgaggccggccggggaaccattttcacatctatctcatgcacgacgatcacatattgcgacttgcactgcgagcgtttctcatatatctactagaatcatcagcaaacaacgaataatgcttactcgatggatactcgtgctctcctaggtctcggccatgtacagcgcatcattccgtgcgcgtcgtcgcacgcgccaaggaaatctgccgcacgtactacgtcggaccgctgacaacgacggcgtggctgcaaaggtgatatcgacggaatcggtgatccttgggactagacccttgtgctgagtacgcaaaaagctactgagagcaacgcgcgagactgcagtgatccactcccgcggcctacgtaaacccctggagtccccgagccgatgtccccgccaaagcgtggcccggagggcctggaagattgaacacacactgacgattttgatccagtggtctggttggcggacgctactatggacgggtatatcatgacgctttagatgatgggagggaacgcgcagtttaaaaacatgatgcctctgaaaatgagcctaatgatgagttcccccaacaggtctcactgggatcaaagctaatacatgaaaatcttggtgag

SEQ ID NO: 161919 - DNA, 964 bp, Zea mays
  Clone ID: MRT4577_79247C.1
actgcagctcgtggtcgtcgatgacggtccgcgaccatgcgtgtgctaggcggggaggtcagcccgttcacggcgcgggcgcgtctggcgctggatctgcgcggcgtggcgtacgagctcctcgacgagccgctggggcccaagaaaagcgacaggctcctcgctgccaaccccgtctacgggaagatccccgtgctgctcctccccgacggccgcgccatatgcgagtgcgcagtcatcgtccagtacatggaggacgtgcggcgtgaaagcagcggcgccgaggctggcagcctgctgctaccggacgacccctacgagcgcgccatgcaccgcttgtggaccgtcttcatcgacgacaaggtgagcaccgagcagagcacggcagcaagtgtcttttcttcaaggtaacgcgcaacaaactgccgtgcctttctgcagttttggccggcgctggatgccgtctccctggcgccgaccccgggagcacgcgcgcaggccgcggaagacacccgcgccgggctgagcctcctggagggaggcgtcaaggaccgcagcaacggcagggctttcttctccggtggcgacgccgcgccaggcctcctggacctggccctcggatgcttcctaccggcgctcagggcctgcgagcggctccacggcctctcactcatcgacgcgtccgcgacgccgctgctggacgggtggagccagcgcttcgccgcgcaccctgcagccaagcgcgtcctgccagacacggagaaggtggtgcagttcacgaggttcctccaggtccaggcacagttcagggtccacgtgtcctaaatgatttagcgtctccaaaagattgtcaaaatctccgtctaaagtctgttttagaaacttaaatcactttcaggattctcggaaattgagagaaaaataaaataacttttcacccaaaaaaaaaaaaaaaaaagcggcc

SEQ ID NO: 161920 - DNA, 395 bp, Zea mays
  unsure (1)..(395): unsure at all n locations
  Clone ID: MRT4577_79248C.1
acccgacgcaccgtctgtttttgttgttcaatcgctagagtatcacnccaggccgacgcagccggcgcagnggngggcggcgggggaggaagccaaggaaanccnnggaggcagggacgagcncggcgggggaacgngganggggngcacgaggganggnaagcncgccnnccngaccaacgngcgggaacccagcncncngancggggccaagaccagaggacagcncccggncaggnnncaacagggcagccnnngnccaaaggagaangccacagaaanngcaaaggaagcagancagnacaacggcnnnaaccnnaanannggcngangngaacccaggaaccanggnnnacancncnaanagacccggaggcgaaccngnganncaaaca

SEQ ID NO: 161921 - DNA, 399 bp, Zea mays
  Clone ID: MRT4577_79249C.1
cctgctctcacttacattgcttttaacaatgtaatgctcaaatcatctcaaccaggttccgcaacttttccaatgtgcacaagctttacatgaaagtcttctaccctaatcttcaattagaaccatttctaatctcagcaatctagtctaattcttgaatctttaaactcaggaacatgccacataaacttctaaagtatcatctgacaattatgcaagcatatcacacgaataaactcgactattagatgcacataccaccaattctgcatgatacaacactaatacaacagatactacataatcaaattaacttcaacgttaattgcatcatatgctctcaatagccctaaacatttgacaatctaatatatcttactatgtacaatcatggcttaa

SEQ ID NO: 161922 - DNA, 375 bp, Zea mays
  Clone ID: MRT4577_79250C.1
caaatcccaaacaaaacaactgccctccataaacaacaaacagtcagcacaagtttttcgcgtgcaatacatctgaatgacaatccaattgacacctaccaggatttgcccattcgtaacaaactgctgaaaaaaaaccatatacccttatggccaggcacaacacaaatctatgatctttttaggacctcagtaagcagcccaacccaggccatgtgcaaataaaaaaatccacctataaaattggttgcaaaaaaacaaccgagcaaagccacccttagccccccctcacaaataaccagcacttttttgagacttactcttatgggaccgtccattcacaaccagagggtgcctttttgtatcatgcgcttg

SEQ ID NO: 161923 - DNA, 452 bp, Zea mays
  Clone ID: MRT4577_79251C.1
acacccccccccccccccccccccccccccccccccccccccccccccccccccccccccccccccccctctcttgggaaaaaactttaaagaagggttaaacctttgggtttttccctatcccaagggctaatatttaacagtgggacgggaaatgcaaaattaaaaacttttttgggttttggaggtttttgcaaaaaagtgggaaatccttttttttggggccccaaccccgagaaaaattgttacggaactgccccaatggccaatgtcctacaagctaaatagctcgaagggggctcccccccaggcaaaatccaaaacccacaatttttgttgcatttgctttcggggcaaaatttggttgaataaaaatcctttccttcgttgccgaattcctgttttgggggaggccccgaaaaaaccggcaaatcttttttcaacgtcaacgg

SEQ ID NO: 161924 - DNA, 286 bp, Zea mays
  Clone ID: MRT4577_79252C.1
cggtccggcatcccggtcgcccagcgtcaataaaactcacagaaaccccaacaacctccccaaataaagccagcctaacataacaaccatgaacactgacacgagtggtgggatgggccaatgtccattggaaatctttgggcattaagtggaattggcccttgtcgcaaagtataccccgcaggtggttgaaacttaatgcccactgccgggttgtgccggcgcactatcccgacacctttgtaggggcttcccctcgcccctgcctcttgctctggtttttgct

SEQ ID NO: 161925 - DNA, 208 bp, Zea mays
  Clone ID: MRT4577_79253C.1
ccgcctcgctggtgcacatgtgtgccccacaacatctggcttagcactggaaaacccctgtaggagggcggcgcctgcttctgcctcagggagaaaaactactttttggactggcctttcctttcttatgcccgatcaacccactctttcgcctcaaagccaaatgtattgagccggactttgggctcttcggcctcaaggcgatcac

SEQ ID NO: 161926 - DNA, 279 bp, Zea mays
  Clone ID: MRT4577_79254C.1
cggacgcgtggaccacgtcgctaaatccctcgccacgggctggcgccgctgttgacgaaagggacccacgatggccatgcaggtggtgcgcaacctatcacctcgatagcagggcacctatacatcgttacgagagcgttcagcttctccatgctggctccggggcgataaaagacaccaacgcactcgctatctacgcatctgaactcccacgggactgcgcacgcggtgatcgacacgtgacactacagacgccacatccagtttgcaggatctgtc

SEQ ID NO: 161927 - DNA, 301 bp, Zea mays
  unsure (1)..(301): unsure at all n locations
  Clone ID: MRT4577_79255C.1
naattatgaaggacgagcgattcttttttttgggtttttttatttattttatccgctttttcctacatatttcttacatttgtttattaaaaagggaaacacgatctgtcggtgggcctcttggggtggacaaaaaaaccaatataaattccgggtcaaccaatccgggggaaaaaaaaaaatttgggggcccattgtcccattaaggaaaacccataatttccccttcccgggccttggggaagggcaggacccctacaatctggggggaaacaatttcccccaattttaggcctgaaag

SEQ ID NO: 161928 - DNA, 398 bp, Zea mays
  Clone ID: MRT4577_79256C.1
atacgtcgggatctccaattcgcttcctacttttcatgcacacaaaaactaaaacgattgggatgggtttacaccctcaaaggggagataaaccctgtatatatctgatgattgttccttcttattactgcaatctcaatactcctaccatctgctaaaacttcaaaatgcaactaaccatatgatcacaatctcactctctttgcacaaaggcttcagatttccccaccaacaatgttttcgacttctacttcactatatgcgcaaaatatcctattcaatcacttatcctcttgcaaacattcattcaatccatctgattcatctcatctagatctaattatcactgtcatcttatatttaaccccttccacctataacataatacctattttact

SEQ ID NO: 161929 - DNA, 312 bp, Zea mays
  Clone ID: MRT4577_79257C.1
cgactcgcacggcatgcatgcaatgtcatcaatggcctttgtggatcccacatgtgggtgaaccttatgtttcatgccaacgctctgaggttcaccttctttacacccaacgtcatattccactgaatctaactcattgaacataactgatcctgatgggtcctttacgtattccctctcctaaatgctttatctggactaccggaacacccaccttcaaagaatttcctgaacctgtgccgatgaaacaactggcaaagacaagtattgactgttcatcctaaagcttaaaaaccgttacttaattactcg

SEQ ID NO: 161930 - DNA, 1699 bp, Zea mays
  Clone ID: MRT4577_79258C.1
ccaatttcttcgaggaggtcgtaccatggacggaacgtggtggacgagcggtcttcctgccggccgacgcgtccggatcgggttccaaccagcccaaaccaccccgccgccggccgtttccccgcactccaccacctgcgccggcccatcctcccggcctggcccatgccaacgcgccccgcgctgcccttgccgtgcctcagccggatccccctcaaagcacgaccacaccacgccgccggtaccggcgcaccatcgaaaccaaccctagccaaaccaaatcagatcagatccccttcccctctccacgcccaaatcgctccgatccgccgcgaccgcgatggacgacgacgacgacgtgtcgccctcctcctccccgtcgccgccctcctcctccgcgctccccgtggacggccccgtcaccgtcgccgctgcgccgccgggcgcttccatggcggtcgctctcccgatccataggaccgcggcgtccctgtacgctagcgccggcggcgatggcggcggcggcggcgggagggaggacgcctggagcgacggcgccacgtccgcgctcatcgacgcctggggcgagcgcttcgtcgcgctcggccgcggcagcctccgccacccgcagtggcaggaggtcgccgaagccgtctcctcccgtgacggctactccaaggcgcccaagtccgatatccagtgcaaaaaccgcatcgacacgctcaagaagaagtacaaggtcgagaggatcaagccggtctccggctggcagttcttcgaccgcctcgattttctcctcgcgcccacctacggcaacaagcccggcaacggcggcggcgggcacaactccaacagccgcagccagatgcctgcggcgccgcgagtgggcttccctcaacgcagccgcacgccgctcatgcccgcagcaggatccggggccaagcggagggcgccttcgccggagccgtcggtgtcctccgattcctccgacggcttcccgccaatgccggcccttccggcggtgaacgggaagaggaagaggacggacgatgggcgctccgacggaggcggcgaccgcgcgcaggggcttcgggagctggctcaggcgatacggcgcctcggcgaggcgtacgagcgcgtggaggccacgaagctggaacaggaggccgagatggagcgtcggcgcatggacttcgcgcaggagctggagtcgcagcgcgtgcggttcttcctcgacacgcagatggagctcacgcaggccaagaatcacgcgtctcctgccacggccgccgtccctgctgttggctcgtcgaggaggattccgaggatgtcactggttaccgacgccggtggcagcagcaatcaccatagccgttaccggatcagccatgttgacaggcaccgccatgctccacgcccacattaccagcagtaccatgacaacaataacgcgggggcagcggctgcaagtgacggtgagcagtctgacgaggaagattatgaagaagagagccagtaactgcatcattgttcgccataattcatagggttaattaattggatctctatgccatgacaattccgtgttcgtagtgtctaactgagtcgttcttttttatacgctcgcaacgacgtttgatccacctccaggtcactatattttagtacgaaccaaagtaactcttctttctctggcttc

SEQ ID NO: 161931 - DNA, 501 bp, Zea mays
  Clone ID: MRT4577_79259C.1
aacagcagcgcctcaaatggcatcttttgccccccacaaagtcaatacagacgtcagatacctctgtgtactccatcacgtaatcgtgaatgggccaccccatcgtgccctggatcaaaaggaaaaaaaccatgggccggaatgctggcccataagtacgatacgatgcggctctatagcccagcctagaatcgtaacattaaagtctcgctgttctcaaggaagcccatggttgtacgaggcccgcgcatgccggtgcggacggcgtcggcccgagactaggctgcggacggcgggacagcccgctccccactcaggcgaatggcgatcatcaggcctccttttttacaagtgtaggccttttcgccgccaggcggacgcggtcgccgtccagctccccgaggcgcgcggcgcggacgcggtccaggaggccgtagtagagcgcctcgcggtagagcgtcgcctcggggacgcccggcggcacgtggagcgcccccgtgc

SEQ ID NO: 161932 - DNA, 366 bp, Zea mays
  Clone ID: MRT4577_7925C.1
cccgctcccccttcctccaccacggccacgtccacgcccacgccgccgccgccgacacggagcacctgcaccgggcgcaggggccgatggacccgccgtcgtcgtcggggcgccccaccacgccgcgccggcagctgcagggcccgcgcccgcccaggctcaacgtcaggatggagtcgcacgccatcaagaagccctcggcctcgggggctccgccggcgcccgggcaggggaggccgtgggaccaccaccaccaccacccgcagcccgggcgcgcgcccgtcatcatctacgacgcgtcgcccaaggtcattcacgccaagcccagcgaattcatggcgctcgtgcatcggctcacgggccccg

SEQ ID NO: 161933 - DNA, 593 bp, Zea mays
  Clone ID: MRT4577_79260C.1
tcttcgggggagaaacaagaaggacaggcctagtgcacgtcgagaactgtctactgagtaccaggttgcgggttcgaagcggcttctccgcatttgcggggaaaggcttgcatcagcttatcccttccccagacccgacttgttttgcagcctctggcattgggtctgcccttcaatgagaaacaactacactcaatgcatataagaagatggatattccaaaattcagcggtcaagccctgataaactatctgtttgaacaagtggcataactagtactttatacacttcaaggccaaaagaaatcactaactacaaatttcactgaatatgagtacataagtgtgtactgtatttcattgtatgagcaaaactgaacttggcaaatgcatgagtgtgaagagatctattagcacaggacaaactgagggcttgtaattcagctacatatatggtgaggttgatctaacaatgtagtataaaatattggctatcaaaaccaaacagaagatatctgagacattgcataaaaaatcacggatatgaaaaaattatatacctgtgtatagaacaataatatgcataccccatgt

SEQ ID NO: 161934 - DNA, 296 bp, Zea mays
  Clone ID: MRT4577_79261C.1
ctagctgcagaaggccttttgtttggtcaaatgcatattattagcagagtttcaaggaaatgattgtcacacatgtcactgtagcctcttggtgtagcaagctcacatacaaaatacttttgtatatgcataatataaatcatctcatgtggatatgaaacttcttttttaaaacttaaaaaggtagaatgttattgattaccttgattagggcagttttatttccagatcctaataattcctaaaaaatatggaaaagttttttttcaatcattgtaccttgatattaaaacaaa

SEQ ID NO: 161935 - DNA, 210 bp, Zea mays
  Clone ID: MRT4577_79262C.1
gtaatgatcgaggaagttttttgactggacccgtcgcaaacttgagtcaagtgattatcaccacaggcacacacgggagttgcgaaacattgcagatacgtgaaccacacattttactgactacatgtactgtgaatgggatgcataaatgccttgtcagggtgtgtgaagttgaaccttatacccatagagagcagactgaaagtgaat

SEQ ID NO: 161936 - DNA, 367 bp, Zea mays
  Clone ID: MRT4577_79263C.1
tttgcgccgggaaatggcgaagaaccaacaggttggaggcggccagcatatgcatatgaacacggaaattaacttaaaacaaaacagctttttttactactactgcatccttctgatccctcggcactagcgtagcttaccgttccatgcatgcagtgcgcgccgaaagcataatacccttattcacgtgcatgagcgcacgttcaattattgactatcatttttgtatctcttggcatgtgcttatggaacgtaggtgttcttgatcatatcattcactgaccgacccatacatactgagatcgtactggcatacctgatttcatctgctggggcggctccagggctcccaatgggagcccgggcg

SEQ ID NO: 161937 - DNA, 246 bp, Zea mays
  Clone ID: MRT4577_79264C.1
agctcgaattccgttgctgtcctccttcaataaatctattaaacgacgagcttctctgctggattctctatagaaataggaaaaagtcatctctagaaaaaagaggcttaccaaaaaagaggcttctcttgtgtcattccctcccctgaaaatagaaagagttatgtttctaaccaaataaagcgctctttcggacttcctacaattaatgagaaagttgttttctcataaaaaaaaaaaaaaaaa

SEQ ID NO: 161938 - DNA, 311 bp, Zea mays
  Clone ID: MRT4577_79265C.1
gtcaactctcgacttggtgctgcgccttacgggaggcatgcagatctttgtcatgaccttgactggcgatacaatgacccttgaggtggagtcctcagacacgattgacaatgtcaatgcaaagatccatgacaaggatggcatcccacctgactagcaacgtctcatctttgccggtaatcagttggaggatgtgaggacccttgctgactacaacatccagaatgagcgcacctctcgattggtgctgcgtcttaggggtggtatgcagatctctgtgaatactcttactggtaataccatcactcttg

SEQ ID NO: 161939 - DNA, 667 bp, Zea mays
  Clone ID: MRT4577_79266C.1
cgaggatcccattgtagggcaagtccagtgccagcagccgcgggggggggaggtccaatacctgtatatccaaggtgttgctaccaaaaagctagctgtcggaccttgggccgggccggcctagccccctaacggcgagacaccgtaccgggtcaaccctcctgccgggcaagcgctgccatggactataactgtgcacaggatgaggcagtgccgacgccggctactcgtgcaagaaatcagcagggcctcaagagcaaggccatcgagtctaggatacactgcagcagtggccataacatgataaggattgccggcctataggaacatgacccgggagtccgagtgatcattgattgagcacagaccacgcgcatcgttcttatatactctgaggacatatacccggatacatgacaagtaccaacaactagcccaaagcgtacagagcaaggcatgttatgcatctaacccatcgaactccatgtcactgccatggacacgtgcgagtgcgctactcattatggctcatccaacactgtatacatacacctaaatttgtactttaaaagaacttagctgtggggactcacacttaagtgctttgggtcaaaccctgggcactacatccgcaaactgctgtacgacggggtgatcaagttcaaca

SEQ ID NO: 161940 - DNA, 508 bp, Zea mays
  Clone ID: MRT4577_79267C.1
ggcttctcctccccctccggttcgggttcgggttcgtgaggttctcctgttccctccagcttcgacgtccgtcaagccctgcccctctccatggcgttgtcgtcttggctctcagcagctcctccttggcactcggcacactccctggtttcaaccctcaagccccagccgacctctcccatggagctttcagtggaggagagaaagatcctaggtttttggttggagaagaaaagaactagtgcctcgcacactaggtgctcggcgtaatgcttaaatcggaatcatcactattcttgtggattcttttagcttggactgaattgtggcgtgttgtatgttgatatccgaacccaagaatattgtctgtgtgctaatccttcgcggtgttcagggaaggataccgctcctctattttatttgtgacgatttgaattatatggtgaaattggaattctacatattaagttaaataagatggggtgtttagtttagcatatagaatata

SEQ ID NO: 161941 - DNA, 228 bp, Zea mays
  unsure (1)..(228): unsure at all n locations
  Clone ID: MRT4577_79268C.1
ggngncaaagcccattaggaccaacgcacatttgtttatttgcaattactacctaggatctggttggggggcggaaagcaccataacattctgcaccaccgcatcagccaagcgccgcatgtcaaccaccacccccaccatctttttctcccagcggggcgaccacgctgcggcaggccgcccaaacaagaagccaccccaagagacggagacgaagacggaccagac

SEQ ID NO: 161942 - DNA, 725 bp, Zea mays
  Clone ID: MRT4577_79269C.1
aaattggaaagctaaaatggcctcaagctcaactaatgttggagaattccatttggaaagcctactgtgtgttgcggaagtctgagttcccagtaaaatataagtactgtcaagttagtgaagcaggagtctcttcattggagtttggcccaaacagagaggttgatgtggatttatcatcacccaagccatccagacacatcttattatctgatggctccctccgggaagcaccatggaggggtgctggtgttgccgtaccgatgttctcaatcaggtcaaatgaggatcttggtgttggagaattcccagatcttaaacttcttgttgactgggcagtcaattcgggttttcatcttgttcagctccttcctatcaatgatacttctgttaacaagatgtggtgggattcatatccatatagctcactctccgtatttgcgttgcaccccttgtacctgagagtgcaggcgctttcagatgctattccagcagatgttaaggaagagatttcgaaggcaaagaaggagttgggcaaaaaggacgtcgactatgaggcagcgttggccacgaaactcagagttgcccaaaaaaatatttaatttagaaaaggacaaagtgctaaattcagctccgttcaagcagttcttatctgaaaatgaggaatggttgaagccatatgctgcattttgctttcttcgggatttcttcgatacatcagatca

SEQ ID NO: 161943 - DNA, 293 bp, Zea mays
  Clone ID: MRT4577_7926C.1
gactaataagggaactactccataccctctacacatccttatgtacactgggtcaaagagtcggcaagtctgtgctggtcgggaacattaacatgtgggtgtataggatggacactctctccactggcagcagcagctgaacaacattcagatcaccagggtaagcgggcaggcccagcctcctcccggcagtcggtccctccacagggatactggacagactcgccaagactttgaattcactcctgtgacggaagagtctggtcttttctgatctgctgctttgttctggt

SEQ ID NO: 161944 - DNA, 804 bp, Zea mays
  Clone ID: MRT4577_79270C.1
aattcccgatctcccagccccgacccccaccagacctccgccgcaaaccgaatccctcgccccgcccccgaaaccctagccagcggcggcgatgggcaacccggagaagctgatggcgcagatcttcgacctcaagttcacgtccaagtcgctgcagcggcaggcgcgcaagtgcgagaaggaggagaaggagcagaagctcaaggtgaagaaggccatcgagaagggcaacgtggacggcgcccggatctacgccgagaacgccatccgcaagcgcaccgagcacatgaactacctccgcctcgcctcccgcctcgacgccgtcgtcgcgcgcctcgacacgcaggccaagatgcaggccatcggcaagtccatgggcagcatcgtcaagtcgctcgactcctccctcgccacgggcaacctccagaagatgtccgagaccatggacagcttcgagcgccagttcgtcaacatggaggtccaggccgagttcatggagggcgccatggccggctccacctccctctccacgcccgagaccgaggtcaactccctcatgcagcaggtcgccgacgactacggcctcgaggtctccgtcggcctcccccaggccgcagcccacgccatcccggccgccaaggacaaggagaaggtcgacgaggacgacctcacccgccgcctcgccgagctcaaggcccgcggctgaacgacggctttttcacttcacttcacttcaggtacggctcatgcaatgttcactcgcttcgccgtcagttgtcaggggctgctcatatctgacagccc

SEQ ID NO: 161945 - DNA, 302 bp, Zea mays
  Clone ID: MRT4577_79271C.1
gttcctcacgacacggttgcgtctaggccccccaacgcgcacgacagaaacgccgcccggagaaacggtgcacacaacacgcccaggagagaggggcgccacggccctaggaacgctaaggggcctcctacaccatatcgggcgtcaaatgcttccttcgcaatctggggaacgggaagaagggggatcgctaggaaactgggggcaaaatgcaagggagataaaacctgcatttgggtccctaagacagtggggactaaccccgggggacccaacaagagcggggcacccaaggcccaagc

SEQ ID NO: 161946 - DNA, 308 bp, Zea mays
  Clone ID: MRT4577_79272C.1
acgaaaatggatgctggcgtacatgatgcaactgttaggatagacgccctaaccgggggcacggtggatctgcacgaggccacagattgtatatgatccaggacaacctgacacccgcatatcttgaaacagacctattacgcttgatttcgtacttacattgagcatgacattgggtcccacacattcggcgagcacaagaagactctaattgtctacgtgaggataccgacctacaaacgtccttacgttgaatctaccactgtgacacacgatgcaacggattcgtacaaaacttctgagaaaag

SEQ ID NO: 161947 - DNA, 299 bp, Zea mays
  Clone ID: MRT4577_79273C.1
tacagaggtgctcagggctctatgcggagggatgtggttggtctgaccagacgtggaaccacatagtacgtacatcctacacttgatgaaggccgaaagaagatacataattggacacacatacgacgcgagatggatgctgatgcttctgcaaaccactcgtacttgtaaggggaacgagcagaaactacatggaaggaaggtagcacaaaccttggggtccaacgtgagaaaccatcacaccagttcatacaagcagcactggcacagaagcaatatgcgctagcaccaactccagg

SEQ ID NO: 161948 - DNA, 235 bp, Zea mays
  Clone ID: MRT4577_79274C.1
taccaaggttttttttatggccacttctttggttgcaagggaaatctccagccttaaattccttttccctaagggtttacacaggggcgggggctataaagctcattccagtaccatttgggctttttaattgtttcaaggcgatttttttgtttttagcctcgtacgggttggaaggtttaacccccggtgggggattttggggggttaccagggaacctattttggcctttaa

SEQ ID NO: 161949 - DNA, 388 bp, Zea mays
  Clone ID: MRT4577_79275C.1
gccagcgccatccacccgctcccctccgcgcccggccgcaccgctcccctccgctcggccttgggcggcgccacagccgcaagcgactggcgtcatatcccatcctgatctctccttccttcttcagtgcagctgcaggccagctgcactccacccgcctcactcccgcctccgatcctctgcttactcgccacccgtagatggccaccttctccggcttctctgtattctcttctgctgtcttcttcaattgtctttcttttcatcatttttttttaggttctaatattaaatctatctttgtttgttatttctctttcttcctcttatatttttagaattatttttgttcttttttttttctaattttcaacccctttttctaaat

SEQ ID NO: 161950 - DNA, 211 bp, Zea mays
  unsure (1)..(211): unsure at all n locations
  Clone ID: MRT4577_79276C.1
cccacgcgtccgaacttctttcccacccctcctgtgcaccgctcactttctaacgacggggttcacccgggcgaggtgcgctttaatctcccctactgtttcatcctcnaaaatgtcgccatgtactatcctatcagcgttggcgtgcactcatgccgcctcactgctgtgttgcccaaaacgctcctactcttcttgggcgcctgcccca

SEQ ID NO: 161951 - DNA, 3579 bp, Zea mays
  Clone ID: MRT4577_79277C.1
ttgggtacctcgaggccggcggggaggtccaattcggcacgaggattcggtcccccccctctgctctctcgaagcctccaggctccagaacccccaccccctctcctctcgcgccgcgaggggttgatccgtccggcgatctgggccctccggccggcgcccgcgcctgggaggcttttccttacccgccgcacgggcggagatgctctcgctccaacagcagcacggcggcgctgtcgccgccggcggcgatgcgcgccaccacgcaccgcagccgtcggtgctcggtggaggcgcggactggctagtgttcgggggccgcgccgacctggaggagcccgcgaggaatgccccgtcgcccgccttgttccttcttccgcccgcggggctcgatgacagggcggcccagcccgagcccaatcccaagcccgcacagctcgcaggagctgttgatgaagagcgacatttggcacttgcacatcaaaactacaggtcagggaagtaccgagaggctctagagcatggtaatgtcgtttacgagaagaatccacgtcgaactgataacctcctcctccttggagctatatactatcagattcgtaattatgacatgtgcattgcaaaaaacgaggaggctcttgccatagatccacattttgctgaatgctacggcaatatggcaaatgcttggaaggagaaaggtgatattgatcttgcaattcgttactatcttactgctattcagctgcgaccaaacttctgtgatgcatggtcaaatctcgctagcgcatatacaaggaaggggagactgaatgaggcagctcaatgttgtagacaggcacttgctataaatcctcgattggttgatgcacatagtaatcttggaaatctgatgaaagctcaaggctttattcaagaggcatacagttgctacatcgaggcgttacgtattgatcctcattttgcaattgcatggtcaaaccttgctggtctgtttatggaggcaggagacctcgacaaggctttaatgtattataaggaagctgttaagcttaagccatctttcgctgatgcatatcttaatcaagggaatgtttataaggctttgggaatgcctcaagatgccattatgtgttatcaacgtgcactgcaggcacgtcctgactatgctatggcttatggtaatcttgctactatttactatgagcaaggccagcttgatatggcaattcgttgttacaatcaagctatagtctacgacccacagtttattgaagcatacaacaacatgggcaacgcacttaaagatgctggaagagtagaagaagcaatcaactgctacagatcctgccttgcactgcaagcaaaccacccgcaagcccttactaatttaggaaacatatacatggagtggaacatgataagcgctgctacttcattttacaaagcagctatatctgtgacatctggattatcttccccacttaacaacttggctgtgatatacaagcaacagggaaactatgctgatgctatcacatgttacactgaagtactccgtatagatcctacagcagctgatgcactagttaatagagggaacacattcaaagagattggcagagttaatgaagcaattcaggattatgttcaggcagcaacaatcaggccaaacatgccagaagcccatgccaacttggcctcagcatacaaggacagtgggcatgtagaaacggctataattagctacaagcaggctctccggctgcgtcctgattttcctgaggcaacctgtaatctcctgcatactctacagtgtgtctgtgactgggaaaacagagatggcatgtttcgagatgttgaagaaattattagaaggcaaataaagatgtcagtacttccaagtgttcaacctttccatgccattgcttatcctattgatccattgcttgctttggaaataagccgtaaatatgcggcccactgttccttgattgcctctcgttttgggctgccgccttttgtgcatccacctcctgttcctgtaaaagcagagggtaaacactgccgactgaaagtaggatatgtgagtagtgattttggtaatcaccccctttcccatctcatgggatcagtatttggaatgcatgatcgtgccaatatcgaggtcttttgctatgcactcagtcaaaacgatggtactgagtggaggcagcgtattcagtctgaggcagaacattttgtcgatgtttctgccatgacttccgataatatcgccaagcttatcaatcaagacaaaatacaaattttgataaatcttaatggctacacaaagggtgccaggaacgaaatttttgcaatgcagccagcacctatccaagtttcgtacatggggttccctggaacaacgggtgctgcatacatagattacttggtcacagatgagtttgtttctccatctagctatgcacatatatattcagaaaagctcgtccatttgcctcattgctattttgtcaatgactacaagcagaaaaatcgagactgtctcactccagtatgtccacacaaaagatctgattatggattacctgaggataaatttatttttgcttgcttcaatcagctttacaaaatggaccctgagatatttgacacatggtgcaatattctcaaacgtgttcccaacagcgcattatggcttttaagattcccggcagctggtgaaactagagtgagagcatatgctgctgccagaggagtaagatcagatcaaattgtattcacagacgttgccatgaaaaatgagcatatacgacgcagtgccctggcagaccttttcctggacactcccctctgcaatgcacacacaacaggcactgacatactgtgggctggtctgccaatgatcacccttccactagagaaaatggcaaccagagtagctggttccctctgcgtagctactgggcttggggaggagatgattgttagcagcatgaagaagtatgaagatagagcagtagaactagcgctgaatccggtgaagcttcaagcgctgactaacaagctcaaggaagttcgtatgacctgcccgttgtttgatacagctcgatgggtgcgcaaccttgaaagggcatactacaagatgtggaacctttactgctccagtcgccacccggagccattcaaggtggtagaggatgacaatgagtccccatttgaccgctaacgagatctcatcagcagcccggctctgtaaataaggcgagagttgtagaatatttagcatcgtgaccgctgttgctccaggtgcttgtttgccgccccctttcctgccgtgcacatcacctctgtggaggctaacttcgtagtatgtatgtactacactgcaaaagaagtcctagggttagcctattgttatcactatttagtttgctatattgtatcgcggtcgtggtttctaaaataaactgcaacctttaggagtgttgatgtgaaatctcattcttaatagcttctgtccaaaaaaaaaaaaaaaaaaaaaaaaaaaaaaactcgaggaagggcgccggtacc

SEQ ID NO: 161952 - DNA, 381 bp, Zea mays
  Clone ID: MRT4577_79278C.1
ctcggatacaagttcaactttggagttggggggatttggtcgggcatgctatgtggtgtcacacttcagacgatcatcttgctagttgtgatttggaggagagattggaaatcagaggcagcacaggcttcaagccgtgtgcaaaagtggggcggcaaaggcactgatgaagtcaagcctctcctgcaatagaattagtgtagtactaccattcaagtttatttttcttgccccacggtactttcccgctgcaggacataccaggctcgtttaatttgaattgaataatcatgcatggggcactggtaaagtgttatagctgaaattgtttgcaatttgatgcactatgttttgattgagctgaagtagttggattgctga

SEQ ID NO: 161953 - DNA, 723 bp, Zea mays
  Clone ID: MRT4577_79279C.1
ccggccgggagttccgagtccccattcggtcccccccctctgctctctcgaagcctccaggctccagaacccccaccccctctcctctcgcgccgcgaggggttgatccgtccggcgatctgggccctccggccggcgcccgcgcctgggaggcttttccttacccgccgcacgggcggagatgctctcgctccaacagcagcacggcggcgctgtcgccgccggcggcgatgcgcgccaccacgcaccgcagccgtcggtgctcggtggaggcgcggactggctagtgttcgggggccgcgccgacctggaggagcccgcgaggaatgccccgtcgcccgccttgttccttcttccgcccgcggggctcgatgacagggcggcccagcccgagcccaatcccaagcccgcacagctcgcaggaggcgatcgtgccgactgtttcgactttggactgggagaagtgggcacaaaagctgttgatgaagagcgacatttggcacttgcacatcaaaactacaggtcagggaagtaccgagaggctctagagcatggtaatgtcgtttacgagaagaatccacgtcgaactgataacctcctcctccttggagctatatactatcagattcgtaattatgacatgtgcattgcaaaaaaagaggaggctcttgccatagatccacattttgctgaatgctacggcaatatggcaaatgcttggaa

SEQ ID NO: 161954 - DNA, 159 bp, Zea mays
  Clone ID: MRT4577_7927C.1
aaaaagggaccagaggaccatagccaccaataagactaggagaggatcccagggagagagagaaagccggcccaaaagaagcccgcgaaccgggagcacaaagagggcctctccccgaccaaagaggccccccccgggccccaagaggaaaggtccgag

SEQ ID NO: 161955 - DNA, 587 bp, Zea mays
  Clone ID: MRT4577_79280C.1
ccagagtagctggttccctctgcgtagctactgggcttggggaggagatgattgttagcagcatgaagaagtatgaagatagagcagtagaactagcgctgaatccggtgaagcttcaagcgttgactaacaagctcaaggaagttcgtatgacctgcccgttgtttgatacagctcgatgggtgcgcaaccttgaaagggcatactacaagatgtggaacctttactgctccagtcgccacccggagccattcaaggtggtagaggatgacaatgagtccccatttgaccgctaacgagatctcatcagcagcccggctctgtaaataaggcgagagttgtagaatatttagcatcgtgaccgctgttgctccaggtgcttgtttgccgccccctttcctgccgtgcacatcacctctgtggaggctaacttcgtagtatgtatgtactacactgcaaaagaagtcctagggttagcctattgttatcactatttagtttgctatattgtatcgcggtcgtggtttctaaaataaactgcaacctttaggagtgttgatgggaaaaaaaaaaaaaaaaaagcggcc

SEQ ID NO: 161956 - DNA, 278 bp, Zea mays
  Clone ID: MRT4577_79281C.1
tcttccttcttcactgcctcgtgtggccgtcgtctcgcgttcttaacaccaagcccgggctcctactaaatggcccccaagcgaggtggcagggcgccggtgccggccaataagaatactgataatgtgactaaccctttattttagaagaggccgtagcatttcggctatctgcggcgcgttgccgtccaagaaggacctgcaccggttttgtcaagtggtccaaggtcttgcgtattcagcggtagtttcttattctttagcaatgccttatggta

SEQ ID NO: 161957 - DNA, 236 bp, Zea mays
  Clone ID: MRT4577_79282C.1
aacaaaaatggggaacgggaaactaaaacaagaggtgtcatacatctgggtagtgctacaacaatatgcacccctgatggctacccaatgatttggcaacggcagaataaacggacagaagatacttatgcaacctccatatggagagtgggcaccaaacgtcgcatgcacataggcagcttaaacgacccatgacttactgaccaccacggagacggagctcaaggtggagggtg

SEQ ID NO: 161958 - DNA, 1129 bp, Zea mays
  unsure (1)..(1129): unsure at all n locations
  Clone ID: MRT4577_79283C.1
gtagaacaacggtctggncataccaacanaatgatgatggggcgttcgatcagtttcaaccagatgaagaattgaaacggaggaagaagatctcatatgtccggagacgcagagatatgtacaaggctttagggcctggttcacaagctgaggatgctactttgctggcatttgggacactcttctcaggaccatacaggggatctgagtcttattttgatatccatgaatcgcctaaggaccaaagagtacaaagggtactagagaaggttgagtttcttccctttgcaccggagatcatggctgcagggaaggaatttgctaagaacaacattaaggagccatttctttgtgcgcaacttaggttgctggatgggcaattcaaaaatcactggaaagcaacattctctgccctcaaggagaagttggaagctattgaactagaaattaggagaaacatgactagtggccttattcacatgttcgtcatgactgatcttccaccaacaaactggaccaacaccttccttggagatgttgcaacagatgagcgatataaactgtacacactgaaggaaagtgacgacttagtgctgcaaactgcagaaaggcttatggctgcagaacatggtattcggtctggattccttcagaaaatcatagagagcacaaagaaggactgcgaccctgttcaactgccagaaattttgttgtatattgaagaatctgtttgtagttgtgcatcactaggatttgttgggactgcaggatcaaccatagcaggaagcatagaaacaatgaggaaaaacaaagtgtgcaaattgtagggaagaacatctttgagttaggtaccagaaaccatgctgattgacgtgttatagcaaaacaagagttagttttttctgacgggttcaattgactgtagagtgttgagcttcacatgggaaaattctagtatattatgaagagaagttgcaccattttcccctacgtgtacagaaagatcatgttcatgcttgtgttatctgaatcgttttgagaagctatgtgctttttcctcagttttgtactcctacatttattttccagtgagaccnnnnnnnnnnnnnnnnnnnnnaaaaaaaaaaaa

SEQ ID NO: 161959 - DNA, 310 bp, Zea mays
  Clone ID: MRT4577_79284C.1
cccacgcgtccgcggacgcgtgcggttactgtcgtgacatgttcagcggcgcacgagacatatgatataccatgctcaacctagtagcgtgtgcaggatatggccaataattgcactggatctgatcatacagataatgataaagaaaggctcgctccactaatagcttattggagcactttactagacgttcgcatatctcgcgaccattaaagggtaatatctatcacatcatcacaactagtacgccatactgagtgaaagatagcatgatcgctttgcattaccagtactgcgcctgactcgctta

SEQ ID NO: 161960 - DNA, 390 bp, Zea mays
  unsure (1)..(390): unsure at all n locations
  Clone ID: MRT4577_79285C.1
agcagtggtaacaacgcagagtacttttttttttttttttttttttttttttttctttttttttttttttttttttttttttttttttttttttttttttttttttttttttttttttttnccgaagaaaccccggagggaaccgggcttttttaataaaaggaaaggcataaggggccccccaaacccacccacccagcccccccccaaagggtttttcacgacccagggagggggaagggcccaaacccaggttaaaggggaaccaaaaaaaaaccggaggggccaaaaccgggaaaccagccccaaaggccaacctgggggggaaagccccccccaccccttgggggataaccaaagaaccccaaagccccccttttagggtggggg

SEQ ID NO: 161961 - DNA, 184 bp, Zea mays
  Clone ID: MRT4577_79286C.1
tacgtaagcaccgaattattctcgtgcgacatttatccgcagcaaacacactcgggtctgtgtctccctccctccttgtggggccctcaacagcgtctctgctccatgcccagccccatggatcccgccgctgcggaccggccgtgtgtcatccaatctctcctggcgaactgtaacaccctaa

SEQ ID NO: 161962 - DNA, 246 bp, Zea mays
  Clone ID: MRT4577_79287C.1
cccacgcgtccggcggcgagggcgagcgcgtgacggtgcggcgttagcccgctgtgccgtagagctggtcggacgtgcggtgccggtgggggctcatgctgtgcgcggaggccgtacggtatcattctggtcgagcaggtggcctcggacggcggcggggccttcgccgtctcagaggcagctcggcatgtgtgggggctgttggtgcaagcacgcggtatggagcgcgcgttatgcttcgtgctt

SEQ ID NO: 161963 - DNA, 602 bp, Zea mays
  Clone ID: MRT4577_79288C.1
gccggccgggtcgggatagacgtacagaaattaccggattatcctccacagaatcaattaacgtgtaccatacagaggttccgactggtacaaggactatagcattgaatgctgtcctggctatgaccctgaaaggaggcctgccgcaatgatgcccaacaacatcatagagcagttcctctacctctccttcggtggcgggcatctgaagcgcgtgggggacctgctcgagctccagcagtcaacggcggatctgggcctgctgctgaagaacttctacgcggagctgagaggctccgccgacgaacgggatataggagacacgacgctcacgatccacactaagaaccggctgtggcgaacgctgaggataaggacttgacggcccaacattaggtctgcaggtcgcactgaacgagaagtagctctcgcgcttgactcctgagatgcgctttacatgagctaaactgcatcgcacacagacagtgaatgggaaccgaggacactgtaaacatatcttgtaggattgcagcgtagcaggtgcaagcacaacaatatattatgaatctatcgaatagatagaaaaaaaaggcccactagac

SEQ ID NO: 161964 - DNA, 223 bp, Zea mays
  Clone ID: MRT4577_79289C.1
tgccgggcatggcagtgccaatgacgctgactttgacccgttcggcgccgcgctgtgcaagggcgtccaataccccctccccccttggcgccggcatcaaacacgacgcgggcggcgtcggcgctggagcgtccccgccctgcaggcctgcggtcaccggcaatggcggcggcaggaagaagtggcggctcagggacctgcgcctcttccggaaggcagccaa

SEQ ID NO: 161965 - DNA, 756 bp, Zea mays
  unsure (1)..(756): unsure at all n locations
  Clone ID: MRT4577_7928C.1
tttggattgaagggagctctgtctttggttggctatgaagaatagatgctggactgctgacagattagagaagagaggctttccgcacccggtggtttgccccctatgcgatcaagagcaggaaacaatccagcaccttctcacctcttgtatcttcggccgtcggttctggcacagtttattactcccttttgggctggatcatctcacgccgactgattatactccttcacagaatggccgacagtttgttgggtttggctggtgctaagggcctaggttccttagacctagctagggctttgaatgtggccggttccttggccatctagctccttgattggtatcttctgttttttcttagcaggtcatcatatgctttgtacccccctccctgggtttattctctttccctcttatttataaagatgtgcagttctcctgcgcattagagaaaaaaagatgctccacttctaccttgagtttgaagggactgttaagtctattaaggtcgatatactatatagacccatatggcccatgaggttctttatataatgtcatatccactacttggaacatcttttaatacccccatagtttcgtgccaggtagaatgaactagagaaccaaaattatatattaatttagagctaagctaaatacctcagatggtacacggttacaaataaaactataacattcatattaatgatcatgtgagaagaaacatcgtncagatagacgagatatgcg

SEQ ID NO: 161966 - DNA, 185 bp, Zea mays
  unsure (1)..(185): unsure at all n locations
  Clone ID: MRT4577_79290C.1
ctcgagccggccgggaggcatgactagagcgacaagggaaagatgtcactatcactgcattctccaaatggtggggatgcccttcaggccgctgntatactggncaagggagntatcantggccgagntaatcaatccttcgctcatttagcccgctggatagagntactattaatggctttgtg

SEQ ID NO: 161967 - DNA, 314 bp, Zea mays
  unsure (1)..(314): unsure at all n locations
  Clone ID: MRT4577_79291C.1
attatctttttaaccccacacanannnnccagcccagggannanttttaaaagaacaggcgggaaaagcccgccgaaagagccggaaaaaaacggccatttttcgggaatcaaaatgacctttcaagaaaatcccattggtcccggaagacaaacaaaaaaatacccgactggggaaaaaaaacaagggcccccggggggggagccacgggcccaccaagccccaaatacccttagactggcccggaaatgaaattgggggaccctggccctctaccggggggggaaaaaggggacccctacccagggtgcccc

SEQ ID NO: 161968 - DNA, 128 bp, Zea mays
  Clone ID: MRT4577_79292C.1
aaaggttgggggggaagcccaaaaacagtgtaataggggaaccttataagttccactcctataaattattttccggccggaggcttaataaaaccacaaaggactttttaccaatggtgcacattttt

SEQ ID NO: 161969 - DNA, 281 bp, Zea mays
  Clone ID: MRT4577_79293C.1
ttcttctttttttttgggtgaacgacggagagggggttccccccttctagcccccgcgggagggtcggtcttcaccgaggcaaggctgacccttgcttgacgaccaaactttgtgtgcgaacagggtgtacgaataacttggaagcatcttaagggtaaaagcaacgtagatgctggatgttgcaagaaccaatgtaaaccataacttgactgtaggccagctcgtatggacggggcttcaaaaccttggcgacgactaacaggccttcccagggaggcga

SEQ ID NO: 161970 - DNA, 426 bp, Zea mays
  Clone ID: MRT4577_79294C.1
ctgaggcacatcgtgcacagagcgtaccatgctctcgaactggtggctgacgtgccgggccacatccacgccgatggctcccacgctggtaatctgctatgaccgggttacgacaccgaacgcttcctctggggctcctactgctccttgcgcatctactacgatccttccccctccgacggcggcagcgagatccggtgggacgggccctacgcgctcgagcggcaagagccgtatatctggccatgcccgtgcttagccatggaggtcaacgtcagcagggacctcctgatctggctgtgcgagtggatcacactacagcgactgaccgggctcgagaccgtcgatggcggatgtatccatacaaaggggaccaacgtgtttgcttgggacgagcagctgggctctctagacgacagtcgacag

SEQ ID NO: 161971 - DNA, 117 bp, Zea mays
  Clone ID: MRT4577_79295C.1
cttgcttgtactttataatgatttcgtcatatggttctcaatatttgctattgttagtgatgttagcatcataatcttgagtactacacaatactaatatagtacatactttttgtt

SEQ ID NO: 161972 - DNA, 335 bp, Zea mays
  Clone ID: MRT4577_79296C.1
ctacatactaaaaattggggatagttgactagaaaagcggcaaacccaatatccctaaagaaactaatgttgcacaccctttgcaacggtgggcttcgcataattgaagaaggcaatgcagatgtgcaagggagatagctggcaaactgggacgggcacatataaggattgacctattccaccggaggcctgagatgtgcaaacggtgcatacaagttggtgctgactccaacgtgcacctaagattatgtgacggtatctgaagacactattcatgtcatacgacatgctggtagagccatattgacgctacgcgcctggaaactccactggat

SEQ ID NO: 161973 - DNA, 527 bp, Zea mays
  Clone ID: MRT4577_79297C.1
taagatttctgtctactaagtgatgctgtgataccttaggcactataagtgagctagtaatgctttttgagtttcatgttggtttattttcacagattggggtaacgtgcactgtaagacgtatgtaacatgatgttaactttgtgtggtctaaagtgtttagctgtcaagccggatgcctaagtagaccaaatcttgttattgaagtgttctgagctgtatcttgatgtttagaaaagtattcgttacatcttgtaggatctactttttgaacttttcattccctgtagttgacaattctgcatgtactagtcctctagaaataggttaaactgaagcaacttgatggaaggatctctccacagggcttgttttccaaagaaaagtattgtttggaggagcaaagttaaaagcctacctaagcatatcgtaaagctgttcaaaaataactcagacccagtcttgtggatggaaatgtagtgctcgagtcacattctgcttaaagttgtaacaaatacagatgagtt

SEQ ID NO: 161974 - DNA, 336 bp, Zea mays
  Clone ID: MRT4577_79298C.1
ggcaaaaaggaacaaataatcttatttccaaaggctagatgaggggggaaaaccgtccaaaggctttttggcaggggccccatttttaccagttgcaaggggcttagaaaaacccagggtttttatacccattacactgtatattttttcatccaggacccagctacaaggaactaacgcggaacttttgccctcaaccatttgaaaggtctacaatttcacctttaattggggaacccgtgggaaaaaacatatgttcatgaccagtttgttttccaaaaactccgttgctactcacaggatgacttgagcaggattttttttaaagttgaaaaa

SEQ ID NO: 161975 - DNA, 656 bp, Zea mays
  Clone ID: MRT4577_79299C.1
gtggcaaaggttttaggggtaagcagagaggactcccggcggcggcgcgaagcggagagagagagaggggcagagagatgtcgaagcgagctggtcccccgaagcaccagaacacctacgcatggaagcccaacctcggccggaagatcaacgagaccgagcccgggggcaggttccggcctctgtcggagatcaccggcgtctgccagcgctgccgggaccaaatcgactggaagcgcaaatacggcaagtacaagccaattgttgagcctgcaaaatgccagaagtgcagtaaaagaaacgtccggcaggcataccacaacgtctgcactggttgctccaaggagcttgggatttgtgccaagtgctgcacctctgttaagcagcttgttggaagggatgctgaggaagcaaacagtgagcgcaaagaactagaggaggccatcagatatgctagggagagggaacgacggacacttcttcgccttatgaacaaaaacaaggatgagagcgggccatcagtcccaaagattgcagaccgagatcgggaaggcgaccttttccctgttgcatccctggacgaatatgctgaacaggctgtacagaaggatgagtctgatgaagaagatgccagggattttgtgaaagattaactt

SEQ ID NO: 161976 - DNA, 395 bp, Zea mays
  Clone ID: MRT4577_7929C.1
atagggtgagagaagaaaatggacaaaatctcttgacatgctctaattttaatggtcctcatatgagacactgttctacttgctactgtatgggattagtgtaacatataaggcctctcatgtgagttagcataatatacaaaaatgctacatatacaaatctcattaactcaattattgtacgcctaaaatctgattacttgaatggagttcaattcctactggccacaggggtctaatgtctttgtgtgcacaatacaatgatttgctgcagaaacttggtgatctacctgctacaatgtcaagacatgttgtgccaatatgtcacccgtagttcatttatctgcatagcgcccgcattactccaagagtttagaaaatgcatgtgctccaac

SEQ ID NO: 161977 - DNA, 778 bp, Zea mays
  Clone ID: MRT4577_792C.1
aacgttaaaacatgtttgttttgtttagagtataaatcattacacttacattacatttcatacttacgttacatttaatgaaccaaacagcaccttagttcttactattactaaactccaaatcaacttaactattcccacaaattatgctgacgttcaaaatgcacgaacaacagcatatcggttaaatgcactataaaactccagtatccttaaagtacactatcatgaaggcacatcctccaatggatgtgcaaacagacaaaggcccggatgaaatgagatacagaaatcgatgttgtttccccttctcctcctgaccttgttactcatccaacatgacggcattcttccttacctgaaatgatcaaagcatcaaatgtgtattagtattatccaggctaagttgacagctgttgcaacgttatgcatccttttcattgtctgtttttgttttgttggcatcagcaaaagcataagaagaattgtatacatggcgaacaccacctgatcgaacacacagtaaaatatggggaaaatatttagaacggattactattagagcagcaattagaattagtcagggtaccaggtgtccagatacccataaaattatttaaatcattataaattatatacaactgatgctgaagaaaataagacaacgacaaaagagtttttcacatgaagagggcattagcattacctgggtagacgacgttccttgtttaatctcagagctctttctttttcctcttcggacctaaacggacgcgtg

SEQ ID NO: 161978 - DNA, 516 bp, Zea mays
  Clone ID: MRT4577_79300C.1
tttttttttttttttgttcaacatacatgggttattcattcatcaagaaaagtataacctccgaagcccaacaagtaacgcagctcaagctactactgcctagaccatgatgtggtaagccctaacgatgaatgaactctctgagtattaaccacatcgcaaccagaaaaccagaagaaattagctagtgaaaacgtacacgagcaaccttcacatttgcaatgcgaaggacgcgcggttgatatatagcttaatactatatatgttcttggaacaaacatcagtcactcttgtcacaagcaatctctaatagatagacaatagatatactagtaaacatatgcaggggggacgatgaataacattccgaccaaatgccaaaataacagcaactgtcggtggatcaaagcacgggccgaagccttactcctcttttacggcagcctccttggagtacgcctggagcacctcaatcccctcctcgatagaggccggggagttcgggtcttcgcctcg

SEQ ID NO: 161979 - DNA, 812 bp, Zea mays
  Clone ID: MRT4577_79301C.1
ccggccgggaattgccttgccttcgcttcttccgtgtcctgtgatcgggtaatcatgtaagcttttaaaggttttcctgcgcacttcgcgtgctgccgtgcagtaccagcgtggcgtctcgccggtgcagaatgccttgggtgcgcagggcaccagcaggtggatgaacggcgtccgcaactacgccgcctttacacgagacaagcctcatgttaacattggtacgattggccacgtcgatcacggaaagaccactctcacagccgccatcaccaagcgacaagcagaaaagggctttgctaaatacctcgactatggctccattgacaaggcccccgaagagcgcaagcgtggtatcacaatctcgaccgcccacattgagtaccaaaccgaaaaccgccactacgcccacgtcgactgccccggtcacgctgattacatcaagaacatgattacgggagccgccaacatggacggtgccattattgttgttgccgcttccgacggtcagatgccccagacccgtgagcacttgctgctcgcccgccaggtcggtgtccagaagatcgttgtcttcgtcaacaaggtcgacgctgttgaggacaaggaaatgttggagcttgtcgagatggaaatgcgcgaactgcttagcagctatggctttgagggtgacgagacccccattgtcatgggctctgccctctgtgccattgagaaccgccagccggaaattggtgtcaccaagattgacgagctgctcgaggccgtcgattcatggattcctacccctcagcgtgagactgacaagcctt

SEQ ID NO: 161980 - DNA, 163 bp, Zea mays
  Clone ID: MRT4577_79302C.1
cggggcgaagcaattctatcctcatgaatcatcggaagggatccggcgattccccatggccggccgacaccgaaacccgctgccaccttcctacccccgcgccgccgctgccgtcgacggcaaccatttgcctcccccgcttcaccactaccttcagccacac

SEQ ID NO: 161981 - DNA, 395 bp, Zea mays
  Clone ID: MRT4577_79303C.1
actcaaataattaccacaaccaagttaccagtaccataaacagagtcctagtctgctactgctacaactactttggtaatttgtatgcgagtatgcggctgcagcaagatgttggtactgtcgtctaggagacgccactggcataggctttacatcgatgcttcaaacggagagtcttcaaggcaccagttcccacgaaaacagagtttgtttttggcctagggccattgcgacaccttgtatactatccctttgcggaaaaaaaaaatggaggggacacggacgcccctgttgtttaaagaaaaaaacacggattgtacttttgatgtattctaggcctgggggatttcaatcctctatttcacgtttactgtacactgaactattcacaatgt

SEQ ID NO: 161982 - DNA, 296 bp, Zea mays
  Clone ID: MRT4577_79304C.1
ggtgttattgttctggaggaatgtgggctgggttatatttttttggtggggaaaacaacagttcaagggtgtgggaaaaggatacattcgccagattggtggggggacttacagaaaaagcgctcaaaaccaaaattaacagctccctggaaacaaaacaccaccggcaatttggatccaaaagagtaaagccgccaaaactgactggaaatggcagataaaaagggcccttcagagcctaagtggctataaacaaggttcgacttattgatgcacaacgagacaacaaattttac

SEQ ID NO: 161983 - DNA, 787 bp, Zea mays
  Clone ID: MRT4577_79305C.1
gggtacctcgaggccggccgaaggtaagcgaagaagatccggactctctcgctcgagggtagggcagggcagggcagggcaggcggcgatccgaatccaatcgccggagggaggaagccaccggtggccgcagtgagggcggcggaggtagaggcaaagggatgacgcgcgggaagcagaagatcgacgcgcagcggcgtaacgcggagcgaaaccagaaatccaaggggtctcagctcgaggcccgcgccgtcggcctcaagatcgtctgctccatctgcaaggcagtttgtacgtattggtgccttggtagtagtgttacctaggcactgtgactcgaagtggaatctactagccagtgtaaccttctcctagcatgatttgatcccagagctaatacttcagaaacagttcctgccgtggaacgttttgtgggtacaattggcaaatgaaaaacagctgaccgatcactatggatcaaagcatccaaaggagaaacctccgagcacatcgagcaccgaataaccatggctggtcgtgacgcagaaatatagatcctgcttggctggtttgaggatctttaagtccgtctgatccatgccttggacctcaacgtcagttatatactctctagtgtgtgcatttcctcttgtttcaggtattgtgttgtcgtgctgccaatgtgtctccaaagtccaaactgtatgtggtcaccatggcattgggatgatgcgaaaaaattatgagcgtatctatgttcgaaaaaaaaaaaaaaaaaaggccccta

SEQ ID NO: 161984 - DNA, 880 bp, Zea mays
  Clone ID: MRT4577_79306C.1
atgcattgggtgcctcggggccggccgggcggccagcgagaagcatccggactctctcgctcgagggtagggcagggcagggcagggcaggcggcgatccgaatccaatcgccggagggaggaagccaccggtggccgcagtgagggcggcggaggtagaggcaaagggatgacgcgcgggaagcagaagatcgacgcgcagcggcgtaacgcggagcgaaaccagaaatccaaggggtctcagctcgaggcccgcgccgtcggcctcaagatcgtctgctccatctgcaaggtacaattggcaaatgaaaaacagctgaccgatcactatggatcaaagcatccaaaggagaaacctccgagcacatcgagcaccgaataaccatggctggtcgtgacgcagaaatatagatccttggctggtttgaggatctttaagtccgtctgatccatgccttggacctcaacgtcagttatatactctctagtgtgttcatttcctcttgtttcaggtattgtgttgtcgtgctgccaatgtgtctccaaactgtatgtggtcaccatggcattgggatgatgcgaaaaaattatgagcgtatctatgttccaatgtttgtgtggcttacaagatggtttgtgcccgtgcgttcgctccctgtaaagggcttcgcccgtgccgcttgatcggcgccatgcttccgaatgaatgaaatgagggaaattggccggtcgatcccaaacaaggaaggctcctgctcctctgactcggatgttatgccattagccggatgtaattttcttcttaatcctcgaaaatcctagaggtaatttaaattttcaaactagcccccttatataaatgtctgtttgttttgtactc

SEQ ID NO: 161985 - DNA, 119 bp, Zea mays
  unsure (1)..(119): unsure at all n locations
  Clone ID: MRT4577_79307C.1
cttctaccaaggccttctactatatctgacagacatgganatagattgctgcgattatacaactatgcatcatcttaacaacatctaggaatacatgctcatgaagcaatctcactctg

SEQ ID NO: 161986 - DNA, 867 bp, Zea mays
  Clone ID: MRT4577_79308C.1
cccacgcgtccgcccacgcgtccgcggacgcgtgggtttcaatgatgcctatgaaaccagatgttgtaatttggggcagcatcctttcagcatcaagggcacaaggaaatgtcgcattaggtgaaagagccgctgaagaattggcaaagcttgatcaaacccatggtgcatccaaaatagccttgtctaacatctatgctgatgctggtcactggatcaatgtttcagttgtgaggaaggaactccaggatgcaaatcttgagaggctaactggaagaagtggcattgtacagtaataggatagatcttttctcagttagctataatgggcaagtgatgatgagaagcccttcctttctttctgtattctattttctgaagatgccgtgaccattgttttctcttcaaacaaaagcaggcgcgaacatgatgtgatggcggaaatataatttcttttgtggtcctcattcatctttgatggggggcgatattgatatttcattatacaccagaaaattctctactgcaggacagagctgtgccgtttcagtgctgataagatgtagtgatgtaccctgggaagcatcagatttatccgtgcagatttacaggtgttcctattttcgaacacgaagtgcaaacactacttccagaaccgcctcaagccatccaatctcacatggacagccatgtacatgaaggctgaagcagcacaagaaggattggcatgtgcagttgtgcactattggcctcgaccgggtgtttcgtcactgaacagtcggacaagtcacaagtgaccgtgggctagttgctcagctactagggccttgcaatgtacactgtattcagcacaacgggccttggggc

SEQ ID NO: 161987 - DNA, 239 bp, Zea mays
  Clone ID: MRT4577_79309C.1
gcacgaggcgacctgccgctggcgcccatgccggagctcgtctcgccggaccgccccgcgctctactgccccatgaccttcgacgactaccgcatgtacatccgccgcaaggggcctcgcgggaagagccaggtcgactccctcaaggtcgccgacgcagtcgacgccgacgccgacgccgacggcagacggtgctactagctagtatatacctagccagcctgctgccgatcgagatt

SEQ ID NO: 161988 - DNA, 594 bp, Zea mays
  Clone ID: MRT4577_7930C.1
ggccgcttttttttttttttttttattcattaatttttttttttttttttttttttttttttttttctctttcttttttcttttttttttttttttgtttttctcttttttttctttttttttgaggaaacacaccaatgattttttggggggggcaccccccctaaccaaaaaatagcatgttggacaataccccaacaaatagctgtaaaaaaaggaccccccccaagttagccgcaaactgcggggagaaagggggtaactgaaacaggggcaagaaagaagcacaaattgctgcagctagaagggtgaaggggggtagccccaactgctgcgaaaaaaaggcggacctcagtgcggccaaaaaaaaaaacccaagatgttgccgttgctgggagtaagcaggagctaactggctgggtggaaaaaaaagggggtgcaaatgggccccaaggttcaaagaaaaaaaatggttgaatggaagaaattgccgctgctcacagccgggagaaaggaaagccagagctacaaaaaagaacacaggtagcacgagaaactgcagctgctgaaaaaaaatggtttgttccaatgact

SEQ ID NO: 161989 - DNA, 635 bp, Zea mays
  Clone ID: MRT4577_79310C.1
tcatcttttcgtgtttataatctctaaaatttcccccactctccagtcgcagcagcacctgtagtagccatggacgccagcggagccggtatgaaggggaagaagggtgcggccgcccgcaaggtatgcggccccactaacaagtcatcgacacggcccgtcaaggctgggttgcaattccccgtcgggcgaatcggatgctacctcatgaatggccggaacgcgcagcgcgtgtccactggttcccccgtctacctctccgccgtcctggagtatctcgccgccgaggttctggagttagcagggaacgcgtggatggacaacaagaacacgcgcatcatcccgcgccatctgctcctggcgatccgcaacgaccatgacttcgctcaactgctggcctgcgtcaccatcgcgcacggcgtccccctcccctgcatgcactccgggctcctgccctagaaggaggatatataatgatgtcattcggcgattgcaaggagtcctagtcccccaagaaggtcgccaagcccccctagaatgcttataaagtatgggcttcgtttgggctgagtgctgaaccatgtgcatgtctatatctgtggatgagatgtggcctgctctaccatcgtccttgt

SEQ ID NO: 161990 - DNA, 929 bp, Zea mays
  Clone ID: MRT4577_79311C.1
cccacgcgacagcccacgcgtcaggcctagcaggaaataaaaaatctgtaagagagaacaaaaaaaaaaggagtcaatcgccggcgacgggtacgggtgtacgcttgaggcgatcggcagagaagaccgagaccgacggctccagtgccgctgtcactgccagtctgccacagctagccgcctagcttgatccgccttttgtgctgtgcggatatgagggccgcgcaggtcgatccgtcccccgcggcgccgcccaagtcgcggctgaagcgcctcttcgagcgccagctgctgcgggtctcgccggccgagcgcctcccgtcggcgcctcccggtggcggggacaaggatgagctgccggagcctagctcgctgtgcctggacggcatggtgcggagcttcctggaggacggcggcggcggcggagccgagcgggcggcagcggccgcgcggtgctgcaactgcttccacgccggcgacacctccgacgacgaggacggcccggctgccgccgacgccgcggccgctgacatcgcggagacaatcaaggggctcgtccactgcgccagcctccgggagcgcaacctgctggccgacgtgtcgacgctggtggagcgccaccgcgcgtcgggggcgcgcaagcgcgacctgctccgcctgctggcggggtccctccgcgcggcgggccacgacgccgcggtctgcctctcccgctgggacaggtcgccgtcccaccccgccggggaccacgcgtacctggacgtgctcctcccggccgcgtcggagcgcgccgggcgcgagcgcgtgctggtggacgtcgacttccggtccgccttcgaggtggcgcggcccaccaaggcgtaccgcgccgtgctgcagcgtctgccgccggtcttcgtcgggcgggacgaccgcctgcgcctcctcgt

SEQ ID NO: 161991 - DNA, 255 bp, Zea mays
  Clone ID: MRT4577_79312C.1
attccaatctcggcttgtgttgctcggagcgggcagtagcacacagggcccatcccaatcctagtcgatcttcttcccctgctcaagggagaaaagaagctgaaccatggggaagagaaagtcagctgctaagccaccttctaagaagcggatggacaggctcgacactgggtttgtctgccgattctggaaccactggaggagcgtcgtatgcgtgattgacataaggaatttgataggttcaggatgtagatg

SEQ ID NO: 161992 - DNA, 409 bp, Zea mays
  Clone ID: MRT4577_79313C.1
tcttccttctcaccctcatggccattatcaagatcagaatcaattgtttcggggggagcggatatctggtggccagattggcccttcatagcgacgacttctagctcgtcaccgtgaacgaccccttcatcagcaccgattacatgacctacatgttcaagtatgacactgtgcacggacagtggaagcaccatgaggtcaaggtgaaggactccaagacccttctctttggtgagaaagaagttgctgtgtttggctgcaggaacccttatgatatcccatggggttctcttagctctgaatatgtagtagagtctactgatgttttcactgaccaatagaaggctgcagctcacttgaagggtggtgccaagaaagttgtcatttctgttcctaacaaggattcccc

SEQ ID NO: 161993 - DNA, 579 bp, Zea mays
  Clone ID: MRT4577_79314C.1
atctccatcggactgagcggcggctgtgggcaacgaaccctagcgagtgaggcgggggcgaggtgcagcgccgcctcctcccatccacctcgtctccctccccctcccagtctcctccctcgtttccctccctcccaatctcctccctcccaatccctttcccgtccatggatggtggtggcagcgccatggagcatggccacacaacttcgatgccggggcaggtgggcttgggggttgaacggctccacgggagcagcagcaggcggcgcatccagtcgggcttgggcagtgccccagcgtcggacgcacgcgctgatttccgacaagctggacatggtgatggaagtgcgccctatgttagtagggcgagcatcgatgaagccaaaggagggaaaatgtcaaccccgacaatgaagataacattctgatggggaatggttcagctccaagagagacaacttggaaagcggaagcggagcaaaagaccttttggtttgatgaagactaacgggtggatgaacgggaagtccgaagtgaaggtctctgttcgattcaatacttttggtgcaagactga

SEQ ID NO: 161994 - DNA, 425 bp, Zea mays
  Clone ID: MRT4577_79315C.1
cccacgcgtccggtctgctcatgcaaaactttttttagaaaaaatgttgagagaagactgggcaatcagtcacaatacatatacttatttaatgataggtttatgcgaagaaaggaacatatcacggttttggtaatgtcggaatcttgcaacaaagtgcagatggtcacctgatagctaggatatgatgggcctgatcagttacttgtgcaaatggtgagtgattgaggaagccctaaaacttatgaactctctatttgactgctaccatgatctgtttcttagtgcatattgtgcacttctcaaacagttgcgcaggacaggtcataccagcattggatgctcactgttggaggatgtcaaagaacagggtgtggctgttcatcgatcattattcttgtatgtgatggatggctttctaaagg

SEQ ID NO: 161995 - DNA, 708 bp, Zea mays
  unsure (1)..(708): unsure at all n locations
  Clone ID: MRT4577_79316C.1
ctccggaatataccgggggaaagtgaaaagacccccatgggtagtgaaatagaacgtgaaaccgaagcatcacccaatcagatccgatttcgtagagatgaagccggcagtagaggcggaggctgacgagcgagcggcggaggagatggcacctaagaaggcagcggctgccaagaaagccgccctccatccgcaaaattacccaatccatcatccccgaaccctaaataaatcctcgatcggccgcgcgcgggaatcaacggatgggaccgcggccggcggctccgtagcggattggaggcgctcggttcgcgggggccgcggttcggctgccgggtggcgcccgcttctagagggaaaccaagaaggaaggaaggagattggaataaagacaggcactgcaacgatggctccatctcaagcggcggcagcggctggccccacctttgaggacctcgagcgcgacctgcaggcagttctcatggaccaaaaccacatgtccccagtggacgacctcggcatgtttcgcagcggcagcgctccccccaccgtcgagggatctcgcacggccattggcgcactcttctctggtcaccgcttcacgccaacagccttggcgccngggcgcgcagncgtgggactgcttctgccttgacgtgctcactgatgaggagatacggtcacacccagcgtatctggcgtactact

SEQ ID NO: 161996 - DNA, 307 bp, Zea mays
  unsure (1)..(307): unsure at all n locations
  Clone ID: MRT4577_79317C.1
agtcacacatccctcctccctgccatttgtttggttgttcctctcgcagtctcgctcgccaccaggcagcaggcatcccaatctcgcgagagcagtagcggcggcggcggcggcgncggcggcggcgcttccggcttcccttcccattggcctccaggatggcgctccgcctccacgacgtcgcgctctgcctctccccgccgctcgccgcccgccgccgcngcggcggcngnttcgtcgccgtcgcctccntgccgtccgccgccgtctccncctgggtggnggnccnggggccctttgctcctcc

SEQ ID NO: 161997 - DNA, 322 bp, Zea mays
  Clone ID: MRT4577_79318C.1
accacgcgcacgcccacgcgtacgatcgagtgccgacgacttggcaatcaccagcagcgacgacatggcggccaccagcagcaagcagccggcagccgccagaccggtgcagggcgcagccgccgcactgctcgtgatcgccgacgtcgcggtgtccgtgctcgacatgagcaccgagcaggtgagcgacatgaacaacgagcaggtcaagacgagccaccccgcggccgccacgacgacggacccctccgacgcgccggcgcaggcgtaccgcaactcgctgtccggggccgacaacaagtgccggatcggctacaacaac

SEQ ID NO: 161998 - DNA, 161 bp, Zea mays
  Clone ID: MRT4577_79319C.1
gagcagcgaagcgcgagagcaaaggcggcgctgccgtgcgcctccacgcggcctaggacccccgactccagcacgcggccctaggaggaccgccgacacacagacactcgccgggcaccggcgccggtaaccgccccccaagggaaggagaagaaacaccc

SEQ ID NO: 161999 - DNA, 542 bp, Zea mays
  Clone ID: MRT4577_7931C.1
aagttacttattacagaccagagctataaacgagtgcagagtagtaatattttacaaaccaagggaggcacaaactcctcccgataagttttaagtaaaagatcctatgtggagggccaagtcctcccgtacttcagtcttgtttttcttcatttggtaccaccttggagcaaaagcaacaaaaatatgtcgcttcctcaccttcgttcgtaggtgagtcaggctcggactcgcagttgtcgaagtagagccaagtccttgcccgagattccaaaggtggtgtcttctcttgagtcacttcaccctcttctccgttttctgagatgattacggaacaagcttcatacatgccagcaactccctagaatgggtgtggtgtggtgaacttggtggctgtggtcaccacaaacacaggaagacggcgcacacaactctggacagtgccaacttggtggcagtgggataggagctttggcttgcaatacccatgaatccctcaccactacaagctttggctagaacaccagggcacagctcaagac

SEQ ID NO: 162000 - DNA, 826 bp, Zea mays
  unsure (1)..(826): unsure at all n locations
  Clone ID: MRT4577_79320C.1
atccttcgcctccccattctctgccctctccacaatccacgttagcaaagcatgtcgctcactcgcctgagtcgcctcctcctcctcctcctctgcgccgcattgccaatgctcttcttcacgtgcgcagaagcgggcgaggtgggcgtgagctacggaaggatcgggaacaacctgatggacccagcgtcggtggttcagctgctgaagagcaacggcatcacgatggtgagggtgtacgacaccgactccacggtgctcaacgcaatgaagaacaccggcatcaagttggtggtggcggtgcccaacgagaacgtcgcccttgcggccgcggatcccaactgggccgtgcagtgggctaagaacaatctgatgccctactaccccgccacggatatccgcggagtaacggtagggaatgaggtcttcaaccaggccaagggacttacgtcgcagctcctcccggccatgaggaacgtgcaggcggcgctggctggcctgggcctcgccgacgccgtgaaggtcaccacgccgatcgcgttcaacgcgctcaagaaatcgttcccgccatccaagagcctgttccaggacgacatcgcccagtcggtgatgagtcccacgatcgacttcttggagcagacgggctcctacctcatggccaacatctacccgtactacacgtacacgtcccaatcagacacaatcaacctcaactacgcgaccttccgcccgaacgacgncgtcgtcgacgatgggaccggcgtcaggtatgacacctgtttgacgccagctcgacgncgtgtactacgcgatagacatctacggg

SEQ ID NO: 162001 - DNA, 371 bp, Zea mays
  Clone ID: MRT4577_79321C.1
aacaactgaaccaaataagtttgacgaaaaattgggttacatatatagatatttcattggtttggttggattcaacaattattttgaaaaacgaaatttttttttaaaatttggtaggttattaataccatttttattaatttttaattttttagcaataggtggtggcataaaacaaatttttttattggagggtttccatttatttacttaatcacaattggtggttaaatttttggggccaccttgtgtaacgtgacaaaaggaaaatgtttccacttcagatttatactgtgggacagttgggaattttgtctaaaaaaaaaaaaaaatatttttttttttaaaccaaaaaaaatgggcggtttttt

SEQ ID NO: 162002 - DNA, 447 bp, Zea mays
  Clone ID: MRT4577_79322C.1
atgcccaccacagagaagggtagcgacaacactaggtatcttgcgctgacggcattagccaccaacatgagattacaagtagccatggaggtgaaggaaggagtttctatcaatctaatgggctgtcattgtattgtggatatttcacggattgtgttttccagaaaatctaatcagtgcacccaatgggtgcgcccaatggaccagcagggtgctatgaactccttcactggccttacttctcctttcatgctatcctcttctcctcttccaaaaactctaatggcgggaaagaaggacggcaagggctggaagaaaaacaggggcgacaagagggagcgtcctccgactccgccattggaggacttcggcgactcggagctctccgatgagaggactcctccgtcgtcccctagctccccgtcgtcggtttgcacggacgactga

SEQ ID NO: 162003 - DNA, 201 bp, Zea mays
  Clone ID: MRT4577_79323C.1
gcaagattgacgcgagacatcggcttccaatatatgtacaccaatggtttctggaaaaaaaaaaaagaaaaaaataaaaaaaaaggaaagggggaaaaaaaaaaaaaaagagatgaagacgactagaaagacaagcataaatggaccagaatctgggcctcgcctagcgttgttcccgggaggcgaccctggtgtgaacca

SEQ ID NO: 162004 - DNA, 297 bp, Zea mays
  Clone ID: MRT4577_79324C.1
ccccggtttcccccaagggtgggcagccgcttccagtgctccacaaccgcgtgatgacatgatcacacgcccgctaaggctcatgacccggctagcgccaacgatgtcggcacgacggaatcttggcccggcgtgtggcaggacgaccgtggccaggatatagtcaacgacgagggtaaccgtaacacgccttcgcacgctcccttgaccgactcagagcgactagttgcacatgtagaaaacaaccatggcggaatgaaaccaattaacaccggctgagatggcaagcgtctcatc

SEQ ID NO: 162005 - DNA, 246 bp, Zea mays
  unsure (1)..(246): unsure at all n locations
  Clone ID: MRT4577_79325C.1
cttcatcgcctggnctcctgacacggcgcgcgtgaggtgtttgattatctacgccagctccaagggggggttcaagcgggaggtggacggcattcaagtggatctccaggccaccgactccgcctaggttggccttgacgttatccagggccatgcatgctgaggatgcccagcgatgaactgcctatgccagaggatgtatgagcaagncnnnntacattataacttttctggtcgggctttgta

SEQ ID NO: 162006 - DNA, 271 bp, Zea mays
  Clone ID: MRT4577_79326C.1
gttccaaaaagtccctgcagaatgttttccgagacagaagaagccatccaaagatggccatggtaattgatgaccgacttaatgtttgggatgataaagatcaacacagagttcatgtcgtccctgcatatattccatactatgctccacaagcggagatggccaatgctgttccagttctatgtgttgcaaggaatgttgcttgcaatgttcgtggtgggtttttcagagagtttgatgagaatctattgaggaaagtgttcgaactata

SEQ ID NO: 162007 - DNA, 258 bp, Zea mays
  Clone ID: MRT4577_79327C.1
gatgcgtggagcgcgattgggcatcgggtcggtgcacgttaaaacataatgcaaatgagccaggatgaaacatgtaaactattttcttgtcgtgaaccttgaagccaggatggaaagacctcttcgaattataaatctcaacataatttgagcttgagtctgatgacatgttttgcaccgcaggattatctcctaaaatctgcatttttaattttctaacaatatgttaagtcttcagcacttaaattcatttaattt

SEQ ID NO: 162008 - DNA, 858 bp, Zea mays
  Clone ID: MRT4577_79328C.1
gtgcggggcacgccggccgggcaacgggaaacacaacaagaccaacactccttaggtcaagaagtaggagctgtaactacaagccaccatgctgctcatcctcgttttcctgctcttcttctccagcttggacctccaaataagtggagcaacgactgacactctcaccttgggccagtctctcccatggaaccagacgctggtctccaagggcggcaacttcgagctcggcctcttctccccgggcaagtccaagaagcactacatcggcatatggttcaagaaggtctccaagcaaacggtcgtgtgggtggcgaaccgggaccgcccgatccttgacccgtcggcctctcgcttcactctgagcaaccgcggcgagctcctcctccacgcgacgccatcgaacaccctgctgtggtcgtccaacgcgtcctccccttcgccgcgcaccaccgtcgccacgctccaggatgacggcaacctcgtggttcggagcaacgcgtcgtcggcccccgtggcgtggcagagcttcgaccaccccacggacacgtggctccccggtgccaggctcggctacgacagggcccgcggcgtgcacagcttcctcacgtcgtggaccgacgcggacaacccggcgcccggcgccttctccatggagatcgacccgcgcgggcaggccaagtttgatctgctcgccggcggcacgcaccagtactggacgaccggcgtgtgggacggcgaggtcttcgaaaacgtgccggagatgcggtcgggctacttcgaaggcgtcacgtacgcacccaacgccagcgtgaacttcttcagctacaagaaccgggtaccgggcatcggcaactt

SEQ ID NO: 162009 - DNA, 275 bp, Zea mays
  Clone ID: MRT4577_79329C.1
ctgcgtgctggtgctcggccccgtcgacggtgctgtggcggtcaagtccggcggcagtgtcggcgggcaggcgttcctgtccgcggctccggtcgtccggccctcggatcaacgactccaggaccaacatctacatcaacccgccggtggcgccgccgctgggcggatacgggtacggtagcccgttcttcggcggctacggctactgctggtcgccgttcatcttcttcgctcgtggtccgagcgtctccgtcggggtcggcggcggcttcgac

SEQ ID NO: 162010 - DNA, 338 bp, Zea mays
  Clone ID: MRT4577_7932C.1
gccacgctttcctaaaggtcttaatctggatcatgggcacactgggactgcacaaagggctcatatacacctccatgtggagaatgactcacgatcagctcagtgaggaaacacctacaacaggacccactgcacgagtaagatagatcatgattgatcccactgacaagtataaatcgtccagagacacgttcattaacatgactgaattgcttacatgagtgactctggatcagctcactggctgccatatggtgaatgctgatcactacgatatgctttcgtatactgctatgatatatgtccactagctatgacagcgatccatggagctagag

SEQ ID NO: 162011 - DNA, 583 bp, Zea mays
  Clone ID: MRT4577_79330C.1
ccgagctgaaaaccgaatgttcttttaaaaaaaacaaattctccccgccccctcgcgcccccccccgatttctccccccctcccttgggggcgtcccccttttcctttgggggagccttttaatcccctggtcctctaaggcccttcctcctcccccggggacaacggtactccccccccctcccccccacctaaacagcccgatgcttaaaatttcttcccccgggcgccccaagggggagcccctccctcattttattgggagcgcgccccccgccccctttccccactcagaaacactccctccccccctttatttaaaataacccgccaccccccgcgggggaggggttcttattctccccccccgggggtttttttctccccgatggaccccccacctttttttccccccccccctcccccgaaaatttaccctcccgcccctcttttcccctcagggcaaatttctttgtggggttcaccggaataatcagcttctccgtttgtctccccccctacacccccccccccctcgttgaatgtccttgcccccccctttttgccccccccggccctcccc

SEQ ID NO: 162012 - DNA, 523 bp, Zea mays
  Clone ID: MRT4577_79331C.1
gttcaattgtggtaataaactctgcaattgagtgatccgaaggacataaaacgaatccaatttggtaattgccagataatttgagagaaaaacgagttatttgattaatgaaaaaaatacaaagtcttgcaaattttacatctaaacaagctctctttctcctctcacactcacgaagcaaagactgaagcaaaatacagataaaacttggctcactttccgggaacaaagttggtggcgaaggcccatgcgttgttgttaactggatcggccaaatggtcagcaaggttctctatcggtcccttaccagtgacgatggcttgaacgaagaatccaaacatagagaacatagccaatcttccgttcttgagctccttcaccttcaactgagcgaatgcctctgggtcggtagccaaacccaatgggtcgaagctgccaccggggtaaagcaagtcctcggcctctcccaatggcccatttcctgcgactctgtagccttcaacggctcccatcaaaataactt

SEQ ID NO: 162013 - DNA, 396 bp, Zea mays
  Clone ID: MRT4577_79332C.1
gtcgccgaacacaacatctcaccagcctcgcctgcactcccgcacgccggcgtcggcgaccaagatctcgatccccatctctccgagcgacgcggcgctgttcgatgcgggtcggctgttcttcttcgcgatggcctgcctcgtctccgaggtcgcgctcgggctgagcccgcccggcgcctgctgcttgttgcggggggggggcgcgctgctggcgctgtccctggtgcgtcgcggccccgtctgcctcgggctcctccgtgctgcggtagccgcgctggtgggggctcgtgccgtgggtccccgcgggtctgatgctctgtggtgcttgggttttgctccggcttgtcgtgggtcgcttgctccggacgctgggctgcgcggtgagctctttgc

SEQ ID NO: 162014 - DNA, 457 bp, Zea mays
  Clone ID: MRT4577_79333C.1
atctatgtcacctagagcctcagtgcctcacgccctcgccttgacactctgtcacccccattgcataacgccgcaatgccccagggcctaccggcctaggccccagcctcctcattcatgtaatcctgttgcggcagcactagctgtgcctgcacctccatcgcttcttcttccgctaccttcgtccccatatagatcggctatcgttgtcggtccctcagatctaaagcagctactcatggagtcatggtcgtgggcttgtccaagaggaaggccagtgactctctgaggaacggtcgccaaaggaagcctacgaggttacgattgccactccaacatcaagtacaggaacagttggctaccatctaaatgaacatgtaattgagtgcttttgcatttctggtactatgcattttagttggctttgtactgatttatggtagtttggatttctggt

SEQ ID NO: 162015 - DNA, 435 bp, Zea mays
  Clone ID: MRT4577_79334C.1
gggagggggggcggactaacaatttatttatcctttcaaccccaaaaaaatttgttcctttttactggcacttgggaaaattaactaaaaaaccccccccccccggggggaaattgggtacataacctcaaggggaaacacaaacatgccccccaaaaaaaaaaaacgtggaaaaacccctttttttttaactccggccctttttttttttccctttgggcccaaaaaaactaggcgttggaggcaccttacccccaggtttttctcccatttttacccaaccaaagccgtccaaaccttggatgctcaaaatttgtccttaaagggctcggggggggtttcctttttaaattcccggggcccctgggtggggggggtggtggcggcccctgcggtctccttgttttttttaaaaaaaacaacaaagtccccccc

SEQ ID NO: 162016 - DNA, 233 bp, Zea mays
  Clone ID: MRT4577_79335C.1
ttctgagctatccaaaccactcacagattgattttcacctaacgttgatgactctctacgtctggcgtcactgcatattctggctcctatccaacacattgacacacacgatctaacttttcatccagtgaagacgcacatagatccatcatcatactatagatcagacagctgacaacacgctcgatactcctactgcatcaacgaactcccactattatccttcatccata

SEQ ID NO: 162017 - DNA, 311 bp, Zea mays
  Clone ID: MRT4577_79336C.1
cttacgtcaagcctgtccatcatgggggtaaccggctaaagtttgtgggggggcttcataccgctgcagaggcacgagcttgccaccactgtatctctctgatattcctgaactattactggactggtgaatattccacatacaaatttattgcggttatcctcatctatccattccataaagctatcaaaatacatcctgacacccaattgatcaccaaaccacttcacaagcacaacaacattctttgcattacatctgcagaccgaatgagccctggccttcaaaagtaccacatgttgcaccacact

SEQ ID NO: 162018 - DNA, 341 bp, Zea mays
  Clone ID: MRT4577_79337C.1
gtgccgcggaggtagtaatgtgcaggacgatcacccctctttgtgataaggtagtgtacggtgtagaaggtgggaatgcacatagctctgctgacagcgttgttaagactggacctactgaaggactccctatgctcatgagctggactaccttgcctacttggatgccgatcgtgatccattttactgagcgtgccgggcgattctgactatcgatattctacaagacttacatgtggcttgctcacgcaaaataccacaggagccccaatggtctgatagctgaactgttctgtgtggtcgaaggcttcatagttggctccgtcaggctgctgtttaaa

SEQ ID NO: 162019 - DNA, 974 bp, Zea mays
  Clone ID: MRT4577_79338C.1
gccggccgggcctcgccgttataaagctatgtcggcccaacgcgcacggcacgcgtccaggctcggaggctccaacagcacgacgcaaccgaccccaccttccctttacgcgaagaagcatcaccgcgagacggagggatggcggagaacccgcagctgtttgggaatgggatgccggtgccgttctacagtgagatgttcgtcctcgcccgggatggcgtcgagttccacgtcgacaagatcccatcagctcctggtggtcatgtgaaaacaaaaggcacaatttacctgtctaatataaggatggtgtttgttgccaacaagcatgttggcaacttctttgcttttgatatgccactgaagttcaatcagccaatatttcactgcaacaacatctctggattcgttgagccagttgttccagacaaccagaacagggccctgtactcaactcacaccttcaaggtcttgttcaaggacggcggctgtggtactttcgttcctctgttcctcaacctgactgcatctgtgcggcgctacaaccagtttgaaacccagtctgctgctagcatggcacctcgtgtggaccctctgcaagctgtgcagactcctgttgatgacatgatgcgtcatgcgtatgttgacccaaacgatcctaccaagatcttccttcagcaacctgcgccagaatcgcagctgaggaggaggaactaccacggcccagctgatgcaaattagcgcttggctggattggcagaactcatgctcaattaagtgctgtgtccatttgagcatttcacctatccttgtcgtttaccacaactgacttcaatattcgggtacccctgggtcctgtgaccttacatatatagtacataatgttgcgagttctcgcaatatgtaatgtacataagtggcgtgttcatatattattaaaaaaaaaaaaaaaaagggcctggatgtgggttgcttgg

SEQ ID NO: 162020 - DNA, 1403 bp, Zea mays
  Clone ID: MRT4577_79339C.1
cctcgaggccggccgggttataaagctatgtcggcccaacgcgcacggcacgcgtccaggctcggaggctccaacagcacgacgcaaccgaccccaccttccctttacgcgaagaagcatcaccgcgagacgcgagtcgtcctcctctctgtcttcgctcggcgatctatcaaggaggaggagggtgagggggagatggcggagaacccgcagctgtttgggaacgggatgccggtgccgttctacggcgagatgttcgtcctcgtccgggacggcgtcgagttccacgtcgacaagatcccgtcagctcctggaggtcatgtgaaaacaaaaggcacaatttacctgtccaatataaggatggtgtttgttgccagcaagcctgttggcaacttctttgcttttgatatgccactgttgtttgtgcatggtgagaagttcaatcagcccatatttcactgcaacaacatctctggattcgttgaaccagtcgttccagacaatcagaacagggccctgtactcaactcacaccttcaagatcttgttcaaggaaggcggctgtggtactttcgttcctctcttccttaacctgactgcatctgtgcggcgctacaatgagtttgaagcccagtctgctgctaacatggcaccgcgtgtggatcctctgcaagccgcgcagactcctgtcgatgatatgatgcgtcatgcgtatgttgacccaaatgatcctaccaagatttaccttcagcaacctgccccagaatcgcagctgaggaggagaaactaccacggcccagctgatgcgaattagcgcttgctggattggcaaaactcatggccaatgaactgttgtatctgtttgaacattttatcacaactggcttcaatatccgggagcccccgtatactgcgagtctgtggccgttacatcgtacataatgttgtgagttcgctcaataatgatgtacataagcagtggtgttgtgttcaaataatattgtagtgttaagtaactgctccgtgttgctgatttgctggtgtttcgtgattgctgcagacatagaaatcgtatatagttcaaatgatttgaattgaatcatttttatttttatttggaacacagggatttttttcaaaagaataatataaaaatattttaatttttacaggaaacgggaaaaaaattcgcgtttggtgaaaagctttctacgcgcttgttcaaatattaatgcactaggtgagtgcccgtgcgttacaacggaaccgtataataacacgataatttatgtacacaacttatgtacatatgtgtgttatattgtaatgagaaaatattttggaatccatttgtgatcctatccataaaaaaaaaaaaaaagggggccgctcgcgatctagaac

SEQ ID NO: 162021 - DNA, 590 bp, Zea mays
  Clone ID: MRT4577_7933C.1
gggtaccctcgggctcgccgggatcaactcacaattccgcattcgatccaactcctgagcactttctcctcgtccccgacaagccaatcgaagccgagatacggtcatggactccaccggcaccggagcagggggtaaggggaagaagggagcggccgggcgcaaggtcggcgggccaaggaagaagtcggtgtccaggtccgtgcaaggccgggctccagttccccgacggtcgcatggggccctacttgaacaagggcccttacccgcatcgtgtcggaaccggcgaccccgtctacctcggacgctgtagttgaatccttcagcgccttgtccgtgagatgtgcgtaggactgctagaccgacctccacttacagtcctactacgtcgccacgctgactgaggctgacgtggcctacctcgtggttctgtatgaggacaccaacctctgcgccatccacgccaagcgcgtcaccatcatgcccaaggacatgcagctcgcccgccgcatccgcggggagcgcgcataggcggtccggcggataggcctggggcccgttgcgcagtctcttctcggaagtttatacta

SEQ ID NO: 162022 - DNA, 1134 bp, Zea mays
  Clone ID: MRT4577_79340C.1
ttggtttttttttttttttttttttttttttttttttttttttttttttttttttttttttttttttttcaagttgaccctccaggctccagcaataatatatgaacacgccacttatgtacattacatattgcgagaactcgcaacattatgtactatatatgtaaggtcacaggaaacaggggtacccgaatatggaagtcagttgtggtaaacgacaaggataggtgaaatgctcaaatggacacagcacttaattgagcatgagttctgccaatccagccaagcgctaatttgcatcagctgggccgtggtagttcctcctcctcagctgcgattctggcgcaggttgctgaaggaagatcttggtaggatcgtttgggtcaacatacgcatgacgcatcatgtcatcaacaggagtctgcacagcttgcagagggtccacacgaggtgccatgctagcagcagactgggtttcaaactggttgtagcgccgcacagatgcagtcaggttgaggaacagaggaacgaaagtaccacagccgccgtccttgaacaagaccttgaaggtgtgagttgagtacagggccctgttctggttgtctggaacaactggctcaacgaatccagagatgttgttgcagtgaaatattggctgattgaacttctgaccgtgcacaaacaacagtggcatatcaaaagcaaagaagttgccaacatgcttgttggcaacaaacaccatccttatattagacaggtaaattgtgccttttgttttcacatgaccaccaggagctgatgggatcttgtcgacgtggaactcgacgccatcccgggcgaggacgaacatctcactgtagaacggcaccggcatcccattcccaaacagctgcgggttctccgccatccctccttctgcttccccctcctggatcgatcgcggagcgaagacgaagagcaacgagttattagatttcgcggtgatgcttggcagttggcaaggaacggtggcccggtggggtcgattaccgccccggctcgaagcgccgaagttcatcaaaaaatgcttttttatcttagtttttaaaaaccggtttctaaaaaaaactggctggagctgctggaagcgctttt

SEQ ID NO: 162023 - DNA, 267 bp, Zea mays
  unsure (1)..(267): unsure at all n locations
  Clone ID: MRT4577_79341C.1
caccagncaaccgcccgcctcggcgcgncgccgcgcctggccgccgccccgccgcgcagcgcccagctgctcggctgcaaggcccggaagcaggaagccgncggggaccagagcgacgtctcgcgccgcgccgcgctcgcgctcctcgccggcgtnacgggcgtcgccggcgccagggtgggtcctgccgncgnggtatacggagaagcagncnncgtgttcgnggggctcaaggtgagcacggtgtncattgngtacaggggggac

SEQ ID NO: 162024 - DNA, 819 bp, Zea mays
  Clone ID: MRT4577_79342C.1
cctgcctgtatgctttagacatgctagaggcaggactgatgccacagcctgacacatttgcaaagttgatgaaggggctgaagaagttgtacaaccgtcagattgctgctgagattactgaggaggttaggaagatggcggaggagagacatgttagctttaagatgtataagagacgtggggtgagggatcttgaagagaaactcaaggcaaagaggagaggacagaaaaagaggcatctgcggcagcctggtcatggacaagagccaagtggtacatcgattacatgtgaagttgtgtgccaagagttactgaccatgaggaggtagaagaatatgacgggtgatttatttgatctgcacttaggccttgtttggctgtacctcaatccactccaatccacgtgtattggggtggattaaggggccgttcggttactgcagaatgaagtcctggaacaattcctatccgaattgtttctctcatttatataaattttgattagctggaataattcctggtgtattcctatgcaaacagggcctaagggtttgtctagctacactgcaatccatctcaatccacatgtggattggggtgaattgcaacgtaaccaaataagggccaaggtggaagcaatgtttcagattattatcctttttttactcctgaaagcagtgggttttgaaacccgttttttcttcgaaatgagggaaacagagataatcatgtatacgtaagtttggtgctggtgcaaccaagttggccaaaattggtaccagatgagccaaaattgttagctgatgaagcttcgttgtt

SEQ ID NO: 162025 - DNA, 174 bp, Zea mays
  Clone ID: MRT4577_79343C.1
gaggggttaactacatccactcaaccaggtcaatacaatcatgtactagtagtattggactgtattgtaggagtattctggagggacctgtttttgtcgactggggacatactaggtttgcaagacagcaacccaaggtatgcaagatcttaaatacacccacgcatacacaca

SEQ ID NO: 162026 - DNA, 184 bp, Zea mays
  Clone ID: MRT4577_79344C.1
aatgacctataacaccaggcggccctggcgggggcgggttgaattatgccggggcctgcgatggcagccatggcaagacccgtctaggcgccctctgatctatgaaagactacatgatgcatcccagcacgtacagcattgatgacgaacatcgggactcatatcagccacacaacacaaacac

SEQ ID NO: 162027 - DNA, 1834 bp, Zea mays
  Clone ID: MRT4577_79345C.1
ttcggcaccgtcctcaccgccgagcagcttgtcgaggaggtccagccccggctcccgctttcgctccgccactatacggccttgctctacggatggtgccgtcagggcaagctcgacgaggccaagcacgtgctcgctcgcatgaaggctgcggatgttgcccttgacgtcgtcgtatttaacaccctgctcgctggcttcgtcgcggaagggagattcgaggacgcgttcgagctggcggggcagatggagcagcgtggctgtccaccgaacgcggtgtcgtacaccaccctgattcaggggcttggcgcgagggggagagttgatgaggccatgcgcgtgtttgtggaaatgcgaaggaaggggtgcgcgcccgatgctgtcacgtacggcaccctggttaacacgttttgcaaggctggcaagatatcccaggggtacgagttcttggatgctatgtcgagggatggcctgcgggtggacgctgccgtgtaccatggtttctttgtagcacacgagaagaaggagcagcttgaggagtgcttggagctgatggagaggatgcgggagtgccggtgtccaccagatctcaagatatacaatgtggtgattcggttggcctgcaggcttggggagaccaagcaagccatgacattgtggaatgagatggaaagtgctgggctcagtcctgtggtcgatacatttgctatcgtggtgagtggccttgttgggcagggtttgctgattgaggcatgtagttattttaaagacatggttgggagggggctctttgtgataccgcaatatggggtgctgaaggacctcctcaatgctttggtcagagatgagaaacttgagcttgcaaaggatgtttggaaatgtattgtgagcaaaggctgtgagctcaatgtgagtgcatggactatctggattcatgcactgttcgcgaagaaacatgtcaaggaggcctgcctgtattgcttagacatgctagaggcaggactgatgccacagcctgacacatttgcaaagttgatgaaggggctgaagaagttgtacaaccgtcagattgctgctgagattactgagaaggttaggaagatggcggaggagagacatgttagctttaagatgtataagagacgtggggtgagggatcttgaagagaaactcaaggcaaagaggagaggacagaaaaagaggcatctgcggcagcctggtcatggtcagtctagtagggatgctggcaatttggatgcttctgatgaagtagaattttccggctaatttgaaatagaattcattgggggcaatgcatctctgttcatttgaattgttttggggagtgatagacttactaaacaataaaggagtgctggtgatcatgccttgccatcataatattattcttatgctaaagatgtattgggtttcaggcaagagccaagtggtacatcgattacatgtgaagttgtgtgccaagagttactgaccatgaggaggggactttctgagggaacctccttattttcatctcattagggagatttcgtcgaagactatcattatattatgaagaaaagaaggtccaaagtagactaatacattattttactgcggaatgaagtcatagaacaattcctatccctcatgtttctctgaataaaataagttttggcgagctggaataattcctggtggattcctatgcaaacgaacagggcctaagggtttgtctagctacactgcaatccatctcaatccacatgtggattggggtgaattgcaaagatagccaaataagggccaaggtggaagcaatgtttcagattat

SEQ ID NO: 162028 - DNA, 788 bp, Zea mays
  Clone ID: MRT4577_79346C.1
agcctggtcatggtcagtctagtagggatgctggcaatttggatgcttctgatgaagtagaattttccggctaatttgaaatagaattcattgggggcaatgcatctctgttcatttgaattgttttggggactgatagacttactaaacaataaaggagtgctggtgatcatgccttgccatcataatattattcttatgctaaagatgtattgggtttcaggcaagagccaagtggtacatcgattacatgtgaagttgtgtgccaagagttactgaccatgaggaggtagaagaatatgacgggtgatttatttgatctgcacttaggccttgtttggctgtacctcaatccactccaatccacatgtattggggtggattaaggggccgttcggttactgcggaatgaagccctggaacaattcctatccgaattgtttctctcatttatataagttttgattagctggaataattccgggtgtattcctatgcaaacgaacagggcctaagggtttctctaactacactgcaatccatcccaatccacatgtgaattggggtgaattgcaacgtagccaaataagggccaaggtggaagcaatgtttcagattattatcctttttttactcctgaaaggagtgggttttgaaacccgttttttcttcgaaatgagggaaacagagataatcatgtatacgtaagtttggtgctggtgcaaccaagtttggtgctggtgcaaccagttgggccaaaatttgtagctgatgaagcttcgttgtag

SEQ ID NO: 162029 - DNA, 321 bp, Zea mays
  Clone ID: MRT4577_79347C.1
gggggccccaaaggaacacacattactgaacaaagcttggaaggggcaaaaaaatttcagggagggaaatttatcaggcccccccccttcgggggaaaaaacttgggattgttaatgcccggcgggtttgcccaaattcaaggaatcccccggcttggttacgggttctaagaaaaaaaacccattcagtttggtttaaacaaaaaaagggtgcccttttaatttccccaccctttaaattcaattcataaaccctctgatcctccctaaataaatggatccccaagcctttcatcccttggcccccctttttggggactt

SEQ ID NO: 162030 - DNA, 493 bp, Zea mays
  Clone ID: MRT4577_79348C.1
gagcgacgaggagatttcctggacgccgtcaggctcctaaagctaaacaagcagcccagggcgaagagcttgtggaccctcgggcgccgcctgctcctcctccgcagaagccgcaagcagcagcagcagccggtggcggtggagcaggatagcgaaggagagaagagccacctgctgagccggagctctctggagcagctgcttgtcacgtcgtcgacggatggcgctgcctgccggtgcgccaagaagctcgggcagcctgtggcgccgcttctcccggaggcggcggatgcggatgcggatgcggctgcgggtgcggcgtcgccgactggtggtgcgcaccgtggcgccgcgccggccgcgcaccggaggttcatgctcggcgggttccgccgacggctgctcatgcggaggccgtggcggtcgatgctcgtctgcatcccggagtgatcgaatccgctcagtaaccgcatgcctggtgacgcgcaaatgc

SEQ ID NO: 162031 - DNA, 4175 bp, Zea mays
  unsure (1)..(4175): unsure at all n locations
  Clone ID: MRT4577_79349C.1
atgacaaggaggttgacgtcttttctattatataggaggcggtggaaccacaggatggggcagcccatgtttctgaagctaatggtgaattgggtgatgagaaggaagcaagtgatgatgtggtggttcttggagttgaagaagccccataagaaccatctaacagggatactgatggtgatgaagacctggttctcggaggtaaagaatcaccagaagaatcaactaagaacgatgatgatgttgaagactaagccaccaatcctgagcctcggcacgaggcaagtccagtggttctgaatgacggaagcatacatgagcttgctcctgcaagtgctgacagtgtgcttgaggatagccttgagaaggagcagaatgctgaaaacctggccactgccagtgaagcggtggaagatgttggtgccgaggttgagaatgttgctgctcctagtgtcgatggtatcttgtctcgggagttggctccagaatcaatcaatgaaaaataatggcgctgatgagattgaaggtgccctgaggttgttgatcgtgaagaagaggttgcttataatgacataattgaggctgtgccagatgacgaggatgggattgataatgaggctgatgatgataatgacggggcaaactcttacacgaatcctgcacgggttgcaatcttagagagctctgaagccgcgaagcagatcatgaaggagcttacagaaggctcctctagtggtaatgtctcaagagacttcaccaatagcatggatgggcagattatgcttgatgattctgaggatgatgatgatggggatgagaaggaatttgattctgctgccttggcggcccttctgaaagcggcaactggtggatcctcagatgggaatgtcacagttgcttcacaagatggttctagaatattcaccatggatcgacctgctggtcttggttcatcagccccttctctgaggccgactgcgcctcgccaacctgccaggtcaaacctattcagcccctcagagctagcagttactgctgaccctacagaagagatgacagaggaagagaagaagctgcatgacaaggttgagttgattagagtaaagtttctgcgtctggtttacagattgggagctactcctgaagaaacggttgcagcacaagtgctgtaccgtctgagccttgctgagggtatccgacatggcaggcagacgaaccgagcattcagccttgataatgcacggaggaaggccttacttcttgaagcagagggaaaagaggatctgaacttctcatgcaacatacttgttctaggaaagactggagtcggcaaaagtgcaactatcaattctatatttggtgaagagaagtccagaactgacgcctttagctcagcaaccacaaatgtgcgggaaattattggtgatgtggatggtgtcaagattagaatcattgatacacctggccttcgacctaacgtgatggaccagggatcaaacagaaagattcttgctgctgtcaagaactataccaagaaatgtccgccagatattgttctatatgtggatcgtctggatagtctgagccgtgatctcaatgatttgcctcttctgaagactattactgctgttcttggctcatccatatggttcaatgccattgttgccctcacacatgctgcgtctgctcctcctgaaggcctcaatggtgctcccatgacatatgaggtcttgatggctcagagatcccacatcatccagcagtccatcaggcaggctgctggagatatgcgcttgatgaacccagtagcccttgttgagaaccatccttcgtgcaggaaaaaccgtgagggccagaaagtgcttccgaatggccaaagctggaggcatcagatgctgcttttgtgctactcctcaaagatattatcagaagccaactcacttctgaagcttcaggatcctaatcctggaaagctttttggcttccgtttccgctcaccacctcttcctttcttgttgtcctcactcttgcagtctagagcccacccgaaactttctgctgagcagggtggcaatgagggcgattctgatattgaattggatgactactctgatgtagaacaagatgatgaagaagaagaatatgatcagcttccacccttcaagcccttgaccaaagctcagcttgcaaggctcacaaaggagcagaagaatgcttattttgatgagtatgactacagggttaagcttctccagaagaaacaatggaaggatgagatccgcaggttgaaggagatgaagaagagggggaaaactgatctggatgattatgggtatgctaatatcgctggtgagaacgatcaggatcctcctccagagaatgtatcggttcccttgcctgacatggtgcttcccccttcatttgattgtgacaatcccacataccggtaccgctttttggagtcaacctcgactgtcctagcaaggcctgttttggatgcgcatggatgggatcatgactgtggttatgatggagtgagcgttgaagagacactggctatccttagcaggttcccggcaaatgtagcagttcaggtcaccaaggacaagaaggaattcagcatccatttggactcttccatcgcagcaaagcatggagagaatgcatcatcacttgctggttttgatatccagactgttgggcgccagcttgcctatattctccgcggcgaggcaaaaatcaagaacatcaagaagaacaagaccacaggaggcttctcggtaactttcctgggtgacattgtggcaactggactgaaggtcgaggaccagctctcccttgggaagaggctgtcgctagttgccagcactggcgcgatgcgagcccaaggggaaactgcatatggagctaacttggaggcacgcctgaaggacaaagactatccgattggccagtccctctcaacgctgggtctctctctgatgaagtggcgccgggaccttgctctgggcgcgaacttgcagtcccagttctccatcggaagggggtcgaagatggcagtgcgacttggtctgaacaacaagctgagcgggcagatcacggtcaggacaagcacctcggagcaggtccagatcgcacttctgggtctcgtaccggttgcagcctccatctacaggagcttccggcccagtgaaccgtccttcgcttattagcctgtcaggagtctcagtccaattacttcataaccatgtggtttctcttggcaattttcttcttcacatgaaccatgtttcttgctgtttcagtttactcccttgtaattggcagatcgtttcctaccataattttggctgaagagggttgtgcgatttatctggaactgtagctgaataaataatgtcgagaaatgtaccatccttgtgtttatcaatatctattgcagcgtctattctgattattcatgtggttataaatcgactgaagattgaggaccagctctcccttgggaagaggttgtcactagttgctagcactggcgcgatgcgagcccaaggggacactgcatatggagctaacctggaggcacgcttgaaggacaaagactatccgatagcccagtccctctcaaccttgggtctctctctgatgaagtggcgtcgggaccttgctctgggcgcaaacttgcagtcccagttttccatcggaagggggtcgaagatggcagttcgacttggtctgaacaacaagctgagtgggcagatcaccgtcaggacaagcacctcagagcaggtccagattgcacttctgggtctcgtaccggttgcagcctccatttaccggagtttccggcccagtgaaccatcctttgcttattagcttgtcaggagtctcagtttaattatttcatgatcacatcgtttctcttagcaattttgcttttcatatcaaccatgtttcctgctgtttcagttcactcctttgtaattggcagatcgtttcctatcataattttgggtgaagagggttgcgagatttatctggaactatagctgaataaataatgtggagggatgttgatccttgtggttatcaatctaaaaaaaaaaaaataaaacttcaaaaaaaaaaaaaaaaaagcggccaagagtgagctcgtagacccgganattaattcc

SEQ ID NO: 162032 - DNA, 423 bp, Zea mays
  Clone ID: MRT4577_7934C.1
atcacgttcagcgggcgcgcgcgccgggtgggcgtgctccgctgcctcgtggccgcggtggtggtgaccatcctcctcgcggggctggccgcgctcatcttctggctcgtggtccggcccaagcccatcgactacaccgtgacccgcgccgtggcgcgccacttcaacgtgacgccgccgcccgacgccacggccaacgcgacgttctacctgaccctggccgcgggcaacccgaaccggcgcgtgtcggtcctgtaccagtgggtggaggtcccggggctgaccggcgaggaggcgcagctggcggtggaggacgccccggcgttccggcagccccgccgcaacgagacgctgtgggacgtgcgccgccgtggcgcggtcggtgcccgtcggggggcaagcccggcgggagctgcggcacga

SEQ ID NO: 162033 - DNA, 1358 bp, Zea mays
  Clone ID: MRT4577_79350C.1
ctcctttgtgagccttgcaagctgagctttggtcaagggctcacaaaggagcagaagaatgcttattttgatgagtatgactacagggttaagcttctccagaagaaacaatggaaggatgagatccgcaggttaaaggagatgaagaagagggggaaaactgatctggatgattatgggtatgctaatatcactggtgaggacgatcaggatcctcctccagagaatgtgtcagttcccttacctgacatggtactgcctccttcatttgattgtgacaatcccacataccggtaccgctttctagagccaacttcgactgtcctagcaagacctgttttagatgcgcatggatgggatcatgactgtggttatgatggagtgagcgttgaagagacactagctatccttagcaggttcccagcaaatgtagcagttcaggtcaccaaggacaagaaggaatttagcatccatttggactcttccatcgcagcaaagcatggagagaacacatcatctcttgctggttttgatatccagactgttgggcggcagcttgcatatattctccgtggggagacaaaaatcaagaatatcaagaagaacaaaaccacaggagggttctcagtaactttcctgggcgacattgtggcaactggactgaagattgaggaccagctctcccttgggaagaggttgtcactagttgctagcactggcgcgatgcgagcccaaggggacactgcatatggagctaacctggaggcacgcttgaaggacaaagactatccgatagcccagtccctctcaaccttgggtctctctctgatgaagtggcgtcgggaccttgctctgggcgcaaacttgcagtcccagttttccatcggaagggggtcgaagatggcagttcgacttggtctgaacaacaagctgagtgggcagatcaccgtcaggacaagcacctcagagcaggtccagattgcacttctgggtctcgtaccggttgcagcctccatttaccggagtttccggcccagtgaaccatcctttgcttattagcttgtcaggagtctcagtttaattatttcatgatcacatcgtttctcttagcaattttgcttttcatatcaaccatgtttcctgctgtttcagttcactcctttgtaattggcagatcgtttcctatcataattttgggtgaagagggttgcgagatttatctggaactatagctgaataaataatgtggagggatgttgatccttgtggttatcaatctattacagcgtttttaagtcttcagattattcttgtggttatcgatcgattagtgtttcttattattaaaaaaaaggacg

SEQ ID NO: 162034 - DNA, 368 bp, Zea mays
  Clone ID: MRT4577_79351C.1
tttctctttccttccccacattttcccttgcagccccaatcccccacggcggccatttttttactcgcatatttcctctttctcgttgtcactattctcttccataacttcaaggtgactgctatcgctacccctatcgacaacttccctttcatcgtcttctcctcccgggacaagtccgtgctggtgtgggacctgaccaacccgtttcactccaccccgtaatccggcgtcaccgccgactacagcgtcccctttcgccgccttaccggccactcccacttcgtccaagacgtcttccttagttccgacggccatttctcactcttttgcttcttggacggcgagctccgcctttgtgacctttt

SEQ ID NO: 162035 - DNA, 274 bp, Zea mays
  Clone ID: MRT4577_79352C.1
tactcaccatgatgtctcgttttctgtgttaattttgtgacacatcagatcatttcgtttccaaatgattgtcgattcgttaggtcttcgtagcgaccattgctctatctgattctgctgcgttcgcacacgcgtgtgatagagcctttgcactatcggacggtcaattgccagcttctggtctacatcaatatgcagttcaaccagatttcagtccagaaggagctgaacagtttgaaggcggttcagaagctttcgaaggaggttatgttgg

SEQ ID NO: 162036 - DNA, 347 bp, Zea mays
  Clone ID: MRT4577_79353C.1
aaaaactctgtaaataatttttggacaaaaaaaatcacttttacacaccatcattgtttcaaaggaaaggtcacgtgagatgactagccaaaccttttttttattcagacaatttgccaaactaaaaacacgggcgcacacaaacaaccatgacatgctggttaacttggccttggccacatgtttttaccacaacaaagtttgatcactttaacactttgggcagttttatcaacctcaacaactgatatttgcaacattttaaaacattctttattaacccaaaattagggcgccacaaatttttgacagcaatttttgttttgatcaggccaaccccttaccac

SEQ ID NO: 162037 - DNA, 791 bp, Zea mays
  Clone ID: MRT4577_79354C.1
ggggataataccgaaggctaacacctacgcatttttactaagatttggtctccaccagaaatccaagcatgtgatctatggcaataaaacatatgtgggatgaggtgtacgagcctttggtcgatgataatggcccacaacccctatttttgttgaaaatagcatgaacgaccattttcaataataccgaaggataacacatacaatttttgaccaagaaatggtatccaatagaaatccaagaatgtgatctatggcaagtaaacatatgtggggataggtgtatgagcctctcgtctttgatcattggccacacaaccccctttttttcaaaaatagcatgaacgaccatttttaataataccgaagggtaacacctacgaattttttaccaagaaatggtctccactagaaatccaagattgtgatctatgggaaggaaacatttgtggggtgagttgcacgagcttttggtcgatgataaatggccacgcaacccacatgtttgtcaaaaattgcatggacgaccattttcaataataccgaaagctaacacctacggattttttttatcaacaaatggtctccaccagaaatccaagaatgtgatctatggcaaggaaacatatgtgggtgaggtgtatgagcctctggttgatgatcaatggccacacaacccgatttttttttgaaaatagccatgaatgaccattttcaataatacagaaggctaacacctacaatttttgacctaaaaatggtcggttgggatataaaggaattcaaacaat

SEQ ID NO: 162038 - DNA, 132 bp, Zea mays
  Clone ID: MRT4577_79355C.1
cggattcgcggcgatctatccggttgcggacggaacaataatggcggcgcaaatccagaggctgagcgttacaccaatggtgacgatgctcggagttatgaatgctccgcttgttttgaccacccgcgggga

SEQ ID NO: 162039 - DNA, 357 bp, Zea mays
  unsure (1)..(357): unsure at all n locations
  Clone ID: MRT4577_79356C.1
ttttgcccacccgttttttcctaaatccctaaaaaactaactttagactgtttttatgcagcaagagggaagaaacttgcccctccctagctctcgttggcagcaatggccaccaccggtgcgtccagcctcctaaagttcttcttcgcgggctcccggtttcttnggncacgcgcaccaacaccccgttgttcgtggccgtggccaccccgcgcgccggcggcgggcccattcgggcgttcattttcttccccaacccggcctacgacctgacgttctttcggttcagccccatcaaggagtccatcgtgttccgcgagatgacccggcgctacatgaccgacatgatcacccacg

SEQ ID NO: 162040 - DNA, 286 bp, Zea mays
  Clone ID: MRT4577_79357C.1
aaaaaagctagctaaaacacaaaacaaaacaaaacaaacaacacaagatatcgagcaaaaaggcataatattggatcttgagtgcaacaaagtgctacaagaagatcaggaaggtcctctgcaaggtccaagacaaggtgagcatcaagaccatctcctactactagaagaacaacacggtgacagtgtccgggcccttcgactcctaggaggtcgcctacaggctcaccttctattctatcaaggtcatcaccgacatacacatcttttttgtgcttatgcttca

SEQ ID NO: 162041 - DNA, 693 bp, Zea mays
  Clone ID: MRT4577_79358C.1
ttgggtacctcgaggccggccgggctctcagtctctccttcctctcccattccactagattaccaccacctccacctcgtcgtctcccaccaccgccgagcgcgagccctagcccgatctagccggcggcaggcaccagatcccgccgcccgcggcgtcccgggacgcgccccgccgaatccgccgctcctcgcactgcaacacgcccggaccacgaggcgcaccaggtgtccaggtcccactcccaccgaaaccaaacgcaccttgccggccgccgctcgtcctcatcttcaaatcccctcttgcacggctgcacctcctagcccgtagtgtggatccatccccacacggccctcgccaaatctactcctccagtcggtcggcaggaaaggaacccctctccacctcggaggctcggacagagtgaacgcgccacccgccccggcgagcattgtccgctgccgcgcgccaccttccgctcacgggtgcatttgatccgtcccggccgcctacacgatgtccaagtcgggagcgctggatcttgcttctggcctcggagggaagatcaacaaggtggaagtcaagtcggccgtcgatgagtatgagaaatatcatggatactatggagggaaggaggaagcaaggaagtccaactatactgatatggttaataaatactatgatcctgccact

SEQ ID NO: 162042 - DNA, 221 bp, Zea mays
  Clone ID: MRT4577_79359C.1
ccaatggcaactagcagtatgaacaactcacactactgggggagacaaatcaatgcataaacaggtgtggaacccatctattaagcgtttaattgcataaaactacattccgagcggagcaatggggactatttgcccttttaattaaacgagggggagggggagggtgctggaaatggggggaaaacacagaacagaatccaaaataaaagagataatta

SEQ ID NO: 162043 - DNA, 516 bp, Zea mays
  Clone ID: MRT4577_7935C.1
atggacagacatcaatcatttataaaatgaggtcaattgccatcaacatccccttacatagtgcaggtttctgaaccgtgcaattggtaagcccaattacacaaattagcagctgctaataaactagatactaggttaagtaaacatttatatatcagctaactttctgccacccaaaaagttcaagataccgagcaatttccagatgagagcttgtccaacgcaactgcctcataactgtgctccaataaccatattagaagctactagtttcatcagtgatcactttcgaagtacaaagttgctcgaattatgtagaccttgaactttgtccgctcaatcagttggaagaccaagcaatctccatcaagcagcttgtgctggatggcgaactctttccatccagtgctgaggccagcctgcattgcgaggtagaacgtgtctgactcgtcatcctcctcatccaccaaggtgatcgtctcatcactcttaggcaggtgctcccggcagaaatgc

SEQ ID NO: 162044 - DNA, 941 bp, Zea mays
  unsure (1)..(941): unsure at all n locations
  Clone ID: MRT4577_79360C.1
tgnctaagggctggtagagggcggaaagagggggatttttacgccaatgcacttctttcttgttcggaagcctcttctggaatgagctcttggatcacctttttcagagagagaaggcaaggggccatttcgaagaagccgaggagggggaacctggaatcaagaaaaccttcagctctcctgtgtaggaggaaagttaacgaacagctcggggggcggccattccactagattaccaccacctccacctcgtcgtctcccaccaccgccgagcgcgagccctagcccgatctagccggcggcaggcaccagatcccgccgcccgcggcgtcccgggacgcgccccgccgaatccgccgctcctcgcactgcaacacgcccggaccacggtaagtttgccgcgctggttgagctcgaccaggccctcctgctaccttcctcgcattgggctgggggggtgctccggagacggttttgccctgcataggcttcacctgcataagtttgtttcggtttttgcgtgaattatcgaggtggttttggcttgtgcgtttggtttcgttcgtttgggggttggccgtgcctgggtttggattcggaacgcggtgcgtgttgatgctgggggccgaatctacatgctacatgccctattaaacggctgtcactagtcccgatccccgatcccatcggctcctagcagaggcgcaccaggtcccactgccaccgcaaccaagcgcaccttgccggccgccgctcgtcctcatcttcaaatcccctcttgcacggctgcacctcctagcccgtagtgtgatccatccccacacgcctcgtcaaatctctcctccagaaaggacctctcgggctactgctgaaagagaaatggctaagcagcatggtttgtgagcaactagtgataattattccattcttttttttaatat

SEQ ID NO: 162045 - DNA, 2487 bp, Zea mays
  Clone ID: MRT4577_79361C.1
cctcgaagccggccgagtaatgtatcaatagatcgaacacgagacatgttttacgtggagaactcttgtatgaaaaaaaaatcatggatgctaactcgtgattttcattgtattcaaaaaaaaaaaaaaaaaaaaaaaaaaaaaaaaaaaaaaaaaaaaaaaaaaaaaaaacaaaaaaaaatttaaaaaaaaaaaactagattaccaccacctccacctcgtcgtctcccaccaccgccgagggcgagccctagcccgatctagccgggggaaggaaccaaatcccgccgcccgcggggtcccgggacgcgccccgccgaatccgccgttcctcgaactgaaacacgcccggaccacggggcatttgatccgtcccggccgcctacacgatgtccaagtcgggagcgctggatcttgcttctggcctcggagggaagatcaacaagggggaagtcaagtcggccgtcgatgagtatgaaaaatatcatggatactatggagggaaggaggaagcaaggaagtccaactatactgatatggttaataaatactatgatcttgccactagcttctatgagaatggttggggggaatccttccactttgctcacagatggaatggagaatccttacgtgaaagcatcaagcgacatgagcattttcttgccctgcaacttggtttgaaaccaggaatgaaggttcgggatgggagaccccacgcgtccggaccccgggctctgacatgcagcaattattgcaggtgcatttgatccgtcccggccgcctacacgatgtccaagtcgggagcgctggatcttgcttctggcctcggagggaagatcaacaaggtggaagtcaagtcggccgtcgatgagtatgagaaatatcatggatactatggagggaaggaggaagcaaggaagtccaactatactgatatggttaataaatactatgatcttgccactagcttctatgagtatggttggggtgaatccttccactttgctcacagatggaatggagaatccttacgtgaaagcatcaagcgacatgagcattttcttgccctgcaacttggtttgaaaccaggaatgaaggttttagatgtgggctgtggaataggtggaccactgagagaaattgcaagatttagctcaacttcagttaccggattgaataacaacgaataccagataaccaggggaaaggagctcaaccgtttagcaggaattagtggaacatgtgatttttgtcaagggcagacttcatgaagatgccgttcgatgacaacacttttggaggctggttatgccattgaggcaacatgtcatgcacctgatccagttggttgctacaaggagatatatcgtgtgttgaagcctggccagtgctttgccgtgtacgagtggtgcattacggatcactatgatcctaacaatgcaacccacaaaaggatcaaggatgaaattgagcttggcaatggcctgccagatatcagaagcactcggcaatgtctccaggcagtaaaagacgccgggtttgaggttgtttgggataaggatcttgctgaagattctcccttgccttggtacttgcccttggatccaagccgattctccctgagtagcttccgtttgacctctgtgggacgcatgattacccgcacaatggtcaaggccctggagtacgttggtcttgctccgcagggcagtgagagggtctctaatttcctggagaaggctgcagaagggctggtagagggcggaaagaaggagatcttcacgccaatgtacttctttcttgttcggaagcctcttctggaatgagctcttggatcaccttttcagagagagaaggcaagtggtcatttcgaagaagccgaggagagggaacctggaatcaagaaaaccttcagctctcctgtgtaggaggaaagttaacgaacagtgtagtaactgttcagctttgtgtttattcagttgttttgctgcttgaggttattcgtttctaggtgggggttggaatccttttcgccataaacctctcagtggcataaataagatggtttgcataagagtacttcatggataccgtaagggctactactgaaagagaaatgtttaagcagcatggtatgtgagcaactagtgataattattccatccttttttttaatataaagcaggagttttgtcaaaaaaaaaaaaaaaaaaggaatcaagaaaaccttcagctctcctgtgtaggaggaaagttaacgaacagtgtagtaactgttcagctttgtgtttattcagttgttttgctgcttgaggttattcgtttctaggtgggggttggaatccttttcgccataaacctctcagtggcataaataagatggtttgcataagagtacttcatggataccgtaagggctactactgaaagagaaatgtttaacaaaaaaaaaaaaaaaaaaaggagggcccggtaaaaaaaaaa

SEQ ID NO: 162046 - DNA, 657 bp, Zea mays
  Clone ID: MRT4577_79362C.1
gccggccggtccgggttcaattttccaatagaaaatcgagctatcctattgccactaaatttatttcacaattttctacatgggctaaattttggttatccgcaaagaaggacaaaaagacaaaacggaaaacgatccatccagcccacaacaaaagcttggatgcgattccgcattctcaaagggatcttttgtaccaagtgacttgtcataaacttcgaccaaacgcaaataaaaagatatttagtctaggagatgtattgcatattcgaaaattttgggagaaaattgaaagattgatctatcaacatgaaatgggttatgtaccttctacaaagagaataccctttaatcccgatataccaggctcaatttatttaccaaaaagatcaagaaaacatattttaccaaagactagaagagaaccctttgcgtcttctcacattgtatatacatttaagcaagacatcaattcaatagaaacacaacagctcatcagcgatgatgacgatgatgatgataatgttcctcttggaatcctacatttttcaaaaccttttcaccccatgtaaatattattgtgaaatataatttttaactctacttttttaataaatcttttttacgtcagaaaaaaaaaaaaaaaaaaggccccta

SEQ ID NO: 162047 - DNA, 575 bp, Zea mays
  Clone ID: MRT4577_79363C.1
gcgtgctgtttggccatggaactatcacgatgaccctgccaaggttgcttgaattgctgaacattcgatgtcatcataatgaaacagcctgctctgattgtggacggttttgccttagtgctgacactgacacacgtcggacattgctacctagggtggagggacgctgatctaccacagcatgtatcgggctgttcgggcggacgcttgacaagcgaagcccaaatcttgtcacgaatgaagaagctgaactggctaagcatggatcactactcagctcaatgtagaaggagacacctatttgaatatcacggctcttgtcctctacgctgtccgtgacatgacgcacaccgtgtctgtcgccaacatcaccagtgtgaagaaggaatgacccaactgaagacaaggtgaccaacgctggcgcaaagaataaatgatctgtctggcttgttctgcgttagattgatggatacctactggaaacataaaatatcatcgattgttcacgtcattgtgtgaactattctcgcagcgttaacctggtgcgacatataactggtattactcgttaaaac

SEQ ID NO: 162048 - DNA, 154 bp, Zea mays
  Clone ID: MRT4577_79364C.1
cccggaaggaaaataggatagcttaggtgttgtttcacccccatatagctcaacgtgggtcttgaccttcagtaccaccaatgtgaaactgcaggaaggggagttgctacaccgccagcgaaaaatgcatttgaatcgctgcggtgacttgggg

SEQ ID NO: 162049 - DNA, 278 bp, Zea mays
  Clone ID: MRT4577_79365C.1
agaaaaaaggcttggtttggaatgtccggcccttcaagtcagggagatgacctataaatctcatgtgtccatatgaaatcatttgcgtacaaatttattttttaactcggccctgaagcagggaatccgatcaacccaatacacccttttttttttcctggggcaacgaatttgacaaactgtccagcctgaacgttctacaactgcttctaaactaacgtccaagttcctactttttcgaatccatgccaaaaaccaaagaaccttaagttggccgt

SEQ ID NO: 162050 - DNA, 215 bp, Zea mays
  Clone ID: MRT4577_79366C.1
ctaatggaatacagtccaaattttcggtttttaccacagtaataaatcaaagggctccggaccaatttatgattggggacaggagctgcaaacggatcaaccaacttgcgagtgaaaacgcgtgcgtacatacccacaaagactgccccctgaaattcattgtgcagaacagtccatcttacgaagggagtactagtattagttgacaaccgcac

SEQ ID NO: 162051 - DNA, 276 bp, Zea mays
  Clone ID: MRT4577_79367C.1
cccactgcgtccgcccacgcgtccgcccacgcgttcgcccacgcgttcgcccacgcgtacgcccacgcgtgcgcccacgcgtccggtatagacaatgcaatgagagccttgctccttttagcgctcttctgtgtcgagcatggggagaattttttttcaaagggcaacgatgcaaaagcaggcggtcccggagggcccttcgacattaccaagtgagggcgcctccggcaattggcgtgacggacagaacccaaggctgtgcaggaggcgggggcg

SEQ ID NO: 162052 - DNA, 333 bp, Zea mays
  unsure (1)..(333): unsure at all n locations
  Clone ID: MRT4577_79368C.1
aaaaaaatggaacggttcctttttactcgccaaacacaaaataaaatggctcaattcctaaaaattggaatgaagccgttccatcccggttggctcctaaaccaaacacccccttactaaactataagctccaacagcacacctttacgggactaaaagcccgaaaatgaatggcacccaggagccatcctcgcctttcttttttcacgagcctcgcctgacgcatttttttagacaactttcgtcgtgaactttcaggccagtggtcagaattcagaatttccaaccatacaggcaccatntgttttgaaccttctgggagttgtcaatttt

SEQ ID NO: 162053 - DNA, 620 bp, Zea mays
  Clone ID: MRT4577_79369C.1
ttgggtacctcgaagccggccgggccgggtcctcccaccctggcgatgtaatggcggctgagcgggtcgctccccgcggtggacctgttgtcgccccctcccgacggcgactatggccgcccctcccccgccagatgcaccgaagccgcgcgccacttcagccggacacgtgctttctgcctcgcctgccaccacggcgtaccgcgactcctcatataccatcgcagcacaaaatgtatctacactgctacttctcgccacactactacgaggtccaggcccctcccactctatggtactcattccacctctgcaggtgatactttctactggatgcgcgctctcctcacatcaaaccgtgcctgtgggagggaggtgccaattactccaactgtgacctcccgcctgagcacatgcaacttcttataggatcgaaaatcattgtacgtcacaaccacctaacagaggatcctcctctgctaaatgctgcacaaaagcatgtagctatcttcatcgctattgacgaacttgtgcaatatgcgctgcctggaatgcatggcagtgctaggctacttgccacaggcaatgctattctccttatacttcagcttttctttggt

SEQ ID NO: 162054 - DNA, 373 bp, Zea mays
  Clone ID: MRT4577_7936C.1
aagaaactgcaatagcccgcagctgttcgagagaggagaaaagggaggcgactcgaggtgcgagttggggctcagcccattcccgggcgctcgccgccggcgttgccggttggagagaagatgggggaggtgcccgcagctgccgtgtacatactagttgtagttgtgctgtttccttagtggagtttggctttatgccggagcttggcgtgatgccgatggggattgggtcgccggcgcgagcgagtcgcgtgcggtggctactggagtcggttcttaaggtggtggcgatggagggcttgctgctgccgactggatccactctggtgtccctggtaataagctcgatgcccctgatctggcggaggatctt

SEQ ID NO: 162055 - DNA, 399 bp, Zea mays
  Clone ID: MRT4577_79370C.1
aaatcgaattgcctccgttttgtttttttttcaaaaacccaacggggcccccgaaaaaaaaaaaaaagagtccccggggggcccccccaattttttgccggggccaaaccggtttttaccaccaccaccaccgatccctaaaaggatgtttaaaaaatcctcccttgttgcgtgaaaggtggcctaaatcgccaaccggggggggcttttttttaaaaaaaagggggaaactttttattttttttttccaaacccccccgggcagcggtgggggcccgtccctttccccaaaagggaatctgacgtacctctgacacgggtttgggggacacctgcgcgcacattggggttgggggtagggcccaacccgggtgcggcgatccccgcccggtggggccc

SEQ ID NO: 162056 - DNA, 640 bp, Zea mays
  unsure (1)..(640): unsure at all n locations
  Clone ID: MRT4577_79372C.1
acttggtcttttctcatgtgctaaatcaaagtaggaatcggttgtagaagtagacaagactgcaactagcttaaagttggttagattatgcataaaagggtatttctgttgtctactctttaggttcccatagtgtgaggtggtattcctntttgaaaacacatataaactggcatcgatagtgaacaatggtgcttcctgtacgtataaactggagcagcaatacttaaatcttttacgtaataaagcgtcccgtttcgcaaaaaataaactggagcagtaatatgaggctgaagtaaccgacattagcaacaataatataaatgttttctgcactgggtccgtgtgtctcacatggatgttgaatagataaaatgctataaagatcagcttgcttctcatgtaattggaacgattgtgtgtcttagtttttcctgtttcctttggttttgcagccaagatttttttagcacgtgcatacagagcagaactggagcataatagtagttgaaaaatgttttagtgtagtttattaaagattccgtttatttctacattacgaatgtaactacttagtcattctcaaaaaagaaaagaaacgaatgtagcttacttagtccactgagttcctttatgatgt

SEQ ID NO: 162057 - DNA, 182 bp, Zea mays
  Clone ID: MRT4577_79373C.1
aacatagatttactagagatcatctttaacaatcacctttgattatgcatagcattttaaactaattgcagagtatccttttggtttgggggtaagtgctcattgaagttcatggctataaccattgcaggataatctcactgacatttggactcctgttagtaacagagcatagctcttta

SEQ ID NO: 162058 - DNA, 672 bp, Zea mays
  Clone ID: MRT4577_79374C.1
gggtaccctcgggttcggccaggccgggactactaattatgtatggagcgtaggcgtccaatttggatggcgcacgtacctagccttggcccacaacaccgagtacagcccgcagtacgctcaagcgcgcgccgcgccgggcgggagtctgcccgcttcttccataccacgcagccgatcctccgttgcttccatgcagtatcccgatccttcgctacttccatcctcgacgcctgtagatcccgggtcctacgctacttgcacgcagacaccccacgcttgggtaccgcagctgcgcggcgccggatccggctacttccatcctagcggtgaccccacacccgttcgttgcattctgggggatacgagcagatggcacacagacgacccacgcccaagcgcgcataccgtagtcgcgcggcaccgcatcctgacttccttatatcatactagctgcgagcccccaactgttcctttcattctcgagaatacgagcgcgctagaccggtagcccataaccacggctaccataaacttgcaggcacgcgagtagagggcatggggaggaggtgcgcggacggcatcaattctgacctacccatatgctgcgagatgcacgccattcctggtgcttaccttacatagacgatgccggagtggccttagctacct

SEQ ID NO: 162059 - DNA, 334 bp, Zea mays
  Clone ID: MRT4577_79375C.1
aaggcaatatatgtgaggaaaattgcccggctgcaacgaagggcagactagacacaccctaaacaaaagccaaaacaactgtgacacgggtttttttttgggttcagggaccccccccggggggggaaataattgggcatacccaattgacaaagtttttggctttgttcaattaaacagatggcaaatacaaatttttctccgaactggtgttttttaaaagcaaaaaaaacaagttttggttccaattgtccaggaaacaaaagagcagttcttttgtgcttttgaacggggttcgtaaacctccaaaaaaggttgggggggagcaataccc

SEQ ID NO: 162060 - DNA, 986 bp, Zea mays
  Clone ID: MRT4577_79376C.1
cggccggggccgccgttcggcaggaaacccccgaccccgatctcgacggcagagcgagaaagcgatggcgctgaccaacttcatcgtaacggtggctgtggtcggcgcgggggtgctcctcttcaccaccgacatccgcaggtccggcgccctcttccgccgcaacgcgcgccagctccagcagtggctccaggaggacacggcctccgccgcgtccaagtccacgaaagaagcagctccgaagaaacttgactcaactgtctccaaggagaggccaaaggaagacagtcactgatttgagttgtttatatgagcggtatgacccctgtttaaagccgttcatttttttgtgtgtaagtaacgtgataggaacctgtagctcttaagtagatgcacggccagattatgtttccgtttgaacagaagcactgggcctgtgtggaacagctagattatgttgttgtatttcgcttgtaaaggatctaaagctcttagctaatgtacatgtgccctgctggtagctttgggaaaaaaaaaaaaagaaaagtaagtcagatatatgaaatggtatttgatttcttttaaaaaaaaaaaaaaaaaaaaaaaaaaaaaaaaaaaaaaaaaaaaaaaaaaaaaaaaaaaaaaaaaaaaaaaaaaaaaaaaaaaaaaaaaaaaaaaaaaaaaaaaaaaaaaaaaaaaaaaaaaggggggggcccccccctcccgttttttttaaaaccctttttttaaaaaaaatcaaaaaaaaggccaaaattttaaaaaaaaccccgcccccaaacgctaaaattttaaaaaaaaatttggaaaaaagaaccaaaaaatttttttacacccatttggggaaaactaaaaaattccaaaaagggaaaaatttttcaaaaattgaccttgggaaaataaaaaaaaaaaacggggttttttttttttttccaacaaaaaaaaaagacctcccaaaattttttttt

SEQ ID NO: 162061 - DNA, 438 bp, Zea mays
  Clone ID: MRT4577_79377C.1
cagcgggcacctagcgcatgaacaggtgcgactgggaccagccggagcaccagcgccgggagccccacacacgcgaagggggggagcggagggggggacgcggacgaagccaccaagggcgcccacggcctgggcatcctgaccgagcgggaccagcataagaccctggactaccagcacgatcttgcccaacaggcacaaggccggcttcgccttacacgggcgactcattgtcgacggcgagaggctgaaggagagcggctgcatcggctactccatacggcaagccgctggacgcctggctcaaggacatgcccgcggacagctaatcacacccccctcacgcaggggatggaagtccgggcaaggaagaggagagaagctgggtgaccgaactgtatgacagtacgaatttgaaggcaaggctaccgatggtct

SEQ ID NO: 162062 - DNA, 2007 bp, Zea mays
  Clone ID: MRT4577_79378C.1
tagtcggcacgaggctcgccttgcggaaccgcatcacgcacgccagcagcgctagccaagagcagccagcagatggaaaccacggcccccgccgccgcctccggcacgatccagaacgcccggcaccggacgagcgccctcaagctgtgctaccacctggcagtctccaacgcgatgtacctcctcctagcccccgcggccgcggcggcggcgcactggctctcccgccacagcgcggccgagctcgcgggctcggcccggtccgcggccgccgccaacccgcccctcgccgtggcgctcctggtcctgggcgcggtgctcgcgacggcgtacctgatgcggcgcccgcgcggcgtgtaccttgtggacttcgcgtgctacaagcccggcggcgagcacgtggtgacgcgggagacgttcatgcggcagtcggaggcggcgggggtgttcacgggcgacaacctggcgttccagcgcaagatcctggagcggtccgggctcgggcagggcacctacttccccaaggccgtgctcaactcgccgcccaacccgtgcatggcggaggcccgcgccgaggccgaggccgtcatgttcggcgccatcgaccaggtgctggcgaagacgggcgtccgcgccagggacatcggggtcgtcgtcgtcaactgcagcctcttcaacccgacgccgtcgctctccgccatgatcgtcaaccactacaagctccgcgggaacgtcgccagctacaacctcggcggcatggggtgcagcgcggggctcatctccatcgacctcgccaagcagctgctccaggtgcaccgggacacgtacgccctggtggtgagcatggagaacatcacgctcaactggtactggggcaacaaccgctccatgctcatgtccaactgcctcttccggatgggcggcgcggcggtgctcctcacgaaccggcgctcggagcggcgccgcgccaagtaccagctggtgcacacggtgcggacgcaccacggcgcggacgaccgcgcgtaccggtgcgtgttccaggaggaggacgagacggggcgcgtgggcgtcgcgctgtccaaggacctgatggcggtggccggcgaggcgctgcgcaccaacatcacgacgctgggcccgctggcgctgcccatgtcggagcagatcctgttcctggcgtcgctggtggcgcgcagggtgttcggcgcccgcggcgtgcggccctacatcccggacttcaagatggcgttcgagcacttctgcatccacgccggcgggagggcggtgctggacaccatcgagaagaacctggggctcagcgcctggcacatggagccgtcccgcatgacgctctaccgctgggggaacacctccagcagctcgctctggtacgagctcgcctacacggaggcgcagggccgcgtgcgccgcggccaccgcgcgtggcagatcgccttcggctcagggttcaagtgcaacagcgccgtgtggcgggcgctgcgcaccatcgaccctgccaaggagaagcccgccggtgggaacccgtgggtggacgagatccacaacttccccgttgaggtgcccaaggtggagagcgtcgtcatgtcctcctgacagtgacacccacggagggcaactactatatgctggtgatggagggcgtgcgccggcagagcgaacaatgatggtggacgtacgaggttatgcctaaaatactacagtattgttaatgaaagcattgcaaaaggttttttcttacactccaaataggttgctttggctatcaaattggcaagagcactaatatgagtcggttggtgggatatttagaatatgattggttcggttgtgaaccgtgaaaaaactattgtgaaatgtatgctattaaaagtatgttgtgagttatctgctgtaaaaaaaagttgaaagtcgtttagtcaaactgatgtgaattgtctattatgaacaatttgtatattgttcatatcttaatcaatttatctaatt

SEQ ID NO: 162063 - DNA, 188 bp, Zea mays
  Clone ID: MRT4577_79379C.1
cccacgcgtccacagacgcatctacctacgcttggatcaacccgataaattcgtacagacacgtgatcgtttccaagctacctatgcttttaatcctactactctgcaatgaaagcactgtacataccctttaccacattgtacaagattcataccaaaagacacaattctataagatctaacttgac

SEQ ID NO: 162064 - DNA, 368 bp, Zea mays
  Clone ID: MRT4577_7937C.1
cccacgcgtccggctacatagataaaatctcatatctgctaaagtagatatataggggggggctggcatgaatattctgctgcacaagcatgagcaatagttctataatgacgacacgatcaacagacatgacaatatattattaacgttagtactttcatgcttaacgtgaagcacgatctaaatgatcgactttctatataaagacggagttgaaaaatctgtaatttatcaactgataaaattatcgagatctgaagattgaataaccaatgtatattatatcagcggatgtatcgtaagtacatttcaaaatttaagcgtaaaaaaacgatcctttatattatgactaatattgaacattagat

SEQ ID NO: 162065 - DNA, 189 bp, Zea mays
  unsure (1)..(189): unsure at all n locations
  Clone ID: MRT4577_79380C.1
nacgctcaattctcgcgcccanaccaaattttctccactcaatcactgcagcctggncgccgcggagccggtagcaaggcgaataaggggcggctgggcgcaaggctggcggccccaggaagaagtcggtgtcgcggtccgtcaaggccgggctgcagttcccccgtcgcccggatcgggcgctacctc

SEQ ID NO: 162066 - DNA, 915 bp, Zea mays
  Clone ID: MRT4577_79381C.1
aggaaaaaccgcaggcacgccaccacccatccccctgttttaaggccccaaaccctctcgaatccgcccccctcctgcgccgtcgtcctcctcctcctcctcgcctccccgcggccacacctcgactcgctccctcgagatcatctgttccatccttttgaggcgagatggcggctaccttcaatgttaacgctgaggcaggccttaaaaagcttgatggctaccttctgtctcgcagttacatctctggataccaagcttccaaggatgacttggctgtgtattctgaattctcagttgctccaccatcaacttgcaccaatgttgcaaggtggtacaatcacattgatgcactcctgaagctgagtggagttactgcccctggtcaaggtgtgaaggttctgtcatcagttgtccctgagacctcaactactgatgtggctgaggctcctgcagctgatgatgacgatgacagcgatgttgacctttttggagaggaaaccgaagaggagaagaaggcagctgaagagcgtgctgccaaagctaaggcttctaccaagaagaaagaatctggcaagtcatcagttttgcttgatgttaagccatgggacgatgagactgacatggtcaagctggaggaagctgtccgaagcatcaagatggagggccttctgtggggtgcttccaagctcatgccagttggatatggcatcaagaagctccagattatgatgaccatcattgatgacctcgtctctgtcgacactcttattgaagaccatctctgcgttgaaccagccaacgagtacatccagagctgtgacattgttgccttcaacaaaatctaaatcttcctgaggcaggtgatggcggtgggtggacaatgcagcagcacaatatatctacagttttccg

SEQ ID NO: 162067 - DNA, 112 bp, Zea mays
  Clone ID: MRT4577_79382C.1
taaaagagtgggagaacaggtcatggaagtggctgaaataagtgatatggcacagtacttggccactcatgatgttattctctctgcggatggcctgaaaataacctacaac

SEQ ID NO: 162068 - DNA, 2041 bp, Zea mays
  Clone ID: MRT4577_79383C.1
gtgggaccctgtacgagccgggccgggccgcgcgtgggttctggggcgctctcctcctcctcctcctcctccgtctctcccctctccactctcccccctctccgtctctctctgtcctttctgggtcgacggctgggcgccgccgcccttcgtcaggtcttcgccggcggcgattacacaccaggttgagcaaatattcttccaccaatggcgagagaaccgagtcctgaaatagatgatgaactttacaatgaagtttatgggaaagcatacagcggcccagttgcatcagctacaaatagtgtgactcctaaaggaaatgctgagaagaggcccctgactcgtgataagtcagatgatgaagatgaggccccagatcctaatgctgttcccacggacttcactagccgagaggctaaggtctgggaggctaaagctaaggctacagaaaggaactggaagaagaggaaggaggaagaaatgatttgtaaaatatgtggagacccaggccattttactcagggttgcccctccacacttggggcaaataagagaaatgcagacttttttgaaagagttccagcaagagataagcaagtcagagatcttttcaatgagagggtaataagccagattgagaaagatgtggggtgtaaaatcagaatggatgagaagttcctgtttgtcagtggaaaggatagattaatattatccaaaggtgtttctgctgtgcataaaattattcaagagggtaaaggtaaacatagtccaagcagtccgaaacgcgatcgctctaggtcgcctgtacgaaacactactgagtttcgccccaaacactctgattctcatcgctcacctagcccaagaatttgattctagcaatggtcccatagtccaagaaatgcatcactctctcaaagtaaaggatactatagtgaaagacatcgagatggtcgcttacacaacaatatgcccaagttttcgaaaggatctccacaagctcatgccaactttggagcaaaaggccgtccagcccaatcaaaatctccacgccatacctcttatcttgatgaattacctagaacacatggcgagaataaccaatttgctgcatcacgagtgcccaatgactggggaattgagaggcatggagcagatgccagttcaagtcttaggtttgacatgccatcccaccaacagaccttggaagaacttgagatggagtttaaaaaagaagctacacaattagctagagctcgtgaccaagaggaggatgaagagaactataggcatcgagagtcgctgagagtgattagagaaaattacatggagagagtgattaccttgaggaatgtgcatgcaaagaagtgggaagaatttcttgacacctttaaaagtcaacaacaagcacagccttcatacatacaaaccggatatctaggttttgagcagagaacggcacatatttcagctacacatcaaccaatggattcgaagagcacatatccgtatgcttctgatagctattcagccccaaaggctcatgcagcatatggtgagtttcaacatgagaggcatgatgatcttgggagggcctataggcgatattagctgtgaatagtgggcgattttgtgaggaatcagtgtcaatggtgcgcttagacctacttatcacccattgctgttatgtagcttgaggaggtaagcattcatatataggcagaactgtctcccaattactttctttgcagcgtctacaaccgcaacggactgtggagctgtttcaggcatcgtaacaagctgctttccaatgaactaaactgaaatgctataaaaaaacattgacctgtatgactgttttatctgcttggaaaaaatctccctgagttggcgtttatgtgaacctagtatttttttttgtcaaacctggcatatcactatgctgggcctatccgaatggttgtttgcatcatccccttgtcatggaatgtttgattggtggatggaggttgtattgtaaatccctggctgagtgaaaatt

SEQ ID NO: 162069 - DNA, 470 bp, Zea mays
  Clone ID: MRT4577_79384C.1
aattgctctttgtagctcgtccggtcacttggccgtttgacgtccgtcaagtccgccatggtcaccacgaccacctgctcatgcgacggggggggagggtaggttcccgccggtactctgcgtgtaggtggtgttccggtgcgtacggatcgggccggtggacgagccatactcggagctcgcgtaccagacgggggtgagcatcggcgtgtacactttcaaggggatcctgcgtgatcacggaccggttgtctacgccgcggtgggccagctggcgccgtcctgtgctgattaccaccaccagttgatggtggtggaagcgacggaagggtagtcgtccgtggcgagcagctaggcggttgtcatggtggccacgtgggccggggtgctgttggaaccgtaccctactcggatcggagtcttcttcggagcactccagatcttccttaataaccatagaacctagctta

SEQ ID NO: 162070 - DNA, 266 bp, Zea mays
  Clone ID: MRT4577_79385C.1
taaccataccttatcataacacaaagtagagtctcttcaaatactaataacaaatttgctcatcgtctcaaaatccaccagaattcattataccagtactctcacatctaaacttaaaatatatctacatctactatacatcgattaagagtcatggcctgcaccataccaatgtccacctacatcaactctagctcctattaatccgactaccagacacatccttaatacacaaaaatagcacgaagcatcttcagacatgtata

SEQ ID NO: 162071 - DNA, 256 bp, Zea mays
  Clone ID: MRT4577_79386C.1
gaaattactacggactgggcaacaactacaacaggaactggtcacattcttcaaaaactatactaacctaccctgggtgggacactaacatagtatccaagtggaggacgagaggccatgaccaggttattcgtagcggggcgctgccgtacaaccacatagcagcaccacgtggtgtgtttgtgaccgcatcctattactatgcaggctcccacccggtgcggtagggaacaacctgttgttgcatgaagggctg

SEQ ID NO: 162072 - DNA, 136 bp, Zea mays
  Clone ID: MRT4577_79387C.1
tcgagccggcgggaaggtttccacccgcgtgggctgcgcgcgccgcttccttaccctgtgtgcaccctgttcctaaccctgcgtgtggacgccgccaaatagcttgcatgaggccgctcatatgcataaccctggt

SEQ ID NO: 162073 - DNA, 197 bp, Zea mays
  Clone ID: MRT4577_79388C.1
ttctgcagtgagttactacgcctactacgggaagaagctggacccggagccgtggcggtgccgccgcaccgacggcaagaagtggcggtgctccaaggaggcgcaccccgactccaagtactgcgagcgccacatgcaccgtggccgcaaccgttcaagaaagcctgtggaatccaagaccgcctcctcgccgcccc

SEQ ID NO: 162074 - DNA, 246 bp, Zea mays
  Clone ID: MRT4577_79389C.1
ggttgggttacccaagggaacccaaggggccgccacgcgcccccccaagcgtccggcaggcgtccggggacccgggggacaaccgggaaaatccggaccggacccggaaggttatcaatcttcacaaataggggcttctttgactcctgagagtattcctggtcctcgtgtgtaagaaggtgattttgtaccaaagcaaccttcctcatcaaatgctcaatttggatcttttcaattttagcttgg

SEQ ID NO: 162075 - DNA, 1192 bp, Zea mays
  Clone ID: MRT4577_7938C.1
ccctcgagcttttctctaaaccgccgcttctgttctgatctgctccccgaaactactaaaacaaatcgaagtggggaacaaacaagagagaagggagatggcggaggcggtggcggtggcgtacgaggagcaacggcggaggcagatagaaatgaacaagcggaagctggaggagctgcagctccaccacctctccgccgccgtcagagaggccgccgccgctgccaaaccctcgtcggccaagaagcggaaggcgccggtgccgcgggacgccgccacggagccgccaaggcggtccgaccgactcgccaacctccctgagaagccaatgtaccgcgaggtcagggtgaacttgccatttccggagggcagcaagtcgaatgcgcgggtgccgctggacgctgccaactccgtggtggcggagccgctacggtggtccgaccgactcgccaacctccccaagaagcccatgtaccacgaggattcggacgaggagaggagctacgccatctctaaggctgaggagctggtgcaagagctgggctccagcttccccatcttcacccagcccatgacactgtcccatgtctccggaggcttctggctgggcctcccgaagcatttctgccgggagcacctgcctaagagtgatgagacgatcaccttggtggatgaggaggatgacgagtcagacacgttctaccttgcaatgcaggctggcctcagcactggatggaaagagttcgccatccagcacaagctgcttgatggagattgcttggtcttccaactgattgagcggacaaagttcaaggtctacataattcgagcaactttgtacttcgaaagtgatcactgatgaaactagtagcttctaatatggttattggagcacggaaattactgaaggtacacaattttgaggatggtgaatagctgtcctgatgtgaacatgtttccttgttccttcactcagttatgaggcagttgcgttggacaagctctcatctggaatttgctcggcatcttgaactttttgggtggcagaaagttagctgatatataaatgtttacttaacctagtatctagttatttagcagctgctaatttgtgtaattgggcttaccaattgcacggttcagaaacctgcactatgtaaggggatgttgatggcaattgacctcattttat

SEQ ID NO: 162076 - DNA, 1222 bp, Zea mays
  Clone ID: MRT4577_79390C.1
cattgggtccctcgaggccggccgggcgtcgtcctttcccttcaatctcgccctcgcccgcgccgtcccttccctgcatcccgtccccgtccgtgagccccctccacacgctcccgtccgcgaccccagatcccgtgactgccgccgtgtcttcgcccctagctccatcatcccgtcgtgtcccgccgtgccatcctccgctccgcgaccaccgcctctgctcccctcgtgcccagcgccgcgtccgcgaaccagcacccctcactctctctcccgcccggctctcctcgcccaactctctctcccgcaatcccacggcctcgccccaaatcgccgccccggctctcggtcctcgcccaagctctccatggaaggagatcgaggaatccgcgtccgctgcgcccggctctctctgcgtccgtagtctccctggaaggcgattcctcgatccgcgtctgctcgcttcggctcctccgttcccaaacctcctcaaccagcatctctagggttttcgcagccaccgcccatggctgccactccggaccgcgtcaatgccgaccttcatcgtcgcctcgccgtcgacactccaccgccgccccaggtagccagagggaggaatcgtccaggcactaagcacaaggaacagatggaatgggtactccatggattaccaaggaaaaaacaagctggtttttagcctaactgatccgaaatcatgcacagcacaaggtattagaattcatattgagcacctaagaggcactgcaaaaattgggatttcgaaattggtggatcttttgcagatagagactgtacaatagttgattgcaccagaaaaatagtagcccagatgggcacgaaagagccaataggaggcaaggacttctaccatgtggaagtgcagtcaggatatgaccaagctttcatcattggggtgatggcaattcttgacaacatacatggagaatccactagatgctgataacatgaattagagaatttgctcttgtttataagagtagactaatgttcaatagcacttatcttgcaacatactttcatcttcaagtaagaaacagacacatgctggcaccatcataatgattgtatgactatgacccgcattgaataatatccacaggccagctgataatatgagcctaactttcactgccacttaactatatctctttaataaacatagagatgtgactaattgact

SEQ ID NO: 162077 - DNA, 391 bp, Zea mays
  Clone ID: MRT4577_79391C.1
cacggcaaggacaacgttgtttaattaaggatcatcggccccgaaatcacagtcaatgctggcgaaaaaataaccgaagacaagttagacagtaatggggggcctcacctgcacagacagcaaaccaagagcaccatcatattcactactgatataaacctacaccagcatgtttacacggggccgtcccatttcccgcctgtgcttgatgcaacaaaggccaccaacgtccggcgacggagaccaacgacgagccaacagggcgacgttgctcagcttgtgaacccaaggcgggaccacctgccttgaggcttacttctctgcacggatgttgagtgtggtgccagaacatgtgtatgaagctgacttctgctttcgggaccgagaccgc

SEQ ID NO: 162078 - DNA, 328 bp, Zea mays
  unsure (1)..(328): unsure at all n locations
  Clone ID: MRT4577_79392C.1
atccaccttctattccacatctcaatccagtactcagccgccgccgcctgctgctcgtgtggttcccgacggtcgctgacgccgcgaccccatcccggcgctcggcggcgcgcatcgccgacgccgctgccccgttcctttctcttccaccgtggctgtcgttccctcgccgatgctcagacctcgctgcgctccaacgctccctactccctcggcttccgcccctgaccttggacgccggcagtcaccagctccctcccatggccgtttccagccatctcccatggccgaccccaactcctcccatggacgtcgntccctccctgct

SEQ ID NO: 162079 - DNA, 1756 bp, Zea mays
  Clone ID: MRT4577_79393C.1
ccggccggggccgtcttcgtcactgcaatcccgcccccgcccgcgcgtcgtcccttccctgcaatcccgcccccgcccgcgccgttccttgcctgcatcccgtccccgtccgcgagccccctccacacgctcccgtccgcgaccccagatcccgtgactgccgccgtgtcttcgcccctagctccatcatcccgtcgtgtcccgccgtgccatcatcctctccgctccgcgaccaccgcctctgctcccctcgtgcccgcgccgcgtccgcgaaccagcacccctcactctctctcccgcccggctctcctcgcccaactctctctcccgcaatcccgcggcctcgccccaaatcgccgccccggctctcggtcctcgcccaagctctccaatctccatggaaggagatcgaggaatccgcgtccgctgcgcccggctctctctgcgtccgtagtctccctggaaggcgattcctcgatccgcgtccgctcgcttcggctcctccgttcccaaacctcctcaaccagcatctctagggttttcgcagccaccgcccatggctgccactccggaccgcgtcaatgccgaccttcatcgtcgcctcgccgtcgacactcgaggccggccgggaaggcagacaaacagaaacaggggttcagatacaagtaatctctctctctccaattcgtgagctacatcaagcaaaatggacaagagcattcctgtagttagcaagattttttgctcaggcactccaacaatgctgatgataaggatgagacctattgtagtgaacggtggtggttttgttgttactgacctcagtcataacattgtattcgtcgtagatggttgtggaatacttggatccaagggagagcttatggtcaaagacggtgaaggagaaccaatattattcatctctaaaaagggaggaattgtccaggcgctaagcacaaggaacaaatggaatgtatactccatggattaccaagggaaaaacaagttggtttttagcctaactgatccgaaattatgcacagcacaaggtgctccgattagaattcatattgaacctaagaggcactgcaaaaattgggatttcgaaattggtggatcttttgcagatagagactgtacaatagttgattgcaccagaaaaatagtagcccaggtatgccacgcctttataatcccctacacctctgcttttgtagtaaattatatttgcagattccttgtgtcgtcactaattaaaggcatacctgagctgatccaggtcatgatcaacaggtgttattccatgagagcagaaaataatgtctatttctagatgtctatacacatggtgcattttttggctaagaaaaatgtataaccgtccctagagatagtgctaccctgtgaatgtgatgtacatgtgtttgcaagtacttgtatgaaagtgtagaagtttacagacagtattacactcatgccaccagcatttgagtgtcagagggattgagatctaaaggcatagtatctgttctgcagatgggcacgaaagagccaataggaggcaaggacttctaccatgtggaagtgcagtcaggatatgaccaagctttcatcattggggtgatggcaattcttgacaacatacatggagaatccactagatgctgataacatgaattagagaatttgctcttgtttataagagtagactaatgttcaatagcacttatcttgcaacatactttcatcttcaagt

SEQ ID NO: 162080 - DNA, 983 bp, Zea mays
  Clone ID: MRT4577_79394C.1
cttcgactatgctgttcgacagtgcagactcatcttccaagactgtctctagaaggcaagatagtagaaatgatttctctcaactagagagatcagaattgacctcaggtcggctatttgatgctgtggcaagctttaaactaatttggtcaaatagtgggacctcttcaccaaaaaagctctcaatatggcgtccaatgttgtctgaaggaatgttttactttggtgacatagctgttaacgggtatgaaccaccaaattcaactgttgttcttcgtgatactggtgaagacacttttctcagagctcctgaaggttttgaccttgttggtcgaattaagaagcaccggggcactgagggtgtatcattttggtttcctaaagctccttcaggttttgtggcattaggatgtgttgcatctaaaagttctccaaccaaagaggacttcagtttgttaagatgtattagaaatgacatggtggctggaggtcaattttctgaggaaagtttatgggattcatctaatgctagaacatctgaaccttttagcttatggactgttgataatgatgctggtacgtttcttgtgagaagtggatatagaaaacctccaaagaggcttgcactgaagcttgcaggtccacctacatcaagcagttcagatagcatcattgttgatgccaaaattaaaacattttctgctgtttcctttgatgattatggcggaatggtgagtcatatgtacatggatatttacctagtaactactattagttatcatggaggtcctcatcatcttaatgcaactgtgagcttgtcatttgtggccagatcctataatgacaagtatagcttggtgggagccctttattgaaccaacagatgcatttcttaggtaccaattcgacatgaatacaccaggttctcctagacaactccgtattacctcaactcaagaccttaatttgaaccgacagcaacg

SEQ ID NO: 162081 - DNA, 558 bp, Zea mays
  Clone ID: MRT4577_79395C.1
cgaagggccggccgggcccgggatttcaacacaccatcggccgactccgaatgataagaaccgacagcgaactccacgaatccacgcaaccgtgagcatgagatccctgccacccaacgggctgaccctgagcaaactgcacattttcctccagccccgcaaaccgagaagagtctgacacgagctggagcaatagagcatgaactgctctggaacgccactacgaatgccgatgtactacacgagctacaagaaagtgaactacgagggcatgacagagtggagagacaactggctgatacgcgagaacggtcttcccagcatccgtgaccttctcacaaagtcaaagctcaccatgagagacttcctactggtccggtcagcactgaggaagtgcacgatcgacggaactactgaactgacattgattgcccaaggaaccgagactccctccgacatatgatccatgttacctaccctagagacaggatccagcgtatcagtaagcctcacattggtggctatcaggccatgaaaccacaagaagtgccgaccctc

SEQ ID NO: 162082 - DNA, 460 bp, Zea mays
  Clone ID: MRT4577_79396C.1
aaacaatagctccaaacttaaaacccaacagcaatacgggggaataaagacttacaacgaaagacggaaaccacacaacgacagatggattggaaccgtccgaacataccacgatatggaccactcacgggggagcacaggatagcagtggcacacaagcccgaccacaccgcgccagtagagcgcatagtactcgatacgccttgtaggcggactcaccctcattaaactcaacaccgacctacctatgagaccttatcgagcgcagtcagatcctaacgagcctcagaaaacttgccatcccacataccgtcaccgcactaaccataccacgaatgcacgcttggcgcacattatgtcgaacttgttgtcaatgctgtagaagaccttcacaacactgtgagagagggagatcatgcacaccggacgctggatctttgccaggtcaccaccagggacg

SEQ ID NO: 162083 - DNA, 273 bp, Zea mays
  unsure (1)..(273): unsure at all n locations
  Clone ID: MRT4577_79397C.1
cacgatcaaaccnacccnccccnaagggcntgggggcacggggctagggtgctcaccccccncccacncccnnccgccacaccccccacggacaagccacgccacacaaaggagacgcgaccgaggcttggcctccgcgccgccgcagccgagcaccagcaccgccggcaccaggccccggcggcgatcactccggtcgcgagccacaaagaccacggcgagcacaaaaactaccgcgtcatcgcgcgcagcctgttcgaggggggggggggg

SEQ ID NO: 162084 - DNA, 405 bp, Zea mays
  Clone ID: MRT4577_79398C.1
acgaggccaaggccattacagggttaaagggctaatagcaaagcccggggggggggggggggccaattaataattttaaaaagcgccccaggggtgacccggaaaagaacgcaaaaaaaaaacgggagggcaacacaattccacaggtaaactcgcctttttaggccccttggggcagccccctccaaatttagggggggggcacgccactttgctcacttggaccccaggaacaaggtgttttttgggggcaggccaacgcaagcccttatgaaggtctccaaaaacgccctttggtttgaaagaggggtcaccaccggggggccggggggaaacaggggggccttggggagggagctaaggaggggggccaccggggggaaggaggggaacttggcccctccc

SEQ ID NO: 162085 - DNA, 991 bp, Zea mays
  unsure (1)..(991): unsure at all n locations
  Clone ID: MRT4577_79399C.1
ctctagtctcctcgcgccaacgaccacagcccaccgaacaccgatcaaggtaaacctgttcgctgctccgccagaagccgaggccgagctgtccacggcagcgagcatgcaccacgatcccaaccccttcgacgagggcgctgacgagaaccccttctcgaatggaggcggaggagcgcgtggcggaggcgtcaagtcgcagtacgggttccggccgacggagcccgcggggttcggcggcggcaggggcgatgcgaccgccgacatccctctggacaccatgaacgattcgaagggcaaggcgaaggagctgtctcagtgggagtcagatctcaggaggagggactcggatatcaggaggagggaggaagctctcaagagcgctggggtgctcatggaggacaagaactggccgcctttcttcccaatcatccaccatgatattgccaacgagataccagcaaacgtagctggggtgcccatggaggacaagaactggccgcctttcttcccaatcatccaccatgatattgccaatgagataccagcaaacgctcagaagttgcagtatcttgcgtttgcgagctggcttggtattgtgctttgcctcttttggaattttattgctgtcatagtctgttggatcagagggggagattctaaactatttttcctggctaccatctatggtatgcttggcatccctttgtcctacttgatgtggtatagacctctgtaccgagcaatgaggtatatgcctattggttgatgcttcgtgccataaatattgattaatatacactatgtcataatgctaacattatgtatttcatttcctctcaactgaaaatgtgtaacatttttagtaggtgatagaacagtatcgatactttggcgtctggtcctactgaagtaaagtaggatgcatgttntgcaagatgtgtttagcttcaaatgacttgatagaccttctgctttgtggtttctggca

SEQ ID NO: 162086 - DNA, 458 bp, Zea mays
  Clone ID: MRT4577_7939C.1
gcgctcttatgtcggcgggcgccctttttttttttttttgaagaagacagaacatgcttgagatacccgtacgcaaactgccattcatgagagtggacagacagagagcatgatgcaaaacagagacacaagctgcagcggcgcacatggggcaccgagcacgactaccaccaccagaccagacgacgcagactttatttagcccatgacactcgtagtccgaagcgggcactgctatagatacgacagacacactgtcacacacagagagatggagagaaaccgtcatgttcgcgttgaactgaacagtaggcgccagcacgcacgactcgactggtacggcacgcgcgcacgctgagacatagatctagcgacccggtgttcggcgacaacatgagcgtacggcgcacggactcactcgctggacttttcgggcacctcagaggacgggtagggct

SEQ ID NO: 162087 - DNA, 852 bp, Zea mays
  Clone ID: MRT4577_793C.1
ccgcgcgacgcctctgcgcccccgccgcccgtcaccacccgcagcgagccttgctcgtcaccaactcaccatcacgcgcgacgcttcagctctctctcgttgaagagctgcatctccagccagtgcctagcccgtcgagggaccggtcgccttggcggactcccgctggtgctcctccacgcccatctctctcttttcctcgctgcagccacggatcttggtagcagggacgccaccgcatttccagaatccaaacggaattttacaggaatcgcgctggaatttcacaggaatcagttcaatttcacggaacaaacgcaggagcaaggaaattttgtcacgttcccctcatttgtttccttcggcgacgactaggcgagtgctgcccgctcttcacgaggttttcacctgcgacgaacatcctccagttgatcttctggctggaaaatcacgttgacggtggcaagtaggggttctatcatccgcagcctcatctcaagaagcaaaattctttcatgatccctttaaaccggagggcaagcctgcccagggctgggatggagtactttgatgcaaggcggaagcctcgtaatgttggaaaaatcattgcagccttggtcctcacaacactctgtatatttgttctgaagcaatctcctggttttggtggcaatagtgtgttttctcgccatgaacctggtgttacccacgtcttagtaacaggaggagctggttatattggttcacatgccgctttaaggctcttacgagatagctatcgagttaccattgtggataatctatctagaggaaatatgggagcagtaaaggttctgcagggcttatttcgca

SEQ ID NO: 162088 - DNA, 328 bp, Zea mays
  Clone ID: MRT4577_79400C.1
atcacggacccacctatccttggtgaaccctgtcgactacttgcaacaaagaatactttaatacaacccactcgctctctccaacgtacctgcataccaccaacaacaacgtctagcgacagcttatgccagcgctcagtcaactagccatggtgaaccctgtcgcctacctacaacaacaacaattgctttcatctagcccgctcgctgtgggcaatgcacctacgtacctacaacaacagttgctgcaacagattgtaccagctctgactcagttagctgtggccaaccctactgcctacaagcaacaggtgctaacatacaacca

SEQ ID NO: 162089 - DNA, 311 bp, Zea mays
  Clone ID: MRT4577_79401C.1
ggcaaagtgaattctcgacaaattcaccacttgaacaggccttgtcgcctttcatcctatactcgcatattacgactcgtggtctgcctggtgcagaggattctattctctcggcctttttaaaccatcgggtgtttggtggtgtttggtgtgtgccctgcgctctttccatcatcccactccgaaaagcaacaactgccaactttcccttcggagacatcctctccttctcctccccctcacactcgacttatcttctcctgaatctcacttcagatttgggagtcgtcaactacgaataccgcaatcat

SEQ ID NO: 162090 - DNA, 162 bp, Zea mays
  Clone ID: MRT4577_79402C.1
ctcgatggacattagaagcataggatcgtttgacttagagacggagggactgatctgttatagcaacttctactacgaggattctgatgcgagactgtagctaatgttgggcgagaaagacaaggcgctgatttcctcctgggtttcactgctgacggccat

SEQ ID NO: 162091 - DNA, 482 bp, Zea mays
  unsure (1)..(482): unsure at all n locations
  Clone ID: MRT4577_79403C.1
tttcgcacaggcgggtgcctaccagcgggggcancgcgagctancttcnggcgggcgatagatcgatcgagcgctcngccatcatggggcgggaggagcangcgctgctgtcnacggagatcgtgaaccgcggggtggagccgtcnggaccgggcgccgggtcccnggcttcggggtgcgcgtgcgcctcctcctgccggacttcctgcggtcggggagcctcaaggacgtgcgcctcggggaccactacctcatcagccacggggtgtgcctgggccccatccccgtcatcgggctggggtgcggcgccnagctgggcancctcagccgcgacgagctgtggcgcaaggtgtngggnggaggcgacctacgacctcgccaccgtgctcgcgcttcctcggcggcctcgccttcaccatctccgtgtacatcatgtgcaggcccagggccgtgtgcctcatcgacttcgcatgcgacaagcc

SEQ ID NO: 162092 - DNA, 274 bp, Zea mays
  Clone ID: MRT4577_79404C.1
cccacccgtccgagcccaccagctaattggcttgtctccgtccgccggccgtccgtggtcaggcaaagattcgtttccttttgggggctcctatcctttccttccttcctgggaacctttcccctgaaggcttgccttttccctgttttgggatggctattggtggcgcctttatgttttttgtttttttttttttttcttttttctattttgtttttctttgttttttatattattttctcttttgttattttattttattatctttgttttt

SEQ ID NO: 162093 - DNA, 344 bp, Zea mays
  Clone ID: MRT4577_79405C.1
gaatccacgcatcgacccacttcttgcgccaatgacttccgctactatccattatacctttcaaccgtacctcagaacttctagcgcttcagttactcacacctgtaccactgccactcttccatgcttgcccaccccggcatccaggagcctgaagctctggcccttgtcaactccatgaaggcacatgactggacagtcgttcccggcggacaagccacgtacctatgcacacctgtgccgcgtatcactcttccgaccatactgctgatcgacttcgtgtccataaccttcccccagcaccaactcaccatggagaaagacccccataagaagaactaccc

SEQ ID NO: 162094 - DNA, 288 bp, Zea mays
  Clone ID: MRT4577_79406C.1
aaaaaaaaaaaaaatgaaaaaaaaaaaaaaaaaaaaaaaaaaaaaaaaaaaagaagggggagattacaaaatagtgatgatacagaaagacattgaagacgacggtggcggaccatcctattgctgttgttgctgtttcagcagtcaatgccaaatgctgaggatgcctattggtttagctaggtcacccctttttcctgcaggggtactaccagttgcataattgcgggggcgccctttggggttttactgctctggctccttcgcaccggacctttttattttttt

SEQ ID NO: 162095 - DNA, 439 bp, Zea mays
  Clone ID: MRT4577_79407C.1
cggacgcgtgggcgccaagaacatacagactttgtgtgtggcgatcgaaacgagagttacctgcactcatgttgagatcaaaatgtgttcggtcttcactgatcaaggctgcattatgttcttgatcttggacaacatgtatttgtccatcctcaaactcagctgatatatcatcttctccaccgtttacagcagaagcttggttcagatcaggtggtatcgcagcttcttcagttcaaaattcagcagtacatacatttttattcaaaactgtcatttcaagcatatgcgttattactcgatcgatcacctgatcacaaatttcaccgaccacaatagatggagaggactctcttttggagtagtatccagttaagtacacgatggacgtgatatgcatactatatattttgaataaaccaatgtataaagttgtttt

SEQ ID NO: 162096 - DNA, 355 bp, Zea mays
  Clone ID: MRT4577_79408C.1
agctgcatcagcgtatcagcacttagggtctactattgttattggtgtagccaagggattgcaaatgggaaaaatggtgtaaaaacgctgcatatttttttttgcctaagctacagctgtgctacagcaaattttgattaaaaaaaaaaaaaaaaaaaaaaaaaaaaaaaaaaaaaaaaaaaaaaaaaaaaaaaaaaaaaaaaaaaaaaaaaaaaaaaaaaaaaaaaaaaaaaaaaacaaaaaaaaaaaaaaaaaaaaaaaacaaaaaaaaaaaaaaaaaaaaggggggggccccccaaggattccaacgttaagtaccgcagaaggaaagtgaaagacccccaaaaggggcccc

SEQ ID NO: 162097 - DNA, 265 bp, Zea mays
  Clone ID: MRT4577_79409C.1
gcagagtccggagctgcggcggcgtaagtcatagctggacaagctttgaggaagtgtcttccgctatgtgacagagtattggttgaaaggagtgccgctgaaactgtgaccaaaggtggcattatgcttccagaaaagtctcaaggaaaagtattgcatgcaacggtcgtggctgtgggatcaggcgggaaaggaaagggtggagagattcagcctgtcagtgtgaaagttggagataaagttcttcgcccagaatatggaggca

SEQ ID NO: 162098 - DNA, 378 bp, Zea mays
  Clone ID: MRT4577_7940C.1
cgagtacaagcttttttttttttttttttttttttttctttttttttttttttttttttttatttttttttttttttttttttttacctgcccgggcgggcggggggaggggcgactcccaggacacgggggggcggcacaaggggagccgaccccgggaccaagccggggggaaacaaggccaaacccgggccccgggcgaaacgggaacccgccccaaatcccacacaacaaacaaaccggaaccaaaaaagggaaagcccggagggccaaaagagggagcaaacccacaaaaagggcggggggcacactggccggttaacaaccggaaaacccggcgggccaggaaaataaaaaaaacccccaaccccccgggaa

SEQ ID NO: 162099 - DNA, 266 bp, Zea mays
  unsure (1)..(266): unsure at all n locations
  Clone ID: MRT4577_79410C.1
tagagttttctcctcttgccaatcatcatacagctatccttatgttcctgagagatacacatcctttcacatataaagtgtagtttaccatagcatacaagcacactgggaattttgcattacagattacgtactttctgaagtatcaaacacatcatttctacaaagtgaagtggtgatacgtttaataaggttggagtaattttttaaaacagcccccataacatattttctcncgtttactagaaaaatggcctactcaaaat

SEQ ID NO: 162100 - DNA, 218 bp, Zea mays
  Clone ID: MRT4577_79411C.1
gatcgatcgtatctgcggaacaagctgcgatgtatctgagcctatccaatggccgagggctacatcagcgcctgtggcgacctgttctccagcggcaagctggtggcggtggcctgcgtgtcgttgttccagcggaagagcgtggagaacgtcgacaagcaggagttcgccggcgcggcggccgagctcctgcacgctgcgtccgcgtacggtaagct

SEQ ID NO: 162101 - DNA, 1112 bp, Zea mays
  unsure (1)..(1112): unsure at all n locations
  Clone ID: MRT4577_79412C.1
agccctaattggtcctgttgtccatgaagttttcgctggatgaacaatttaaaacacaattacaccaccgtttgcaaccacaaaggcctttcatgaattctgaaatggaactcagaaagaaacttcccggtcataaatacaacagatcaaaaaagtattattgtgagtccaactacaagggaatataaaattcagagcacccaaatccaaaactttatgcccatttaccgcacaggctgctggttgtaatgactcttctctttcttcttggccgccgcaagccttgcgctccttgctgtggcctcggcagcggcgattttggcaccggtgtccgtctctttgctcgatctcttcttcttcattgaagccatcttcttcaaacgctccttcacgtccacagcaatggtatcttcttcatcaggtcctgcactggcagtctcctctgacccctcggctgcatcgagggcccgcggttcgctctagaagnnnnnnnnnnnnnnnnnnnnnnnnnnnnnnnnggtcttgctctctgannnnncagtagcatcttccnnnnnctctgcatcaccagcttggttggcaccttccttctcagcatcctggcagcgctggttgagttcccagaaagtcccagctcagccaatactgcatcaagttctgctannnnnnnnnnnnnnnnnnnnnnnnnnnacagctgcctttctgtatctttgggtggcgcagccagggcttcaactgttttgtcagcaagttcggctggggcatcttccacttcatgctcagctccatcatcaaggtcctcgtcgtcactctcaacgtcctcctgaagggcggcgcggacagnnnnnnnnnnnnnnnnnnnnnnnnnnnnnnnnnnnnnnnnnnnnnnnnnnnnnnnnnnnnnnnnnnnnnnnnnnnnnnnnnnnnnnnnnnnnnnnnnnnnnnnnnnnnnnnnnnnnnnnnntgcccaggacttggtggtgagcggcgcgggagcccagaacacctccttctgcggcgacgcctgcgaattccagatnnnnnnnnnnnnnnnnncctggaggacggccggcgccctnnnnnnnnnnnnnnnnnnnnnnnnnnnnngggac

SEQ ID NO: 162102 - DNA, 402 bp, Zea mays
  Clone ID: MRT4577_79413C.1
ggggagcgggggtaaaacaaaaaaaaaaaagccacaccccaaaaaaaagggagcggaggaaatggggctgaaaaaaaacccgccaaaaaaaaaagaaaagcccccccaccttggaaaaaggcacccaaaggaaaaaccctaaattgggaactttgccgcaacccccccaatggaacaaaaaaattccaaaacccaaaatgccaaaaaaatgcttgaccccaagaaaccccaaactggggaaaaaaaccctctaaaaaccgctgggccaaaaaccccgaagtaaatttcaaacaattggaagccccgggaaccctaaaaaaaaaccactgggggaccaaaagctcccaaaaagggggcaacggaaaaaggtcttttcaataggggccttaaatccctttcttt

SEQ ID NO: 162103 - DNA, 599 bp, Zea mays
  Clone ID: MRT4577_79415C.1
ggtaccctcggagcctgccgggaaacaaccgttctcttatctcctacggtcgtcttttcttcaaagcgaactaacagaaccaactttccttctctcgccatggatcccgcgagatctctggatcccgcactgcagccgccgccagggatgagatgcataggaccagccgcacatatctgccggagcgttgttccttggaggaggagcccccgtggtccgtgcaatccgccctcgcggcgccgttcgccgaggaagcccttttcgcgccgtccgcggggccggaggagatgctttttgaagccacgcagtccgccaaggccgcgtcttacgccaagtccgcgcagtccgccagggtcgccctcgcggcgctgttcgccgaggacgcccttgtcgcgccgtccgccgggccggaggagatgctagccgaagccgcgcagtccgccagggatgccctcgtcgcgccgttcacttgtgctcatggagacatatgcaaggcagggtataaacgaagaagtatttctctttaaaacagttaattaccattcctaaaaaaagctaattactccagagaaataaagcatgatctgcaatgctttcac

SEQ ID NO: 162104 - DNA, 430 bp, Zea mays
  Clone ID: MRT4577_79416C.1
acggggatccccgatggggatttatccccggggataacggagatggggaagaaatgtcccccggagcgttcgtggggatccgcgcggggaagttttttcatcgcggggactgggatgggtagccaaaacccgacggtgaattccccgttgccatctctacttgccagtcgagatggaataaaataaatgtcaggcgcacgtactgacgtgttattacgatatttctcccctacagataaatgctctgtttattccctgcctaacttatctaacttttctatttaaagttgaagttagttatttaattcgaacaactaatcttaaatgaaatatggtatagttagccacaaatcagacagacctaaaaactcggtcagcaaggtggccaatggtattattatttaaaaaacttgatcttgcgaatttacac

SEQ ID NO: 162105 - DNA, 610 bp, Zea mays
  Clone ID: MRT4577_79417C.1
gctaggtacaaggaaagggcgtgcatggctggcatggggatcatcggaatcgagctcgtcggttacccgttgcgtgtaggcgggcggcatgagggagcggagcgcggcgaggtactcgttcatctgcttgcgccggttgcgctccacggcaatgtggaccatgcgctggctctccacttcctcctcgttcttcagtggcctcatccttcgccgcttccttcttccggttccggccgccgctgtcgcggtcacagcaagtgccgccggggcatcctgaccggcgccgccactcgcgctccccacggacgacgccacaggcagcgcgcgggcagccggctcctgcaggagctgtggcggcgagcacccggccacgtcccggccgccgccagcgccactaccgatctcgaccacgccctccattccactaaaaaacaggccactccaaggccctcctgctgccatggcaccacacccaaagcgactgccttgctgggaaagcaccacggcctccagtgccatcccttcagggtctcgcctctcaagaaaccagcagcagcagcgtgcagagtgcatacccgagctagaatccgagaaaattaggtcgtctctc

SEQ ID NO: 162106 - DNA, 350 bp, Zea mays
  Clone ID: MRT4577_79418C.1
gaattgtggatctagaaaccgtgaacatattgtacaaaggtaaccacccgcgcttatttctaaggaagcatctattccatgcgccgtttgcgcccacacgggaggacactggccttataccagcacgcaactttgtttacatcgggactaaaaatgggcggccaaacctaaaatcgactgggatagaagcccatattggtctagctattacccagagggtagagaaggccctatcgctaaatgggacgtttattgtaccactcggcatacactgtgcaaataacacctacctcctagataccttatgaagagtggcaggcctcacagacactgttttacttgtggaatag

SEQ ID NO: 162107 - DNA, 293 bp, Zea mays
  Clone ID: MRT4577_79419C.1
taggtaaagcttattttaaatcactgcgtgatttggagtggatgatgcgcctgactgaagagccggataaagattctcggaagaagggcactgaatgagcatttactggggaatactgtaatactaataccccaggcatttatcagtgtgtctgctgctacacccctttgtttcagacatcaaccaaatttgatagaggttctcggttgccattctattataaaccaattgttgaaaacgtcaagaacatgcatgatatgtcaatcatttttatgccccgaaccgaggggctt

SEQ ID NO: 162108 - DNA, 358 bp, Zea mays
  Clone ID: MRT4577_7941C.1
ccaaggcttccggtttttcaatccgggattttacaatccagttaaacggcccaagatggaaatggaaaagctcttagcccaattggttgaaaccgaaagggccaaccccctagttctgggccttgtttgttttaacatcgtaccggttggttggaacggttccttggccactgggcccaaccttaagggtccagtaaccaaagggaaatggggggctgttcccattccatctatgttgactgggaaaggatggccacgtggggctgccaccagccaattcggtaagcctgctgtccacatggcgagggtggccttaaaaggaaaggcatttgagtggtggggccaaaatccttttagc

SEQ ID NO: 162109 - DNA, 588 bp, Zea mays
  unsure (1)..(588): unsure at all n locations
  Clone ID: MRT4577_79420C.1
cctgaccaacacacggttggtattagctcttgggtagcacccatggcgaaatgtctgaagcacactactatccacgcactgtggctggttgccatagttcttcttgcatcctctgtcgtacttcatgcgcgcataataagcaggcaaaccaaagagaatagcaacactaggagcttgacaatgactatgatggggccggcaagcaacattattggcactggtgggcaactttctagagggaagtgcattaaggatcatgcatggttcgtgtgcgtaaagactatggagtgttttgtgaccttagtggagtgcttgatagggtgcagtggttatgactaacaagaggccgtgcttttatccaattccaagatggaaatcataaagatgttctagctnaaaaaaaaaaaaaaaaaaaaaaaaaaaaaaaaaaaaaaaaaaaaaaaaaaaaaaaggggggaagataaaaaaaaaaccaaaataaaggaacccgtccttgaaaaaaaaaaaagttttttatatagggccccctaaaataaaattaattggcccgtcgttttaaaaacttcatgaacggggaaaaaccggggg

SEQ ID NO: 162110 - DNA, 125 bp, Zea mays
  Clone ID: MRT4577_79421C.1
agcagggcggcgccatcgacgactacgtcatcgccaaggtcactgaccaccacgtgtacctcgtctacgacgcctacatgcagacacatcgaccattgccagattgactctcgcactgaggtctc

SEQ ID NO: 162111 - DNA, 302 bp, Zea mays
  Clone ID: MRT4577_79422C.1
acagcaactatttttatttcacggccagaaacagagctaaaaaacgaaccccaacaaaaagaaaacagggcgatatttggtcacaagcccgacgacgccaccttagccgggatgatggcttcaccattcacgcgtcaccataccgccgacaaaaaccccaccagcgcgagcgcaagtagcgcgggcgcggacacgcctgacgcgggcacggcggagttggccgacttgtacggggccgaggacgaggacgcgcccgccacgctgacggcttccggggaaggaccatcagccgccgtcgcgag

SEQ ID NO: 162112 - DNA, 439 bp, Zea mays
  Clone ID: MRT4577_79423C.1
ggcaaaagccaaaaggcatcaccgccgcgacgacgatggcagcctcgctccaagccgcggccaccctgatgcagccggccaagatcggcggacgggcgccctttgcctcgctgccgtcccgcccgtcgtcgcaactcgcctgaggcggttcgagagacaactccaatcactggcagtataacgtactccactgcacgacatcttgacatggttgggcgacttggccaagatggccgtgttagaccgctgcaccttctcgaagacgccgatgacctcgacggtctacgggttgctcttggggacgctcaacgtgatgttgccagtggaagaagcggcgttcttgatgttctccttctggagctccttctcgtcacctttgcccccggaggggagcgcgacggcgttgtcgtagccggtggagccgccgcggcccttgggg

SEQ ID NO: 162113 - DNA, 828 bp, Zea mays
  unsure (1)..(828): unsure at all n locations
  Clone ID: MRT4577_79424C.1
gccggcctctttctacatggtatcagattagggtttccttcctatccacccacagccaccacccacccccaacagcagccgctagaaccgccggacaccgccgtcgttgccccccgggaggctcaaccttccctcccgggggcagccacaccccagtcgccgctccctagcagccgccgcatcctcccctctctctccagtcgccgcatggccactgcctcctcgtcgctccgcttcctcggcctgctcaagcaacccgacgacgccagctcccagtcccacggcatctaggcgctggagctcgacgagcgcgacgtcgtctggtcctccagcgcgacctcctcgtccttcgcggcctcctcgccgttcccgaccgccagcctcgggaggccgatttccgcgtcgtcccgccacttccccgccggcagcatggggctggacgcgctcctcgccgacgaccaccacgcgcccccgcgcccgcgtcgacgaagtggttctcttctgagtccctgggctcacccttggccctcctttgctgatcatgccgcagcgccggcaccggcggcgagagcttgccctagcggtcgcggaggtgtcccttccgcgcgccccacgacgcaacgctccgctccagctcgcggagctcgcgcagtaggccggagaagcttcggtgccggtgggcgacgatgctctccggcaccatccggcagccaccgcccttgtagccctccctctgtccgtcgcggncggccccaatcctcctcggcgctagcgcgcttctccggncacggntcgaagnnccctcacgcagggncacctcgctttctc

SEQ ID NO: 162114 - DNA, 2664 bp, Zea mays
  Clone ID: MRT4577_79425C.1
aaacgaacaaccaaagtagagattcaaaggttgagacagaagaaggaaaagaagaatactacaaattcaacaagattgcatttaggcaatgaaagaaaaaagagaggtggctgtgctctactcgttcgtggatcgaacaaggagtctggcagcaccactgatggttttgttccatatgaatggaaacgtacgatcttctcctggctgattgatctgaatgttctatcagtcaatactaagctgaactgtttggatgaaagccactcaaaggttttactagagggttttgtcactagggatgggattaactgcagctgctgtagcgaggtcatttcagtgccagaatttgtgactcatgctggttctgaagtaaataagccatacagaaacatacttggggatgggctagacattgaccttttgcactgtctcattaatgcatggaatatgcagtctgatgctgaaaggcaagatttctttccagttagcattgagggcgatgaccccaatgatgacacgtgtggtatttgcggcgatggaggcaatttgatctgctgtgatggatgcccctcgacatttcacatgagttgtctaggactggaggcacttccctctgattattggtgttgtgcaaactgctcatgtaaattttgccacgaacattctagtgatggtgctgaagacactgctgatgttgattattcattgcatacttgttcccagtgcgaagagcagtatcatgaagcctgctctcctgagactgattccataactaacctttccagtcagacaggcaatttattctgccaacaaagctgcagactgctgttcgaggaattgcagaatcttcttgcagtcaagaaggatcttgaaccagaatattcatgcagagttgttcaacgcatccatgaagatgtaccagaagaagtccttgctttggacaaaagagttgagtgtaactccaggattgctgttgcactttcattaatggatgagtgcttccttccgattattgaccagagaactggcatcaacttgatacgaaatgttgtgtatagctgtggatcaaattttgcccggttggatttccgtggattctatatatttattttagaacgtggagatgaaataatagctgcagcatctgtccgaatacatggaaccaagttagctgagatgccgttcattggtacccggaatatgtataggcgacaagggatgtgccgccgacttgtagatggaatcgaaatgatcctcagctctctcaatgttgagaagttgatcattcctgctatcacagaacttgtggacacctggacatcgaaatttggatttagtccacttgaagattctgagaagcaagaagtgaaatctatcagcatgttagtttttcctggtacaggtctcctccaaaagccattgctaaaggccttgcctaatgaagaacaatgttcccaaggagacaaaactgagaaatcatctgatgtagtcaatgaagattctccttgctctgatgcaagtgctgatcccctaggtttgggggtcaaagagcatgaggacagcagcaaagacgctgatggcacttgtaacggtgacgtttcacaggaatgtccccattcttgatgggaagatttggttgcagttttctaggccccaagctttacatggactaagcctccatttgtttttgcacctcgagtttttgatccagcagttagcatgacatccatccgttggtgagaaagaggcttgccgggtttttttttggcatattatattagttgatggggcaccccttttagttttactcagaaattgatgattgacgcgtcggcctgggaaaagaatcaacccgtgcagttctgaaaagcgtttactccatccagccagctaacttaatgtgcagctgaaaaatcggcatgtagaagaatgtggaggataacgtcccttcttttgttttttttggtcgttaacttgagactccgagggcgagtcgtcgtaaatgttacaccagttgttattttgttaataggtttttttaaatgttttcgctagcgcattcctggaatctaatctcattcctgtaagataattctcacctctgtaagatcagctaatgtatgcgcaaagctagaaatagtccgcctgatccgtcacgcggaattggttacctaaaccctgttaatgtttcgttttgcatcgtgttggaatgtgtgtgttcttcctgtgaaacaataacatgtgttcgttcctgtggaaaggattcgctttgctggaatgtgtttgtttgttcttcctgtgaaggaaagcttttgcaggtcaaatcatcagttcatccccattaaaatgtgcatgcaatacaatgcccctggagaagcaaaatttacaggcaggcaggggtttgcgatgctggtgctgctaaggttatcgaggatcttgttcttgacatcctgtggaaacgggggggacggccctgccagcctgccttggaacaaaactccgccagcgatttgatccccttttccagcgcgacgtgactcctgcagtgcagtgaaaagggtcggcacggggttcctgtaactgtgtcgactatattttgtcaattcgctacccaaaacatttggaacctgcttggaacagctttttatgaaaagcttttctgag

SEQ ID NO: 162115 - DNA, 226 bp, Zea mays
  Clone ID: MRT4577_79426C.1
ctatcactttaccatgcacgcagacgtacgcttgcatcctttctatcgagcggcctcccttttttttttttttttttttttctcaaaacaccgagagagttttttaataccataagatacattacacccatctttttttgctacatacaagtactgccataatccaaaaagacacccacccaaaaacattattttctaaaaaacccggtttattaaacccattaac

SEQ ID NO: 162116 - DNA, 4391 bp, Zea mays
  Clone ID: MRT4577_79427C.1
aattcggcacgaggctcatgctggttctgaagtaaataagccatacagaaacatacttgtggatgggctagacattgaccttttgcactgtctcattaatgcatggaatatgcagtctgatgctgaaagacaagatttctttcccgttagcattgagggagatgaccccaatgatgacacctgtggtatttgtggagatggaggcaatttgatctgttgtgatggatgcccctcgacatttcacatgagttgtctaggactggaggcacttcccactgattattggtgttgttccaactgctcatgtaaattttgccatgaacattctagtgatgatgctgaagacactgctgatgttgattcttcattgcatacttgttcccagtgcgaagagcagtgtactgatccctgtttatacttactctgtagtttttttgaatttcgaaatcttttgacactttttattccattttcattattatcttactatattattttgatgttcaatcatgtctttgagtattttatacgataatgtctgcagatcatggagcctgctctcctgatattgattccatagctactaatctttctagtcagacaggcaatttattctgccaacaaagctgcagactggtaacgcttgtcagattattgttcttttttccttgaccttgtttctggatatgctaccttgtggttttcatgatcataatttaaatggtgacacttgctgattcacagtcctgtttgaggcagatatcggtcccttttttaacggctcatgtttgttttgggactaaaatgtttttgtggtttttttatgtttaacaccttaatcaatcatgagatgttaggtttgaggaatatgcttgtccatcatcctcgtattccccaaaagctagttttgattgccaaatggactgagttgatccattatcaacgcatttgtcatggttagtttgtaagtactaccacgaaaaattctgacatctcaccaaatttgaggaatagattcatgatgcaccaccgcatcttggatgaagtgattcctcaaaccaaacacctcctaaatatctgcaccatcccgctctgttagcttcctttcttgatcatatgcatatatgtttttccttctaatagcaatattgcaagtgctgatcccctaggtttggggtggtttttatttacatggatttcattactacaagtgattacatatagtaaggtactatatgagtgtggtattttgtcatggggcggcaacccagggcatggaggcttagattggataagattgagttagttacttgggattagattagataatattgagttagttacttgggatccaagtcttcctatctatataaggatgaactgtacctccttaagaagaaaaaggaatgaagaagaattagtcctagatctctccaatagtctagtccctcccatgctgactctgcccggctaccttcccggcgctgactaggattcataacatatggtatcatgagtcaggtatcctttccatgacttctgctgcggacgatgtacgcacatggcgtgaggagctcgctcgtgccagggcagatctggagcaggcccgatctgctatcctccagctagtgatctactcacggcaaaggtggagtctgactgccgatcagcggcgacaacgcgactgcaggaggctgtgcatgggttcctggcgtgacgtccagtgtggcagcggcttgccgtcttcaggctacgacacgtggcttcctggcgcggcgtcaagcacagcaagcagcggcttgccctcttcaggttgcggcacttggcttcctgacgtggcgtcaagcacgacaagcggcaacacggttgcaggctacggtccgccgttccctggtgcagcgacttgcatcggtattgcgcgttgaacaacacgcggcacgtggggcgacaaggccttcagcagggttggccgatccttagccatgtggacagcaagaacaagtctggttgggtggtgctgtctccactggaactcgcggtagctcaggccgtaagactggtgagctgccacgtcttggcctttgcagcctggaagaggttgttcccatgggatccagggtggcatatgttaggttctttattttatttgttaataaattaaagcggagatgtaaaaggcttatagttagggttgcactttcacatgcatatcaagttagacagcaaggttgtttccatgcaccgagaacgagctgtcttcaaagggtgggggaatgtcatgtggtggcagcccagggcatggaggcccatagggataggctcagggttaggattagtgaataaagattagataagattgacttagatacttgggattagattagataaaataagattgagttagttacttgagagccgagtcttcgtatctatacaaggatgggctgtacctccttaagaagaaaaaggaatgaagaagaattagtcccagatctctccaatagtctggtctctctcaagccgactccgcctgactaccttccggcgctgtttatcacccctatgaactaggattcaaaacatatttgaactattatttagtgacttgagaaccttgtcattttaatccagctattaaaagctctactcttcttttggattgagtcgctatatttttatttctgaaactagacagttggtatttagtcataagaaatgtgtaatgcaaaaacaccatggaagttgtgtatttttgaaaatgctgtattaaacactattttttaccatcaaatcaaacacacatcctgtctagatcctttctatctatttgtggttttatttatcttctagtttattaatgtatgtataccctccctacaagccgcaactgacccaagaacttccaaacttcaaatggtatagttgcataatctgaaattactagttctgtgatgcagctgtttgaggaattgcagaatcttctcgcagtcaagaaggatcttgaaccagaatactcatgcagagttgttcaacgcatccatgaagaggtaccagaagaagtccttgctttggacaaaagagttgagtgtaactccaagattgctgttgcactctcattaatggacgagtgcttccttccgattgttgaccagagaactggcatcaacttgatacgcaatgttgtgtataactgtggatcaaattttgcccgattggatttccgtggattctatataattattttagaacgtggagatgaaataatagctgcagcatctgtccgaatacatggaaccaagttagctgagatgccgttcattggtacccggaatatgtataggcgacaagggatgtgccgccgacttgttgatggaattgaaatgattctcagctctctcaatattgagaagctgatcattcctgctatcacagaacttgtggacacctggacatctaaatttggatttagcccactcgacgattctgagaagcaagaagtgaaatccgttagcatgttagtttttcctggtacaggtcttctccaaaagccattgctgaaggcctcaccatcggaagatcaatgctcccaaggagctggtgctgtctcttctgtagacaaaactgaaaaatcatctgatgtagtcaatgaagattcgctttgctctggtgcaagtgccgaccccctaggttcgggggtcaaagagcatggggacaccagcaaagacgctgatggcacttgtaacggtgacgtttcacaggaatgtccccattcttgatgggaagatttggttgcagttttctaggccccaagctttacatggactaagcctccatttgtttttgcacctcgagtttttgatccagcagttagcatgacatccatccgttggtgagaaagaggcttgccgggtttttttttggcatattatattagttgatggggcaccccttttagttttactcagaaattgatgattgacgcgtcggcctgggaaaagaatcaacccgtgcagttctgaaaagcgtttactccatccagccagctaacttaatgtgcagctgaaaaatcggcatgtagaagaatgtggaggataacgtcccttcttttgtttctcgtcgttaacttgagactccgagggcgaatgcagccattgaatcgtcgtaaatgttacagcagttgttgttttgttaataggtttttttatgtcttcgctagcgcattcctggaatctaatctcattcctgtaagataattcacatgtctgtaagatcagctaatgtatgcgcaaagctagaaatcatccgcctcaaaaaaaaaaaaaaaaaaaaaaaaaaaaaaaaaaaaaaaaaaaaaaaaaaaaaaaaaaaaaaaaaaaaaactcgaaaagggg

SEQ ID NO: 162117 - DNA, 440 bp, Zea mays
  Clone ID: MRT4577_79428C.1
aaagggaattggttttttttggataggggggggatttatttccttttttaaaaaaaaaaacccttattttgggggcccccccctaaggcaaacatggccctcccacccccaaaaaacaattaattgggttggaaaggaaaattttccccgggacccccccaaaaaaaaaccaaaccgggggtttttaaaagggggcctttggggttcaaacaaaagtttttaaccccccccccccgggggctttgggttttaaaccccggggccttaaattgaaaggggggcccacctggtttttggaaaaacttgaaaaaaaaaaccaggggccccccccccaaaaaaggggggggcaaaaagtttttttccccaggggaaaaaaaaaaaatgggggggtatcccaaaaattttgcccggggggcctattgggaaaccccacccttttg

SEQ ID NO: 162118 - DNA, 333 bp, Zea mays
  Clone ID: MRT4577_79429C.1
atgcagttactactttcatccctttgcattcttgttcacacattaaatgaagaagggtttctggtacacaacgtccttgtcgatataggcaacacagcagatatcaacttcgcaaaagccttcaggcagatgctagagcaagatgataagatacatgatgcaacacatcccctctgtggcttaggaggaaggcagatagttgcacttggcaagataacaatgtcgattaccttcagcaaaatgatacagaagtcttccctacctctgctgaagattttcaagacgaagaccttacatggaagcaacattgcaaaatgtcgaagctaccattaa

SEQ ID NO: 162119 - DNA, 576 bp, Zea mays
  unsure (1)..(576): unsure at all n locations
  Clone ID: MRT4577_7942C.1
gnacgatcgagatggcgtttccgaagcctactagtcgtctagccgcgctagctgccctcgctgcggccatggcggcggcgatgatggccgcgaccgcctcggcgcagaacacgccgcaggacttcgtgaatctgcacaaccgcgcgcgcgcggcggacggcgtgggcccggtggcgtgggacgccagggtggccaggtacgcgcaggactacgcggcgaagcgcgccggggactgccggctggtgcactcgggcgggccgttcggcgagaacatcttctggggctcggcgtcttcatcgtctgcagctacgaccccccgggcaacgtcaacggccagcgcccgttcctcaccctcgacgcggctgccaagtagaggcagagagcccggctgcatgcagtgtgcgtacgcacgcatctgcgtgtgcatggcgtggctactcgatcgatcacgtactgcgtgtgcgcgcgcaccataataagtattgtgtgtgtacgtatatatccgcatctgcagtgtttgtgtcatatataaaataatcgtctgcgtgcgctatataatatctatagaacttcaat

SEQ ID NO: 162120 - DNA, 238 bp, Zea mays
  Clone ID: MRT4577_79430C.1
gtgcaagcagagcggattccagcaggtgccagctaggaggaacgatgcggagatgacgaaaaacctatcctcgggcattgcgtcgagttgaataagcatgataacgcacgcacatgagacacgctaatggtatcgacaatgccagtcctgtgcgacaatagaggtgtcagcaattgatgctactggagccacttgaccggactcatgcaatcattggctagagtgtacaatacatact

SEQ ID NO: 162121 - DNA, 206 bp, Zea mays
  Clone ID: MRT4577_79431C.1
gacgcacgcgtccatttttatttttttttttttttttttttttttttatattgtgttattttcatatgaatacttttgggatcttatttttatttggaatttttttaataacattccaatttcgagaggaggttctaaaggttccaaacttacgttagcgtacatgcgaatttatagttcttcaatagtgtcaccaaaattcaatt

SEQ ID NO: 162122 - DNA, 490 bp, Zea mays
  Clone ID: MRT4577_79432C.1
gcgagtacaagctcttttttttttttttttttttttttttttttttattttttttttttttttttttttttttttttttttttttttttttttttttttttttttttttttttaatgttgttggtggtttttcttagccggccccgggggggggccagggcgggggaattcccgcaagtgggggggggcaaaacaagggtgccctgcccacacacaacggtgagggcaaatgcaaaaaccctggggcgcgggagaaaaaggatcctgacgcaaaccccaaacaggcaaaggccggggggtaaatggggggagggggaaaggggtaaacgaggccaaaacaacaaaaatacgggggggggcaaaaaggggcaggggcgcgggggacaaaagccccccccaaatcaaaaaaaatgcgccccaccccggggccgaggtgtaaaaggcaaaccggcccttcccgtttttttaacaaaaacacccagccctgggg

SEQ ID NO: 162123 - DNA, 272 bp, Zea mays
  unsure (1)..(272): unsure at all n locations
  Clone ID: MRT4577_79433C.1
taggacccgggccaggacaccaccgagggccacaaaggcagagaaaccaccgcggccaacgaggaggccacaaacaacaacgagccagggacacaaccagggcgccgagcaacaacaacaggaaggcgagagcaccacaacgggaaacacaacagcgagggaggaggagcaaaggaagaacagccaggcgccaaccagagaagggagagaccagngcaaacgccaaaatgcagaccaccgagatgcacgaggaaaagaggaccgagggaccc

SEQ ID NO: 162124 - DNA, 267 bp, Zea mays
  Clone ID: MRT4577_79434C.1
tgcctcgctaaaatatcacagaccctcaaaaggggggacctttctatagaacctgggtgcctccacttccagtccatgcacaatcattcttcagtctccatagattgctaagaactagcccctatacttagataactaattctatcctatcctcccctttcctcactccgccattaggagcattgtcattttgcatatatgatcatctgctaatataccatcaattcattaaaaaaatacacgcttaaatttattggtattttcaag

SEQ ID NO: 162125 - DNA, 364 bp, Zea mays
  unsure (1)..(364): unsure at all n locations
  Clone ID: MRT4577_79435C.1
gatgctcaatcttcttgttcatgaacaaacacatgagagcacaagcatgaatacatcgccgacatcctgaagatgtgcgtgtaagtcaaacctttgctgcccagaaggcaagcagatcgggctatcgctgtccggaagacaagttgatggcccgacgcgtgagatgcagccgcacagcgaggcctcgatggccgttgtggaccatgccctgcccccttctgttgtagccgccacgctcgccggggatgcacgcgaggccggccgcagccatggccgcgaaccgcatccacgcggaggccgtgagctgcgccagccgaggccgtccgcgccccctgcccaggccgncgtngctgcatgccgcgcc

SEQ ID NO: 162126 - DNA, 283 bp, Zea mays
  Clone ID: MRT4577_79436C.1
cgttaatcagtgttcagatggatagaaaggctattcactatgcacaaaataatgggcatacaacttgctacaactgctaaaaaggtcaaaggctacaacagaactaccaacagtaaagattgatctgcaagacaaagcctagctgcataacagaactgccagctgtaagaacaagcaagaatacatttctatgtaaaggaaggatacctaattcaaattctgacagctaggagcacacctgtggacaaactgccccacatgcatactggctcgcataaaataa

SEQ ID NO: 162127 - DNA, 433 bp, Zea mays
  Clone ID: MRT4577_79437C.1
gtatctgcagttcgatgtatccatccatgggatcgatcccttgtgcctgcctgcctctgcctggcggcgcgtgtcggcacctgacagcaggtgacgcctcgtgacgggcagttagttaacccttttgccggtggctcactgatctgctgcctgcctgcctggcccggacgtctgttcgctgtccctgaatgcgatgcatcgtctccgtttcggtctgcacgtcagttctagttgtgccgaagctgtagccatcacaggccgacctggcgtcgagagaagcgaggatggctgtgtgtagtcaatctctgtcgtactactactgtccactaccagctttggtggcgtcggtccgcatggcatgtgactggaataggctccagttagagaaaaaaaaaaaaaaatataaaaaaaaaaaaaaaaaaaaaaaaaaaaa

SEQ ID NO: 162128 - DNA, 206 bp, Zea mays
  Clone ID: MRT4577_79438C.1
attcttagcattcataaacacaccaagcgtagctacctatcaacaacggaacatgtttggcttccaagatattagccctccttgcgctgattgccctttttgagaacacaacaaatgcgatcattattccacaatgctcactctctgctagttccattatcctcacaaatgctaataccagtcactttaatggggtttgaacactt

SEQ ID NO: 162129 - DNA, 508 bp, Zea mays
  Clone ID: MRT4577_79439C.1
tcgagtcggatgctctcttcatccggaaggcaggggaagaaattacgcagcagctctacaacttcgaggacaaagggggtcgccgtgttgttctcaggcccgaaattaccccttccctcgcgcgcctagtcataaagcaaggaaaatcagtctcccttccactgaaatggtttactataggacaatgctggcgatatgagcgcatgaccagaggaagaaggcgggaacattaccaatggaatatggatatatttggtgtgcctaaagttcgggctgaggctgagcttcttcatgctattgttctcttatttcaacgtcttggaattacatcttcagatgtggggatcagggtgtccagtcggaaggttcttcaggctgttttgagcatgtactccatcccagagcacttattcactcaagtttgtgttattgttgataaattgggtaaaatgactagggaagaaattgatgacattgtcttccctttggacgaagaacttgaaggacc

SEQ ID NO: 162130 - DNA, 2285 bp, Zea mays
  Clone ID: MRT4577_7943C.1
agaccgcaagtatgttccttttataactattccactcatgtgctcaacaacccagtcatgcgatacagcaacgaacgaacgaacgaattaaattatgcaactggattaacaaacagcagaataatcagtcgagccgcatcatgtccttgtggaacgcgtcgacggcgccggcgtccacgcactgcgtgatgagtcgcgcgccgggcttgtgcgcggagggccggaccaggatgcacgtcgcgatgtagtccaggttggtgagcgggacgacgtgcacggggcagccccacccgtagtccacctccgcgaacccgagccgcgaccagtccgacaccagcagcgtccggtagtccgacgtgatgcggtacgggtcgtccaccccgccgcccgcgtgggggggccggccgcgaggatcatctcatataagaataactaatcaagatcgatcgagagaatggcgtttccgaagcctactagtcgtctagccgcgctagctgccctcgctgcggccatggcggcggcgatgatggccgcgaccgcctcggcgcagaacacgccgcaggacttcgtgaacctgcacaaccgcgcgcgcgcggcggacggcgtgggcccggtggcgtgggacgccagggtggccaggtacgcgcaggactacgcggcgaagcgcgccggggactgccggctggtgcactcgggcgggccgttcggcgagaacatcttctggggctcggcggggcgggcgtggagcgccgccgacgcgctgcggtcgtgggtggacgagaagaggaactaccacctgagcagcaacacctgcgaccccggcaaggtgtgcggccactacacgcaggtggtgtggcgcaggtccacccgcatcggctgcgcgcgcgtcgtctgcgccgacaaccgcggcgtcttcatcgtctgcagctacgaccccccgggcaacgtcaacggccagcgcccgttcctcaccctcgacgcggctgccaagtagaggcagagagcccggctgcatgcagtgtgcgtacgcacgcatctgcgtgtgcatggcgtggctactcgatcgatcacgtactgcgtgtgcgcgcgcaccataataagtattgtgtgtgtacgtatatatccgcatctgcagtgtttgtgtcatatataaaataatcgtctgcgtgcgctatataatatctatagaacttcaataattttacatgcaaaaaaaaaaaaaaaaaaaaaaaacaaaaaacgcttcttgccctcgcggacgaggcgcaccacgtcgcacacggacgcgtccgacacggcctcggcggccgccgacacgcgcatgatgtagtagcagttgccgtagaacccgcgcgggacgcccagcgccggccgcgcgttcatggcgaagcacacgtgcacgggggagccccgcgcgaaccccgccgcgcgggtgcgcgactgccacgccttggcgatcagcacctcgaacgcgctgcaccgctgccccgcctgctccaggaaccgcgccttcaggtgctcgatgtactccgtcgagatgtccatggcgaggtactgcagccggagctccgtcggcaccggcagcgcgcccaccgccgcgccgggagggttcgggatcgcctcgcggccccaagccggggccaccaggggcgccgcgtgcccacgcgccatgtcgccgacggcggccatgaactgggccgcgccggggccgtccgcgaccgcgtggctgaaccggaacccgaccacgaacccgccgcacgcgaactgcgtcacctggacaaggaggatgagcgagtcctcggggaggaggtcagattcgggataggtggggtgcgggagaagctcgtccttgggcaccatgagcgggtactcgaggtagtccacgtccgcgagggcgcagctggccccggcctcgacgaaccacacgccctcgccggtacagtccaccaccagctccccctcgtccgagaccgccagtctcccggcgatggggtagtagctcaccagcgcggcagccagcgcgcgctcaatggccctggcgggcgcctccgctcccgcgtcagctcggcccttgaagacgtggagggactcgatgagcgcgcgctgggtcgggtagcggtccagccaggagagcgggagctggcctcggggcgtgggcgccgccggggccaccacccgctgcgccagacgcgtcacggtcgccgccgcacccgcgctcctcatgctggtggcagcactttgggtgggagatctggaccgcggcggcggtgggtgcgcgcactggc

SEQ ID NO: 162131 - DNA, 852 bp, Zea mays
  Clone ID: MRT4577_79440C.1
cattgggtacctcgaggccggccgggaaaacagctgttctcgtggtcctcctgctcgatattcaaatttaatagttattcaaaagtataccaaaatggccggcgcatcaaggaaagaccttcttaagaaggtgtacaatatggtaccgcctatgctcgagagcttccacaagggtcaattgggtcgtgtggcagtcattggtggcagtgaagattacactggcgcaccctacttctccgccatggcctctgcaaaactaggctgtgatatgtctcacgtcatatgcgagccgggagcaggcgccgtcatcaagacctactcccctaaccttatggtacacccgtacatgcgacagtccaagaaccttgcgcaatccgagagtgccgagagtgtaagcgcagaagttgttggaatgctatcgcggctccacgttgtcgtaattggtcctggcctcggtcgcgacaaacttatgcaagacacatgcgcaaaggtgattgaagaggctaggaagcagggcatcccttttgtactggatgcagatggtctgtaccttgcacagacgaggcctgaactcgttgaaggctgcaaggagtgcatcctcacgcccaacgttgtggaatttggaagattggccaaggcaaagggcgtcaacgttgatgagggcgatccttcagaactttgctccaagctatcaaaggctttttgggtggtgttacgatcatccagaagggtgccaaggactacatttccaatggttcacataccctggtctctgagggcgagggtggcttgaagcgctcgggcggtcagggcgatactctgacgggtagtttggcgactctactaacctac

SEQ ID NO: 162132 - DNA, 269 bp, Zea mays
  Clone ID: MRT4577_79441C.1
attctttatccttgaccgcagggccgcgaggctctttagctttttctggagcagaagtagttagtttctgcaacgccattgcggtgatgatttccattgaatgtttttatccgtcaggggtagtccgtagtctcatactccatcgccttgtgtagcagcgtcgctgacatcaaaatttgggactgacacatttcacacatttttgtattctgttatttttactggttcacatggttctgctaatttttacatgtttttgcttgtattaa

SEQ ID NO: 162133 - DNA, 277 bp, Zea mays
  unsure (1)..(277): unsure at all n locations
  Clone ID: MRT4577_79442C.1
acttattatgggtgcatgcatggtatatcatgcataaattctggatgcatatgtgcatgcgggggaatgtgccaagcgaggggggctacaacgtggtgactgttaaatgtgggcattgtacaatggtgctgtccatggatctcagtcccttccatcagcaggcacgcactgtcccagacaaccaggtgcaaaaccagctgctctaacttttaataactgcaatagtaagttaaggcatgcgatgantatttggatataataaacaagatttttacag

SEQ ID NO: 162134 - DNA, 372 bp, Zea mays
  Clone ID: MRT4577_79443C.1
ccgccggaaaaaaaagcaccagcaaccaggcgggaccgggcactgataacgaccccggctgccgcggcgcctcaccgacggcggaaaggcacacggcggagccaagagccgcgcgacaaagacgaaaaaccaacacccaccaccacaacacacaagaacacaccaaaagggcagggatgcaacaaaacagactagaaagcatgaagagcgtgcaaaacgcagaaggagcaccgcaagctcgacaaggaagaggtaagaaggacgaaagacccagcacccaggacaataaaacaatcaagaccaactacctggacgccaacaacaacacccaaacctgaaaacacacaaacaaaaaaaaggacaacaaaacca

SEQ ID NO: 162135 - DNA, 257 bp, Zea mays
  Clone ID: MRT4577_79444C.1
ccgtcgctacctgtggacagacaaaactatcgagcgggggtcatagaccaacgacgaggtggccttcatggtgaactggatgctagattttcgagctctatgctggctctagtacttaatcaagacgatgctcttcgtcgcaaaagcgcgacgagactacgtgcacggtcaatgcctctgaccctcagtactcggtatactgtcacgtctgatacctgctgaacaactgttgcggctgctgcaagctgaccgagagc

SEQ ID NO: 162136 - DNA, 305 bp, Zea mays
  Clone ID: MRT4577_79445C.1
gcgcaactgaccggggcgcgcgcaaatcttgcatacatagccgaaaggtcctgcctggccagcatctgcatgagaccggactcgatgcagggtatgacacttagctccatgtgcagaaggaagctaagacgtcatcaggccgtgacagcgatccatgagcaggcacgctcacaacagcctggagtgccaggtacagcaacgggagcggatgctgagaactgggtcacatcagctacactaccaggcagtgggaccgctacagtttagaacctcgatggtgatacagctcgcttcagagcaagtca

SEQ ID NO: 162137 - DNA, 1281 bp, Zea mays
  Clone ID: MRT4577_79446C.1
ctcgaggccggccgggccgggagaaagcagagagagccggcaacatcgcagagagagagagagagagagaggcaaactggagaggccgagggtgatggtttccaaggagcagaataagcgaggagctttgcatgagaagctcaagattctccgcagcgttactcactctcatgcgatcagtcatgctgtgtgtgctctgctatatatctacgtaccaataccattcagcttttcagaccattcctatgctgtcaaggtatatgcaacacgcgtacgtgtgtgtgtgtcacgcatgcagggggataaagtgtcgataatagcggacgcgtcatcgtacatcaaggaactaaagcagaagatcgcgaagctaagccaagagatggcatcgtcgtctccgcagcacgccactactggtgtctgccaacaacaaccgtcgtcgtcgtcggtgagtgtgggagtcctgctggacaagaagggccgtttcctcgtcagtgtgttcatggacgagagctgcggcccgccgccggccgggctactcgcttccgtcctcgaggccttcgacgagatcggactcacggtgcttgaggctagggctacctgcgctggttcctttcggctagaagctgtaggagaggaagtagtagtagatgggggcctcatcgtcgacgcgcacgcggtggagcaagcagtagttcaggcaatcaagaattgccctgcaaatcattaaactaatcgacctagtcctccaattcgatcgatcgagttgacgatgcgctgctggtggagcacaaagttcatgccaagctagagactccgagctatatatacatatactgattcgcatcgtactttttgaagagagcaaagcatttttttctctcttgcctgccgcaaggagtcagtcttgcgagttctgctatttagtcaggccagggggcacctgtgctcatcgtttggcaatgccaatatatatatctcaattatccaaaaaaaaaaaaacagtcgtccgagttctgctatttagtaaggggggcacctgtggccatcgtttggcaaatgccaatatatatacctcaattatccagcttgcgtatccaaattctagagtaaaagaattactcgcacggcatcacggagatggcgtagctagctcccatcgatcacccttcttctctctacccctgatgaatgttgtggtcttcctcgaaacatatcctggctgtatgatttctgaaggttttcgtttcatcgtctgtccactagaaaaaaaaaaaaaaaaaa

SEQ ID NO: 162138 - DNA, 543 bp, Zea mays
  unsure (1)..(543): unsure at all n locations
  Clone ID: MRT4577_79447C.1
tttaggaatgcggcgacgagcatctccccgcgatccccctcccaagcgtatccccctcccaagcgtcttccaccccgaagcaccacacctcccgcgcatgcacgtgcatcggccccccggcctggcgtcctccctcccacctcccggnaccgccgggggggggttttttttctattcggcccaacaccaggacggccccacctctgtggctggccgctggccggcggcccnnttataaaggcctggaggcaggngttgggctgggtcactccataacagggaccctttggatgcacacccctgggtacccntcttaggcaccncaaccctgggtctaantttcggtctggggaggngtacccananagngtaccanntgggtgngantcccccaaggggtgnnanacccctnngggaggtntggtccaatncccggagnnggaannaggaagccannntcaaggtaggcgccangngcggtnngggttggtaacctntnttggcctggtggttggggttggtaattcaccnntcntaggcggt

SEQ ID NO: 162139 - DNA, 453 bp, Zea mays
  unsure (1)..(453): unsure at all n locations
  Clone ID: MRT4577_79448C.1
ttcccgtggggaggcacgcgtccggagggaactgtggacgccacttctgttgctggtagccatccaggcatggagcaaaagggggaggggtatgatccaatgaggatacctgatntttacaanttgaatgcttcatacatgggtgttcatgggagagccatgctatggcggtccttggggttgaagaccaacccgctggcccaaccgacataagcatgtttcctcccccgaagactacagccaaggctggggggcgcaactgggtttcatcgcgcagattattttgcccttccccagagtcacgtgtaactctgaaattggtgtaggctgggcaggagcttcttctatattgagaacattccatggatgattggcgtgactcttttggactggattttttaagcgtgggggtaatattattagggacaatattgagggagcgggggaaggcac

SEQ ID NO: 162140 - DNA, 399 bp, Zea mays
  Clone ID: MRT4577_79449C.1
aatgggaaaggggatcttttttagctggccatttatccattacatcctggaaaaaacacttaagaggggttattatgtttgttttcacctaaacccacttgggtaaaaagaaaggggaaaatttccatttttcacatttttaaggaaaaaaaaaaaagcaaaaaatcgcccattttgatgaagggggggggggggggggggggtccaaaggtgaccccccccccgggggaaaaaacaaaaaattttccttttttgcaactagctggggggacaaacagcatttaaggggggaacccatgcttgtccagggaacaccattccggccgtcctcaagggttggccgtttttttttggggggtccagctttttttttccttttgttttggggaaacaagggaa

SEQ ID NO: 162141 - DNA, 295 bp, Zea mays
  Clone ID: MRT4577_7944C.1
ctcctcgcctcgccttggagttcacgccgtagctagcgcctgccgaggagaaggttcttccctccccggcgccaggctatagtcgtagccagacacacatctgctaccccagatcaccaacacaccagctcggcagtaccacgcgatgcgaaacgtaaactcgtgaagaaaaaagccgccactgacaaaacacttgcgacggaagtgggctacacgtgacatctttcccatcagtcgctccatccatgtcgcaaatatgccaggctgcaggaagacagaccatattcagagacaa

SEQ ID NO: 162142 - DNA, 253 bp, Zea mays
  Clone ID: MRT4577_79450C.1
aatcaatgttctaataagggcagtgtggaaaataaatgggctcgggctttcaatgcatgaaagtaacaacaaagaagatcatgatcagatcatcatattgttccaagacatgcttgaagtggttacaatggacataatggttgactagctcaacgagtacggaacctagaaaccattctacacatttgatgagtagcctttaatcatcattttttttctcgaacgcgcaggataactgcacaccattgtatta

SEQ ID NO: 162143 - DNA, 317 bp, Zea mays
  unsure (1)..(317): unsure at all n locations
  Clone ID: MRT4577_79451C.1
tagtggtggagcgattttctgttaattcgttaacgaacgagactcagcctgctaactagctatgcgggcatcctccgtagttagctctagagggatatgggcgttagncacggaagttgaggaataacaggctgtgatgccttaatgtctggncgcacgcggctacactgtgatccaacgagtatanagcttgncgacagccgggtaacttgggnattcatcggatgggaagtnattnaatgttgnctccacgaggatgctatnagccngatatcactngcgtgatangnctgccctttannaggcngtcnacgata

SEQ ID NO: 162144 - DNA, 2581 bp, Zea mays
  Clone ID: MRT4577_79452C.1
gccggccggggattcgcctgcgcccgcgatcccgctcgacgcagggaggacaggggccgaccgggccccccggcgcgcctgtttgaccacgtgcatggctatgattttgaagatgcgaagacggctccttgttcgtgtcccgaggtcggccgggccccccggccattgaaaagcagagcggctgccgctctcctcctcctccttcctggacaaaatcatcagctcccgaaatccaaattgaaacagttgcaggcgattctgagctcgggttttgttccggggacggattcctgtgccggcggacgggatgtcaggccctctcgaccgatttgctaggccatgctttgaagggtttgtacataacgatgaaaggaaagagagcagatctgatgcagacaactcagaaggagataagaagactaagattgggtctttcaagaaaaaagcaattaatgcggggaacaaattcaggcattccttgagaaggagaagcaaaaagaagaccgaaaggggggattccatcaaggacataagggacgttaaagagcttcaagatgttgagacattccgacaatgcttaattgatgaggatttgctgccaccacagcacgatgattatcacatgatgttaaggttcctaaaagcacggaaatttgaagttgagaaagctaagagcatgtggtcagacatgatcaattggaggaaggaattcggggtcgacaaaatagaggaatttgactacaccgagttagatgaagtgacagagtattacccacaattttatcatggagtagataaagagggaagacctgtctacatagaattagtaggaaaagttgatgcaaacaagctaatacaagtgacaaccctagatcggtatgtaaaataccatgtcaaagaatttgagaagtgcttccagatgaaatttccagcttgcaccattgctgctaaaaagcacatagattcgtccactactattttggatgtgcaaggcgtgggtttcaagaacttctcgaaatctgccagggaattaatcacacgattacagaagatcgacagtgataactacccagagacactgtgccggatgtatataattaatgctggccaaggcttcaagatgttatggagcacaataaaatcattcctcgatccaaaaactgcttccaagatccatgttcttgggaataagtatcaacataagttgctcgaaataattgacgagtgtgaactgccagaatttcttggtggcaaatgcaattgtattgaaggttgccaaagatctgacaaaggtccttggaaggatcccaacataataaagagagtcctcaatgacgaggcaaactacggcagacaaattgtgaccatatccagcattgactggaaaaataatacgttatgctaggccagatcacccaactagaaaagggagtgatgcatctgccgagtctggatctgaagtggaagatgtaacatctcctactgcatcaaggaacctgattacacatcctattttgacgcctgttcacgaggagtcaaaattgtcggcacatggttccgcatttgttgctcatgcttctattgaagaaaacattcctgttgtagacaaggttgtggatgatggatggggtactcccagaggtagtctacaagcttcttcaggttcgttaccctcgagaaacacgcacggcacattcgaaggactgagaactgaagctgtcgcatggctgacgttcttgatcacggcccttttcgccacgctctgttccgtcccgagcaagatggccagaaggatctccagccagtctagcaagcacgacgactaccgcggcgagtatcctcaagaggaggaggagcacaaggaggagttccggcctccgtctcctgccccgtcctacacggagaaggacgtgctctcgtcgatgctgagacggctcggtgagctggagggcagggtgcaggtgctcgagacgaagccgtccgagatgccgtttgagaaggaggagctgctcaacgcagccgtccgccgcgtggacgcgctggaagccgagctgatctccacgaagaaggccctttacgatgctctgatgcgacaggatgagctgctcgcgtacattgacaggcaggagctgatcaagttccgtaaaaagaagttctgcttctaagatctgaccatggagcagctggtcatgtccggagccgttcgtgtatattgttggatcgcggctagtacggtgaatgatgtaatgtgtccatctgtacaagtgtgtaacggaacggtgtaagtatagtaggaaaacaatgtgttagctgtgcggtagcacttgtgtgctagcctaaattgtaatcttgcaagtcggtgcatagctgattgcgcaccaatacgtagttatgaatggaaatggaatcgcactcgtgttcgtataaaataaaataaattagcagcgccaaatgtttaaaaaaaaaaaaaaaaaaaaagaccagaaacatattccaactcgcaccaaaaataaaaagcgccaaaaaaaaaaaaaaaaaaaaaaaaaagggccgccgagtgagtcgacccggttatttggtt

SEQ ID NO: 162145 - DNA, 129 bp, Zea mays
  Clone ID: MRT4577_79453C.1
cccgggtaaacaactgcggggcttgcattttcacccacaaggggggctgggtgtgggaacacagagctttaacccttccacaagggctaagggccttaacttgaccaatgaacacaaccactgtttttt

SEQ ID NO: 162146 - DNA, 322 bp, Zea mays
  Clone ID: MRT4577_79454C.1
gtaagggcctgtcggccagtcttgtcccgccgacgatgccgtgccccgagccgtttctcatggatttcagtcaacagctgacttttggatagtttgatggaagatggctgtggaactcccttttgggagaaaaaaaagtagctctggcatgagcagaacagctgccgagggcgcccacagggttaggccccctttggaacggagggttggcaaaggaaattcgtaggatcactgttgctaaggattttttcaaaaaaaaaaaaaaaaaaaaaaaataaaaaaaaaaaaaaaaaaaaaatttaaaataaaattaaataaaatt

SEQ ID NO: 162147 - DNA, 618 bp, Zea mays
  unsure (1)..(618): unsure at all n locations
  Clone ID: MRT4577_79455C.1
ggacacagagaaatttgtgggaataatgattcctatcatggntctgaagagcaagctaaaacattttccagctggcgcttttataattggatctcaaatccagcctgacaatcgcaaagagaaggcaaatgttagttctccttttctttcgaagttccggtacagccaagctatacttggcctcacattacaggtatccttaattatattgaatatgaagcttatacattgtattccctttggtaaaaaaaatacttggatgtttgggacagggcatgttgtttcaaatatttataaaatccagcacgccccaataaatttgtgacattatacaagtatttacaattttcatacttacatgtccaaaaaagtttagatagtcaaaatttcaaaaactttgaccagattttattcaaaaattaaatacttgttaccagaggagtatttcattagttttgttattatgcaccgtttgatgtggtttcaaacggctgagtcaggcgctggtggctccttgctgtaatgcacggaggagctggagccgctgaagcaaaaaataattggtttgcccgtttgccagctctttgttcattntgaaagacatctctacagtgtgcg

SEQ ID NO: 162148 - DNA, 355 bp, Zea mays
  unsure (1)..(355): unsure at all n locations
  Clone ID: MRT4577_79456C.1
ccgcacgccgcacgccgccggggacggcggtgtctgcgcgacgtcgtctccggcgccatgggcggcggactggcctccgcgtcgtaccaccacacgatccatgctgtaccgcgggagacagccggcccgcgcgccgcggcacgcgagcgccgccacggccgcctcccggggggggggtgtaccgcctctgtcgccgagccgggctgcacttttctgcactgtccgctccagacactccacctgcctctactgcttccttggctgttggctggaacgcgcccccagactccctctgctcgnttccnncccagccgcccctcctgcgaccggcgattctgctggccacgccgctctg

SEQ ID NO: 162149 - DNA, 416 bp, Zea mays
  Clone ID: MRT4577_79457C.1
attagaattacaaaaaagttttattcagggcacgagcttattggcgtaattcggacaggagctgggggcgggcccgtccgatagccaagtacgaagaccctggacaaccaggcaaccacagacatacataagggacccaggcaggcacaaacggggggggatgccggcccccgggcgggtaaattagccctggggaggaagctctccctgcgctcggggacccccccggggcaggggttgatgtcctcctcgaccctgggttcgcgcaccaaaaaaccggggccgccggggggaccatggggggggggggggtggttggcccccgcccgtgaaaccgggtcgacctcctagaacttttccttgacaacctgctggtggaccccccctccgggggggccaaagccggccggggccac

SEQ ID NO: 162150 - DNA, 231 bp, Zea mays
  Clone ID: MRT4577_79458C.1
cagagacgtggtctttttataaaacttgtgaatctttgccttttgaagaatttaacatggaccttttcgagaggctcctctgtgttcataatttgccaaaaaattacaaaagcctgtgatttttaacatccctgttatgctgatttctctttaagtaggtcctatttgcataacgagagagtggagaactgaatgcttatgcccaaggagcattctggagggttacacaga

SEQ ID NO: 162151 - DNA, 347 bp, Zea mays
  Clone ID: MRT4577_79459C.1
cggacgcgtgggtgagttccagttccttaaacttatttgacattgctaccgactgcaatacattaatgatggaatgaagggaggcaaacagatttgagtaactgtatttgttggcatctctttcaatcatattaagtggcatgttaccaacaaagttagagttaagttattatcctcacctgagcaatcaaggcactccattccactgtgttggacttagcttcgagactctccttgataggcttcagcctctcaacaagtgcaacacatgattgccgaactgcttcacagctagtttcagaagtggtgctcccagcagtcatacctccttggatcaggcttaatgt

SEQ ID NO: 162152 - DNA, 228 bp, Zea mays
  unsure (1)..(228): unsure at all n locations
  Clone ID: MRT4577_7945C.1
aaacccaacacacctaaccaaccaaaggaaatttttaaaattcgccggggcgtgancaagagctagagatggacggtaggatgttcggtctcgagacccccctgatggaggcgctgcagcaccttctggacgtgcccgacggcgacgcctgctcggacggcgacaaggcaggctgcggcggtcccacgcgcacctacatccgctacgcgcgcgccatggctgtcaccc

SEQ ID NO: 162153 - DNA, 425 bp, Zea mays
  unsure (1)..(425): unsure at all n locations
  Clone ID: MRT4577_79460C.1
gcccacgcgtcgcagccaaagatggagatcaacttaacaaatgcggatgtgggagatctgaggatacagatctcgctgtcatggacatgcgacaggaattccataacgatctggatcatgactgnatatttggctcgttacctgaaaactacatagcttttctatacttgacgatgtcttaaatgccatcgactgtcaggcagatctgcttatgtgctgatgcgttcttgcatgcaatgccaggaaattgcttcatcaatatcgctaaagagcattgtcaactacggaccaatattgtgttctggcactaggatgttttgaggatgttatgtttgaagaaacttgagacttttttttttcatctaattaattatcagacgtaatttgtggtactaaaaatacttttttataaattgttttgaacc

SEQ ID NO: 162154 - DNA, 545 bp, Zea mays
  unsure (1)..(545): unsure at all n locations
  Clone ID: MRT4577_79461C.1
tttttttttttttatttncacagcaaattcaggcattcaactacaatttagcgcctgtgcatgttcagcaattcagttttctggacacaggcatgcaacaacaaatgttcaacaacgcattatttgtccaaggtacaaacatcagtctcagtttcaactagcaaatttagcagcacatacaacaacaaatattcattttcaactagtagttcaactagcaagtgttcagatacaaacagcaaatggtcccctgctctttcttccctgttcaatgcagctgagcagagctcactgtagcctttgctgttgataggagagctcaccgagctcatcgtagctgagcagagagcgtgccggagacaaggatgggtaggaggaggatccactcgcgctcgtcaagcgttgcagcccgtgcacgccggagtcagggaggagaaagacagaaacaccatagcagggatgggagagcaggccaccgctggaggagagggtagggagtgcgccgcaccggagaacaagcagttcgcactgctggagatccacct

SEQ ID NO: 162155 - DNA, 950 bp, Zea mays
  Clone ID: MRT4577_79462C.1
aaaaaaattacaaaaaaaaaaaaaaaaaaaaaaaaacggccaaagtctcgacacttccatcaccgcccatcgaaatccttctaccgccccgctccgtcatccatggctcgtctgctcgcggcgcgagcccttgcgctggcccgcccctcggggacgccatccgccctacgcttctgcccctcccgtgcgctgtcggacgaggtggagttcgtcgagatcgacctatccgaggagtcccctgcctcttcatccggaggggaaggcgcgggcgactcagccacggttcaggcgcagatggggtcgcggcgcctggaggacgccatctatggggtgctcgtgcgccgggcggcgcccgaatggctccccttcgtgcccggggcatcctactgggtcccgccgttgccacggccgctcggggtgtcgagtctccttggcgcggctgtgtacaccgcgaggggcgccacggcgatgacgggggaggaggcgttcagcttcactaccgtacgggggtgtccatccgcggcgtactttgtgggaggaaaatttctgcgtccagtgaagaaatcaagggaagatgctactcaaactgacgatgatgatgaaagctaattctatgctgcttcacctggggctcctaccgaagagggctgctcggggctgtgaagctcctctgatgattgtagatgtagacagctagggagccccgcaaggatcttcggctggcgtgctcacagctggtaaaatgatgctggttcaatcgtatgtatttggcagaacccgatgcgctagcacctggacatggtgcgcgtaaccgtggcgcataatgtaatagtgtttgtaccagatttttccttctgaataaaattctgaataaaagcatgtgcacatgacagctctccagtttagctgggggccttgagtttcagaaaaaaaaaaaaaaaaaagcggcc

SEQ ID NO: 162156 - DNA, 228 bp, Zea mays
  Clone ID: MRT4577_79463C.1
gtgggaggggaaagccccactctagcccacatctattcggatccacactatataacggctaacacaattggccattttagaccccattgtgcgcgcaacacaccctgcctgacggtctgcgcaaattccatatgtccggcaaaaggcctctggcattccaatactacacaaatgtaactgggctataagtggacacaaacggggaatacggtgacagtcagggggggg

SEQ ID NO: 162157 - DNA, 393 bp, Zea mays
  Clone ID: MRT4577_79464C.1
gggccgagccacgcgtccacccacacgtccgcccacgcgtccggccacatcccaggccgccgagatgcagctcaaggtcggttgggccccctggttgaaggaacaggccaactacctaagacacaatcggatcctctgctcaaatctagattcccttacttcgagcaaccacccgctgctccaggatgcctcagccaccaacaactcgcccaccaagtactcgacagaatgcttcagccatgacatcgtcctgttgaggactatcagtgctgcacccacaagcgaagaccgcgcgctgcagcagaggcgccacgagtgcctcgtcacgcggcccgagttggcgaggattggcggacggaactacatcatgctcgagcatcaccccaacaggat

SEQ ID NO: 162158 - DNA, 355 bp, Zea mays
  Clone ID: MRT4577_79465C.1
tttgttttttttttaagcagtctcccttttttcccctataaacggagagaaagaaaggacgatggccaccggtgcacaagttcaccaaaagcggtcttgggctggttcaaccaggttcaaacaacttatgctgccctgagacacagcccacactcatttggcccactcccctaaaccctgtgataccatggcgcacacatcgcccggaggacccttgttcggacaacccatacaactggcccacccaatgtcttctcctccggcttgagcataagttagcccactcaccggactgataacaaggtcctccaggccaccgaactccttcagattctttggacccggaaagagccca

SEQ ID NO: 162159 - DNA, 271 bp, Zea mays
  Clone ID: MRT4577_79466C.1
gacgactgagacaccggcagacaacatggccgcctccgcctccaccgtctccggcctctccggcgactccctggccagccgcccggcgttctccaccagcttcacgcggggcaaccgggtgtcagcgaggcaccccctgatgagcaggaaccttcagaggcatggcaggctcacctgcatgacgtttccccgggactcgctgccgatggacctgagcgtcatcggcttcgggctcatcggctagatggggccgtccagcttcccggccatc

SEQ ID NO: 162160 - DNA, 295 bp, Zea mays
  Clone ID: MRT4577_79467C.1
aaaaccgcccccaaagccccggataggggttcgggaattaaaacaggggggtcttggtcacggtacaaaaatttttttttttttccccaaagggggaaaacctcccaattttcccccgggaggggggttttgcccaatggcccccggccccaaaagggccaggtttttttaaaaaggggggggggcccgatttctcccggggggtttggccttaaaaccccccccccggggaaggccaaatgaggaaaaaattttcaagggggaaccccaaacttggggcttccctgaaaaaggg

SEQ ID NO: 162161 - DNA, 140 bp, Zea mays
  Clone ID: MRT4577_79468C.1
agagctagacaggggccggggacctaagctctatacattaaccaaccacctttttttaccccagacaattcctaccgggggtttttatcaactcgggccacttcaataaattcatcataccacggcaccggcacccctcc

SEQ ID NO: 162162 - DNA, 617 bp, Zea mays
  unsure (1)..(617): unsure at all n locations
  Clone ID: MRT4577_79469C.1
ccggccggacgcgnctcagagtccgcgagtctctctccgcgtggcgcagccgccaagtcaggtctcctccgccccgccgcctctctagacgttccgttcgttagcccacccggacgagacgacgaacgagagccccatcccatccggttccgcttcggcgcgtccctctgttgcattgcccttgccgccaaccaacacccccgaccccgagagccgagcccctcttgcttggccctcaagctttcggtgcgtcacccgccgccaaccctcgacgagactccgattctcttttcccctaggccaaggtctggccttccggtctttcttcacgccgtttgtgcggtgcggtggcgatcgtccgcgatgggcgccgcgcggggagaggaggacggggaggggcgctgcggcgagcggtgcccgtcgtggtacgtgagccgggaggagatcgagagcggctcgccgtcgcggcgggacggcgtcagcgcggccaaggaggccgagctccgngccacctactgctccttcatccgcgacgggtgcatcagactccaactgccgcaaattacaatgggcacggagaacatggccctgccacgtttctacctccgtcagtctca

SEQ ID NO: 162163 - DNA, 357 bp, Zea mays
  Clone ID: MRT4577_7946C.1
gggtacctcagccggcgggcgggaagctgtcatagacctagccaccgcggtagattctcgagcacagtcaaccatggctcgactgacacccaccgcgcgccgctacacctctctggtactcatccgtccgtacggcggcagtggcagctgtgctgtcctacaacctcaacaccaaagcaggacattagaaagctagatgagtaccttctcactcgcaggtacataactggctataaaggttccaaggatgacttgtgtggctacacttcgcattcgcatggtccctcgggcaagtatatcaacgtagcaaggtggtgtaatcacattgatgcgctcgtgaggctgagcggaattact

SEQ ID NO: 162164 - DNA, 258 bp, Zea mays
  Clone ID: MRT4577_79470C.1
ggcaagttaattttggagatttgcgtatttaaacaagcgtgatctttgcagggtgtttttcctcaaccttttaccatgaaatggacaaaatagtctatgtcttaatttttcagggttcaatgtgaaaggcccacaaacagcttatatttgaagagggtgcgatgcaccggcttgttagctaattttggaggaaaagatcgcccacgctagtttccaaagactcccctcccttttttacctgacccgtatgcagttggg

SEQ ID NO: 162165 - DNA, 312 bp, Zea mays
  Clone ID: MRT4577_79471C.1
gggggaaacaacaaaagggagctttccagcccttttttttcctttatattttggcatcaccaaactgtcttttaatgtaagggttaaggggcggggacaaaaggaaaaaaaacaaaaggggtttttggggcacacaggattttccacattacccatgactgggcacacttaacccgacggggggacatttacgtggggtggtttatcggaagctcagctttcaaatgccgcatcccgtcgataaaaaaaaggctgttattggccatgaacccccgccacgggattccaaaaagatttctgtgcccaaatggc

SEQ ID NO: 162166 - DNA, 494 bp, Zea mays
  unsure (1)..(494): unsure at all n locations
  Clone ID: MRT4577_79472C.1
agtgtgttctatacactatggtaaaggctgaaagaaacagtaacagagcccgacggaaaatgccgagggacgtaaagacaacagacagggggaaagaaaggactccgacaacgagagggggacgaggaaccacccgcaccgaacaaaaaggcagacgggacagagccgaaaaaagaagcgggaacgggggggagggcgggaggctaaagagcagccgggcaaaggaaaaggccaaaaaggctaggaagaggccgggctgaacgaacagtcccgaggaagggggacgcagaatcggagcggcgcaagcaccaaaaacaaggggactggaacgcaggcgcaagaagaaggagaagacccactgggggcaagccccatccaaaggggggggaaccatgcaagtcaggcctgggagagaaaaaagcccaagaggacagacatntanggggggggggccaggaccagggccaagaagggaaaaaaaatccgggcgaacg

SEQ ID NO: 162167 - DNA, 215 bp, Zea mays
  Clone ID: MRT4577_79473C.1
gactactaagggcgaattggtgtcctcgaggccggccgggatcttattactggtctaccatcccatactggttagggtcatcattctacgagagagcacgaagcatctaccagcgcggtctagtcgttctactggcccatccaagccccggcgcaggaaatgaaagcttatgcccccgtccttactgaccggccggtgcccgacaaggtgatgaa

SEQ ID NO: 162168 - DNA, 280 bp, Zea mays
  unsure (1)..(280): unsure at all n locations
  Clone ID: MRT4577_79474C.1
tatattatcacttaaattcaattcacttaccacctttttacaacttcttcacttttaaaaccctttctttacttatcttaatctccttacaaaacaaccccctttctccatctnacttaatatctaacaatcccacacctatctccctttccaacatttcctcaacctaaatttctaatcttactctccctctaacanctcattaagcccgcccgatgtcttaattactcacatccttacctttacactttccatcaccctaacaccctttcctttcact

SEQ ID NO: 162169 - DNA, 188 bp, Zea mays
  Clone ID: MRT4577_79475C.1
cggacgcgtgggttctcctgcccgctctttttctgcgtctgctgcttacgaccgaaccggagcccggagccctaactaaccctatgaggcaggcggcggctatgatggtgtactacacgctgttggtaggcgcggagctggatggccttaccaacctgcagtccctgcacggttgcaacgacctcaac

SEQ ID NO: 162170 - DNA, 255 bp, Zea mays
  unsure (1)..(255): unsure at all n locations
  Clone ID: MRT4577_79476C.1
acggcaagacggccgaggggagttataagaaggaaccgccccatacccccagcggagagaggncaacggaccgacgggcccacccagaggacgagcacgaaaagcacagccagcaaaccgacccggacggacggaactgaaccgagaaagacaccgacaaactacgacgtgcaccaggacgacgacgagctgctggaccagacaaaagactagggcgctgcagcacccaagcctaagggcaagcaccagccacac

SEQ ID NO: 162171 - DNA, 157 bp, Zea mays
  unsure (1)..(157): unsure at all n locations
  Clone ID: MRT4577_79477C.1
tcggcgccgtcggagtacgctccagtgctgccccggcagcggaangttcctgcggccctgcctcttcacacggcggtacgcgatccccacccacccaccccactcccctccgcctcatctcctgtgcctaccgngngncncccnccatctctaccct

SEQ ID NO: 162172 - DNA, 662 bp, Zea mays
  Clone ID: MRT4577_79478C.1
cttcggctaaatccccattcctgccattcgctcttgcccggcttctccccacgctcccatggccgccgtttaccccaccacggccgtcctccccacgcgccactcccctccttccttcctccggccgccgtccctgtcgtggtccgcctccatcacccagcaccgcatccccttctcaccgcgcctcgctctctcgccgccaccggcggccaatcggcggtcattcgtggtccgagcggcgtggacgcggcggtcgcgcggcgagttggacaagagcccgaaccgcaagtcgtggaagcagcgcacggacatgtacatgcgcccgttcctgctcaacgtcttcttctccaagcgcttcgtgcacgccaaggtcatgcaccggggcaccagcaaggtcatcgccgtcgccaccaccaacgccaaggacctcaggaccaccctgccgtccctcatcgacgacaacgcctgccggaccatcggtcgcctcatagccgagaggtccatggacgccgacgtcttcgccatggcgtacgagcccaagaagaacgagaggatcgaggggaagctcgggattgtcatcgacaccattaaggagtatggcatcatctttgcataggcaagttccagtgtaggagcagaaacagtttttatgttgtatttct

SEQ ID NO: 162173 - DNA, 510 bp, Zea mays
  Clone ID: MRT4577_79479C.1
actatccctaccaccacactggcccttatcattcctcactgaagcaattgggctaggtacgtacttccgagcgctagattcactaattgatcaatcgcccatcaggccgtgacgacgatgaggctgatagctctcgacagatcatactgcgacgcattcgagacgcagtcggtctcggacgacatgtcagcgctcttgtcggggcgcgtgcgccgccgtctgccctacttcctgcactcggcgaagctctcgaggtgtccctcatgtaccactacatcatcagtcacggcgagtacctgaccaccatccccgtcatcgtgctggtgtgcgcctgcgagatgggcagcatcagtcgcgacgaggtggggggcaaggtgtgggagtaggccacctaggacgtcggcaccgtgctcgccttcctcgcagtccgcgccttcaccatctccgtctactgcatggccagaaccaggcccgtgtaccccatcgacttcgcatgctacaagccggacg

SEQ ID NO: 162174 - DNA, 368 bp, Zea mays
  Clone ID: MRT4577_7947C.1
tcgagcgacatcaccctcaaggactccaagagtgttgttttatgccagaagccggtcaccgtctctggcatcaggaaccccaaggagatcccgtggggtgaggctggtgctgagtatgtccaggagtccaccggtgtgttcactgacaaggacaaggctgctgcacatctgaagggtggtgccaagaacgttgttatctctgccctaagccaagatgcacccatgtttgttgtcggtgttaatgaggacaaatacacatgctctgttaacattctttccaaagctagctgcactacaaactgacttgcttcccttgctaaggtcattcatgacaacttaggcattatttagggcttgataacaactgt

SEQ ID NO: 162175 - DNA, 253 bp, Zea mays
  unsure (1)..(253): unsure at all n locations
  Clone ID: MRT4577_79480C.1
cttcagagagggggcaaccgatcgagggaacgcgtttgcctgctgcgcggtcttcattcttcaagcagtagcgcgcacaagataccaccagggctagctagggtggtttagggttctccgccgctttccgatcttgtacagctagcatcatcggtacgctgtcgattgatctgagcagattagaaggatcagncacagcaggaggtgggggagagtcgnncaagaaggaggaggagagcttgccgccgggctt

SEQ ID NO: 162176 - DNA, 358 bp, Zea mays
  Clone ID: MRT4577_79481C.1
catcctaataaacgcttcagactgtccaaaccatttatttatcagcttaattttcttgtttcaagccagcagcacctcgtggatgagcctatcaacattgcgcatggaccttccatcacaccgtgcggaggccagggcgctatcccggagctcttgcacacgccgtcgcatctctcgccctttctccccatccatgacctcccgtatcatggcctccacctcagtcctcctcacttcttccctgacctccaacccgatgccccactccgtgcacttgtagcggcagttggtctgctgctccgcaaagaagggccaacacaccattggaacgccgccgcatatgccctccagcgacgag

SEQ ID NO: 162177 - DNA, 229 bp, Zea mays
  Clone ID: MRT4577_79482C.1
gttaacggcgtctccgtcgacggggatctcctcctgattctgccccgtggctgggacgtcgagatgtgcggcggcgccatcctcgactccggcacgatcctcacggtcctcttgagctcggcgtaccgcgccgtggtggctgcgctgagcaggtagctagccgggctgcccctggtggtcatggacccgttcgactactgctacaactggacgtcgccgtctacgggct

SEQ ID NO: 162178 - DNA, 284 bp, Zea mays
  unsure (1)..(284): unsure at all n locations
  Clone ID: MRT4577_79483C.1
ctcgagccgccggnaaaacctactactctgtcgagccagcgccgtctccctcccccattccattcccactcggacttggacccccaaaaccctagcggctagcgcctcgtcgccgtcaccgccatgatcaccggcggccagagctacgtctcggcgccgccggccttctcggccgacgggcgcctcctcctcgtctgctccggtcgcgccgtctccgtcttcagcaccgccaccgccatgctagtgtcggagctggaggggcacgagggggacctcaccgccgt

SEQ ID NO: 162179 - DNA, 835 bp, Zea mays
  unsure (1)..(835): unsure at all n locations
  Clone ID: MRT4577_79484C.1
ccggccgggatcaacatccacttcaatctccattcatcaatttactacttcatacacacaaatcagttcagcaaaccatcaccatgcggttcagcaaccttttccttggcgctgtcttcgccgtgacttcggtcgctgccatggccaaccctgccgccgaggccggaagtcttatggagcgcagcaagcatcaccatgactgcggcaaacatgcctcctacaacaccgagaagaaggaatgtgtctgccatgtcagcggcgagacctaccacaagaagcaccacaagtgcaagaagcctaaggaagacaagaagcaccactcaagagacgttcttgaggagcgcagccccaagaaggacgagcacgaacactgcggcaagcacgcttccttcaacgaagagaagaaggagtgtgtctgccacgataagtccgaagtttttgagaagcaccacaaaaagtgcaagaaggcaaaggatgagaagaagaaggacgacaagaagcaccactcacgagatgtcctcgaggaacgtgaccccaagaaggataagcaccacgaccactgcggcaagcacgcctcttacagcgaggagaagaaggaatgcgtctgccacaacaaagccgaggtctttgaaaggaagcacaagaagtgcaagaagcacatctctctgcgaagcatcttcaaccactgcggncgacatgcttactacgatgaggccaagaaggagtgcatctgccacgacgccggcnagaacttcctncagaagcacaagacctgcgcttgccctcagggtgagaagtggcacacattgagcgcagtgcaagctantcttgctgc

SEQ ID NO: 162180 - DNA, 1739 bp, Zea mays
  Clone ID: MRT4577_79485C.1
acgcccgtaagagcaggaggactcagaaatggcaatcccagtgcgatcggctgccgcgccccgccgcctcgttccgtcgatacctccggcgagctctggacatgttcgaggactggcgtgcttcagtacccgtcgtcgttctctctgccatgggaaaaaccaccaacaaccttctccttgctggagagaaggcagtagggtgtggagttatccatgtttctgaaatcgaagagtggaatatggtcaaaagcctacatatcaagacggtggatgaacttggacttccaagatctgtaatacaagacatgctagatgaactggagcaactattgaaaggtatcgctatgatgaaagagctgacgcctaggaccagtgactaccttgtttcatttggagaatgcatgtccaccaggattttttctgcttatttgaacaaaattcgtgtcaaggcacggcagtatgacgcatttgatattggtttcattacaactgatgaatttggtaatgcggatatcttagaagcaacctatcctgctgttgcgaagagacttcatggggactggatacaggatccagcgatacctgttgttactgggttccttgggaagggctggaaatctggtgctgtaactactttaggccgaggtggtagtgacttgactgctacaaccattggtaaagccttgggactgagagaaattcaggtatggaaagatgttgatggtgtacttacttgtgatccaaatatctacccacatgcaaagactgttccatacttaacatttgaagaggccacagaacttgcttattttggtgctcaggttttgcatccacaatcgatgagacctgctagagaaggtgatattccagttagggttaagaattcatacaaccctaaagctccaggcacccttattaccagacaaagagacatggataaggttgtactaactagcatagtgctcaagtcaaatgtcactatgttggacattgtgagcactcggatgcttggtcagtatggttttctggcaagggtatttgctatatttgaagatctatgtatatctgtggattgtgttgctaccagtgaagttagtgtttctgtgtcacttgatccatcaaagatctggagtagggaactgatacagcaggaacttgaccatgtagttgaagagcttgagaaaatagcaattgttcgtctacttcagcagagggcgataatttcacttatcggaaatgtggagcaatcgtctctcatactagaaaagacgggacgtgtgctgaggaaaagtggggttaatgttcagatgatctcgcaaggagcgtcaaaggttaacatgtcgctgatagtccatgatagcgatgcaaaggcactcgtagaagcccttcatcaggcgttctttgaagacgatgtcctatcacaagtcgaagcggagaacctactcgtgggctgatcaacgtaggctttgctgggtccaggcgtgttatctgttatagattcccactcgcctccatgaacggcatgggcattggatcattgatcatgttttgcttgaaacaagtatgtcttccaggttctcagccaatgactgcaaaactgtgtttctgttttagaactgtttgcagacaccacagtctgagctgcgagcaccgattgtcaacaagatggcaagcctgtgatataattccaactgtctctaatcaatatatataataaacattatcaatatctattaatt

SEQ ID NO: 162181 - DNA, 3092 bp, Zea mays
  unsure (1)..(3092): unsure at all n locations
  Clone ID: MRT4577_79486C.1
caattccaccgttctcccatccactggtgattcatgttcattcggctccagacagagcaggaggactcagaaatggcaatcccagtgcgatcggctgccgcgccccgccgcctcgttccgtcgatacctccggcgagctctggacatgttcgaggactggcgtgcttcggtacccgaaccgggcctcgcggtgcaagagggttgtcaatggtggtcgccgactccaccagccgtcgggccaagcaagcggacggcggggacggcgtccttggggcgcctgttctcggagggctcgggatggcaggaatgggggagaagctcagcgtggtgatgaagttcaggggttcctcggtgtcgtcggccgcgaggatggctgacgtggccggcctcatcctgacgtttcccgaggagcgccccgtcgtcgttctctctgccatggggaaaaccaccaacaaccttctacttgctggagagaacgcagtagggtgtgtgattatccatgttgctgaaatcgaagagtggaatatggtcaaaagcttgatagtccatgcctgaactttttacaagaacttttttattgtagatctatggtaataatctcaattaatgttgacttgcccgctgtcaaatcaggacggtggatgaacttggacttccaagatctgtaatacaaggtaaacccaccacctttggtgacctcttctgtatttctaagcctttgtataacagttgtggacaaaatctgtagacatgctagatgaactggagcaactattgaaaggtatcgctatgatgaaagagctgacgcctaggaccagtgactaccttgtttcatttggagaatgcatgtccaccaggannnnnnctgcttatttgaacaaaattcgtgtcaaggcacggcagtatgacgcatttgatattggtttcattacaactgatgaatttggtaatgcggatatcttagaagcaacctatcctgctgttgcgaagagacttcatggggactggatacaggatccagcgatacctgttgttactgggttccttgggaagggctggaaatctggtgctgtaactactttaggccgaggtggtagtgacttgactgctacaaccattggtaaagccttgggactgagagaaattcaggtatggaaagatgttgatggtgtacttacttgtgatccaaatatctacccacatgcaaagactgttccatacttaacatttgaagaggccacagaacttgcttattttggtgctcaggtactctttcttttgagtgaagaatcaaaagtaacatttcccccaagaaaaattatttgtcttggactgttaaaggggctatgatggttgacatgcgatgattcatttttgtcactaatgaatctttgtacaaattatattttgaatgctcaagaaaaaagttctggaactaaacaacaatgatatcgggtacatgatatttcatctttattgcacgttttcaggacttgaaccctgtatagtgtgaccaggctgcttctcagtgaataaacaaatctttcagttgcatacttctcaaaaacgaaagatcctgttcagtagataaacctctgttccctttttaccttttaaagctatattgattgttgtttggcatttgctttactaaccatcatgaattgaacatatagctcatgatgtcagtctcctgaacagaagcgagaaatttaggatcgttattgtggactgttcactccaatgcaggttttgcatccacaatcgatgagacctgctagagaaggtgatattccagttagggttaagaattcatacaaccctaaagctccaggcacccttattaccagacaaagagacatggataaggtctggtagtaggtaacttcaaatatatcctcacatctgcttgactttcgaggcattgannnnngcgcccctcnnnnncactactaggttgtactaactagcatagtgctcaagtcaaatgtcactatgttggacattgtgagcactcggatgcttggtcagtatggttttctggcaagggtatgttgaacactgagccannnnngtatttatattacactgttctgatcactgcatgtatgaccttgagcaggtatttgctatatttgaagatctatgtatatctgtggattgtgttgctaccagtgaagttagtgtttctgtgtcacttgatccatcaaagatctggagtagggaactgatacagcaggcaagtgtttccattccttcattgtattagcatgtagaagcacatgnnnnnttgnnnnnggtgacttgatagtgcatttccaagagaaatannnnnattccaattctctacgcttccacattgttaacaaattttcaggaacttgacaatgtagttgaagagctagcaagtagaaacacgannnnnnnnngttgctaccagtgaacttatcccatgcctgaacattttagttccctgtgcttcacaattgttaacaatctttcaggaacttgaccatgtagttgaagagcttgagaaaatagcaattgttcgtctacttcagcagagggcgataatttcacttatcggaaatgtggagcaatcgtctctcatactagaaaagacgggacgtgtgctgaggaaaagtggggttaatgttcagatgatctcgcaaggagcgtcaaaggttaacatgtcgctgatagtccatgatagcgatgcaaaggcactcgtagaagcccttcatcaggcgttctttgaagacgatgtcctatcacaagtcgaagcggagaacctactcgtgggctgatcaacgtaggctttgctgggtccaggcgtgttatctgttatagattcccactcgcctccatgaacggcatgggcattggatcattgatcatgttttgcttgaaacaagtatgtcttccaggttctcagccaatgactgcaaaactgtgtttctgttttagaactgtttgcagacaccacagtctgagctgcgagcaccgattgtcaacaagatggcaagcctgtgatataattccaactgtctctaatcaatatatataataaacattatcaatatctattaatt

SEQ ID NO: 162182 - DNA, 1314 bp, Zea mays
  Clone ID: MRT4577_79487C.1
cccgcgcgccaccaccggccgctggggcgccgccgccatgatcctagtggcggagctgaacgagcggctgacgacgctgggcatcgccgtgaacctggtgacgtacctgacgggcaccatgcacctgggcaacgccgagtccgccaacgtcgtcaccaacttcatgggcacctccttcatgctctgcctcctcggcggcttcgtcgccgactccttcctcggccgctacctcaccatcgccatcttcaccgccgtccaggcctcggtcagtcccctcccacaaactcgggacaaattcttttttttctttccttttatttttataataataataacaatagtaatctgctcaccgcttggacttggatcggataatcctagctagggcagctcgttcggctctgctctctctacatgtcggttagtttactggatgggtgcggtcaatctcctctgtcgaaatatctgcgtcggcttttcttcgtcttgatttttatttattttttatccccttccctggtaggactcacttaggaggagtaggactagtagtagtagcagccgttaaaaaaaaacccaaataaaaattggaactttccatgcagaagatgctcaaccctgaaaagaaccgcgcacgcgcacccaatgaaagcaaacagtttccaatccagtccatcatcgcccaatgaacgcccgcccatgcacggtggtgcggtggacagccggcgggggtctacaatttcctctttttgtttccccccattattggcagcggagttgttggattcgatccttgcatcatctgcctgtctgtcaatctaccacgatctcgacggcggcgccggggctacggccggcgtcctgctccgcgaccggcggaggcgtcgtcggggagtgcgcgcgggcgtcgggggcgcagctgggggtgctgtacctggcgctgtacctgacggcgctgggcacgggtgggctaaagtcgagcgtgtcggggttcgggtcggaccagttcgacgagtcggacggcggggagaagcggcagatgatgcgcttcttcaactggttcttcttcttcatctcgctggggtcgctgctggccgtcaccgtgctggtgtacgtccaggacaacctgggcaggcgctggggctacggcgcctgcgcctgcgccatcgccgcgggcctcctcgtcttcctggccggcacacgcaggtaccgcttcaagaagctggccggcagccccctcacgcagatcgccgccgtcgtcgtcgccgcctggcgcaagcgacgcctccctctccccgccgaccccgccatgct

SEQ ID NO: 162183 - DNA, 378 bp, Zea mays
  unsure (1)..(378): unsure at all n locations
  Clone ID: MRT4577_79488C.1
tcttttgnaaaagaggagcagataaggtgccatggaggtggccatgggagggcatggcggccggctctgcctacctggtggcgcggccagccaggggcggtcggcggccggcacggccttcccagtggtgcggccggccagcaccctccctcgacctgcatgggccagcctggggcgcgcagggtgtggcctcctagggcgcgtgacaaccatcggccaggccaggggcgcgcgcgcgtgccgcccagcgcgcggccatggcggcgcggccctcagcgggtgcggcaggggcgcggccggccggctcgcggcggcgccttgcggcttggcgcacggttcgcccacctgcctgggtgcgcggcctgccccccggcgcgc

SEQ ID NO: 162184 - DNA, 2720 bp, Zea mays
  unsure (1)..(2720): unsure at all n locations
  Clone ID: MRT4577_79489C.1
ttaattcggcacgaggcatcggtcgcgccccgatcgagccgacgaggccccatccccaacccctcatccatcgcttgctctctgccctctgggagctcgagcctcctcggttgaattgtgagtcgagctgctgagaaagacaagagcgcgcgatgagttctccgncctgccggccggaattcgacggcagtccgcaccgcacacacacgcacaggcagcagcacagcgatctgccttctgccccgcccccatccagcccagagcagcagcgcgcggtgccggccggcaaccgcagctggtcatcaggtctctgggcctcctcctcctcctccatcccccctcaaccctccccgtgtcggctcctcccgaatcctcacacgtagccccgcgcgccacctcgctgccggccgccggcacacagatagagagagagagagagactgagagagagagagggaggggaagcgaagagaccagaacaagagcgaagatggtcggactcctccccgagaccaatgccgcggcggagacggacgtcctcctcgacgcctgggacttcaagggccggccggccccgcgcgccaccaccggccgctggggcgccgccgccatgatcctagtggcggagctgaacgagcggctgacgacgctgggcatcgccgtgaacctggtgacgtacctgacgggcaccatgcacctgggcaacgccgagtccgccaacgtcgtcaccaacttcatgggcacctccttcatgctctgcctcctcggcggcttcgtcgccgactccttcctcggccgctacctcaccatcgccatcttcaccgccgtccaggcctcgggcgtgacgatcctgacgatctcgacggcggcgccggggctacggccggcgtcctgctccgcgaccggcgacggaggaggcgtcgtcggggagtgcgcgcgggcgtcgggggcgcagctgggggtgctgtacctggcgctgtacctgacggcgctgggcacgggtgggctaaagtcgagcgtgtcggggttcgggtcggaccagttcgacgagtcggacggcggggagaagcggcagatgatgcgcttcttcaactggttcttcttcttcatctcgctggggtcgctgctggccgtcaccgtgctggtgtacgtccaggacaacctgggcaggcgctggggctacggcgcctgcgcctgcgccatcgccgcgggcctcctcgtcttcctggccggcacacgcaggtaccgcttcaagaagctggccggcagccccctcacgcagatcgccgccgtcgtcgtcgccgcctggcgcaagcgccgcctccctctccccgccgaccccgccatgctctacgacgtcgacgtcggcaaggccgccgccgtcgaggatgggtcctccagcaagaagagcaagcgcaaggagcgcctcccccacaccgaccagttccgcttcctggaccacgcggcgatcaacgaggacccggcggcgggggcgagcagcagcagcaagtggcggctggcgacgctgacggacgtggaggaggtgaagacggtggcgcggatgctgccgatctgggcgaccacgatcatgttctggacggtgtacgcgcagatgaccaccttctcggtgtcgcaggccaccaccatggaccgccgcgtcgggggctcgttccagatccccgcgggctccctcaccgtcttcttcgtcggctccatcctgctcaccgtgcccgtctacgaccgcctcgtggtgcccgtcgcgcgccgcgtcagcggcaacccgcacggcctcaccccgctgcagcggatcgccgtcggcctcgcgctctccgtcgtcgccatggcgggcgccgcgctcacggaggtccgccgcctccgcgtcgcgcgcgagtcctccgagtccgcctccggaggcgtcgtgcccatgtccgtgttctggctcatcccgcagttcttcctcgtgggggcgggcgaggcgttcacgtacatcggccagctcgacttcttcctgcgcgagtgccccaaggggatgaagaccatgagcacggggctgttcctcagcaccctgtcgctgggattcttcgtcagctccgcgctcgtcgccgccgtgcacagggtcacgggcgaccgccacccctggatcgccaacgacctcaacaagggccgcctcgacaacttctactggctgctcgccgccgtctgcctcgccaacctactagtctacctcgtcgccgcccgctggtacaagtacaaggcgggccgccccggcgccgacggcagcgtcaacggcgtcgagatggccgacgagcccacgctccactgatccatccatgttcgatcgatcgacgaggcacgcgacggacgaccctaaattgaaccctatacaccgagcttaattatatatccgtccgatcgtcgtcggtcagattcattgctagctccgcgtgttgtaccatcgtgtcagtcagtgtatacgagtgtgtatcttttgtatccaagtacagcacgcgcgcgtgcgtaagcgtgtagttataaaaattaataacatgtttcttagaggagtgaggggggaattgtaaaaccgcttgtcaattgggctaagatcgttcgggacactgagcaaactcagaatgagttaagtttttcattttcatataaaaaaaaaaaaaaaaaagcggacttgacacctttaaatgatttagggtcgaataaagtctatc

SEQ ID NO: 162185 - DNA, 421 bp, Zea mays
  Clone ID: MRT4577_7948C.1
atgctgaaatgtatgttatattggtatgagaaatgtttggtacattacaagggaaacatataaaccacgataacacgagaatatataataccatgataacttatgggcattgcaatagaaacatataatatcacgataatttatgtataaatgggtattggactaaaatgggggttatattgttatgagaaaaggtttcacgcgttgggggaggaagagcttggttcctgaggggtatggtctttctcacgctttaactgatgcttttgtctgttggagccgtccgattttaggtgatagcagtaggctgaccagatgttggttgtggaggaattgttggaggaccatttaggttagtgcaacccatggcgacgtgttggttagtgacccttgcaccttgaatgggaatccgggcctgtac

SEQ ID NO: 162186 - DNA, 570 bp, Zea mays
  Clone ID: MRT4577_79490C.1
agcaagcattgattggagtgaaaaattaatgtctgaacgtaaaatgttcatgaatcatgatgccagtacatatccattttaaaatacaacctactagttttaaaaaagttgtatacatgtcaagggtcaagaacgcacagacagcatggggccttctgttcattatagtttcgtacgtgcacaaataaagaagaatgcatttgagcttaagttttttttacctttatcgagcaccgaacatcctccaccgtaggccagacaatcagtggtttcccgattcctagctgggatccatcatctgatttaccagctgacagcgagcatgcaaattcactcatccatttctcataaagtgaccccagggaagaaaactggtaaatccgaggggatttgcaaaattgtttattgaacatgatttcatccagaacattcctaagtttcatatggccccacttcctaatattggagcccacatgataaccaggaaccgatccaatcaacctgaccattgaattactatagtcaaacttcctaaagaatgccgcattgatgttgacatcaccaacccct

SEQ ID NO: 162187 - DNA, 391 bp, Zea mays
  unsure (1)..(391): unsure at all n locations
  Clone ID: MRT4577_79491C.1
aaacccaatatacatgtgtttctgctgcgctaaacttcaagttttgtttatgatccaaacggccccccctagaagggggtcccccaaaaaaaattacatgaaggctttggtccttgacccaaggctttttcaaaacatgcccccgttacagggggttgtngagaagggattgaacacagggctagtttcgttttgatttgcgtggcgtggagcacttttgcttcctgtcttggaggatccccaagatgacagccgctgtttccttgattgcttttccagggcccgcnttgtctggccccgatgggttctgagcaaggatttgattcgcntggacccgttcctgcctcacatggtccttctcagcgtaattgctcttgcccccatcaaaacc

SEQ ID NO: 162188 - DNA, 469 bp, Zea mays
  Clone ID: MRT4577_79492C.1
ggccgcttttttttttttttttttggttttttttttttttttttttttttttttttttttttttttttttttttttttttgcaaagagaaaaaaatatatttgtttcaattctggagcggggggccgcgggggggaacaaagaacttcacgcccccccataataaaaagaggcaggaattacggggtcctataaaaaaaaggccctcctggggggggggggagcttcattaataaccagccgcaaaaaggcggatggtgggcacagaagaagtcgccgccggtgcccccccaaaagacgccaaagcattgttagaaaaaccccctccggtggccgacatggttaggatcaccatggcccccatggaggccggggacgatgttggtggggacaacgccaccagccggaaggccgccggctgccgcaacacgggcggggggccacccctgccccattataacgtggcgcaa

SEQ ID NO: 162189 - DNA, 229 bp, Zea mays
  Clone ID: MRT4577_79493C.1
tactctcacgcgttcatccgcccgcagcccccatccccgtgggtggctccagatggccaggcggtcgcaccgccccattcctcgattaaacttagatagatcctgtacactcatctagggcaatccgctaacctaatcgattccaacctctgtgaggaattgtgttaacaccactgcattttcactagctgagagtgcactgacagttgtcatctctactgacagcgcg

SEQ ID NO: 162190 - DNA, 643 bp, Zea mays
  unsure (1)..(643): unsure at all n locations
  Clone ID: MRT4577_79494C.1
aggcctctcggccttttctgtcccttcgctccaaaaagactacagcgctaacttgcctccaagcatccgtatccgacgtgtaaacaggagttgggagccctccaacctcctggatccttctcttccgtctggtcagattcctgatctctgttgctgcacctgtatccttcggcccaccactacgaacaagatgaacggcctgcaggcacacgtctaggagcttctgtgttgctgctgctgctaaaacttctccttgaagattgcgtgtccctcggtgcaggaaccggggtgcttactctctgacatctgtccgtcggagctggagctgcagccggcttgttctgctgtttgtccatgggagttggagctagcttgttctgctgcttatccaccggagttggagctggcttgttctgctgcttatccatcggagttgggatgggagttggaaccggcttgatatgatgtctacacgttggagctggagctgggatctgcttgatatgatgcttatccattggagttggagttgggaccgggttgatctgatgtctatttattggagctggaacctggttgatntggtgcttatccattggagtagggagtggggccggcttgatctgttggttaatcggggggg

SEQ ID NO: 162191 - DNA, 144 bp, Zea mays
  Clone ID: MRT4577_79495C.1
aaccaaaaaaggggaggtccatttatggattgagatccaaaatcttgggacagacggggtaatgcatgcagggggaagagtaaccctggcaattttcaaggcaaccaccaccattgttaagcaaatgggggtggcctacaagcc

SEQ ID NO: 162192 - DNA, 432 bp, Zea mays
  Clone ID: MRT4577_79496C.1
aaaaaaaaaaaaaaaaaccaaaaacaaaataaaaaaaacaaaaactgaaacattcaatacggagaggggtcccaacaactataccctacccctaactgtactgacatatgatctcttacaaactcataaacaaaggggggcgcccctctttttttttttttttttacaaaaaaaatcccattttttttattttttcgctccacacattttttttttgctcaaagggatggatgagcttttcacccactcccttccgaataccccccaataaaaaaaagagaaacccttccggggtgggctttttaatcaccccctgtttcagaccccccaaactttccttttttttcattatccccgggaagaggttgaaaactcattttctcagcccttcaaaaccctttttttttttgttcgacgcttggactcgccctg

SEQ ID NO: 162193 - DNA, 946 bp, Zea mays
  unsure (1)..(946): unsure at all n locations
  Clone ID: MRT4577_79497C.1
gcagctccagctccgacggacagatgtcagagagtaagcaccncggttcctgcaccgagggacacacaatcttcaaggagaagtttaacagcagcagcagcaacacagaagctcctagacgtgtgcctgcaggccgttcatctaacgagaagcccagagacaggtcgccaaggcatgaagggcaccggtgccgaggaaaggatggagagaaccagcattgtcaaagacacagagaccataactctgagcagaggccagaagagcggtctaatcagagagctctgaagtctggtcttgcttaccttgttcgtagtggtgggccgaaggatacaggtgcagcaacagagatcaggaatctgaccagacggaagagaaggatccaggaggttggagggctcccaactcctgtttacacgtcggatacggatgcttggaggcaagttagcgctgtagttctttttggaacgaagggacagaaaaggccgagaggagatgaaccgtaggagttgccgccttttttatttggtattttgcagagaaggtcgagagaagatgaaccgcgtaggagttgccgttttcatttggtatttggcagagaccgacgacgggtctttgctggactgatgatactttgagacaaaggtgtctaatgtggacggggtctgtgaattaagtaaaaaaaaaaaaaaaaaagcggcccagcttgcactgaaaatgacacgctattgtctccatggaccaggctgttccggttctgtaggcacggatggacagtgatggagagaaagctggttttgggcaccacctggtgccagccatctttgttttggactgagctgtatggctcaaaacaaattttgtagtgtgtgtccatgtgtatattaggacgagtgttctaattctgtctcagatcgtccagtgctatttgttaaaaaaaaaaaaaaaa

SEQ ID NO: 162194 - DNA, 360 bp, Zea mays
  Clone ID: MRT4577_79498C.1
gggtggttgttttttttggtttgcgggttgacataaccagaaagtcttacaacatcaggtgttgggaaccactcctgagacaatagcaactcacaagcctgacgatgaccgcatcaggatacttttagcactcatcaccatcatcaccttcctcaccctcattaatcttgggaggaacctactcctagtcgttgtaaagcgctgccagatcctgacaggcctcaaaaaaatatccctcctccatgcggggggcgacgtaccaattctcaaattcactcttggcgtacatgaggtcagacttgtggtcgatgcaggaaaacacctccacatcactttttgtagttggaagatcatgcacac

SEQ ID NO: 162195 - DNA, 188 bp, Zea mays
  Clone ID: MRT4577_79499C.1
cacccgagcaccactgtttaaagccacaatatcacccactacaatatcaaatattgatacttggatccttataccacccctaaaaacctgaacaacacagcatagatttaactaaattttttttgctacaactaccacccattgactcacactccttaataataaccacttctcaaacccccccttat

SEQ ID NO: 162196 - DNA, 385 bp, Zea mays
  Clone ID: MRT4577_7949C.1
tcgactggatttggaaaggttctaaaaacaaatcacagcaacattctggatgatcctttcataagaggacacattggaaagcttttggggaacatcagaacacaagtgcttataaaattaaataagccttacacaaggattcatattccttttaatttctaaaggggttaaacttagatgtagctgatgtgaaagctgctgtgcattgctatgggatacactattcatgggccaatttgatcaagtcaaccagttccttggactggatcatcaaaagaggggtggtgcccgatatactggactagataaatggaccaaccaactaaattctctcaaccaggctgtagtcagtaaactggcttaacagagaacagcttttacagac

SEQ ID NO: 162197 - DNA, 251 bp, Zea mays
  Clone ID: MRT4577_794C.1
cattgggacccctcgagccggccgggctcactctcctcgacgcgcctctgaaagttcggagccgccgggccgtccgcctccctctcagagtaccgtctcctaggtcaatagttttcaagtggcaatggcggacgaggataaccaaccaactgtgcttcataggctcggtggtcaattccacctgcgctcgatcgtatctgaacgtgtagagtctcagaagatatgcccatctgtctcatcttatcacacca

SEQ ID NO: 162198 - DNA, 330 bp, Zea mays
  Clone ID: MRT4577_79500C.1
atccggtcgtgttttttttttttgcggtcttttttctttttttttttttttttttttttttggggaaaaacgggttaaccccaaaattacttttttttttggggcccccgggaccggggggccccctatttggaacccccccccgcacccccgggtcatccccaccgtggaagtggtcgggggcccacgcggtggggccctgcccggtttgccccccgctgctcagccgaaaccccgttttgccgcaaatgctaggccggggggaggccctccatggcttcaacaacctgggctggcagagcatctggcgactgcggcgggggacgaacc

SEQ ID NO: 162199 - DNA, 1502 bp, Zea mays
  Clone ID: MRT4577_79501C.1
attcgttaagaaaagaatttccggatgttgatcctagcacattcttttctatgtttatctggaagatccctgctgaaggatacaggatccaaaaaggcacccggcaagtgaggatccatgaacctgaacctgtggtggctgatccgggtggtctctgcaaggctaggaatagcttgtgcaatcttcaaagggaaggttttgttgaatcatcaccagcacgggtttgtaatatctgctgcaaagagcctggtttctgtcgtgagtgctgctgccttctctgtaacaggaccgttgattattctcttggaagttacagctgcataaaatgtgaggcagttgtggaagagaacttaatatgtgggcattttgcacaccttgaatgtgctcttcgatgttacatggctggaactgttggaggaagttttggcttggatgtccaatatttatgcaggctctgtgataacaaaaccaacttaatgacacatgtggagaaactcatggaaacatgccaatctcttgaatctagggaccaaatcaaacctatgctgaatttgggcttatgcctcttgcgtggatcaaaacaaatgagagcaagaaacttggagaaccatatgagatcagcaatggaaaagctggaatgtggatttgattttgttgaagtctggaaattggaaggtgacgagggcaggacaacactcaatgcaggagagaattccccaactaccaatggcgtgactgtgcttggggctcggcaagttcctgaagcgggtgcacttacagggcatcctgatctgatagatccactggttgataatgacttcgagacggttatagaaaaccttccagtgttcattactggagatcagaatgtcgcgtctgctaaatttgaggatgagatagatcttgctcttcaagaactgaaaaaatctcaggaagcggaatatagcgtggcggagcagaagctttacgcccagaaagaccacatcctctgtctgtacaggcagcttgacgctgaaagggctgaacttgcagatcccatgcccttgtctgatgcttcaaattatggtgcgatgctcgctaatgttctaagccgcgtggaccaagtcaagcgtgaggaggagaaatttaggtctatgctgaaagttgctggcggatttgcgaaagcaccacaaagcgtcaccagggagatgttcgggttacctgctgataagtagttgtaatagcagacttgcttggaacttaactatctgtagtttaccatagaaccaaacttggctgtgttgttatagctgtatgagctgtacatcctaccgacgggttaccccataaagactggtttggatgaaaccagcaagtgctgcggatgcgcaggttctctatggacctgcttgtactaactactaagattcgttaaatgtgacattctaaatggaccgaacctggacctccacattttccctaccagtttcatagattcaggcgataattatgttacactcgcc

SEQ ID NO: 162200 - DNA, 278 bp, Zea mays
  Clone ID: MRT4577_79502C.1
ggcgacgacgcgtccgacacagcttactcaactccaacaaatgcgtttcattttcactgctgataacattcaaacagtgctggttaccatcattaatgaacattcttcaaaaaaacttcttctccctaaccttttgcagtatcctaaactagcgcgccacacacctcctttaaatcttaatatatcacacatatccaggattgttattctaaacgacctttaatccctagaaattaaaagtggttgcacttataattcctaaaacaaatataatcaaa

SEQ ID NO: 162201 - DNA, 2762 bp, Zea mays
  Clone ID: MRT4577_79503C.1
gtgaagtaaggacatcaagaaaatgaaggggaaagggaaattaaagaagaacatgaaaaattctcagttctcaaagataatgaaggtcccccctggatctggtggaggaaagaaatggactaccttggagcacaatggtgttattttccctcccccatacaagcctcatggtgtcaaggggctgtacaatggagaaacctatcgatctgacaccagaacaagaggaggttgcatcattggttcctcgaggccggcaaaaaaaaaaaaaaaaaaaaaaaaagtttatccttgccctgcgggtcgaaaaccgtcaccgtgttcagttcatagaaggcggcatcatgagctctgcagtcagtagataagccgtaacctgcgcgattctattcttgcgacggaagcaaaatctgcacgagagacagacgacgagatggccgatgcggaggacgccgccgccgcgcgccgacgggccgccataaccgactaccgcaagaagctgctcaactgcagggagctcgagtcgcgcgtcggcaccgtgagagaaagccttaaaaatgcaaagagggattttaccaagactgaagacgacttgaaatctctgcagagcgtggggcaaataattggagaggttctccgacctcttgataatgaacgctttattgtgaaggccagcagtggtccccgatatgtggtcggttgccgaagtaaagtagacaaggagaagttgacatctggaactcgtgttgtacttgacatgacgaccttgacaataatgcgcactcttccacgggaggtggatccagtggtatataacatgcttcatgaagatccaggaaatgtcagttactctgctgtaggcggtttgtctgatcagattagggagctcagggagtccattgagttaccacttatgaaccctgaactctttcttcgggtgggaattaagcctcctaagggtgttctactctacggtcctccgggaactgggaagaccctattggcaagggctatcgccagtaacatcgatgccaactttttgaagattgtttcaagcgctattattgacaaatacattggagaaagtgctcgtttgattagagaaatgtttggctatgcacgtgatcaccaaccatgcatcatcttcatggatgaaattgatgccattggtgggcgaagattcagtgagggaactagtgctgatcgtgagatccagcggacgttgatggaactccttaatcaattagatggatttgatgagctcggaaaggtaaagatgatcatggccacgaatcgacctgatgttctggaccctgcgctcctgcgtcctggacgtttagacaggaagattgaaattccgctacccaacgagcaatcaagaatggaagttctaaaaatccatgcagctggtattgccaagcatggggaaattgattatgaagcagtcgtgaaactagctgaaggtttcaatggtgctgatcttcggaacgtgtgcactgaagctggtatggctgcaattcgtgcagagagagattatgtagtccacgaagacttcatgaaggctgtgcggaagctaaatgatgcgaaaaagctggaatcaagtgcgcattacagcgcagattttggcaaagagtaatgtatgatgctggacagatgcataaggcgtgtatcatcagggagctctgtcagatgcgatgcaaaagcgaaagaaaccagctatttatgttcaggctccaggcagctccactttttcctgatattcacaattttagtgaggaggattgtcaagctgaccagtgggggaaatcagtcgagaatttagtagttctgcgccagatggcctttgcttctgtaaatcgtacgtaatctgcttccgtgcgtcttagtctggtaataactctggttggacctgttctgtttccatgtacttttggacagtgtgcctgactccgcggtaacagaggaaaaaagaacattttgtattcatcctgaactacaattccccctcatttgtactattcacactcccattactgcgtcagggagtcgatcagacatgtgattaatttcggttatacgtttcgtgggaaataagcaatttaaacttactttaatttcctgtatgtcatgtgttcgttttagtgtgtatgcctactatatattatggtcgtatgtgtgtgtcgacatgcttgtgtctctcagtatgtgcgtgtgtctgtttgtatgtgtcagtatcagtgtatgtaagggtcggtttggtaagttctatcttattctgattgaaaaaaaaaaaaaaaaaaaataaaaaaaaaaatagcaaaaaaaaaaaaaaaaaaaaaaaaaaaatttgtgctgtgaaaggggcgcccctgaaaaaagatttttgggaatcttcgcgggggggggggccggccgcgcccgcgggggggggggccaatcctgcctaggggggggcgttgggttagatggtggctggaaaacccccggagcaccaggtgagggtcggtttggtctcgtggagaataagcaatttaaacttagtttaatttcctgtatgtcatgtgttcgttttagtgtgtatgcctcctatatattatggtcgtatgtgtgtgtcgacatgcttgtgtctctcagtatgtgcgtgtgtctgtttgtatgtgtcagcatcagtgtatgtaagggtcggtttggtaagttctctcttactctaaaacgaacacatgacatacaggaaattaaactaagtttaaattgcggacgctggg

SEQ ID NO: 162202 - DNA, 1678 bp, Zea mays
  Clone ID: MRT4577_79504C.1
ttgattgagaaagtttggctatgcacgtgaccaccaaccatgcatcatcttcatggatgaaattgatgctattggtggtcgaagatttagtgagggaactagtgctgatcgtgagattcagcggacgttgatggagctccttaaccaattagatggatttgatgagctaggaaaggtaaaaatgatcatggccacaaatcgacctgatgttctggacccggcgctcctgcgtcctggacgtttagataggaagattgaaattccgctacccaacgagcaatcaagaatggaagttctaaaaatccatgcagccggtatcgccaagcatggggagattgattatgaagcagtcgtgaaactagctgaaggtttcaatggggctgatcttcggaacgtgtgcaccgaagctggcatggctgcaattcgtgcagagagagattacgtagtccacgaagacttcatgaaggctgtgaggaagctaaatgatgcaaaaaagctggaatcgagtgcgcattacagtgcagattttggcaaagagtaatgatgctaatgccgatgcaacggacaaatgcatttggcatgtatcatcaggcgagcccagtcagatgcgatgcaaaagcgagaaaggaaccagctatttatgttcaggctacaggcagcttctctttttttccttctttctcgtattcacaattttagtgaggaggattgtcgagctgaccggtgggagaaaccagtcgagaatttagtagctttgcaccagatgccatttgcttctgtaaatcacacattatctgcttccgtgtgtcttagaatggtaataactcgtccaatctgttttgtttccatgtacttttgacagtgtgctcgacttgcgtggtaaaaacagagaaaagaacaatttgtgttcaaaaaaaaaaaaaaaaaagggcggccgccagctgcgctgggcaccgtcgcgtgggcggccaccgcgctcgcgctcggcctcgcgtgcaaggagatgcgggccgccgccgccgcggcgcgcgggtggcagatgcgcacgctggaggcggtcaccgcggtgctggccgtcacgcagctggcgtacgtgctgatgctgcaccgcgccgccgccgccgcgtacgctgatgatgaagccgatgctaccgcctacgccgacgctggtggcgaccagtgcgagcctggctgttccatcggcaccgaggacgacgccgacgccgactgccagcgcgcgcagcagcagcagcatggccgccaccaccaccaacccaggcagggcggcgggccctcgtgcagtgtcatgtgaactagcatacccatgcatgcatgtttggtggtgtcgctctcttgtcttgccattttccgtgctcgtgtttcgtctcgtggaaaataagcaatttaaacttagtttaatttcctgtatgtcatgtgttcgttttagtgtgtatgcctcctatatattatggtcgtatgtgtgtgtcgacatgcttgtgtctctcagtatgtgcgtgtgtctgtttgtatgtgtcagcatcagtgtatgtaagggtcggtttggtaagttctatcttattctgattcttcgtgagaattagttctatgacataagtgattctatgactaaaaaaaaaaaaaaaaaaaaaaaaagaagggcgaccgcgaactagaacgc

SEQ ID NO: 162203 - DNA, 666 bp, Zea mays
  unsure (1)..(666): unsure at all n locations
  Clone ID: MRT4577_79505C.1
acgcgtgtgtggggaccgctgtgtgnttgaaggtatctttttgacgccctttatacgacacaaagcaancgctacgaagcaacaatgagacccgtattctggggagggaactggttgtgtgcctggaacccttcagaacgggagccctccgctgacgaatgtcgaaggggggaatgctctctcgagaacgtaanagagacnagcttgagctcaacnaggaaggcccatggctgctctacacaaagagcttgaggaagaacggagcgcgtcggcagttgcggctagccagacgatggccatgatcaataggttgcaggaggagaaggccgcgatgcagatggaagcactgcagcacctgaggatgatggaacagcaggctgaccacgaccacctagcgatacaggatctgcatgatttgctcacagagagggagaaagaattgctcgacttggacgctgaacttgcacactgcaggaggctcctgcagaacgacgatccgttcaatggcgacagatttgatggcactgattatacaacgaacaacaacacggattttgtggggagcgccatgtcccattttgaagacgacaaggcatacattttggaatccttgagcagactggaggaaaatcttggcatttccacaatcagacttgcttctggtga

SEQ ID NO: 162204 - DNA, 321 bp, Zea mays
  Clone ID: MRT4577_79506C.1
atacagctccatacacttacataccacgcctctaatctatacaacatgtgtcatcacctaggttctgggtccacatgcatgcatacattcaatattactcgcatcagatgcatgcatgcttcatatatcaatgattaaggttaaacattcatcaaaccatcactctatcaattgtacccaactactaattacatcttctcacacataactttccttataccaatatcttctactactacaaactaatcctccctacaaccatagatattaacaatgtattatgtactaatctcgtcttagctacaatcattcacgacctta

SEQ ID NO: 162205 - DNA, 387 bp, Zea mays
  unsure (1)..(387): unsure at all n locations
  Clone ID: MRT4577_79507C.1
cggcctttnttttttttttgcacaatgttaaaactatcattgctcttattctgtgaaagaattcacacgttctggaagatatcttaaatgagaggggcctccaaataaaagcaaaaaacatacaattcccatactgcttacaaaattggagaccaatatcaggatcctgtcagattaatagttcaattttcacctgaaatggcccttccacaacattaacagtttctttaatggatattgccttttttcgatgatcaacatctgtctacattttatccacacaacctctcttaatatcctgctttctcactttcaccgtagatggctggggaccaccctttattattcctaaaccatcttttttaacatctacaattacaccaaata

SEQ ID NO: 162206 - DNA, 414 bp, Zea mays
  Clone ID: MRT4577_79508C.1
aattattccatgttgtgatcaaatttgccatgtgattttttttcgaaagcgcaagagaggtgcacatcatttaattagagaagaaaaggtccaaaatggaccaaggtacaaagccctgaacaggcccaacaaaacacccattaacacactacatcctcccccaacaaattaggccctgtgtaagttacgtgtgatctcaatgccgaaactctgaagatgtttagctccagccgtaatccaacaccccatctcatcaagaaagacgcatctgatagagctctcatcctctctctaatatttgccatgtgaattatatagccggttaatattgttctaagtattagcatattagaacatggtcatattctcattttatctccatggaactctcatcctctctctaatactcacaaa

SEQ ID NO: 162207 - DNA, 501 bp, Zea mays
  Clone ID: MRT4577_79509C.1
ttgccgcccttggtttttttttttaaaaataaatctcaatcaatatatggattatttttaggaaacacatgccggtatgagggcacaatggctgagtacatctcatatgtaatctaaaagatggcacctacaacgatgggttgatggaaggcagggtatatcaaagagaggtgtgtgtatggcagcaattgttgttgctgcaggaacttagccaccaataggttacccactgctagtgcattaagtaactgcagccgctgctgttggtacacagcaaagttcgacacacccatttcactgaatggaagccactgttgcaattaggcatgatgatttaccacagctagatgactcagagctggtacaatctgttgtcagaactgttgttgcagagacgtaggtaaatctcccacagagagcaggctaaatgaaagcaattgttgctcttgtacgaaggccacagggttcaccatggctagatgactgagcgcttgaataaac

SEQ ID NO: 162208 - DNA, 1440 bp, Zea mays
  unsure (1)..(1440): unsure at all n locations
  Clone ID: MRT4577_7950C.1
ggaaaaaaatccacacaagaacaacccaggaggagtgtcctcccctccaagattcaagcttctctcttggtttcctccgcagttgcgattctgcggagcgctgaatactacggtaatggattnnnnnnnnnnnnnnnnncctcgaggccggccgggtttcagatagaataccctatgagaaaataggggcatacaacgaagcagcatatctattctcccaaattcccacacaacaagaacccaaggaggagggggtcctcccctcccggattcaagcttctctcttggtttcctctgcagttgcgattctgcagagcgcagaataatactacggtaatgggttccaagaagatgtatgtttgctccctgcctttgatgccacacgtcgtcttcggattcgtcagctccctactggcgtcagctcccaactggcagtcctataaagtggatgatccgaatgcgccgagaatgattcttctcgttattttctacgcgaacgtcatcttgctggctgaaattaagaacgtcaggatctacatcgagacggcaactgccgtggtgatatcttacgtgtcactacttaaaatcagctggagctacatctggctcgttctcttccccattgtggcgatcggcttcatcgttgctctgtgcaaggagctcagtcacgaggacgaggccggtggatcacattcacaggagcagagcaatgaaggtgaaggtgaaggcgaagctactacgtcttcatgggaaaagtttcatgctgggggcactgaccatgatgatgactcggctggtggagacggggcgggccactgcccaccgcggcatcgtgccggcgtccgagctgctttggaaagcctcgctcgtggtgctgctggtggcggtgcacgcagtggcggcagagctgctgggagagaacgcgttactcctgtgcatgccggaaatcctgccggtgctgctgtggctcagcgttcgccttgacactgctgacgacaggatcaagctggtcctggacagtaatctgctccccgcagcaccacctgcagtcctcgccatgctagcgacgggcgagcccctgctctactggtgcagaaaggcgttggtgtcttgtgttgtttcggcgcttcttaccttctacgtttatttcatgctgtgccagtggccgggaggacaacgcaatcgcacgctcacaggtgcctctttgcagcacgcggtcatccacctcaagtcttgggcaaaggttttgctcaaagcggtggttgtgctgctaatatttgtatgctttcgttccaactagttctactgcaagaaccggtggtctcatcatcagccgaccaaatcttcatcgactatatgtaaaaaagatccaccagttcataatttgactgcgaaatgaatagtttcactatcaaaaaaaaaaaaaaaaaactcgagggg

SEQ ID NO: 162209 - DNA, 443 bp, Zea mays
  Clone ID: MRT4577_79510C.1
acatggtacccttcgctcgattccttcgtcgcctcgtcactccgacgaagactatatccacatagcacgcccgagcaaggcgaagacatcgaatgggtgaagaacggcgcggtctcccttcgaactctctgttgcaagacgaaggctctgtcgaagtctactagtctaacgtcctcaccgcgtacgagaggcccatgcgagtttcggcccactgtaacgggccccgcgcggataagtgcattacgggccgcgtttgtaatagcctttactgtaatgattgtctgtaacctcccctcgtgcgaatattctggggacaaaccgggcatttgagggcataaacgtctttggcaagggacgggtgatcactcgagtagttgagtgcctataaatactcctgtatagtgccctcacatggccagatataatagagctattattatctt

SEQ ID NO: 162210 - DNA, 342 bp, Zea mays
  Clone ID: MRT4577_79511C.1
acgtacgcaccaatgactgttaggactgcgggcagcggaacccgatgatgaaccaagaaccggctaggacgacgacggcaatggtgcagcggtacgacccacagacatgctggatgcagtctcggtcgcatgaactgagcaacgggccgacaatggagcagtatagccgcggagatgcttggcagaacctcgagcgtggagtcgagccccgtgtgaccgcacgcgaggcctacgcacctgcaccaggacacgccagcagatcaagccatgccgtagtcggctgcatacgacaaaccggtggctcaactcgacgcgaactctgtgcgagcgaaactggagctc

SEQ ID NO: 162211 - DNA, 513 bp, Zea mays
  unsure (1)..(513): unsure at all n locations
  Clone ID: MRT4577_79512C.1
tgcttggaacctttgggctgatttatgtgcttgttaggactacgcgggattagtcttgacgaagtccccttaccccctccaggtacgtaatcttgacgaagtcgtcggttacgctgcttcttgttggttcacccttacggttatgataaaaccgaggactggccattattcattcgtgcttactggacgaattcacgctgtcgtcgtccaatcgtataccgagaccgagaccgcgcggccgctgtcgtcgtccaatcgtataccgagaccgagaccgcgcggcgccccgccctaggcctagttctattgttcatcgcggggaggataataccgcagccccagatcgtcgtctcataagcattcatcgtttcatcctacccctagggcgtttccaccctcaagttcgcacgacctggtcagtagacgctatcgcactccccctattatcgcgccggaaggaggccataccgtanaaacgtaacgcgccttcggcctccgttcgtggcgggtcac

SEQ ID NO: 162212 - DNA, 174 bp, Zea mays
  unsure (1)..(174): unsure at all n locations
  Clone ID: MRT4577_79513C.1
ctcgagccgcgcccaacaagccattctgctcgcctgggtcggtgaanaacccagtggggtggtgccagtcccnccgtcnagatggccccacgccgcctgctcgtcctcgccgtcctcgccctcgcgggcaccgccggcgcggtcaactccggcttcgcggactccaaacccgat

SEQ ID NO: 162213 - DNA, 208 bp, Zea mays
  unsure (1)..(208): unsure at all n locations
  Clone ID: MRT4577_79514C.1
gagctcattattcggcggccgccctacntttttttcggggggcgtttttaaaccacttccccgctttaaccgatgaacatgggacgaatcccttaaacatatgagaagaaagcgaaacaaccatttcaacacaacagctaccaccatgagcagcagcggccactgacggggggatgacccacaaccacccactacaaaccaatcaacg

SEQ ID NO: 162214 - DNA, 565 bp, Zea mays
  unsure (1)..(565): unsure at all n locations
  Clone ID: MRT4577_79515C.1
tggtacgcctgcaggttccggtccggaattcccgggtcgacccacgcgtccgccttgctttgctcgttcttcttcagggtctgatcccctttggctctttaccatgcctgggtcacttcctttgaatgcagaggcttgctggccaaaagatgtgggaatcgttgcccttgaaatctactttccttctcaatatgtcgatcaagctgagttggaaaaatacgatggtgtagatgctggaaagtataccatcggcctgggccaggccaggatgggcttctgcacggatcgtgaagacatcaactctctttgcctgactgtggttcagaaactgatggagagacatagcctttcctatgattgcattgggcggctagaagttggaacagagacaatcatcgacaaatcgaaatcagtgaagtctaatttgatgcagctgtttgaggagtctgggaatacagatatagaaggaatagatacaaccaatgcatgctatgggggcacagctgcagtcttcaatgccgngaactgggtcgaatccagctcttgggatgggcgatatgctctg

SEQ ID NO: 162215 - DNA, 1022 bp, Zea mays
  unsure (1)..(1022): unsure at all n locations
  Clone ID: MRT4577_79516C.1
gtttgagataattcagattcttatcaaggagtgcaataagattgaaggccacgtccagcaggtaagctatttggctcgttcatgtgcgaacttttcacgccccacaactcactcagtatatgtcagaataaacaatctgaatgacctgcagaaacgctactatttggctcgttcatgtgcaaacttttcacgcccgcacaactcactcagtatatgccagaataaacaatctgaatgacctgcagaaacgcttggttctttattgaaaaaatatatatattcagagatgcacatgcacaacttacttatatcaggaaccgtcttctaacttgctcggttgatttgtgatggcgtccgcccagaatgccatgggctgctccctcgcccgcggttgctgggggttcttccccttgttcgatacgttgagaaggaaagcatcgcaagttcgccatacggatgggttccaaagcgcctttctgtctcacgctcctcttgctgctcgccgcggcctgtggacctgctgcacatgccaacgatgctggtaacagattgtgttatgttctcatcagtcatcactctggatttgcaccgttgagttgatttacccacttaggctgtcgatttgcactgtagattacaccgtttgcagtgtgagaaataggggatagatatgatagctgctgcagagtggagacagccttgctgcaaaaccataatcaccatcggtcgtattagatatttatagggcaattatcaacacgagtaccacctctcctctgaaactctgggactccggtcatatcagcaccgttgagttgatttacccacttaggctgggatttgcactgataagggataagaaaggatagctgctgcagagtagagacagctttgctgcgaaaccataatcaccaacgngtcgtattagatattaatagggtacttatcaacacgaataccaaacaagctgaaaatgagcatgtttattttctgatcctcctcctattccagttgctatgtac

SEQ ID NO: 162216 - DNA, 420 bp, Zea mays
  Clone ID: MRT4577_79517C.1
atggtcctctcgtctatcttctcgtctgatgagctcgacgacgtgtctggactctggaccctgggggcctggacgcgacccgtccccgcgctgttgccattgatcattgatgaggacagcatgctccggctcagggctgtcgcgtcgcatgcattgcctcccgagctcagtccacagggtcaggctggccagccaagcctagccaggccatactgccgctgctgccgccatcttgacctgttcgagttcgagttcgactgctcgttcgtcacggtgccatggactccggtctctctctcattcgcggtgccatactgctatgatggcatctacgggcgcgccgcgacggcgatcaggatcgacgtggcgccgccaagacccgccggccggtgggcgcgaacgcgtcactgcgtcagatga

SEQ ID NO: 162217 - DNA, 323 bp, Zea mays
  Clone ID: MRT4577_79518C.1
ggctgggggggggggggttttttttttttttttttttttttgtccaaagtaaacatttttagggattatgcaaaatcctgactggggccacaaaaactgggacaatgtttcaccattgtacgggggttcaacacattcgttttgaaacacatgtgcgtggggggtgttaagcacagtttacagattgacaaggactattacttttggtggccttgttagccttggtgggtgtgggttgagtttgtcccctgagcctttcagtgcttcttatggggttgtgaccaatcttttggctttggggaggtttttgggggacagttgag

SEQ ID NO: 162218 - DNA, 934 bp, Zea mays
  Clone ID: MRT4577_79519C.1
gggtacctcgaggccggccgggaaaaaaatgctcgaggggcgcctgtctctcaccgtcgacatcccgacagctcttagcccagatcgagcttccccttcccaaatcgggttctacttgggctcccgccaccgccgccctataccaggtgccaaggccttcaccgacctcttcgccggtgaagagcgcccagcagagatgaatgtagcggtgccaccacaatctccacatcttcgtctatatgactgcgccaagagtgccatcataaaaaattttgcctttctttatgctacgtggaatggatacagacaagtggtgtgatgcccaggtctacataggcatcggatggttttgaagctcaagtgcaggaaaagggcatccaagcagatatggtttgttgtatgcagcacttgcagatagtcatgctttgagaatgaagaacgggcaaagaagcttctgaataatgtatcatcacttctcaaacctggaggctacttctttggcataactccagattcatctacaatatggacaaaatatcaaaagaatgttgaggctgcacataataagggtttgaagactgttccaaatagcattcgctcagagaactataccattacctttgaagtcgaggaagagaagtatgagttgaaattgtatactaaatacacctagaaacttttgttacactgacttcctgaccatgtatgagatattgtctcttattagtactagatgatgagatgtgtctttttatgactatggatgagacttttgtgatgtaattgatgagactatggatgagactaattttatgatgtaattaatgagactatggatttaaatattgttatgtgattgtgtgtgagatgttttatgtaaaaaaaaaaaaaaaaaaaaaaaaaaaaaaaagtactctgcgttgttaccactgct

SEQ ID NO: 162219 - DNA, 551 bp, Zea mays
  Clone ID: MRT4577_7951C.1
tcgaggggccggccgggaaccggcatgacgaacaccccctcatagagaggaaccacattcagcaggtactaatgacatgcggccaccagtggctacgccctcggatcatacggcacgccgtgtccaccactacgtctcgtctctccagacgtgtgcaccccacgctcggatcatcaacgccactctcccccacatgggcaactccctagcattgcacctcgtctcaccgagtggaccaccaaaccaacaattacaggcagactaagccacacaggtaaacggcctacacgtgcatgcccgtgactgatacctatatgtgaatggggaactgctgaatacccaaaggggtgtccgctcgcatgagagaaacagcgacggatacagagatctcaccagaggaataacatctcctgaaatcatagacgaacttgagtgatcaggaaagaaccctccgaaaggagagagcacgctaaaccagtagaactgatatatgctgcaactgtgcatacacatgacacattgggatgagacgatgacactgacgggcagat

SEQ ID NO: 162220 - DNA, 315 bp, Zea mays
  Clone ID: MRT4577_79520C.1
tcctcgcgattccaatctccgcacgccatctccgactccgcgtccgcctcgcgcaggcaatatattcactgatggaacacaaggaggccggctgccagcagccggagggcccaatcctatgcatcaataactgcggtctccctggaagcgctgccaccatgaacatgagctccaagtgccacaaggcagacgatcatgatgcacgagcaggcccacttggctgccccccccatccacagcattgccaatgtcgctgataatgccaaacggacctgacaattcgctgacactgttatgtgcggtacctcccctccg

SEQ ID NO: 162221 - DNA, 1547 bp, Zea mays
  Clone ID: MRT4577_79521C.1
ggtaccctcgggcctgccgggaccgctttgcctcgttcccgttctcctcctcgcaactctctcgtccatacgtcgtagccgccgcctgtctctcaccgccgacatcccgacagctctcagcccagatcgagcttcccccttcccaaatcgggttctgcttgggctcccgccaccgccgccctacaccaggtgccaaggccttcgccgacctcttcgccggcgaagagcgcccagcagagatgaatgtagcggtgccaccacaatctccacatcttcgtctatatgactttgccaagagtgccatcatcaaaatttttgcctttccttatgctacggtctgtgacctgtattgcgacggtggaatggatacagacaagtggtgtgatgcccaggttggccactacataggcatcgatgcctctgcatcgggtgtcaactatgcccgtgagctatgggagaacaggaggaaacctttcactgctgaattcatcgagttggatccttctgatgatggttttgaagctcaagtgcaggaaaagggcatccaagcagatatggtttgctgtatgcagcacttgcagttatgctttgagaatgaagaacaggcaaagaagcttctgaacaatgtatcatcacttctcaaacctggaggctacttctttggcataactccagattcatctacaatatggacaaaatatcaaaagaatgttgaggcttcacataataagggtttgaagactgttccaaatagcattcgctcagagaactataccattacctttgaagtcgaggaagagaagtttcccttttttggaaagaagtatcaactcaaattcgcgagtgacgcggtgtttgagaatcagtgcctggtccactttcccacccttatgagattatcaagggaagctggacttgaatatgtggagatccagaatttaaccgagttttatgatgataacagaacacaattcgctccaatgcttggtggttacggtgcaagttttttggatgctcgagggaagcttgttgctcgttcctacgacattttaggcttgtattcagcatttgtgttccagaagcctgatccagaggcaataccaccgattgtaactcccgacttgcctgatcctgataaaggtcacgaagagcaggagtggctccagccacagcaggcgtcagtggaagatgggagacgctcgcatgcggatgtgcttcccatagaccctgagaaaggcatcctgggtcctggacctgcagacatgaggctttagttgctggacattcaaatgcagctgagcctgggtagtgatttttttttccaccgtgggcattctcccatagtcccatgtggccatgtctcctttatgagtccacgaaaatagcgaacaacactacaaggctcatgaatcctgcacggacgcatgggctttcttgtaaaacaaatgctcgatacgtatgaccttgtacggtctttgatgtgtatatttgactgctcatactcagtaccattttttaaaaaaaaaaaaaaaaaaaaaaaaaaaaaa

SEQ ID NO: 162222 - DNA, 1064 bp, Zea mays
  Clone ID: MRT4577_79522C.1
ccccttaaaggggaccaaaagtgggaggttggggggcgacagattttttttttttttgagaccattttcccctctcattctctctgactgatctaagtacatctacctctggcaggtaacagaagtttgggagtggcccatcgcactcgttctgaagctcacaataccatcaacccttccttccgagtggagcaaagtttacatcagcgcaaacatcagcctgtgccctctcctaatcctgtactccttcagctcgttcatccctctagacacccgaatagtgttcctcctcccgcaagtccgcttccctctatggtccgtcgtgctcttcgccagcctgtgcctagccctctcccactacctcctcgagaaagaagccccagaaacagagaccatcgcaagcaccatcatctccttcatcatgagcgtcttctggatctcgaccacggccggagagctcctgagctgcctcgccgcggtcggagccatcatggacttccctcccgccattctcggcatgacggtcctggcgtgggggaactccgtgggcgacctcgtcgcggacgtggcgctggccagggctgggcagcctacgatcgccgtcgccggctgcttcgctggcccgatgttcaacatgctggtcgggctgggaaccgcccttgtggtacagacggcgagggtgtatcccggagcttttgtgctcgagttccatgttgggatcgtcgtcgcgtttgtgttcctgctcctgagcctgatgggcaccctgttggtggtcacctgggctaggtttcgggtgcccaggttctggggatactgccttatgggcatgtacatcttgttcaccgtagtcagtattgccatcgccagttattcaggatgatatgtcatccctttttttgtgaagatagccggccgctgatagattgtggtatatagttagcatgcgcaatctgtctgtctggttcaatgcctacgtttgctgattttggcggtgccggtgtggcacgcggaatttaatgtgatatttaatttgctgccgcatttgcgaaaaaaaaaaaaaaaaa

SEQ ID NO: 162223 - DNA, 357 bp, Zea mays
  Clone ID: MRT4577_79523C.1
cggccgacccacgcgtacgcgcaagctcgcgccttttatgccggaccatgaagtcgcgtcggacagcatgacggtcggggagggtctgctcatgatggacgatgaagagagggtacggccatgctgagatcccgaccagtggctatcgcaagctgcgcgtctgactgcgacgtcgcctagtcaagaactacgaccagatcagggacaaccgctgcaaaaactgtccatttgtatagatggacagagagcacgacatcaccgtgaactagaccaccccgaactttactggaattatctgtctgatggaccccactctgagctaggcagcccgttggttgaaaattggcaggttcatta

SEQ ID NO: 162224 - DNA, 1441 bp, Zea mays
  Clone ID: MRT4577_79524C.1
ccggccggggcttctgctgcttgcttcagacacttgagagttgagactcactcagtcactagcaagtgcctcctcacatggcagcggcagcgctagcggcgtggtggtggtctctgtcgctcctgctggctaccatcgtcggcggaggcagcgcctcaccgtcgccggtgcccggctgctacacgcgcatcttcagcttcggcgactcgctgaccgacacgggcaactacgtccacctgacggcgagcagccacagcccctacggcgcgccgccatacgggaggacgttcttcggcaagcctaccggccgcgccagcgacggacgcctcgtcatcgacttcatcgcggaagagttcgggctggcgaaggtgacggcgatccaggcgggcacggcgcccggggacttccagaacggcgccaacttcgccatcatctcggccaccgccaacaacggctccttcttcgcgggcaacggcatggacatcaggcccttctcgctggacacgcagatgctgtggttcagaacccacctccgcgagctcgtgcaggcggcggcggcggcggcacagcatcagaacggcagcggcagcgtgggcgcgctgctgagcggcgcgctggtggcgctgggcgagatcggagggaacgactacaacttcgccttctcgcggggcgtgccgcgggacgcggtgcgcaggttcgtgccggccgtggtggacaagctggcgggcgccatggaggagctcatcgcgatgggggcgcgcgccttcgtggtgcccgggaacctgcccttcggctgcacgccgctgtacctgcagcggttccgcgccaacggcgggtggtgggactacgacccggcgacgggctgcctcgcctggttcaaccgcttcgcgcagtaccacaaccgggtgctcgcggcgcggctcgacaggctccggcgcctgcacccggacgtgaccatcgtctacgccgactggtacgaggccacgatgagcatcttccaggaccccgggaagctagggttcacaaacgctctgcggacttgctgcgggaaccagaccgtgccgtgtggcaggcccgggtgctccgtctgcaaggacccgtccacgtacgggtcctgggacgggacgcaccaggtgatcgccgactgggtgctgcacgggccgcacgcgtccccctgttcctctgcgtcccctgttcctctcgccgacacctgccctccgacatgacccttagaagatttataattggcagcttttaagagcggtggtaacatctgaatcaaacttgcttgtgtgattttaatggcggcacggtaatagctttgtttaagaatacaggtgaggttggcatatttcgatagcatacacacgaagctctcaagtgattaagtttgtataaatttcatggcaacaacgatccttcactccaaaaaactaatctt

SEQ ID NO: 162225 - DNA, 496 bp, Zea mays
  unsure (1)..(496): unsure at all n locations
  Clone ID: MRT4577_79525C.1
tgggtaccccgaggtcggccggggaagcacacacccgccgctgtttcttatcttgctcctgctcgcaccaggcgggggcgacggcggacggcggaggcgttcatgctcgggctctcancgacgggatcagtgggctcccgcctctcgccagtggcgtggcgccctcgcctccgggcctctgcacaccgtgcggggaccttgtgtggtgagtgtttccagcgctgcttgcggggggggttctcaattagaaaacctcaaattctgtgcctgagcgccaaatcaagaccctaccaatttagggaggccggacagagggcgatggccggagtgctggccaatggggagtcacagggggcggctcagaggagctatcaaggggctgggggggggactccggacatgggcattgggaaggatggggtcttgccatggaagcttcctggggatcttaaattctttaaagaggttacactaactacatcggagcctggcaaaa

SEQ ID NO: 162226 - DNA, 735 bp, Zea mays
  Clone ID: MRT4577_79526C.1
cccagcgtccggcggtgcgcaggttcgtgccggccgtggtggacaagctggcgggcgccatggaggagctcatcgccatgggggcgcgcgccttcgtggtgcccgggaacctgcccttcggctgcacgccgctgtacctgcagcggttccgcgccaacggcgggtggtgggactacgacccggccacgggctgcctcgcctggttcaaccgcttcgcgcagtaccacaaccgggtgctcgcggcgcgcctcgacaggctccggcgcctgcacccggacgtgaccatcgtctacgccgactggtacgaggccacgatgagcatcttccaggaccccgggaagctagggttcacaaacgctctgcggacttgctgcgggaaccagaccgtgccgtgtggcaggcccgggtgctccgtctgcaaggacccgtccacgtacgggtcctgggacgggacgcacccgacggaggcggtgtacaaggtgatcgccgacggggtgctgcacgggccgcacgcgtcccctgttcctctcgccgacacctgtcctccgacatgacccttagaagatttataattggcagctttaagagcggtggtaacatctgaatcgtacttgcgtgattttaaggatggcacgataatagctttgtttaagaatacaggtgaggttggcatatttcgatagcataagcatacacacgaagctctgaagtgataattgagtttgtatacaaaaa

SEQ ID NO: 162227 - DNA, 313 bp, Zea mays
  unsure (1)..(313): unsure at all n locations
  Clone ID: MRT4577_79527C.1
cccgcttnnggctttccatggggggtgtttgggtgngtcccgtggctgaactgttacagtggctgagtcccaccgtgtttttttttttttnnnnnnncncccccctctgtgtgggggggggggttttttttnncnnnnctntnnntggtttttcaatgggctgtgttggcgcctttgatggcngttggggaaaattttgatcggtgtggggggtgtgggggatgcggggtggggggtccagggttacgtgcgcgtgcgtgcggcgtggtggctcttgtgtggggtgggctgggtgggtttgggtggccggcgg

SEQ ID NO: 162228 - DNA, 1320 bp, Zea mays
  Clone ID: MRT4577_79528C.1
gaccgtctcctcgagctggccggaaaccctagcttccgtcacccacacagccggcgaggtggcttccatctcgctcgtgggccgatctcactgagcccccgccgttcttctctccacttcctgcgttctccagccgccgtcttcgctgataggctacgccgcccgctggcctgcgcgcgccgcagccttaccctgtgtgcaccctgttcctaaccctgcgtgtggccgccgccgactggcttgcgtgcgcccgcgcctccgcctaaccctgctagcttgcgcgcccaacgccagatgccctgagcccaccgccggctgtctgtgcacgcaagtgaacccatccggctacctgggcacgccatccgacctccctgcgaacctctgtatcggccgatattcctcaagaacacagtgcaaacagtaacacatcagcaagttcgagactgccaaaaatatgcaaggcagctggctggaaagaaccatcatttgactttgaagaacaaggacctccgcataacagagtattcacatgcaaggtgaccgtccacctggatgaactggtcaacaccattatggagtgtttcagcgaccccaaacctaagaagaaagctgcacgggagaacgccgcacaaggggcattatggtgccttgagcgctctggttatgtcaagtcatcttcagatgttcctgacctgtgcggccatcagcccttctgctagccagatctacccttgtaggagtattaatgttggtagacgggtgcagcttgttgctgtggcacagtggttatccatgcactgatgccatgatactcttgagaagttgagtcccttatgaatcttgagccggctgtgttggctcgtgtacctagtctctagctcgtttggttacatgcccaacgcctgcacttgtactgtgtaaaatactgaactccggcgatcaatgcaatcaaactggaactcctagccgagctctgtcttgcaattcggcacctgggcgccctgcgccccctcggcttgccaggtcttcccctgttggtcctgtcctgtgcggccaccggccctgctggctgccctggcccacccgggtagccgtgctatgtggccgggagacgcgtgcagcagtggtgccccggctcaagcgggtgcccgcgctctgggcccgtgttcctcgtcgcgagctcgtgtcccttctggcccttcgcccgcctgtgttggctcgtgtacctagtctctagctcgtttgattgcattgatcgccggagttcagtattttactcagtacaagtgcaggcgttgggcatgtacgacagcaacggaa

SEQ ID NO: 162229 - DNA, 939 bp, Zea mays
  Clone ID: MRT4577_79529C.1
atgcaaggcgatatcgatgatgaaaatgaagcatatgagaggtatacacagaatgttaggttactggaggaaacattctatcccatggaagacgctgatgtcgagcctgaagccgaagcaccttcttcagacgaagaaaggatggacttgctggttcggaggcaaaggtgaggctgaagtcggataacgaaatcgctgatcgcttcaaggagagggtcgccgccatcttggaccagaagctgaaaaaactgctcgagagccaaagcgccgacgaggacgacaaactgtccgatccagaccaggacgatcatctaaacccggcaaagttcagcgcgaagcagaaggcagagagaagcgcgagcttaaacgagctgctcggtaagctgacacgggcacggagcgaggacgacctgaagccgtgccgcgatctcatcgagcagctgtttgggaaggagaagggctcctctactgacaggccagctggagtggagatggagcagagagatcaagagtcagccgcagcagcagtagcacagccttactccgtcccagttgtgcgctaggatggaggctgatgaggactttgccgcaaagattagtgatgagttctcgttgagtcaggtggcgcagctatgaatctggaacccggccttcgatgagttctcgttgagtcagggggatgcaatgttattatcactgagctccttcgatgtgtaccaactcaacagcgctatccatcgacgtgctggcctgtcatttaggtgttgttgtttggttacgactagtaaatgtaaatgttagaaccccgatgagcagatgagttgagcaccgctcccggcgctcgacttcctctcacgaagatttctggagtatggtatagttggagttcgtacacgatggcacgccgccaaaaaaagaagaaaagggcggccgccaccg

SEQ ID NO: 162230 - DNA, 1448 bp, Zea mays
  Clone ID: MRT4577_7952C.1
ctggccgggatttcccccaaattccacacagaacacccaggaggagggtcctcccctccaagattcaagcttctctcttggtttcctccgcagttgcgattctgcggagcgctgaatactacggtaatggattccaagaagatgtatgtttgctccctgcctttgatgccatacgtcgtcttcggattcgtcggctcccaactgccgtcagctcccaactggcagtcctataaagtggatgatccgaatgcgccgagaatgattcttctcgttattttgtacatctacgtcatcttgctggctaaaattaagaacgacaggatctacatcgagacggcaactgccgtggtgatatcttacgtgtcgctacttcaaatcagctggagctacatctggctcgttcccttccccattgtcgcgatcggcttcatcgttgctctgtgcaaggagctcagtcacgaggacgaggccggtggatcacattcacaggagcagagcaatgaaggtgaaggcgaagctactacgtcttcatgggaaaagttcctcctcttcttcagtttcatgctgggggcactgaccatgatgatgactcggctggtggagacggggcgggccattgcccaccgcggcatcgtgccggcgtccgagctgctttggaaagcctcgctcgtggtgctgctggtggcggtgcacgcagtggcggcagagctgctgggagagaacgcgttactcctgtgcatgccggaaatcctgccggtgctgctgtggctcagcgttcgccttgacactgctgacgacgggatcaagctggtcctggacagtaatctgctccccgcagcactacctgcagttcctcgccatgctagcgaagggcgagcccctgctctactggtgcagaaaggcgttggtgtcttgtgttgtttcggcgcttcttaccttctacgtttatttcatgctgtgccagtggccgggaggacaacgcgatcgcacgctcacagttctactgcaagaaccggtggtctcatcatcagccgaccaaatcttcgatgtgtagcatgtacttttcaggggcacatactggatgagacaatggatgctgctgctaaaggaagaagaaaaattacaagtaaagcagggatgcaggctgcttgaagttgcaatgatgcaaatctttgctaaaaatggttggaactttagtaatcgattgtgcttgtaatctgtaatgttatggtggcatctatgtttcgagtatggttttgttcctgtttgaacccagtatttttgatgtattggacagctatatgcccaatatttttgatgtattggacagctatatgcatattgtcatgcagaggttggaataatcaagttattcccttttctaaaaaatatgtaaaaaagatcctccagttcataatttgactgcgaaatgaatattttcataatct

SEQ ID NO: 162231 - DNA, 868 bp, Zea mays
  Clone ID: MRT4577_79530C.1
aatgtgtaccgcctgcccggccgggaacaaacccctagcttccgtcaccacacagccggcgaggtggcttccatctcgctcgtgggccgatctcactgagcccccgccgttcttctctccacttcctgcgttctccagccgccgtcttcgctgataggctacgccgcccgctggcctgcgcgcgccgcagccttaccctgtgtgcaccctgttcctaaccctgcgtgtggccgccgccgactggcttgcgtgcgcccgcgcctccgcctaaccctgctagcttgcgcgcccaacgccagatgccctgagcccaccgccggctgtctgtgcacgcaagtgaacccatccggctacctgggcacgccatccgacctccctgcgaacctctgtatcggccgatattcctcaagaacacagtgcaaacagtaagttctggagacagcaaaaccttaaggtaacacatcagcaagttcgagactgccaaaaatatgcaaggcagctggctggaaagaaccatcatttgactttgaagaacaaggacctccgcataacagagtattcacatgcaaggtgaccgtccacctggatgaactggtcaacaccattatggagtgtttcagcgaccccaaacctaagaagaaagctgcacgggagaacgccgcacaaggggcattatggtgccttgagcgctctggttatgtcaagtcatcttcagatgttcctgacctgtgcggccatcagcccttctgctagccagatctacccttgtaggagtattaatgttggtagacgggtgcagcttgttgctgtggcacagtggttatccatgcactgatgccatgatactcttgagaagtgagtcccttat

SEQ ID NO: 162232 - DNA, 410 bp, Zea mays
  Clone ID: MRT4577_79531C.1
ctgctaactgaaccctggggctgcaggacttattcaaatctcacatgagagtgaagccacgtccaggtatcacaatcagaaaaccgatgctacatggagtgtagtcacgtttgtagtataacatgctgcggcaaaacatttctcaatcatgaccagagctgccgaagaacctttacgaggacccggaatttcacatggaacgggagccttttaaattttgttggcgaaccggaagccaaccttttttgaattcccaagggtaacgaccggcggatgggttttcgccaccttggcaatgaccttgttctaggccggtgaccccccctacaggaaggggcccaaaaacttgccccccctaatacaagacgagcccaacttgggctttatggaggtggggtcaccgacaccaa

SEQ ID NO: 162233 - DNA, 1293 bp, Zea mays
  Clone ID: MRT4577_79532C.1
ttttcaaaaacagcctaaaccctatcttccgtcacccgcacagccgccgaggtggcttccatctcgctcgtgcgtcgatctcactgagcccccgccgttcttctctccacttcctgcgttctccagccgccgtcttcgctgataggctacgccgcctgctggcctgcgcgcgccgcagcctaaccctgtgtgcaccctgttcctaaccctgcgtgtggccgccgccgactggcttgcgtgcgcccgcgcctccgcctaaccctgctagcttgcgcgcccaacgccagaagccagatgccctgagcccaccgccggctgtctgtgcacgcaagtgaacccatccggctacctgggcacgccatccgacctccctgcgaacctctgtatcggccgatattcctcaagaacacagggcaaacaataagttctggagacagcaaaaccttaagggctactctccatttagtggttatggagtctcccaggaagcataaggccagtgccgtgccagtcaaggagaaagtgaagttagaagatggaaatgatttgttagtcaagcgcagaaagactgaattttcagggtccattgtccaaccagaacgggaaattgaagtctttgacccggagaacaaagtgcctgatggtctcccagttgaatattctactgacaaggatcccatggatgcgctcactagttgtgcagtacagaactttggtcaagcgaaaggtaacacatcagcaagttcgagactgccaaaaatatgcaaggcagctggctggaaagaaccatcatttgactttgaagaacaaggacctccgcataacagaatattcacatgcaaggtgaccgtccacttggatggactggtcaacaccattatggagtgtttcagcgaccccaaacctaagaagaaagctgcacgggagaacgccgcacaaggggcattatggtgccttgagcgctctggttatgtcaagtcatcttcagatgttcctgacctgtgcggccatcagcccttctgctagccagatctacccttgtaggagtattaatgttggtagacgggtgcagcttgttgctgtggcacagtggttatccatgcactgatgccatgatactcttgagaagttgagtcccttatgaatcttgagccggctgtgttggctcgtgtacctagtctctagctcgtttggttacatgcccaacgcctgcacttgtactgtgtaaatactgaactccggcgatcagtgcaatcaaactggagctcctagtcgagctctgtcttgcaattc

SEQ ID NO: 162234 - DNA, 333 bp, Zea mays
  unsure (1)..(333): unsure at all n locations
  Clone ID: MRT4577_79533C.1
acacaacacaagcagannncgccagacagaacccacacatnncatgcaaaaagagaaagagagagagagancnnacaggganncattttcctcttttaaccaaaagacggacaccaaacctatatgcttgcaaaaaagnnnaaaaaananagaaaanaaaccaacaatactcatattttncancanctnaccatcaanttcttctactcaacccctntacacnttnaaatncttcncccatcncccccccatnaacccctcatnntantcccncctctcnncccaacaactcctcctntcncccccaaatctcaaccccatctntctcattcc

SEQ ID NO: 162235 - DNA, 2162 bp, Zea mays
  Clone ID: MRT4577_79534C.1
cattgggtacctcgaggccggccgggttgccagcctctccctccgcatcctggaacccgccccgccacgccaccgccatctccccgcgccgccggcctaaaacctagccaagccatcttccccgcccgaaccttccaacgccggccgcttcctatctcaaccactcgccgctccgtctggtcttccttcacgccgattacgtggcgcacctactcgtgctcctcacctacgtctccagcgcttctgctctccgccgccacttccgtcgctcggtcaccgttgactgctgctacagctagctgggtgttaactgaatcgtaggaatttaggaaatatagttagcacagcccgccacggcatggaggtcgacggcgaggcacaacatttccgcctcttctccaagagggccaagcccaagctcaagtccgaggtccagccccagccggagccggaaccccaaagccgtgaccccgccgcccccaaagcctacctcgatcctgctcccacaatcgtgaccgagaccggccaggccgacgacgcggcggacgctgccggcacggcgccggcgaccttcgcggaccttggcctatcgcagtggctggtggatgcgtgcgaagccctgggcatgcggcgccccacggcggtgcagcgccggtgcattccgcgcgcgctcgctggggcggacgtgctcgggatcgccgagacggggagcggcaagacggccgcgttcgcgctgcccatcctgcaccgcctcggggaggacccctatggcgtggccgcgctcgcgctcgcccccacgcgcgagctcgcggcgcagctcgccgagcagttccgcgcgctcggggcgccgctcggcctcaggtgcctcgcggccatcggaggattcgactcgctcgcgcaggccaaagggctctcgcgccgcccccacgtcgtcgtcgccaccccaggacgcattgcgacgctcgtcaaaaacgatcctgacctcgccaaagtattctcccgcacaaagtttcttgtgttggacgaggcggatagaattctagatgttaattttgaagaggaacttcgtgtcatatttggctgtctaccaaagaagcggcaaacctttttgttttcagcaacaatgtcagacaatctgagatctttgcttgaactttcggggaacaaatcatacttttttgaagcatacgaaggtttcaagacagtggagaccttaaagcaacaatacatccatgttcctccacagggaaaagagcttcatctttggcatcttttgtcagttatgaagggaaaaacggaagaccctattcgttcagccattgtatttgtctctacttgcaaagactgccaatatttagatctgctgctggaagaacttggttatcctgcggttgctttgaactctcacaagtctcaggcacagcggctctcagcacttaaccggtttaaatccggtcaggttcctgtattgcttgccactgatgtgggcagtcgtgggttagatatccagacagttgatcttgttatcaactacgacatgccgatgtctccacgtgattacatccaccgggttggacgaactgcaagagcttcaaggggagggctcgctataagctttgttacacagaaggatatatgtcttttacacgagatagaagatgttgtggaaaagcagttggaggcctatgagtgcagtgataaagaagttactaaagatattacaaaggtgttcaaagcaatacgtctctcgaaaatgaggaggagggacgagggacatgatgagaaagtagaagcaagaaaagaacagaagagaagagatcgggcaagaaagaggaaacatgaagactaaaacccatagaaggacgactgttgaaggccgctgtgcccgatctaaaacgttaaacatgagaggcagttgcttgttcagtctagcgagtagctttaacctggaggagtcgatgatgactcgctccagtgtgagcccattcagtcgactgctctcagttttgccggcgttgtgctgtggatgtataaatttagggggtggctcggcagatgtgccactgaattcgtggcgcagcagtaatggacgaaacttcaccattgcttgtcagtacttactttgttctaaaggaattataattctcgctctttgacgagtt

SEQ ID NO: 162236 - DNA, 294 bp, Zea mays
  Clone ID: MRT4577_79535C.1
aaacaggagaagccttttttccttgctttttttccacatttattatgggtttacccccaatttaggtgcaataccattacatacccgcacaatacaccgggtggtggtgctaaacacatggggcgaacacccaggggggactttaaattaaacgggcgggacgggagaagacagaggccgggagcacagagctctgcgttattctctcctcgatcgtctagcggggacgggtgggtggcagcccacaaagaggggagtagtaggactagggcgtaggactcgcctttcatcatc

SEQ ID NO: 162237 - DNA, 361 bp, Zea mays
  unsure (1)..(361): unsure at all n locations
  Clone ID: MRT4577_79536C.1
gctgttgangaaaccccgacgccaagcaccttccccaccggagcttcgctgacctgctgtccacgtttctcctcgctgtgcttcatcgtgatggtgtggtgaggtgaggtcgtctacccccttccctcgtctatctcgctctcgctccgccccgccgtagttagctgctgcgcgctcgccaccatggccagtgccggctccctgcaacgcagaccgcgtgggggctgggcgcatgtgtgttcttgctcctagccgccgatgcccgctccggcgagcagcagccccaccgcgcgtcnctggcgccactggccgtggtagcagccatggcattgctctgcgcgcccttgcacctggccaaaaa

SEQ ID NO: 162238 - DNA, 1313 bp, Zea mays
  Clone ID: MRT4577_79537C.1
atccctacccctacgagtatccaagtccaaccagcaagaggggaggcgctgcacgcaggtcacgcggcgatggacatatgcgatgtttgagcaggcggtggcagatttctgctggcatgcgagggaagtagtgtcgtcagggatggggctctggggttggccgtgggggcgacgtgggccgtcgggcttcggctccgcgtccaccgccgaggaggtcaccgccggcgtcgacgcaagcaacatcactgccatcgtcacaggagcgacgaatggcattggaaaggagacagccagagttctagcactgaggggagccaaggtaatcataccagctaggacactggagagtggcctcaagttgaaggagagcctcgcagatgaggtcccaagctccaaggtacacgttatggagatggacctgagctgtctcagctccgtccgcgacttcgcacggtccttcaattcatcccacaagcatctgaacctcctcatcctggagtgatcgtcaccaatatcattcgctatgttgctggaaacagtgcgctgatttcggctctctcccctgtagcaaatcttgttctgaagagcgtgccccggggggctgcaactacttgttacttggcattgcaccctaatgtcaaaggtgtatctggtaaatacttcgctgattgcaatgaagcaacaccgactgctgtcgcgagagactcagagctggcgaagaggctatggtcgttcagcgaagaacttgtcaagatctatgctgatatgtcacagacgacacaggcaagcgaagaagaggaaaccacggttacgaaagacgttttccaagacaagtagcgtaatatatgttgctgcgttttctacgttttgtacctgtcctctgggcccgaatggccagtgactgtaatagcacctaagtgcccgagactggtaagggggtattcagacaatcaatcaagaaaccacggtgcggctgaggcctgaggcagtcctctccgtcgttcacccaaatctgagatcactcgtgtgctcacgtcgacggtgattagccggtggccccgggtgttgcaagatagaagaccaaaattatacgatcatatggaaacaagatgtgcctgcaatcatatgatatgagagtactagtgttggataatttttattcttcagaaagcgccaaaatcataaacgtttgatagttttagcattaagagcagccttggttgtttatttgtttccatgcttcttgaattgtcaggaagatcatgacttgtgacgacattaacagctattacactattggactggacttcttc

SEQ ID NO: 162239 - DNA, 404 bp, Zea mays
  Clone ID: MRT4577_79538C.1
gaggtctcagggtaatgtgagggtgtatccatcctatgcagcaccagatgagaatatggtgcttgatggtgaactacttcgtaagagaatgagcaattggtcttctcctatgaatcgtgttgggttaaccggaaaaattccgcaactgacaagtactcatcaatcaagaaggtacagtacagccgcattcaaagcacttgtgaaagtgctaaagaatgcatgagtagaaaggtgcctcgtggcatgccatgatattcagtggcggaggacgccagaaaatttaggtgttgataacgcaacgaagaataaaaaattatgacagtttaaaataacttgtagtagctacaaaataagtaatagatgttgaaaaataccttatttaatagtcatcttgattataaccg

SEQ ID NO: 162240 - DNA, 1654 bp, Zea mays
  Clone ID: MRT4577_79539C.1
gcggcattcatccgtcgaggacaagccaggctcagatgcggcagaacatccgtcgacgtcgccgacaggcgacacgaggctcacggctcacggctcaccagtcacctctaggtcttttccaaaaaaaaaagaagcccctcgtgtccatccctatccctacccctacgagtatccaagtccaaccagcaagaggggaggcgctgcacgcaggtcacgcggcgatggacatatgcgatgtttgagcaggcggtggcagatttctgctggcatgcgagggaagtagtgtcgtcagggatggggctctggggttggccgtgggggcgacgtgggccgtcgggcttcggctccgcgtccaccgccgaggaggtcaccgccggcgtcgacgcaagcaacatcactgccatcgtcacaggagcgacgaatggcattggaaaggagacagccagagttctagcactgaggggagccaaggtaatcataccagctaggacactggagagtggcctcaagttgaaggagagcctcgcagatgaggtcccaagctccaaggtacacgttatggagatggacctgagctgtctcagctccgtccgcgacttcgcacggtccttcaattcatcccacaagcatctgaacctcctcataaacaatgcagggatcatggcctgcccttaccagctgtccaaggatggaattgagctgcaattcgcaacgaatcatgttggccatttcttgctgacaagtctcctgctagacaagatgaaatcaactgctgcagagacaggtgtgcagggaaggatcataaacgtatcatcggtcgcgcataaaagaagtgatggtacatgctttgagctgaacaagctaaacgataaggctaggtacaaaccgttcattgcatacgcgcattcgaagttagccaatattctccacacaaatgagttgtccaggcgttttcaggaagaaggatgcaacctgacagcgaattccctgcatcctggagtgatcatcaccaatatcattcgctatgttgctggaaacagtgcgctgatttcggctctctcccctgtagcaaatcttgttctgaagagcgtgccccggggggctgcaactacttgttacttggcattgcaccctaatgtcaaaggtgtatctggtaaatacttcgctgattgcaatgaagcaacaccgactgctgtcgcgagagactcagagctggcgaagaggctatggtcgttcagcgaagaacttgtcaagatctatgctgatatgtcacagacgacacaggcaagcgaagaggaggaaaccacggttacgaaagacgttttccaagacaagtagcgtaatatatgttgctgcgttttctactttttgtacatgtcctctgggcccgaatggccagtgactgtaatagcacctaagtgcccgagactggtaaggggtattcagacaatcaatcaagaaaccacggtgcggctgaggcctgaggcagtcctctccgtcgttcacccaaaaaatctgagatcactcgtgtgctcacgtcgacggtgattagccggtggccccgggtgttgcaagatagaagaccaaaattatacgatcatatggaaacaagatgtgcctgcaatcatagaaaaaaaaaaaaaaaaaagcggcc

SEQ ID NO: 162241 - DNA, 382 bp, Zea mays
  Clone ID: MRT4577_7953C.1
ggaaccaaaaacgggcttggccctaaattagccaaagaagccgggcccaaaaggtgggacccaaggggtttgcaaaagaaaagccccagaaccggttgccgctttcgggtttttttttggtaaggccctaaaccaacgggatcgggaaactaaaagatccccttaataaacaccgggtggaaacaacttaacatttaagggccgcaaaacagttagctaattgggggcccaaccctcgatttgctcccccgggaccttggaaacaggggttacccatcggcatcggtttcctcggcactggggccatccttataaaaaacccttggcttcgggccatcctcatcctcaggtttagccttttttgggggtgggctttcctttt

SEQ ID NO: 162242 - DNA, 181 bp, Zea mays
  Clone ID: MRT4577_79540C.1
ctgggaaagggcaaacagaaacagcctgggattcggctttctttttcatttgaaaaatttgggttttgctcacatatatatgatgacccaaccgatggccgccgacaggcccaaaacagcccggaaactgccttggggggacacgttttcttgtccggcccaaaaccacaaggggggaggg

SEQ ID NO: 162243 - DNA, 362 bp, Zea mays
  Clone ID: MRT4577_79541C.1
gggggccaaacactttgaacacaactagggatggcccggtaatactaaaacggcaaatgcgtcaggctaaaggccagggccaattttttttgtccaacaacccattttccagttcccccaatgttttgtttaacattttcccgaccgaaaaaaggtgttacccaacccaaaaatgaaccttccctcaaaaagggggaaaggggccccctttcccggggatgatccagacaaccaattcccgaaaatcattttgcatccctgggcaattccaccttggcccatttttacccaccctagctttgttacaggccccgttcaaatgggccaactaaagggccatcagaggcaacccgccccctttt

SEQ ID NO: 162244 - DNA, 364 bp, Zea mays
  Clone ID: MRT4577_79542C.1
attcggctcgagctcccctaccgagctcgtcccaggcatcgtcgagatcggcgaccagaccggaatcttcagcaacggtggccacaaggcagagctgccccgcacgactgcgaacacggagaggactcggaggctatggggaccgctcgggaagggactatctgaggacgatacttgatcgaaccccaagctaatccatggggcaagccccatccagcacaaaggcaataaacaccatgacttccaggactgtatgatcaacaggctaaccatgtgatgatgcagatctgatggtagatgccgtgcgcacccgataatgggattgagcttaccctatatgaagaacacaacctgtatctcggtc

SEQ ID NO: 162245 - DNA, 793 bp, Zea mays
  unsure (1)..(793): unsure at all n locations
  Clone ID: MRT4577_79543C.1
tccttccccggcacccganacccgccagctccgcgcgtgccgccggcgggatacccgcctcccccgcgcccccgccagctccgcgcgaggcgccagctccgcgcgtccgccgcagtgatgccgcgcgatgaaggccgcacgggagagacgctgggaaagccgctccttccggtgttgcagtgggggcgtccacagctgtgccatgcccccgccccgtgggagaggccgaccactactcattgattctcgcttcccgtccacgtccgtgattttcccagcgaagctgaccacgcctccctgtacgcacctcccgacatcctcgccgacatgctcgcactcctgtccccgtctgagatcctcgcgtcggcgccttcggtggaagtccggaatcgcccggctctcctccaccgcgccgccagcctcactgagaagagttcatctgcctcctcctcaacgcttgaccccaccgccgctggatccaacaccctgccctcgtccttcttctccgacctactcaccagtgacgacgtgggcaccctggccagacgcacgccatggacagcaggtgggcaggaacaccttctacgtggatcctcttctcccgtgctcctcgacgcacgagagcgagctcggactggatcctctcctaccgctccatgcaggtgctccttcggccgatccaaagtaaaacctacagttttgttagatgttgctgccactgtttggagaagactcgcgctagaaagcggtactgggtgaaaactgcagagcgatctagagctcgcaagcctgc

SEQ ID NO: 162246 - DNA, 530 bp, Zea mays
  Clone ID: MRT4577_79544C.1
ggccgcttttttttttttttttttaatcattgacaagtcatgtagtttctggcgggacaaaagaggaacaactaatagggatgtagaaaacatcaagttcatttacttcgtatccgaaaatgacggtggtaaaaacgccagaagtgattctgaaaacttttgagtgtatggggccacatgccaaacagtggctgtgaaaggacattgccgtattggacttgggattctaccgagcgtaactacttcttgctggctttgacagcggccttggtgaccttggcggccttgccatcggtcttctcacagctcttgatgaccccgacagcgacagtttgtctcatgtcacgaacggcgaagcgtccgagaggagggtaatcggagaagggttcgacgcacatggccttcgagggaaccatcttgacaagacatgcgtcaccggatttgacgaatttgggagcctcttccaaggccttaccggtacgtcggtcgatcttctgctgcagggtgtcgaacttgcaggcaatggccgg

SEQ ID NO: 162247 - DNA, 264 bp, Zea mays
  unsure (1)..(264): unsure at all n locations
  Clone ID: MRT4577_79545C.1
ccccagattatatccaacgacagaagaaccaaccagagcggggcaaaaagagcagaggcgcggcaccacacaacgagcacacggcaccagcgaccgaaacgaaccacaaacgcaaacagcacaagccagcgaccaaaccagcaccaaaaccgcaaaaccaaccccccaacaagaccngccgaggcagcacgagacacgcaggccgaacccaaccnagacacnggccgaaagagacggcccaggcccggccagccacgccacaac

SEQ ID NO: 162248 - DNA, 538 bp, Zea mays
  unsure (1)..(538): unsure at all n locations
  Clone ID: MRT4577_79546C.1
ccgggcggaatcgaccggccctcagccaaacagtgctccggccgtatctaacgggcagaccctgcacagcatcactatctttgccgacttgattactgtgttgcaggaggtaactcaatcgacaggagtgcgagagcatgcgttctcacaaatctcggagaaagtcagggagcgcaatccaaatttcttgaagaacgcgaaaataagtaaattcaaaaagtatctactagttgccgaggaggcggggattgtaacaaacagaattcccaacggggaaggttgggtgacgttgaacgatgacagcatgtggagggttactgcctaagccgatgaccacaccccgcggttgatctcctggagtcatacagaaaggacgcacgtctgcaatctcttcgtagtatagaaattcagctcaaccgaatccttcggctcgatgagataagccacaggggcggattgaaacctggttttgtcacaaaataaacacaattctaaatgaanaaaaaaaaannnnannacaaaataagtggggaannnn

SEQ ID NO: 162249 - DNA, 454 bp, Zea mays
  Clone ID: MRT4577_79547C.1
ggaacccacgaacactggggggcaactttttaagggaagggaaaaagggtcacattcaggctcgcaaaaggggaactcaaacgacattcattttcatttccgggcatttggggtacactggcgctcactggtccttttcgaggacccccttggggctcacatagataccggccaaaaactttgggatatccttctttttaacatggcatttttggttgatgagggcgggggaacgagaaacaaactcaacgtcgtttccgtaaaggatgagctcatccttgacctttttggaccgggggaggggcaccccatcaagcatgtccaccttcctgaccttttttttgccgaggaagtttctgatctccatggcggtgttgcttttggggatggaggcctttatggggaaatgggcctaaacaaacctaatattggagcgggagcccttggggacccc

SEQ ID NO: 162250 - DNA, 415 bp, Zea mays
  Clone ID: MRT4577_79548C.1
acccacgcgtccgattccaaaaacctggtgggagtccactcacaagagtgtgccaggtggttatagcagcatttcgtaagtggcacattgaagtgccacatgatacatctctcctatatgaagttgatggccaaacttcagcaattgaaggaagccggaagctggagcacacaaatgagctcgagtaattctaattttctgcaatgcaatcacttctttagtttcagtatcatgtgatgcaacatttatggaatatttggaaatgacagtacttatatgtcataaagacattgaacttcactgcaaagtttttattatttcaacttgaggatactggaaaattagtacataaatacaatgaacaagaattaggaattattgataggatcaaacaagcatgataattcctccagta

SEQ ID NO: 162251 - DNA, 525 bp, Zea mays
  Clone ID: MRT4577_79549C.1
ggggggggggggttttttttttttttttttttttttttttttttttttttttttttttttttttttttttttttttttttttttttttttttttttttttttattcaaaactcgggtcccgggggttccatgggtaaataaataaaacagggggggggggggtttgctttttaaaggcacccttgcttcctacccaaccaaacttttggccatgaccattccctagagactacctcccctcccaagtaaagcccaactgggggggtttggctggaaaaaggttaaaaatttttggaaccagtacccaggtcaccggtttgttttcggggggcccccaattgtccaaagccaaaaacctccaaacacgggaaaattggccggaaaatagtccttccaggttaaatccaaaccaccattgggacatccgggccaaaaaaacactttttttttcctccatggggatcactttttgacttttccaccttgccggtggtttttgtttaattttccgagcctttttaacct

SEQ ID NO: 162252 - DNA, 1402 bp, Zea mays
  Clone ID: MRT4577_7954C.1
gagtatcattaaagcatgtaggtgggcgcaccacgcactcatacaacgaagcagcatatcctttcccccaaattcccacacaacaagaagccaaggaggagggggtcctcccctccaggattcaagcttctctcttggtttcctctgcagttgcgattctgcagagcgcagaataatactacgaattaaaatgtctaccttctttgaggcatgccccgattctgaagtaggatcacaatgttgaaacttgcccgatcgaagcactcactggtagatctggaagggagagcagacagaagtaatgggttccaagaagatgtatgtttgctccctgcctttgatgccacacgtcgtcttcggattcgtcagctccctactggcgtcagctcccaactggcagtcctataaagtggatgatccgaatgcgccgagaatgattcttctcgttattttctacgcgaacgtcatcttgctggctgaaattaagaacgtcaggatctacatcgagacggcaactgccgtggtgatatcttacgtgtcactacttaaaatcagctggagctacatctggctcgttctcttccccattgtggcgatcggcttcatcgttgctctgtgcaaggagctcagtcacgaggacgaggccggtggatcacattcacaggagcagagcaatgaaggtgaaggtgaaggcgaagctactacgtcttcatgggaaaaggtagaggggctggaggcagtagcggtggtgccgtactgggcgcttctcatcatgggcctcttgcatcctgacaagttcgccgtctcccagttcctcctcttcttcagtttcatgctgggggcactgaccatgatgatgactcggctggtggagacggggcgggccattgcccaccgcggcatcgtgccggcgtccgagctgctttggaaagcctcgctcgtggtgctgctggtggcggtgcacgcagtggcggcagagctgctgggagagaacgcgttactcctgtgcatgccggaaatcctgccggtgctgctgtggctcagcgttcgccttgacactgctgacgacaggatcaagctggtcctggacagtaatctgctccccgcagcactacctgcagtcctcgccatgctagcgacgggcgagcccctgctctactggtgcagaaaggcgttggtgtcttgtgttgtttcggcgcttcttaccttctacgtttatttcatgctgtgccagtggccgggaggacaacgcaatcgcacgctcacaggtgcctctttgcagcacgcggtcatccacctcaagtcttgggcaaaggttttgctcaaagcggtggttgtgctgctaatatttgtatgctttcgttccaactagttctactgcaagaaccggtggtctcatcat

SEQ ID NO: 162253 - DNA, 305 bp, Zea mays
  Clone ID: MRT4577_79550C.1
gcggccgcccttttttttttttttttttttttttttttttttttttttttttttttttttttttttgggccaaaacagagaatggcttttaacttagttcagtttttacacatacatgcttttcacttattccattcctatgaacaaaaatttagggcgggccctactgggcatcaattacatatgctttatccaactttttttttatcgacaaaggagccgaaaaatttaacggggagaacatgtcgtcatttttggatttgggagcaggcttgaacttttaggggccagccttggtcccccaa

SEQ ID NO: 162254 - DNA, 183 bp, Zea mays
  Clone ID: MRT4577_79551C.1
caaaaaactaacaagaactaccacaatgctagctaactagcagggaggcccggagcattctgcatacttgttaatcaaaatgcagatatgtagttcaatgcaatatgcacacatttgtccacatttgaagagttacaaattttaacgggatgcaatctttgcacaagtttcggttgctgaaag

SEQ ID NO: 162255 - DNA, 232 bp, Zea mays
  unsure (1)..(232): unsure at all n locations
  Clone ID: MRT4577_79552C.1
tatatttttnctntttttaactttttttccgaggggaagaaagaaaattaagcaaaagtacatgcatacgccagggcgagagcagcaaggtagcatcgcaaccagaagaagacgacgacggggacgtacgattcgaggaccaagcaagcaagcatgcatgtggcagccatgcattttatcgcggtgacggtggtagccccatatacttgatgaacttcatggcccaagcgtt

SEQ ID NO: 162256 - DNA, 234 bp, Zea mays
  Clone ID: MRT4577_79553C.1
attcggctcgagatcgaatgttgctcccggttattgtgcggaaagacataatggggcccagtccggggtatgtacccagggttgtgccaaggaagggctatggcctgacagactggattggaaaatatatttaagcagttgatgtatgaaactttggactacgatcaaaagttatggactagtgcctgctggaaatgaatcgaattctattggtactgtcatcttgaatgagaa

SEQ ID NO: 162257 - DNA, 550 bp, Zea mays
  Clone ID: MRT4577_79554C.1
ttttttttttttttttttttttttttttttttttttttttttttttttttttttttttttttttttttttttttttttttttttttttttttttttttttttttttttttttgggcccctccccgggaacccccaacaaaaggggggtagcccccccccgggggggccattttagggggcggcccttggaccccccccaccaaaaaaaaatggggccaaccctggggggcggaaaacgggtcaccccttaaaaaccacccaaaaaaaaaaggaaaaaccgggggaaacccccccgggacaccttttatttggccaaattttagggcccggaaaaaggggttccaagaaaaaaaggggggtgcttcccccccaaaaaaaaggggcatttaccaccaaacgggcccgggggggggctctttggaatccccggggggtaaaccaaaatttccgccaaaacaaaaaaacggtggtttaaaacaaaaacccgggggggttttaattggaagggggcctttttaaccttaaaaaggggggcgggaaacctttcaat

SEQ ID NO: 162258 - DNA, 425 bp, Zea mays
  Clone ID: MRT4577_79555C.1
aggccggccgggatctgtttcacaagcggcgacgacgatgccgacgtcgagcccaccagactttcgtccaaagccgtgctcatcgcctctcgctccgctgtactttccgacattcaaccatgacctccccgctgtgcgccgattcgaccatcactgctgttctcaaatcccctaacgcggtcttccctctactcaccctgcttggagcaacaactcaggctttgatgtcaatggatctatgaaaagcattgttcttggactctttactgcctagaattaaaatgaacggacctactttgactggaaatgacatttgactgcaaacatcctcaatttaggcagaattattggtgtactctgcgatcgtgttcaaaggaacagatcctgcattgtgcacaataactacctccaatgtggtacaaaat

SEQ ID NO: 162259 - DNA, 597 bp, Zea mays
  Clone ID: MRT4577_79556C.1
caacccaaagggaaactaaaacgggcctttttgcttggccacaactggtccaattggacccagggcccaaaacaatagaccaaacaaaaccttttatttaaattattttaattcccaaccagttagttagggggcccccaaaagggcaaccccccttgggagggaaaggacggccgggcaaaagggaaatgctgtgggggatccccccccggggaactcccggttggaaaaagggtttgagcatttcgaacggaacaacccctgttccgaacgggttcctgacctccgggtggtggtggcactcgaaaaaaaatccctgaatctctttaatccggccgccaaatttttaaaacgccgccttaaccaggggctcctccagccaaaagggttccgccaactttccaatgtactcctggtggggcaagggcaacaaaaggatgcccagcgtcgtaatcaccctgagggcctgcatttgcgtgggaagaatgtccagaagggtcgtctccggttgtttaagaaactttttaattttttggtccgggcccgcctcctcctcaaggggaatgcttttccggatgggggccggccggttcggaa

SEQ ID NO: 162260 - DNA, 686 bp, Zea mays
  Clone ID: MRT4577_79558C.1
attgggacctcgagccggccggccggggatttagcagtaagtaactgcatgcagctgaggccatgcaggaggaagcaacaatgcaagtcctcctcctcctgttgctcccgttggttctcccggcggtcatcctgatcgtccggcgtgcaacgccggcgacgaaggcatgcctggccaatctcaagttcgttctagcaggtaataagccaccggacatgttggtcacggactgtgccgccgcgtatggccttcttgtgcggggcaggaggacggccgccggcggcggcggcggctccttctccaaccgcctttcatccatgtcacccagcgccgtcctctcgggccgccgctaccataacatcacctcggcgccctacggccagctgtggcgcgccctccgccacaacctcgcctcgggagtcctccacccgacgcacctgcacggcggctacgcagccgcgcggcgccacgcgctacgcggcctcgtcgccgacctcagggaccagcagctcgccaacggcgtggtgctcgccgcggagagcatccgcggcgcggtgttcggcctcgtctccgccatgtgcttcggcgccgccgacgcggtcgtggtccgcgccatggccgacgtccagacggagctcgtcctgtccctgcccgcggcgcgcgcgttcgtgtccgggccgttcccg

SEQ ID NO: 162261 - DNA, 1326 bp, Zea mays
  Clone ID: MRT4577_79559C.1
attcggctcgaggcaagatggaatcacggtttttacaactcgctttgttttttaggttccaacatttccgtccaaattgttcttcttctgcgaagtggagccaaagagtggcggagagacgccggttgtaccgagccattatgtctacaagaggatgaaggagaaattccccggatttgtggagaaactggagaaggacatgattgtatatacaagggttttaggagagggcgataacccgtcctcgtcaatcggtcgtggatggcaatcgacatttctcactaaagataaagctgttgccgaggaaagggccgcaaagctcgggataaagctagaatggaccgacgacggcgtgaagacggtcatgggccccatccccgcggtgaagtgggacgagagccgaggacgggtgttcaccgccaacgactcgccgcccgatcagaagatccccttccaccacgagatggctcaggttccaacatttccgtccaaattgttcttcttctgcgaagtggagccaaagagtggcggagagacgccggttgtaccgagccattatgtctacaagaggatgaaggagaaattccctggattcgtggagaaactggagaaggacatgattgtatatacaagggttttaggagagggcgataacccgtcctcgtcaatcggtcgtggatggcaatcgacatttctcactaaagataaagttgttgctgaggaaagggccgcaaagctcgggataaagctagaatggaccgacgacagcgtgaagacggtcatgggccccatccccgcggtgaagtgggacgagagccgagggcggaagatctggttcaacagcattgtcgccgcctacattgggtggaaggacgcccggaacaaccccatgaaggcggtgaccttcggcgacggctcacccctgcctgctgacgtcatcgacgcgtgcggccaggtcctagaggaggagtctgtggccgtgccatggcagcacggcgacatcctccttatcgacaattgggccgtcctgcactctcggcgctcgttcgagccaccgcgtcgcatcctcgcctcgatctgtaaatgatgtgtgtagatgcgctgcgggtttgctgctccgacgggcgacgaaggcctgaaactcacacgttggaaagagcggtgttttagaatattagaggtgtgcgtgcgggcgaaataattggtatttcgccgctcaaaacattgtctcctggttataattaccattgtatctatgagttatgtatctatgagttatgggtccatttgagtctacaaaatgtggcttgaccacaatctagagga

SEQ ID NO: 162262 - DNA, 111 bp, Zea mays
  Clone ID: MRT4577_7955C.1
gggtctagagccggagctgcaaaaaatgactctgaagtgcccagcaaaatagttcagctagtagtaaaagagaagagctactggctttacctattttgctgggtgctgcgc

SEQ ID NO: 162263 - DNA, 581 bp, Zea mays
  unsure (1)..(581): unsure at all n locations
  Clone ID: MRT4577_79560C.1
cgtccgnaaaccgttctctctaaaaaaaacctacnctttttcctttgtcggccttcacaaacaactagttagcgatacgtcttgttgcctcagtcatgacccgggtctacgtgtacacggcgggtttcgtggcctttgttgccgtcaccgccatgataatcgcctccgtctccgagccccattgggtttcgtactcggtgacaacgaccaaggcgagacgttggagaagtatattgggctgcacaagagctgctccagcctggacgaccctcactgccgcgatttcccgtctacggagctgtgtcagtatggcgagcggtacttttgctcctgtggaggacggtgggcttcatggcctcgtttgtcattgttctgtgtctgggcagtctgattgcttttgcgatcgtcatgggtggcggaaagtataggcgcgagacgggctggccgtttgtcgctgctcttctgacgcttgtctctgttgtcgagtttatcattatctccattgtggcatacttgtacgaccatgacgatcagtttaccgttccgggatggaacctggntgtttcgtggtatcttggcac

SEQ ID NO: 162264 - DNA, 1054 bp, Zea mays
  Clone ID: MRT4577_79561C.1
gcctcccctgcactctggcaccataagagcagcagcggggtaactgaaattcaggagacaacgcagtggccacgacatgtacatctgcaacgtgggcttgctttttaagcctagtacccatttttcaattcaaaattagattgatcttttttttcacgtagagctcagtttgatgaccaagctacaatacagcacgcacgctttgattttttaggttccaacgtttccgtccaaactgttcttcttctgtgaagtggagccaaagagtggcggggagacaccgatcgtactgagccattacgtctacaagaggatgcaggaagaattccccgaattcgtggagaaactggagaaggaggggctggtatatacaagggttctgggggagggcgatgacccgtcttcgccaatcggtggatggcaatcgacatttctcactaaagataaagctgttgccgaggaaagggccgcaaagctcgggataaagctagaatggaccgacgacggcgtgaagacggtcatgggccccatccccgcggtgaagtgggacgagagccgaggacggaagatctggttcaacagcattgtcgccgcctacattgggtggaaggacgcccggaacgaccccacgaaggcggtgaccttcggcgatggctcacccctgcctgctgacgtcatcgacgcgtgcggccaggtcctagaggaggagtccgtggccgtgccatggcagcacggcgacatcctccttatcgacaattgggccgtcctgcactcccggcgctcgttcgagccaccgcgtcgcatcctcgcctcgatctgtaaatgatgtgtgtagatgcgctgcgggtttgctgctccgacgggcgacgaaggcctgaaactcacacgttggaaagagcggtgttttagaatattagaggtgtgcgtgcgggcgaaataattggtatttcgccgctcaaaacattgtctcctggttataattaccattgtatctatgagttatgtatctatgagttatgggtccatttgagtctacaaaatgtggcttgatggc

SEQ ID NO: 162265 - DNA, 537 bp, Zea mays
  Clone ID: MRT4577_79562C.1
cggcgtggcgcattagagctgaggattttcacattgagctgctaatagcaattctttccaccacctttatgtagctatttttttcttgttctgtccggtgttttggaggaaaaaaaaaaaaaaaaaaaaaaaaaaaaaaaaaaaaaaaaaaaaaaaaaaaaaaaaaaaaaaaaaaaaaaaaaaaggggggacgaaaaaaaaaaaacgcaagcttacttaaaagaacaaaaaaaaaaaatgggctgtcttataaagggaacaaaaattcatttaccgtggccgtaaaaaaaacaacagtggtcattggggaaaaccctaatttaactccaaataacctgcttttaaaaaaatttaacctttgtaaaaactggggtaataccaaaaagatccgtaagaatcaaaattcccataactaagcagctttaaaaacaaaaaggcaccctccatggacattggcaaaaaccttgaaaggtgtaatgaaaacgggcaccgtcactgttacacttcataaagccctatcgcctggtcatttcccta

SEQ ID NO: 162266 - DNA, 190 bp, Zea mays
  Clone ID: MRT4577_79563C.1
agtttgttgaatgactaacacatttacaactgccacctgggcggacaggccatgagtccctttctactggttccaattgtgtaaaacggggtcttgcaaggccttgtaccaggttttggttggaacaaccaacatatgcccacaagtaaacactgcggctccagaccaaggaaccccgaacttggtatat

SEQ ID NO: 162267 - DNA, 957 bp, Zea mays
  Clone ID: MRT4577_79564C.1
gggttccatacagtacgtgtgcgtgccgtgccaagcttctccctcacctacctaaatacaatccacttcctttcttctttcatctgcatgcacacttcctctctctctctctctctctctctctctctctctctctctctctctccttcctgggagccgtgttaattgctctcttgttgtggagcagcaggagccgaggaggacggcggcggcggcggcgagaagagatggccgacggcagcagcaactcatcggcgtcggtggccatgggacaggaggtgcaggctttcgttgagaacaagtatggtggaatggtgcctaagaagcctctgatttcaaaggatcaggagcgcgcctattttgattctgcagactgggtccttggcaagcaagctgcaaacagcggcaccgcacgggctgcgactgctatcgaattcttgaagccaaagctaaagaggacgccccatcaccagcttccccctcgcaagccgacctgtgcgtccagctgagctcaagacagtgcgaaaatccaaagggccaggcttacaaaagctccctggctgggagagacgatgaagagcgttatcaagttttttttagttggttgcattggttaggaaggcaaattcaggattgatgagccctgcatttggctttgttcgcagcactcgctgaattattaatttaagcatgtgggggacatagataaaactagactcctgctattatatgcttaattgtggaagtggtagatgacacccatctgtttcaatgtatctttggtcggcagatgaaatgtatcctctctatctacttggcttctccctttctttactagacctcatatataatattcaccgaaaagagaatgaacgaatggatattccaatttgggatgaaaatgctaaatcctttaaaaggaacttttttttagaaaaaaaaaaaaaaaaaggccct

SEQ ID NO: 162268 - DNA, 264 bp, Zea mays
  Clone ID: MRT4577_79565C.1
tcgagcggccgtccttttttttttttttttaggcacgcaacctacacaacttagattaaaaaacaaaacaatagaacaaaatggaaggcactcaaccttggtgctcgtgcgagatcttgcccaaagtttaaatcacaatgtacataccagttcagatgggacattgaattcacctgggggaaggaaaagctaacaaaaaccttgttatagcttaaatagatcagaaagagctgctctaaaaacaaaggtgcttcccgtcaaaag

SEQ ID NO: 162269 - DNA, 603 bp, Zea mays
  Clone ID: MRT4577_79566C.1
aattcggcacgaggcagtagtcatatgcttgtctcaaagattaagccatgcatgtgcaagtatgaactaattcgaactgtgaaactgcgaatggctcattaaatcagttatagtttgtttgatggtacgtgctactcggataaccgtagtaattctagagctaatacgtgcaacaaaccccgacttccgggaggggcgcatttattagataaaaggctgacgcgggctctgcccgccgatccgatgattcatgataacttgacggatcgcacggccttcgtgccggcgacgcatcattcaaatttctgccctatcaactttcgatggtaggataggggcctaccatggtggtgacgggtgacggagaagtcggtctctgcagcatcgcgcgtgaaaaaaaatcagccaattccacgagcattgatgttgtcatgacttcaaaagaggagagaccatgctaagaataatgcattatgacatttgtcaggcttacatatcgactgtttgatatggatagatgtataggtttatgaccaatccagttcaaagcaattggagtatagaagaaataaggagaaacaggaaagctctgtacatcttgca

SEQ ID NO: 162270 - DNA, 1729 bp, Zea mays
  unsure (1)..(1729): unsure at all n locations
  Clone ID: MRT4577_79567C.1
aattcggcacgagggccagtagtcatatgcttgtctcaaagattaagccatgcatgtgcaagtatgaactaattcgaactgtgaaactgcgaatggctcattaaatcagttatagtttgtttgatggtacgtgctactcggataaccgtagtaattctagagctaatacgtgcaacaaaccccgacttccgggaggggcgcatttattagataaaaggctgacgcgggctctgcccgccgatccgatgattcatgataacttgacggatcgcacggccttcgtgccggcgacgcatcattcaaatttctgccctatcaactttcgatggtaggataggggcctaccatggtggtgacgggtgacggagaattagggttcgattccggagagggagcctgagaaacggctaccacatccaaggaaggcagcaggcgcgcaaattacccaatcctgacacggnggaggtagtgacaataaataacaataccgggcgcgttagtgtctggtaattggaatgagtacaatctaaatcccttaacgaggacccccaccgccccaccgtccctcgtcatgcgcatggccgccgaccgccaagccgagctccaccgcctctcgcagcaccgngccgtctctgactttccgcatcgcaacagaatccatgcgctgctccggggtcggtttctgcgcaacagcggtttaccagaggagaggaggcccccatctgtggccgcaagggagcttggccagctgcggcaaaggcatcctgtctctggtttgagagaagagttccgcttcagattggagaatcttgtccgtggtcaagcagatagccaagtggatgcttcttcagttcacgatgttgagttatctacaaatgatcgttctgaattaaggcctcctgaaactactcaggagagacatgagcggacaagtgagattgtcagtcttcaacaaatcgacagtacggcaatgacatcaggatttgaaagtggcagccctaacattgctgaagtcttctgcgggtctcatagccaagcagaaagtcaggatgatttggaacatgagagaagagactggcaacgattttcccatgctgtgattggagaggaatctgaaagaacttggcgtgaaaatgcagacaacatgtcatctcatgaggggacagcagttgaagatgataataacgatcatcttccagaagcaaatgaagagtcaaccagtgttgatcaccttcctgaaggacttgaagggtctatcactgatggtagtcttcctgaagcgcaagaagatcagcatgacagtgatcatcttcctgcagtgcttgaagagctgcatggaaataatcactttcaggaatcacatggggaatggagaagagatgatcggcctgttgaagtctatgatgagtggcagagtgatgatcatctccctgaagtaaatgaagagtggcataatgatgatgagtctaatgatactgcagacaattggcatgataataattctgaccaaccaattgatcatgatgctgctcttattagaagagctaatactttcatccctggagatgatgataatgtgtacagcacagaattgagggaacttctaagcagaaggagcgtttctaatcttcttcacagtgcttttcgtgaaaacttggatcggcttatcccgtcatatgtggaacggcaaggtcgtggtcctctcccttgggatctggaaggaacaacc

SEQ ID NO: 162271 - DNA, 373 bp, Zea mays
  unsure (1)..(373): unsure at all n locations
  Clone ID: MRT4577_79568C.1
gacccacgcggccgcaggatcctttacgccatccacaatcgagtgaccgttctttcttccaactacgcttttnnnggacccgttcgttccaccacaccccaccgacggtcgcagatatgtcgccgtcggagccgacgcgggaggagagcgtgtacatggccaagctggcagagcaggcggagcggtacgaggagatggtcgagtttatggagcgcgtcgcgcgctccgtcggcggcgccggcggaggggaggagctatccgtggaggagcggaaactggtgttcgttgcctacaagaacgtgatgggcgcaagaaagggcttgtggcggatcatatcctgcatcgagcagaaagaggagggacgtgggaacga

SEQ ID NO: 162272 - DNA, 1671 bp, Zea mays
  Clone ID: MRT4577_79569C.1
acttaggtggtacactcgaggctcttccgggttctgggggctgtgttgtaagggtccgctctttctctccctttaatacaaagattaactctcctatgtgtttgaggaaaaaaaaaaacatgatgttccttccaaagttttgcattaatcggcaacctaactgcttttgttctctgtaactgttttagtgggttgcaatgaggcttatacatgggcagggacatcagagagctaataatgaaacagaagaggcaaggaagaagataagaaaattcaaggaatcagcttggaaatgtgtttatttcctgtctggagagcttttatctttgtctgtcacatataatgagccttggttcaccaataccagatatttttgggtaggaccaggagaacaggtctggcctgatcaaaagataaaattgaaacttaaggctgtatatatgtatgctgctggattctacacatattccatatttgcacttatgttttgggaaacaaggcgttcagactttggagtgtcaatgtcacatcatgttgctactgttgttctgattgttctatcttacgtgttcagatttgctagagttggctctatagtattggcaattcatgatgcaagtgacgttttcctggaagtagggaagatgtccaagtacagccattgtgattggcttgccaatgtttcgtttctgttttttgttatttcgtgggttcttctccgcctcacatattttccgttctggattctgagaagtacaagctatgaggtcttgttgactttggacaaaaagaagcacaattttgatggtcctatatactattatgtgttcaattcccttctattttcactacttgttctccacatatattggtgggttttaatatatcggatgcttgtgagacaaatcaagacaagaaatgttggagatgatgttcgatctgattctgaaggagaagacgaccatgaagattgattgggggcatcatcttactttctgtgttataacggtgcttatacattcttttacttgattccaacattgttcctcacgagattcaccgaagccgggctacgggttacctgtgtcttggctgccaatttctgtgcattagaaacaacgctgcaatgcattagaaaaaagctggatgtcgaatataacattcttttcagtgttcacacaaagtgcagcggtaaatgtagcgccaatttagtattccggaaacaaaaggactggttgtaaatcaaagcctttctgccgacataccatgtacattctgtttgccaggatgacaccgcttggagttttgtgaacggtagcgctggccgccggtgaaacgcttctcttgaaaaaaaaaaaaaaaaaaaaaaaaaaaaaaaaaaagaaaaaaaaaaaggggctctcataatctgagaggcaagcgctgatccacacaccagcagtgctcctcaactgctcgagagatttgctgcccagagccttcgaatcgggtgtcaatcccgtcgatctttctgcccgccgcctccacagcactccagaagtggccttcaattcaggctgggccgcggaagcggagatggggctcggagaggccgcagggcggctcctggcggccgcggactgggagctccggaaccagactgacccgatgacaatcaaagcctttctgcct

SEQ ID NO: 162273 - DNA, 392 bp, Zea mays
  Clone ID: MRT4577_7956C.1
acgcgggaggcacgcgtacaaagcgcggaatacggctcgaggtgtttacaaggaactgccctaaacagggggggggatacacacacaaggggagaaagaacaatcgatctcacaaacttggggcacaaggccggaaaacttggcggaaccgcgacaaatatatggggaaaagagcatatgagcccagaagcctcatagaaagagaaggccagcgccgggaacagctggagccagacatgaagcaaagcaggggcatgggggaaaaaatagctgcaggaggaggggaaaaaaggacaccagcaggaacaggaagggaggggaacattagaggaacaaggcaacacaaggaggaaggaccgaaggagaagggagaaaggcaagcgacccaagcc

SEQ ID NO: 162274 - DNA, 333 bp, Zea mays
  Clone ID: MRT4577_79570C.1
tagtgagtcgtattagcctcctacatgacggtgagtgctttgactctcgtcctcgtcatcctttggggtacaagagacgaggggaagaacccttgaagagatacagtggcccttccagtgagctccggcattcatatgtacatgcaaatagcgtggcaaatcctccaggatcccaataaaagatatagtgaaatatagcacaagctatttcatttagcattttttatagtttaaatggaatttcgctgccgattctgcatgagaacatgtaaataaggagatttcacgaacatgaacactcaaatacatgtacaggcctgtaaaagaagatgt

SEQ ID NO: 162275 - DNA, 1802 bp, Zea mays
  Clone ID: MRT4577_79571C.1
cctcgacccgaccgggaaaatcgctttccggcacgaggggaacagaggcaagcgctgtgccacacagcgggagtcctccccgactccccgagagatttgctgcccagagccttcgaatcgggttcaatcccgtcgatctttctgcccgccgccgccacgggactccagaagttgccttcgattcggccggggccgtggaagcggggatggggctcggagaggcggcggggcggctcctggcggccgtggactgggagcgcgaggcctaccctgcgtacgacgacttcctcgcgctccccgccttcgttctcttcttccctaccgtccgcttcctcctcgaccgcttcgtcttcgagtgggttgcaatgaggcttatacatgggcagggacatcagagagctaataatgaaacagaagaggcaaggaagaagataagaaaattcaaggaatcagcttggaaatgtgtttatttcctgtctggagagcttttatctttgtctgttacatataacgagccttggttcaccaataccagatatttttgggtaggaccaggagaacaggtctggcctgaccaaaagataaaattgaaacttaaggctgtatatatgtatgctgctggattctacacatattccatatttgcacttatgttttgggaaacaaggcgttcagactttggagtgtcaatgtcacatcatgttgctactgtcgtcctgattgttctatcttacgtgttcagatttgctagagttggctctatagtattggcaattcatgatgcaagtgatgtttttctggaagtagggaagatgtccaagtacagtcattgtgattggcttgccaatgtttcgtttctgttttttgttatttcatgggttcttctccgtctcacttattttccattctggattctgagaagtacaaggtacccacgcgtccgaagaagcacaattttgatggtcctatatactattatgtgttcaattcccttctattttcactacttgttctccacatatattggtgggtcttaatatatcggatgcttctgagacaaatcaagacaagaaatgttggagatgatgttcgatctgattctgaaggagaagacgaccatgaagactgattggcgtcaccatcttagtttgcatattatgtcggtgctagaagcatcacccccaataccgtccctgagcttatacattctttggctggattccaagaatacgtgcagattatgagaggacgagcatttgttcctcacgagaatcaccgaagccgggctacgatttcttctgtctcgactgctcatttgtgttgtactaagtatgcattagaaacagcgctgcaatgtgttaaaaaagttggatgtcggatataacattcttgtgagtgttcagacaaagtgcagcggtaaatgtagcattccagaaaaaggactggctgtaaactatatggcctttctttcgacaaaccattgtaaaaattgtgtatgccaggatagccttgcttgggatttaccacaatcccaatcagaaactgtcccttctgaagcatgtatttcaccattcagtgattcgcctgatgataatttgataaattcatttatccaacaaccgcttggagttttgtgaacggtagcgctggccgccggtgaaacgcttctcttgagctcctgttgttccatagctgcatgctcttttttttaggcattagctagccgaccgtgtgttttgtattgttttaccctgtagattatagtaaaaggtgagatagtaagactacctgtctcccgctat

SEQ ID NO: 162276 - DNA, 1290 bp, Zea mays
  Clone ID: MRT4577_79572C.1
gggaaaagggtaaattcgctttcacagaggcaagcgctgcgttgccacacagcgggaatcctgcccagagccgccgaatcgggtccaatcccgtcgacctttcaggccgccgccgccacgggactccatccagaaattaccttcgattcggccggggccgtggcccgtgggagcggggatggggctcggtgaggcggcggggcggctcctggcggccgtggactgggagcgagaggcctacccggcgtacgacgacttcctcgcgctccccgctttcgtcctcttcttccccaccgtccgctacctcctcgaccgcttcgtcttcgagtgggttgcaaggaggcttataaatagaaatggacatcagagcgctaataatgaaacagaagaaggaaggaagaagataagaaaattcaaggaatcagcttggaaatgtgtttatttcctgtctggagagcttttagctttgtcggttacatataacgagccttggttcaccaataccagatatttttgggtaggaccaggagaacaggtctggcctgatcaaaagataaaattgaaacttaaggctgtatatatgtatgctgctggattctacacatattccatatttgcacttatgttttgggaaacaaggcgttcagactttggagtgtcaatgtcacatcatgttgctactgtcgtcctgattgttctctcttacgtgttcagatttgctagagttggctctatagtattggcaattcatgatgcaagtgatgtttttctggaagtagggaagatgtccaagtacagtcattgtgattggcttgccaatgtttcgtttctgttttttgttatttcatgggttcttctccgcctcacttattttccattctggattctgagaagtacaagctatgaggtcttgttgactttggacaaaaagaagcacaattttgatggtcctatatactattatgtgttcaattcccttctattttcactacttgttctccacatatattggtgggtcttaatatatcggatgcttctgagacaaatcaagacaagaaatgttggagatgatgttcgatctgattctgaaggagaagacgaccatgaagactgattggcgtcaccatcttagtttgcatattatgtcggtgctagaagcatcacccccaataccgtccctgagcttatacattctttggctggattccaagaatacgtgcagattatgagaggacgagcatttgtttcctcacgagattcaccaaagccgggctatgatttcttctgtct

SEQ ID NO: 162277 - DNA, 948 bp, Zea mays
  unsure (1)..(948): unsure at all n locations
  Clone ID: MRT4577_79573C.1
cccggggtcaatgtcacattangttgctactgttgttctgattgttctatcttacgtgttcagatttgctagagttggctctatagtattggcaattcatgatgcaagtgacgttttcctggaagtagggaagatgtccaagtacagccattgtgattggcttgccaatgtttcgtttctgttttttgttatttcatgggttcttctccgtctcacatattttccgttctggattctgagaagtacaagctatgaggtcttgttgactttggacaaaaagaagcacaactttgatggtcctatatactattatgtgttcaattcccttctattttcactacttgttctccacatatattggtgggttttaatatatcggatgcttgtgagacaaatcaagacaagaaatgttggagatgatgttcgatctgattctgaaggagaagacgaccatgaagattgattgggggcatcatcttactttgtgtgttataacggtgcttatacattcttttgctggattccaacagattatgagaggacgagcattgttcctcacgagattcaccgaagccgggctatgggttagttgtgtcttggctgccaatttgtgctgtactaagtatgcattagaaacaacgctgcaatgcattagaaaaaaagctggaactggatgtcgaatataacattcttttcagtgttcacacaaagtgcagcggtaaatgtagcaccaatttaggggccgttcgtctctttcggaatggaggcatggaacaattcctagccggttaagttttgatcagctgaaatgattcctgatctattcctggacaaacgaacaaggccttagcattccggaaacaaaaggaccggttgtaaatcaaagcctttctgccgacataccatgtacattatgtttgccaggataaaaaaaaatgcagtattgtg

SEQ ID NO: 162278 - DNA, 338 bp, Zea mays
  unsure (1)..(338): unsure at all n locations
  Clone ID: MRT4577_79574C.1
tctttcaggcaatggcgcgaaccaatcgggaggtgcacggatcggattcggggagcactcaaacccgcagatccttaacttgctccgatcaaaccatggtgaccgccttcaagtgcttttgaacagcgaccgcagaaaggtgtgggttcaggngccaacccatccatcaacgttctttggcaatggtggtgatcttcttcatgtaaaatagacaggcactgcggctaggagattaggtaaattagaattgcttctatttattagctaccaacggccgggggttctaaacagacaaccaggttaattagcaattgcttctttttttgtgaaaagattgg

SEQ ID NO: 162279 - DNA, 617 bp, Zea mays
  Clone ID: MRT4577_79575C.1
ggaccgagcgatcgacatgcatgtgacgctagtggtcgtgtttacgtggacatgtatgtattctgacgaacgcgcggcgtacgacgttcgatcagcacgcgtagagctgggccagctccctcatggcgtcgtcgtcgtcgtggaggtcgacggcgttgtccagcatccacagcaggtggtcgaacagcaccacctcgcagttgacggcaacgggctccttgtgccgctcgtcgtcgtcgatgagcgcggcgatcagcgggtggctgaggtgctccgcgctgatcacgtaccgccgccgcgagctgcccacgagcgccgccgccgccgccgccgcgccgccgcccacggacgacgcggcagcgtcgtcggcatcggcggctgcggcgcccgcgtcccgccgggtggacatggacatgggcatggaccggaggctgctgtacctgtacgacggcgacgcgctcggcggccgccctacccgtgatgacaggctcttgcacttgcgcagcaccacgttcttgaacctgttcatcgatctgacgtactattgcagagccagcacagcacctagcttcaccggcgcggcgaccgaaacgcctagctaatagctacagcgagag

SEQ ID NO: 162280 - DNA, 539 bp, Zea mays
  Clone ID: MRT4577_79576C.1
gccggccgggccgggacaaggagacatacactctctgctagcaccatcttgaagcacgagctagagcccgacccgatccgtgccgtgtgtgatgaaaaaaatggtacactactttacgttgccatggtgagccaatggatgaacatcagcccggcgtatgcgaggacgaagggccagtactgcagtggctcacgcacccccggacccggatcagcgtggacaaggtcgccatccaggccgagaacgcaaagtaccacacgttgcagaccatcaatgctaatgcgatcatcatcaacatggagacgcccgtgacctacagcccgctcatcttgtgctacctctactacctgacgggctacctcagcgccgagatcccgttgctgcggagcgtcgaggtcgtgctcgcccacgagtacatcctcgcagggttcattccgctgaccgggcacgctatctacatgaacatgcacggccacgaggacgagctcgtcgcctgcatctctcgtcggcatcctcattgtctgcctcaccatgaactg

SEQ ID NO: 162281 - DNA, 505 bp, Zea mays
  Clone ID: MRT4577_79577C.1
accaaaaaagctaaactgggccaaagagacggggggagcatgacgggtgatcacacccgaacaaccatcccaaggttttacaggcccaaaactacccccgacactcatgcgggagctaccgacaaatctagagctaccgacaatattacgaggggaacaaaacccaggcaagaggggaatctataggcggaattggggggggatccccccagcgacaagggaggcagcctactttttggccttcctggccacgtccttcctggccggagggggagaaacagccttttttgggggtgccacctttttaggagccgccggtgccttcccctttttgggaggagcaacccccttcttggctgccttggggggggaggccctggcggagggcttggcgaccctgggagggcccccccggggcttgggcaacccggcggcaggagcaacaggcttggccttggccttggccttggccttggccttgggcttgggcgacgccgccttgggc

SEQ ID NO: 162282 - DNA, 228 bp, Zea mays
  Clone ID: MRT4577_79578C.1
ggacgaccgacgcgtccgacaaggcatatcagcaaagcggcagggcgtttagaggatcgtcgaacagaacagcatgaaggtggtcagcgttctcgtcatgtgcctggctctgtcagctgccatcgcctctgcaatgcagatgccctgcccctgcgcggtgctgcagggcttgtacggcgctggcgcctgcctgactacaatgatgggcgccggcagactgtaccccta

SEQ ID NO: 162283 - DNA, 258 bp, Zea mays
  Clone ID: MRT4577_79579C.1
agcacctacggccaggtcctcgagtccaagatcatccgggatcgggaggcgcagaggtcccgcggcttcagctacgccaccttctacaccaaggaagcgatgcggaacgccatcaagggcatgaacgggcaggagctaagacggccgcaacatacaccgacaacgaggcccagtcccatgtacaccgcggaaaccgcggcggtggccgagacccggatgtccgataaagcaccggctaccgcgagccgcaggctcccc

SEQ ID NO: 162284 - DNA, 1879 bp, Zea mays
  Clone ID: MRT4577_7957C.1
ccggccgggatgttttcctctgcctccttccttctgcaggcttaaactagttgctggatcgtcatcgaagtaaaatcatcatgtctcaactccaaactccaccaggcgtcaccatcacctgtgcggtcgaaactcctcatctggccattttgactcccgatgccctcaagttcttggccaccttacatcgctactttgaacctactcgccgagccctccttcaacgccgtcaactcgagcaagcacgcttggatgcaggtggtctacccaacttccattcggaaaccaaatggatcagagaaaaccttgcctggcaagctgccagcccagcccctggtttgagagatcgtcgagtcgagattacaggccccgtagaccgcaagatggtcatcaacgcgctcaactcgggcgctgctactttcatggctgactttgaagactcgcatgcacctacttggcttaataaccttgatggccagatcaatatgcgagacgccgttcgaagacaaatctccttcaaagctccgaatgggaaggattacaagctcaacgatcgtatcgccactttgatcgtgcgagctcggggttggcacttggatgaacctcatcttttggttgacgggcaacccatcagcggtggtatttttgactttgggctgtactttttccacaatgccaaggagtgcattaagaggggattcggtccttacttttatcttcccaaaatggagcactaccttgaggcgagattatggaacgacatcttcaaaatcgctcaagattatattcatatgcccagagggacaatccgcgctacctgcttgattgagacgcttcctgccgcgttccaaatggacgaaataatcttcgagctgaaagagcattcggctggcctcaattgcggtcgctgggactacatcttctcgttcattaaaaaaatgcgccataatcctcaatttgtgcttccggatcgttcggatgtcacaatgacggtccctttcatggacgcctatgtgcgtctcttgatcaagacttgtcattcgaggggcgttgctgctatggggggaatgagcgcgcagattcccatcaaagacaatcccaaagctaacgaggcagccataaacaaggtcaaggctgataagttaagggaggtgaaggctggacatgatgggacctgggtcgctcatcctgctttggtgaaagtagctcttgatattttcaatgagcacatgattgggcccaaccaatatcacgtgcgccgctcggaggtacaagtatctgctcttgatttgatcaacacgaacgtacctggcaaaatcacggagcatggtatccgggagaacgtttctgctgcgttacaatattgtgccaactggattactggtgttgggtgcgtgccgattgccaacctgatggaagatgcagctactgcggaaatagcgcgtcttcaaatatggcaatgggtgagacatgggtcgatgacggacgcgcataaaaaaattactgccgagtggattgatcagatcttggaggaagaaagcgcccaagccaagaagacgacggccaaggggttaccagaatccaaggtagatatggcaaagcgctacttgagtgggcaagcacatgcgccagtgccagatgatttcctgaccagtgcgctgatgagcagtttggatgatatggcagcaccgaaccgttcgaaactgtagatgggtaatgtctttgtgggaaaaagaaaacaaaaaaaaagagtgtgttgatgtattaagttattagatagtcgtgtttttttttattacaagtttatgttgttgtgatcagctctgacgttgtagagtgtgcttattagctttttcaattagtaaaattagtcattccg

SEQ ID NO: 162285 - DNA, 514 bp, Zea mays
  Clone ID: MRT4577_79580C.1
agaatattaatatggaggacttacccaaccctaactttttcgatttgaagtactgtcccaacaagttgggtactgtcaactgctcctcctaggtcaccgataaggacgttaccttcaagaacattaccggtttccttctcatcctggagggcgggagtctgttttgcactgtctaggtttccaagcaccggtgttaccatggttgactttaacgttgagtttattggcactattaactatactcatggttttatgcacgaacttcaagggcagttcctagggttgtcctaaggagcttgcatgcttttaaacctttcgtttactgacccatttctttagttataaatttttattcgtctcttgcattgaccctttacatgctatctattggtttccgcacaactgttaaatgactacattcgacagttttatttatgttaactgtgtaataccctctatttgagggtataaaatctttatttttaaataccaccaaatatcaggtgttacctta

SEQ ID NO: 162286 - DNA, 523 bp, Zea mays
  Clone ID: MRT4577_79581C.1
caccagcctagatcgggtgcattgctttaacccatgagggctagttcatcagcagattcaagtgcacacgaagtagacaaccagatgtgccaaccagttaatctgactctggagcaggttgtcaagcataagctaagaggaggacgaatgttcacatgccgcattgataggtgtgattggtggaagaaacaggttcaaaggagctttagaaccttgttatagtgaaacctatacaggtggaggatctactttaaattgttaagtttgtggtgtgtatttgatggagtgcgtacttgatgaccaatacaagggaaaggttttatccgccctgattgaaggtggtcttttttctgttgggggatcgataaaagataaagttgtcttctgttttacagataacggccgtgcaaaattctgttcggtaacctaaaactgattgtggcatagatacacagttctgaaaacgttcaccaattagctaggggtcttaaatattaactggtcattacaactgaaccacccg

SEQ ID NO: 162287 - DNA, 2586 bp, Zea mays
  Clone ID: MRT4577_79582C.1
attggtacctcgagccggccggctcgctcaagaaagcacacacgtgataaaatcccctctacaaattgcaagcaacttcatattctacgcgaggttgctgtcgcgcgcttcgaccacgtcctactccgtcgcggcacgccaaggagctgcaccttccgcaagctgctggagctggatgtgtccgggctggggctggggtcgcggcccgcggggtagacgcagctcgccgggctcgggagcttcctgacgggcggtagctgccttctggtgctggacggcgtgcgggatcgtggaggcgcggcgcggtgcggcgtgccggagccccccggcatggctgacggcaaggtgagggaggtcatagtggcgtcgaggcgcgaggccttgtgcgccgacatgggctgccgcaacaagatcaagatggagtgcttgaacgaggaggatgcgtggagcctgtttcaagctaatgttggcggcgacatcatccatggccacgctcaaattcctgcacttgctaaacaggtcgctgccgaatgcaagtgcttgcctttggccctcgtcaccgtcggccgcgcaatgtcaaataagcgcacaccagaggagtggtccaacgcactcgacaccctcaaggcatcgctccgctccggcacgcccggcttggacaagagcacgcaggcgctagtgaagttctgctacgacaacctggagagcgacatggtgagggaatgcttcctgacctgtgcgctatggccggaggaccacaacatctccaaggaggagctcgtgcagagctggataggactcggcctgctccccgatctcggcgacatcgaagaggcccacaggttcgggctctcggtgattgccatcatgatggccgcgtgcctgctggagcccggggacaaccaccgctacaacatgttcccgtcagacactcacgtcaggatgcacgatgtcgtgcgcgacgcggcgctccggctcgcgcccgccaagtggctggtccgcgcaggcgctgggctcagggagcccccgcgcgaggaggcgctgtggcggggcgcgcagcgcgtgtccctgatgcacaacaccatcgaggacgtgccggcgaaggtgggtggcgccctagcggacgcgcagccggcgtcgctgatgctccagtgcaacaaggccctgccgaagaggatgctccaggcgatccagcatttcaccaagctcacgtacctggacctcgaggacaccggcattcaggacgccttccccatggagatctgctgtttggtcagcttgaagcacctcaacctatccaagaacaagatcctgtcgctgccgatggagctgggcaacctgagccagctcgagtacttctacctgcgcgacaactactacatccagatcaccataccaccggggctgatctcgcggcttgggaagctgcaggtgctggaggttttcaccgcgagcatcgtctccgtcgcggacaactacgtcgcgccagtcattgacgacctcgagagcagcggcgcgcgcatggcgtcgctcggcatctggctcgacaccacccgcgacgtggagcgcctcgcgcggctagcgccgggcgtgcgcgcccggtcgctgcacctgcgcaagttagaagggacgcgcgccctgccgctgctgtccgcggagcacgcgccggaacttgccggcgtgcaggagagcctgcgggagctggtggtctactcctccgacgtcgaggaggtcacggccgacgcgcacgtgcccatgctggaggtcatcaagtttgggttccttacgaagctgcgcgtcatggcgtggtcccacgccgccgggtccaacctccgcgaggtcgccatgggcgcgtgccacagtctaactcacctgacgtgggtgcagaacctcccctgcctagaatcgctgaacctcagcgggtgcaacgggctgacgagactgctgggtggcgcggaggacagcggcagcgccacggaggaggtgatcgtgttcccgcgtctgaagctgctggccctgctggggctgccgaagctggaggccgtgcgagtcgagggagagtgcgcgttcccggagctgcggcgcctgcagacgagggggtgcccgcggctgaagaggattcctatgcgcccggcgcgcgggcagcaaggtaccgtgcggatcgagtgcgacaagcactggtggaacgctctacagtgggcgggcgaggacgtcaaggcctgcttcgtccctgtgctgtgagtcatttcactaggcggacggagctgcaattttggcgccagttgatatgttcgacgaccacggtccacgggttgcaccacggttcaaggcaagatgagcgatgagattggaaatatctctcgaacagcgaaaaggcggtttgttttggatttcttctaagaacaattcaaattttggcttaattcccgttatgttgagaactggtgacctagttaaaggcgcttttgtcagtgctccggcttcttaaagacacttccggatctaattcctctagctctttggcttttctaaaaaagttgtagccattttataatttgtttagcaaaataacttatttctgtgtct

SEQ ID NO: 162288 - DNA, 226 bp, Zea mays
  Clone ID: MRT4577_79583C.1
tggatgcttctacctcctagactggtaatcatgaccccccaccacgccgctgtgtccccatacacatattccctgtaaaaaagcttgtaaatcctgctccttcatcacacaattgagacattccggatgggaaccaccctgagtatcaccagcttaatatccctgaggacgtatccgttaccccccttacttcagaaggcaacactaccgatgatcttagcactcc

SEQ ID NO: 162289 - DNA, 388 bp, Zea mays
  Clone ID: MRT4577_79584C.1
gattgggtacctcgaggccggccggagaagaaaagtacgctacactcttgtgtgtcccgaccgcgaggagtgcgacgacgacttacatatatataaatatccgcgccgcagctaggtagctagctaggagagcagcctggccgaagtggtgtagcctaggctcctcacatatagcaggagcatgacgagatcgacgaccgatcgatggtgtctctgcagccctcatcagcggggccgctcctggcggaggccgccaccgagaacaagctcccggcgtgggtctccctcgtcggaagcgttgtagcctcctccgccggtaccgcggtcacgagcaagaaacgtaagcgtgacgacagcgggactaggggacacgaagaccaccgagatc

SEQ ID NO: 162290 - DNA, 603 bp, Zea mays
  Clone ID: MRT4577_79585C.1
atacccatcacagaagcggtcgacgctgcaaggtctatccccaacattccagactgagacgccgccgcgtggccccgacgtacgtgagcgatgggaagtcaccagcgcgtccgaggaggaggtcccaggacgcgagctctcattcaagaacagagcacctcgatacggttgctgatcacacgaccgagtgtgagccgaacgaccaccgaacggagttcgtgtgtgagtgatgcaccagagcttcaaagcggacatcttgcttgctagtctccgaggcgacactgcacttgcatcgagcaactagcgtgagttgacagtatacgcgagctcacatgagccagactcactattgagtacgtataggcacagagaccgcgggctgatcgcagagcgctccccaccagaccgagcgatgctgacatggggcagctagtatcaggccacgacggcagacctcgctgccgagcacagctaatgatgctaccacgagccgtgctcactaagaaggtggtcttattacgacgacgaatgaggacccaagagcgtggtgctcctcaaggaactttatcatggtgaactgcgcattcggctcgtcaacaatag

SEQ ID NO: 162291 - DNA, 258 bp, Zea mays
  Clone ID: MRT4577_79586C.1
gcgcatcgtctttgtgcttatgagcatggggatactcccatgcttttggcgcgcaccaactgggaacgtgtaagacgtctcgtggaccaagccatattactcgcgatggagagaagccttcctcgacaatgtcttgttccacatcatccagttctatgtcaaggagttgcctgacaacaccttagacttcttcaccctgtactactgtgttcctcgtcacctacccaagcctgtctacgaatccttctatgtcattct

SEQ ID NO: 162292 - DNA, 385 bp, Zea mays
  unsure (1)..(385): unsure at all n locations
  Clone ID: MRT4577_79587C.1
aaatnttnnncggnnnnggttgcttaacaaaaaaaaaataaaaaaactcctacaaatacaaaaacggggagaaacacctgaatcgccaagggagcacgaacatatcttaggggggggcccgttttaaagaaccaaacttatccaccccgtccatgaaacgtaataaccttcttttggggcaccctaattcaaatcaatggcccgcggttttacaccgtgggacctggaaaaaccctgggtttcccaaaattaaatgcctttaaaaaaaacccccttttccccagttgtgttatttccaaaaagcccccacccattcccctttccaaacatttgcccatcttaattgcaaaatggacccccccctttaccgccccttaaaccccgg

SEQ ID NO: 162293 - DNA, 519 bp, Zea mays
  Clone ID: MRT4577_79588C.1
cggacgcgtgggtactgatcctaattattctatacggtgtagtatttatgcagttcagaggaaatggattggcatagatgtaaacaaaaaatgggttttaaatcctttatttcctccataaatataggatcactccaactgccatgtagctaggttcgtcagaactagttcatgatatataccgatattaattatgctacactttgtaggtatttattcaatgtggtacactacgtaaaatgtggttcaccggtggacgtatctccatgttcgagcgtaaaaacctttaggtttgagcgtaaataccgatccaacatgaaagatgttgaaaacctcttgatgttggcatagatatgtatacaaagtgacataaaaatatgtacgcgattgtatatcgtcactccaccatgaacatgcatccaggtgcgtcccccaccaaacacatgcatgcggtcttatttttatggcagatctgaaaaatatggcaaccattaggcacatgcatgtggtacctatttt

SEQ ID NO: 162294 - DNA, 340 bp, Zea mays
  Clone ID: MRT4577_79589C.1
tctgaatgtgaagcatcaagcatagacctctattatttgcggtggaaatacatggcaaacatggtgcgagttcttctctacacgtgcgtagcactacacgattacaccaaccaagctattagcgtgccatctagtaagcgccgacgacgcctccctgcacgtggagagcaacgggcacagaaaccctggtgccttgcgtggtcgtgaggtgcccaatgttgcggagcatcatctgttggacatcaacccggtgcacacagttgacccgaagggcggtgttgaccacggcgaggaccctgacgtaatcatggacgagcacgtccaacacctgataccccag

SEQ ID NO: 162295 - DNA, 452 bp, Zea mays
  Clone ID: MRT4577_7958C.1
tcgaagatcgcttctcccggcggcagctgctccctccctgctccctccctgcttgctccctccctccctctgtataaatcgtgtcctcggcggcagctgctccctccctgctctcggcgcgcgtcgggctccctgctgccctgctcccttctcccggcgcgcgcggtggccgctactgccatgctggacatgcatgtatctgctcctgctggcgaggagcaggggttgatgacatgcatgcctgtgaattgatgaatgtagtgtatatctgcggtgcatgagaagagaattaagagatgccaacgccgagcgagtcaactgtcaggctaaataatttcttcgacctcgtgcgtggccagtgggcgttaaaaatttatttatttattttccgacctcgtgaattagcgtgctcgggctgggccgggctccttcgtgggccgggctttccgggc

SEQ ID NO: 162296 - DNA, 195 bp, Zea mays
  Clone ID: MRT4577_79590C.1
aaaaaaaaaaaaaaaaaaaaaaatttattttaacaaaggcaaacaaaattaaaagggggcgcctataaaaaaaaaacgctactgacatactagatcctacgatctactttcctaaggtttcgagctttctacttccattttcctggcccttactttacaaccccttgccttgcttaactctgtcgttacccaatt

SEQ ID NO: 162297 - DNA, 515 bp, Zea mays
  Clone ID: MRT4577_79591C.1
gtcctgacgttcgccgccgaggaggcgctttaggacccacacggagcgcacgtagtgccttggagaataagctgaagcatactgggtctaggtagagacggtctgcgcagataagtcggacgactcagcactggcgcgtccagagcgcacgctattcggcttaaaggatccagccgtccatgccgggtctgcctccgggggctccgaggctcacgggggcgcggttcaggaacagggaaaaggtactgatgacctgctgctgacgaatcacgtacaggtatgcgctatctgatgcaagacgtgctgctcgatgctaccgaacgggaagaatgacagcaaggtcgaatagaagcacagcagtggggaacgctctgaacgagatgctgtagctcaggagctggttcagtagcttcttattcaagagctgcaaaacagaaggatctttaccttgggatggatgaagtattctggaggacgcatcgtgtacattgtagttaatgttggtaagaccatgg

SEQ ID NO: 162298 - DNA, 340 bp, Zea mays
  Clone ID: MRT4577_79592C.1
ccacgcgtccgcccttgcgggcggttttttttgctggcctttaggcagtacaagggaggtttcctgtcggaccaggtgagccttagcttctgggggcaggagtaagaatacggtggcaccttgggcggcttcaacattcatagggagtacaccgtccacattgtccttcgtcttggtggcgacctcattgaaccttgcctgcacgcgctccgcatctgagcacacctagtacaagatgatctaacggaagtgatatgctcggctgcatccgatggctgctcactgccgaaagaataattgtcggcacgacgacctgatttgtcaataagcacaatagcgc

SEQ ID NO: 162299 - DNA, 247 bp, Zea mays
  Clone ID: MRT4577_79593C.1
cttcattcggcgtcattactcctctattggggcaccttaattcaattcacttgccctcgttttacaacctcctgacttggaaaacccttgcctttcccaactttattgcctttcaacacattcccctttttccaacttgccttattaccaaaaagcccccaaccaatggcctttccaacaatttccccaccctaattgccaattggaccccccccttaaccgcgcctttaaccccgccggttttgtg

SEQ ID NO: 162300 - DNA, 290 bp, Zea mays
  unsure (1)..(290): unsure at all n locations
  Clone ID: MRT4577_79594C.1
ccacgctttttgggcgcgtggcgttttgcgccggggggggcgtctggttcctgccgcggcgctggcgtcgggtggccgctgcttgttgaggagcgaggaggagtggcgcgccgggcattcccccgtgcngttccgggtgatccggcngaggggctctgtgtttcctgggncnggngngtccaggggggggggggggggcggggnttttanctgtgctgggtgtggggctccgctgtncnngtcctccgcnggtgtggttgtggttgnggntggcctgcattgtttggggg

SEQ ID NO: 162301 - DNA, 396 bp, Zea mays
  unsure (1)..(396): unsure at all n locations
  Clone ID: MRT4577_79595C.1
gatctacaagaaggggagtttaacacgacaacaagaaccaggggcattgcccccaagaggaaaccaccggggaaggctaaactcggtcaaggcccgagaccataaaacagcaaaagggcgcgggcggtggcgatcaaaacccgggcccgggggtcaacccgggatatgcggcccgtgcccaggngggggaaccaattttcccgtaaagggaggcgaataaaaccctggcgaactcaagcgaaaagtggttcccgggaaaaaaatgttgccctctcacatctccaacaaaatacaggccgaaagcacaagggctaaaccgggggggccccaaggggtgagctaactacagaaaatggggtgggggtaacggccgcttttcaaggggaaaaaccggac

SEQ ID NO: 162302 - DNA, 210 bp, Zea mays
  Clone ID: MRT4577_79596C.1
ggccgaacaacaattatttaggggatgggcaaaggaatttcaaattcaacaatggaagggccaaaaatagggcgcatgaagctcaccaaaacaggctttttataaaagttcaacccggcaaagcccttaaaaaaaactaagaccccaacggggggggccgaaactttggggggctttggcgtattatccagttttccactaactttgggg

SEQ ID NO: 162303 - DNA, 335 bp, Zea mays
  Clone ID: MRT4577_79597C.1
ggtaccgattccaattcgacctacgcgtacgcgtccgctccggtccgtcaccccaccatactcgtacagaaccaacgaatatgtgtagcgccacatacgcagtcctattgtacgtactcgccggacatggcctcatagatggcgctgaacaagattagggaccaaaaggagctagtcatgacaaggtacactacgtgtatccggatgtaggcaggggtataattcatgcatacgcaccttactctggtaccgctagaactgtcgccgcttaaggacctcaggccaccttcagccgccacgatgccgctgccgcatctgctgctgcacctaagaag

SEQ ID NO: 162304 - DNA, 1025 bp, Zea mays
  Clone ID: MRT4577_79598C.1
aattcggcacgaggcgccatccttggcttctcccatgccgagcgtctccaatgcccaaacctccatggccgacgtcgccctgctcaggtccaaccagctccccttcgtgttgttgtgtccagccgatgcccctccctccatcttcctctctgcagcaaccctaccatggttgtgcccctgcttccatggtgagctcgccccagccccaacgtcagacgtgccgtcgccctcacgtccagctcctccatccccctggttccctcccagctccgaccaggtttgccaggtccgaccgttctgctcgtcgcgccctccctatgccagcacgcgagcgccccctcccgtccctgctcctctccatcgacgcccaggccgatgccgagctcccagcccctcccgatggcgtggtcaagcatctaggtaccgttcctttttggacctcctctgctcggtccctagctccacgccgatgtttgctcaggtattcggtgggacgcctgagccatatgattgacgtcgttcttgtgtattcggaattgattgatgttggtacgctagttgatcacgtgatatggaggactagaaccgagtcgaccacaagatgttgttaagcgcgagtttcttcgtaaggtgatgctgatggataaacttaaggatggatggcctgatcaagtgccaggacaaggaagatcatcaagagatcgtcgtctaaccaacactgacttagtgttattccaggttttactttgtgctgctgttgatggtgttaagtgccggtgggctcggccttcttataagtctaagtaactcttctatacttcttattgaggatggtcacttgagctagcatatatttcaaacttataaataatttataacatttcaaagtttatcactttgaaccacttttgtaaccactccgataaatataatgtaaatttgttgtaacttgtaaaatttggtaaaaaaaaaaaaaaaaaaaaaaggggcggcccccaactaagaaccccgtagccccgggattt

SEQ ID NO: 162305 - DNA, 274 bp, Zea mays
  Clone ID: MRT4577_79599C.1
gccagccatggggaagatcaccttctacgaggaccgaggcttccagggccgctgctatgagtgcagcagcgactgccccaacctgcagacctacttcagccgctgcaactccgtccgcgtggacagtggctgctggatgctctatgagcgccccaactaccagggccaccagtacttcctgcgacgcggggactaccctgactaccagcagtggctgggtttcagcgactacattcgctcctgccggctcatcccccatacaggttctcacagg

SEQ ID NO: 162306 - DNA, 402 bp, Zea mays
  Clone ID: MRT4577_7959C.1
atggagtacgaacatctggttgcctccccgaccgagggggagggactcgcagtggttttccacaataaaccactcgaggtgccaccctttgatgctgtccttgagggggatgtcgaggtactctatcttcctcccacgacgcatctccagactggcaccaccgatgagctggtgctgtcccccggccatcccgggctagcaatgatacaaatacttccaaaggccaaaatgggggagaatcttgagatcatagaaatcaaggaggccgcggaagaagggagaaacgggaagagcaaggccgcagataagaaaaggaacgtagatgacggactcatgtgtgtcctctatcgaaacagtgaccccgcgacaaatccgccaagagtagagctcttttggaagtag

SEQ ID NO: 162307 - DNA, 463 bp, Zea mays
  Clone ID: MRT4577_795C.1
ggtactccttgcaatcgtcgccgcttgaaatccacacttccatcacccgtcgtagacatgacggtaactccaggaccccactctggcaccagcctgctcgctcctcctcctcctcctgcgttctttggctgcaagcgtgaaagtatccgtggcctaaagcatctacactcctcacagagcataccaaatacagatcggacgaagctaaagaacatcactgaaggatgacaggacatagatacatgaaaatatcccatatatgcaaggatgcaatcatgttgcgagggcaccccttctccataccggccccttcgccgaagacgtgcgcaccaggctgacacttagctgcctctctttctgccggcaataagttcttatagcctgacctgaaatcgggaaatacaagagcaataggactaatcggcaaccgctcgatgaactgcgagacgtgtgtggacgacgg

SEQ ID NO: 162308 - DNA, 194 bp, Zea mays
  unsure (1)..(194): unsure at all n locations
  Clone ID: MRT4577_79600C.1
gtgggaatctccggnagaatggaggtggggggggacttctcggcgacgggacttacgcagcggaagcgcttcgagacggatgggggggcttgtgcctacgcttcctctgatcgccgcgctattctaggatctgtccctcggagcatatgacagtccagagcctatgctttacaacaacacatggggtgttaaga

SEQ ID NO: 162309 - DNA, 887 bp, Zea mays
  Clone ID: MRT4577_79601C.1
cggacgctggtcgagacgcgtgggcggacgcgtgggcggacgcgtgggtgctgatgctggtccaccagttcatcaccttcggcttcgcgtgcacgccgctctacttcgtgtgggagaaggcggtggggatgcacgtcacccggagcgtcttcctccgcgcgctggtccgcctccccatcgtcgtccccgtctggttcctcgccatcatcttccccttcttcgggcccatcaactccgccgtcggcgcgctcctcgtcagcttcaccgtctacgtcatcccggccctcgcccacatgctcacgtaccgctccgcgtccgccagattgaacgcagcggagaagccgccgtccttcttgccgagctggtcggggatgttcgtgctgaacgcgttcgtggtggcgtggatgctggtggttggattcggcctcggcggctgggccagcgtcaccaacttcatcaagcagatcgatacgttcgggctcttcgccaagtgctaccagtgcccgacgaagccacaccccgggtcgccgctgccggcgccgccgcatcactgaagcagcgagcgagtgccaaaggctaacgaccgtaaaccgagacattcccgggtggtttcggtcgtcttgttatatgcagcctttctaggagtgtacaacacagcggagcagcttgtgagttcactgacccgagatacctagactggactcgcatgtgtcgcgtggctttgatacattagtgggcctcagtgtcacttcctttgtcttggttgtttgcacatggttgttttaggttgttcggttcatggtacgtgccatctagtacaagacttgatacccagtggtgtcgattctaatcttttgtatggttaatcgatcttgatgactagatcc

SEQ ID NO: 162310 - DNA, 534 bp, Zea mays
  Clone ID: MRT4577_79602C.1
agcaaataacagaagatagatgcggtggttcagagttcagaccatggttggttggtttacgaatgctcaaactggaactgacagagtaaaacatctctcctgtactacgctacgacatgcgtgcgttattatgtttgcacttgcacaccaccagactaaacgggaactgaatcatcatcactaggtagattggtaggtaggtagaagagacggaggcgacctccatctgctgcgtctcgaccgtcctccggagctagccccggctagttgcagcagcagcagaggcagtcgaggcagcactcgcaggtctcgtagcagcagaagcagcacagcgcagtgaagatgcatccgtagaggcagcccttctcctcgtgccgcctctggcagtgctcgtagtaggacatgtcctgcggcggcggcggcggcgcgttgtacatcctcgctgtcgctggttcgtggcttctcctcctctcctccttcaggcaccggcgccgcttcaggcagctctcttcctgccttgttgtgcacggcaat

SEQ ID NO: 162311 - DNA, 584 bp, Zea mays
  Clone ID: MRT4577_79603C.1
gcccgaggttttttttttttttttttttttttttttttcagaccatggttggttggttgtttggtttacgaatgctcaaactgcaactgacagagtaaaacatctctctcctgtactatacgctacgacatgcgtgcgttattatgtttgcacttgcacaccaccagactaaacgggaactgaatcatcgtagataggtaggtagaagagacggatcaggcgacctccatctgctgcgtctcgaccgtcctccggagctagcccggctagttgcagcagcagcagaggcagtcgaggcagcactcgcaggtctcgtagcagcagaagcagcacagcgcagtgaagatgcaggcgtagaggcagcccttctcctcgtggcgcctctgcacgtgctccatgtaggacatctcctgggccgacggcgcgttgtacatcttgctgcctgccttgcggatcgatcggagctgtggtggtgaacgaacgagcaagggctctctctctctcctgaccctcttctcccttcccttggaacgaacctgatcctcttctccctttggaatgaacgagtggtggactcccggcct

SEQ ID NO: 162312 - DNA, 825 bp, Zea mays
  Clone ID: MRT4577_79604C.1
ttttttttttttttttttggttcagagttcagaccatggttggttggtttacgaatgctcaaactggaactgacagagtaaaacatctctcctgtactacgctacgacatgcgtgcgttattatgtttgcacttgcacaccaccagactaaacgggaactgaatcatcatcactaggtagattggtaggtaggtagaagagacggaggcgacctccatctgctgcgtctcgaccgtcctccggagctagccccggctagttgcagcagcagcagaggcagtcgaggcagcactcgcaggtctcgtagcagcagaagcagcacagcgcagtgaagatgctgcgcaacaacagagcagaggaacagcagtcagttagttcaacactccagcaggaagcggcgcgcggccttgtgctggtgacaaagaaactgatcgacaaggagcaaggcaacgccatggcaactgaaactgaaactgagctggcggcggaccgaaacccctcctccgatctctttttcttctctgatcaactcaggcagagcagacggagacggagacggaggtctagctagctcaccaggcgtagaggcagcccttctcctcgtggcgcctctgcacgtgctccaagtaggacatctcctgggccgacggcgcgttgtacatcttgcctgccttgcggatcgatcggagctgtggtggtgaacgaacgagcaagggctctctctctctctctctctctctctctctctctctcctgaccctcttctcctttcccttggaacgaacctgatcctcttctccgtttggaacgaacgagtggtggact

SEQ ID NO: 162313 - DNA, 872 bp, Zea mays
  Clone ID: MRT4577_79605C.1
gggtacctcgaggccggccgggccggggacgtgagccccatggttatgattacttgtatggttcctggaaggcttctccaaccccacaccatccatggatgccctgaccatgaggtgctaccgctactcacctagtgtcgccatggttccgatgaggaagacctcgaggacgacgatgacgagagcctccatctccacagatggctgctcgagttctgagcccaagaagaaatcccactctgtcagcttcgctggcaaggccaacaaggtttacgaggacaaggacatgggaatcctctgctacaccgacgagaacggtgaactggtgtgcgagggcctagacgaaggcccgaggctgacgtggcaggacatggaaaaaaaaaacgagaatcaagaacgtcagaggaggcagaggacaccgccgcctacggttggtaggatcgactggagcagtctccatgctgcagttagcatggggaaaaactgaaacaagtttcagtatcgcgcgtggtgtgtttttgtttgcttgccttgtgttttagaagttaagatgtaaagttgttgagagtgagttttaagaactcctgaagatgctcttgagcatataaaaactatgttggtaaatacttaattccttgcaaattatgttgttttaatttttagaagtatgttaatacttcctcagttttaaattataagatattttgaattttaaatgtatggtaaaaccaatatatcttaaaagctaaaatcttttataatttgacttgggagagtatatatttatacatattatatgttttgactatagtaaaactattttgcttagaaaagtaaaaaataacttacaaactttagtttttaataataac

SEQ ID NO: 162314 - DNA, 580 bp, Zea mays
  Clone ID: MRT4577_79606C.1
ggttcagagttcagaccatggttggttggtttacgaatgctcaaactggaactgacagagtaaaacatctctcctgtactacgctacgacatgcgtgcgttattatgtttgcacttgcacaccaccagactaaacgggaactgaatcatcatcactaggtagattggtaggtaggtagaagagacggaggcgacctccatctgctgcgtctcgaccgtcctccggagctagccccggctagttgcagcagcagcagaggcagtcgaggcagcactcgcaggtctcgtagcagcagaagcagcacagcgcagtgaagatgcaggcgtagaggcagcccttctcctcgtggcgcctctgcacgtgctccaagtaggacatctcctgggccgacggcgcgttgtacatcttgcctgccttgcggatcgatcggagctgtggtggtgaacgaacgagcaagggctctctctctctctctctctctctcctgaccctcttctcccttcccttggaacgaacctgatcctcttctccgtttggaacgaacgagtgcggacgcggggcgaaagctgggtcgaaaggg

SEQ ID NO: 162315 - DNA, 465 bp, Zea mays
  Clone ID: MRT4577_79607C.1
tctacctgtggtttcttgcatttcttttaataccagtttttgtgttcagtactcttgtatggcagacgttcctcctatttggtgaaaggtggcgattattgactgactgataaatatgtcaaaagtccatcctggttataattcaaaaaaaaaaaggcggcgttagagaccaactactacctgcatgcgactatactctttatggtactaattcaattatgccgcgtttacactctgctgggaaacctgcttcccacttatcccttgagacatcctttcccagctgctaatacaaagcccaccacgccttcacattgccacctgatggcgaatggaccccctgtacggccataacgcgggtgtggtggttacccacgtgccgtcactgcagccctacgcccgtccttgcttcttcttcttttcgccacgttcgcgcttccctcagcttaatggggctccttaggt

SEQ ID NO: 162316 - DNA, 585 bp, Zea mays
  unsure (1)..(585): unsure at all n locations
  Clone ID: MRT4577_79608C.1
ggccgcttttttttttttttttttctggttcagagttcagaccacggttggttggttggtttacgaacgctcaaactggaactgacagagtaaaacatctctctcctgtactatacgctacgacatgcgtgcgttattatgtttgcacttgcacaccaccagactaaacgggaactgaatcatcatcactaggtagattggtaggtaggtaggtagaagagacggacggaggcgacctccatctgctgcgtctcgaccgtcctccggagctagctccggctagttgcagcagcagcagaggcagtcgaggcagcactcgcaggtctcgtagcagcagaagcagcacagcgcagtgaagatgcaggcgtagaggcagcccttctcctcgtggcgcctctgcacgtgctccaagtaggacatgtcctgcggcggcggcggcggcgcgttgtacatcctcgctgtcgctggttcgtggcttctcctcctctcctccttcaggcaccggcgccgcttcaggcagctctcttcctgcctttgttgtgcacggcaatggacgaagattangcgggcgaggccctacttata

SEQ ID NO: 162317 - DNA, 624 bp, Zea mays
  Clone ID: MRT4577_79609C.1
gcacgagctgaatcagagttcagaccatggttggttggtttacgaatgctcaaactggaactgacagagtaaaacatctctcctgtactacgctacgacatgcgtgcgttattatgtttgcacttgcacaccaccagactaaacgggaactgaatcatcatcactaggtagattggtaggtaggtagaagagacggaggcgacctccatctgctgcgtctcgaccgtcctccggagctagccccggctagttgcagcagcagcagaggcagtcgaggcagcactcgcaggtctcgtagcagcagaagcagcacagcgcagtgaagatgcatccgtagaggcagcccttctcctcgtgccgcctctggcacgtgctcgtagtaggacatgtcctgcggcggtggcggcgcgttgtacatcctcgctgtcgctggttcgtggcttctcctcctctcctccttcaggcaccgcttcaggcagctctcttcctgccttgttgtgcacggcaatggacgaagatcgatcaggcgggcgaggccctacttatacacgaaaacgcaccccgtttcgtcgtcaatgccgcgcgccacccgccagggcgtttcagaagagtcctttggttgca

SEQ ID NO: 162318 - DNA, 613 bp, Zea mays
  Clone ID: MRT4577_7960C.1
tcatattttgccatggacccagatactcctatttcatctgcctttgcaaaacatggaatgcaatgggccatgtatgttgtgacaactggtgctgttcttgcactctgctcgaacttgatgggctcacttcttccacaggtatacagtgataaaacataaaagtatattatgacttactcctgatgacacccagtggatgaaattgaatggaatttgagttgattctactattctagtacatgtgaacttttcattccactgtcagttactctgcaataagttgtgaacctagccttgtaagtggccaaaactcaatgactcctgacccttattgtataatttatctgttcttcggtttgcactttggattcctcatttaactcaacattatccatcaattacattgccccccattcattcattttgaatttaaatcccattgaactaatgctgcaatgaactttgatttccatgccacatctatgagcgaagatgtaggcatgtagtactatggtgaaccacatcagcactatgcagatgatattttaatacttgggtgtcattatgatttggattggtattctcgcagcctagaatacttatggccatggca

SEQ ID NO: 162319 - DNA, 1010 bp, Zea mays
  Clone ID: MRT4577_79610C.1
ccggccgggagtccaccactcgttcgttccaacggagaagaggatcaggttcgttccaagggaagggagaagagggtcaggagagagagagagagagagagagagagagcccttgctcgttcgttcaccaccacagctccgatcgatccgcaaggcaggcaagatgtacaacgcgccgtcggcccaggagatgtcctacttggagcacgtgcagaggcgccacgaggagaagggctgcctctacgcctgcatcttcactgcgctgtgctgcttctgctgctacgagacctgcgagtgctgcctcgactgcctctgctgctgctgcaactagccggggctagctccggaggacggtcgagacgcagcagatggaggtcgcctccgtctcttctacctacctaccaatctacctagtgatgatgattcagttcccgttcagaccatggttggttggtttacgaatgctcaaactggaactgacagagtaaaacatctctcctgtactacgctacgacatgcgtgcgttattatgtttgcacttgcacaccaccagactaaacgggaactgaatcatcatcactaggtagattggtaggtaggtagaagagacggaggcgacctccatctgctgcgtctcgaccgtcctccggagctagccccggctagttgcagcagcagcagaggcagtcgaggcagcactcgcaggtctcgtagcagcagaagcagcacagcgcagtgaagatgcaggcgtagaggcagcccttctcctcgtggcgcctctgcacgtgctccaagtaggacatctcctgggccgacggcgcgttgtacatcttgcctgccttgcggatcgatcggagctgtggtggtgaacgaacgagcaagggctctctctctctctctctctctctctctctctctctcctgaccctcttctcctttcccttggaacgaacctgatcctcttctccgtttggaacgaacgagtggtggactctttttttcccggccgg

SEQ ID NO: 162320 - DNA, 176 bp, Zea mays
  Clone ID: MRT4577_79611C.1
tcgattatatagaggcgattcacatggatcacactttatgacgccttccttccagggcgtaagttttttattgggtgacatgacattaaatcacttatcgccgtattacaacaatctgggttgtgtaaaccccagcgtttcccaaaataattgcccttgtatgcaaaccccttttt

SEQ ID NO: 162321 - DNA, 311 bp, Zea mays
  Clone ID: MRT4577_79612C.1
acgcccacgcgtacgcccacgcgtacgcatagaagtgctcatgtccaaaatagatgctttaacggctggactctatgatgaaatggcgctgccatcacgacgacttacttaaatactgagatctttaggacacaatgtaaatttctgaaatcactaggagttcaatgcttatggatagacacccagacaccatgtctaagcaagataaagagatatgttctgcaatagaaaaactttcagactgtcaggaaaccatattgattcttatccgtcagatgacttctatacctgctccaattcaattactcggc

SEQ ID NO: 162322 - DNA, 1229 bp, Zea mays
  Clone ID: MRT4577_79613C.1
ggccgctttttttttttttttttcagcgatagtagcaaataacagaagatagatcgatgcggtggttcagagttcagaccatggttggttggttgtttggtttacgaatgctcaaactgcaactgacagagtaaaacatctctctcctgtactatacgctacgacatgcgtgcgttattatgtttgcacttgcacaccaccagactaaacgggaactgaatcatcgtagataggtaggtagaagagacggatcaggcgacctccatctgctgcgtctcgaccgtcctccggagctagcccggctagttgcagcagcagcagaggcagtcgaggcagcactcgcaggtctcgtagcagcagaagcagcacagcgccgtgaagatgctgcgcaacaacagagcagaggaacagcaagcagttagttcaacactccagcaggaagcggcgcgcggccttctgctggtgacaaagaaactgatcgacaaggaggaaggtcaacgccatggcaactgaactgaactgagctggcggcggaccgaaacccctcctcggatccctttttcttctttgatcaactcaggcagagcagacggagacggaggcctagctagctcaccaggcgtagaggcagcccttctcctcgtggcgcctctgcacgtgctccaagtaggacatctcctgggccgacggcgcgttgtacatcttgcctgccttgcggatcgatcggagctgtggtggtgaacgaacgagcaagggctctctctctctctctctctctcctgaccctcttctcccttcccttggaacgaacctgatcctcttctccgtttggaacgaacgagtggtggactgctcccggccgcctactggggagtagaatttatagacggggaacagaaagaaggggacacccgtgtacgtgtatcgtgtaccggcttcgtcttcggctgacaataggcatggacctcatctggcagcgactgtctggtgcgattattggcgtggttgtccaccttacccccaagccatccgtagaggcagcccttctcctcgtgccgcctctggcagtgctcgtagtaggacatgtcctgcggcggcggcggcggcgcgttgtacatcctcgctgtcgctggttcgttgcttctcctccttcaggcaccgccgcttcaggcagctctcttcctgccttgttgtgcacggcaatcccggccggacccggagggtacccc

SEQ ID NO: 162323 - DNA, 386 bp, Zea mays
  Clone ID: MRT4577_79614C.1
attcccgggccgacccacgcgtccacccacgcgtccggtacaaatcatgaattgtccacaatagaataaccaattgtgaccatagcaaaaatcttctgtttctgaataaaaatagcaaaatcggtgtcgtgttcgtaaaagcaagggcaagggtagaaagagaaatatgaaaatatactggtgggtgggtctgtttgagactaaatcgtagacaatggtctatttcagacttaattaaaagtttaatggcacttttgcaaccttaagaagtttagtggcatatatcaaaacatagaaaattataatggcacagacacaattaacctaatcataaaacagcatgtcatctctcaaatcaccaggagaaagggataaagggaacctgc

SEQ ID NO: 162324 - DNA, 304 bp, Zea mays
  Clone ID: MRT4577_79615C.1
ggaaaacaataaagtttttgaacattactccgaacaatacacataaaagggtcgggtctccgttacacaaaatcctggaggacaaatgcagttttccccccaggccccgggatcttttattttatgagcaaaaagggtttcgagccgagccaaggttcccatgggaacttttcttgttctgaagaagggaccccgttgccttatcagggaaccaggggaattctccattttgaaccacagccatttaaacaggcagaaggtttgacaaggtttgcttgtttgaaagccccttttgcaccgttgc

SEQ ID NO: 162325 - DNA, 355 bp, Zea mays
  Clone ID: MRT4577_79617C.1
tttttggaatgcaatttctagcactaaaggtggtaccttcttttaatccaggggatttgaagttgatgttttggatgtcgacccaaacgggttacaaattccacaaaaaattagcacatacacaattggccctttccaaaccttcaaaggagagaagggcaaactgaaagtgaaagtgcgtttcaacattcatgggaccggtacaggtgattcaacaattatgctggaggatgatggggaaggtccaggttcatttgaaatgaagcttcaaatgatactatgaagatggacacaaatgatgcaccaagtgatcctggtgttggatttgatgtgaatattgcagagccttaaagcg

SEQ ID NO: 162326 - DNA, 538 bp, Zea mays
  Clone ID: MRT4577_79618C.1
tttttttttttttttttttttttttttttttttttttttttttttttttttttttttttttttttttttttttttttttgggaaaaaccccaaattttttaaaaggccgcccccggaaacaaaaaagggttaaccccctttaccccaaagggggggaaaacccccccccttttaaaccccctttgggttggggctaaaacccctgggccggggaacccagaaaaaccccgggaggggcaatcccagccccgaaagagttgaagggaaaaacaggggccctgaaaaacacccctggggttacaaggcccccaacccgttaaacacagtggcccccaaaagggggggcggggaaccccctccccaaaatcttggaaaaccccggggggtttgcggggaacccccgccccccaaaaaaaccccttggaggggctgggtttactttcacccccgcaaatggcaaaaaggggggggtatttttgaccccttttgtaaaaaagggaacaggggccaaagggaaaaatgccctccctgtattgtt

SEQ ID NO: 162327 - DNA, 315 bp, Zea mays
  Clone ID: MRT4577_79619C.1
aagcagtggtaacaacgcagagtacgcggggtatcacttctgcccattagtcactccatcttagatcaatgtttactctgcgcatccgatagtcagttccgcactttgttgttctggaatggaacggcaggagggtggacatgaaatgagtattttcgtccaaacttattaagttttcaatttggtttgtgttgtttatctgtgtcaagaatctgtgaagatcatggttggctgttgtttacaatgtaaaaatcacctagtagtattttagaacctcctggaattgttccatgcttcatactagtgtccacctgt

SEQ ID NO: 162328 - DNA, 606 bp, Zea mays
  Clone ID: MRT4577_7961C.1
ggagacattcagaaagaaacttctaggttctgtggattctatgtggaagtagagaggagaaagcaaagtggactcaacgttgatgacaagataaaagaggccatggcgatgcacgagcgtatagttggcacaccgttcaagtttatgcactgctggttaattttacgtcacgagatgaaatggaatgcattgcttgattcaatgaatccaacagatgctaaagaaacagaacaaaaggggacaaatatcatggaagagttgcttccccccaaaattgcacgcccaacgggaagagatcatgataagaatatgaagagcaacatcagctcaagctctttcactgcttgcattaatgtgctccaaaagttgtcaatggagcatggagcatttgaagagaggcaagatgctacaagtagggaggaagcaacacacatggtagtaaggtcggatcgcaaactggccctacaagaggaagttataataattcaaaaagcaagcctcgaaatccagcagcaaatgcttaagctacaagaagaagaacgtgaggagagggtgatgacaatggatgtaaacaagatggagccatgggttcgggagtactacatc
